United States Patent Application Publication US 2026/0103690 A1 - sequence listing, part 52

SEQ ID NO: 249955 - protein, 368 aa, unidentified
MVLDTVINVMPPYLYIPKLDSSLGFWPRIRNDSVQMYWCLIVHKFIISMTYIGIDVSKDSFVAAYPTKSGYSTKSFPNTTSGVRKFMQSLPAESHCVMEATGNYSMLLLYLLQQACIPVSMENPQKIKHFARAMLSTTKTDEIDAKLIAIYGEKMNPAPFKIPSESIILLKQKRTVLRQLKKQLTAMINLQHSLSVLPKQDPTAKAATEQTIKFLRKQISKIEEEITNLSNKEFKRQMELLTSIKGIGENIASALIMATGGFTYFSSAKQISRFLGLCPTYQQSGTSVNIKGHINRNGDTHLRSLMYVVAFSSIRSNTACRETYERLRSNGKSGRVAIIAVANKLIRQAFAVVTNNRPYIDGYVPSLV

SEQ ID NO: 249956 - protein, 369 aa, unidentified
MGDRITYVGLDVHKEGIVVAVAEGGLRGEVREYGRIANTAAALDRLVRKLGGEGVRLRFCYEAGPCGYGIQRYLSAHGHECVVVAPSLIPKRAGDRVKTDRRDAASLARLHRAGELTAVWVPDAGHEAMRDLVRARLDAVHALRRARQQLSGFLLRQGCHYGRPAWTKLHRRWLAGLKFEQAVHHIVLEDYIAAVEAAEARRDRLTAQIAAMLPDWTLAPIVAALQTMRGMALVNAATLIAELGDLSRFGNPRQLMAYLGLVPSEHSSGASVKRGGLTKAGNSAARRLLIEAAWCYGFPARVSRELRLRQEAQPWAIREIAWKAQLRLCARYRKLARTGKPANVVTAAIARELAGFIWAIARRVPPATS

SEQ ID NO: 249957 - protein, 348 aa, unidentified
MNAGYAGCRDFVGVDLARRRSVITRMDAQGSVLECVQIDNSAPALVAEVGKAGAGAPVAIEATYGWYWAVEALQGAGFEVHLAHPKGNASMHNRRVKTDAKDATELARLLRMGDLAESWIAPPRVRGRRELVRHRHKLVKSRASLKASVHAVLGKCGVLLPLNDIFGPVGLAQLAATELPEPYASRVASQCRLITAISREVDLVDAAIAAEFKDDPGYRSLLTINGIGPVFASVFVAEIGDVTRFPTPQALASWAGLTPRHYASDDKVRRGHITKQGSRLLRWAATEASQRIREPYLADKRRLITDRRGRSAANISKVAAGRRLLHVVYYTLRDGHARCLDQPARQPA

SEQ ID NO: 249958 - protein, 393 aa, unidentified
MINVGIDVSQKKHDVCIIDSNGTILKEHLTIDNTRKGFNTLCSVILNQDEGSIKSNVRIALEDTGHYSLNLLTFLRNEGYTVFTYNPILIKEFAKSTTLRKTKTDKKDAKLIVRKLMSDNQVEKFTADKKMTDLKFLTRNRTRLSHYQSEGKIQYVRLVDLVFPELSVYVTSLHHSYVYSLLKNYPSAKAIGNSHLSTLTSTLASASQGKIGKEKAQEIRNLAKDSIGQVSKILELEMTQTIEIIEFYNKKIKKVDKEINSLMNDIASPITSIPGISNRLGSVIISEIRNINNFKTPAQLLAFAGMEPSVHQSGNHDGKGKMVKRGSSSLRWALHQAARLVAIHSPLFKLYLHKKLAEGKHYNVALTHVAKKLVRIIFHLLKYNVPYIEKTLA

SEQ ID NO: 249959 - protein, 397 aa, unidentified
MQTPIVYGVDVAKAELVIAGPGAKCVKLANRASEICQWLDEIPARSFVAMESTGSMHRLLAQLAYRHGMTVFVLNPRDIHHYARALGSRGKTDRNDAEVIARYVAAEHRGLRAYAPASELQERIDLLLRKRASVVRHRDALRKALRELPGLNDAAMRAMRSLAELLTCIDDQIEELVRSEQALVQRSELLRTMPGVGPLTSVSLANLLERVKLANADALVAFVGLDPKPNDSGQHRGRRRLSKRGPSEIRRVLYCAALTAARGAWKPLYETLRHRGLASTQAVCIIARKLLRVAWAMAVAERSSPRKDPLGPTTLATPRAATPGPQPISRTRIPGRSANAATAWAMRSDAPTIRCYPSLRIYVQVGTVVPRATEKLSASPRYWKPALVSTRAEPGLS

SEQ ID NO: 249960 - protein, 424 aa, unidentified
MKVTYQICCGVDVHKSFLVATIVKTTGGIEPSYQKKRFSTFNNSILEFKQWLLDNGCHDICMESTGKYRVPVFNLLEDEINVVIANPKWVKAVKGNKDDAKDSKWIGDLFRLGLVKGSYIPCKKVRILREYTRYRYKLVSCRSSEKNRYQNALTVCNVALDSVVSDIFGKSSTSIIDYLLEQSGTSINHEEIASKLLRSLKSKEDAVIHSIEGYQMTDAQKYRMRLVRAHMDYITAEINDVDKMIENMISSNPDFENAVQFLCTIPGVKRDSAITIISEIGIDMSQFSSSKRLCCWAGLTPGSNESAGKKKSVRITRAGVYLKPALVQCAHAAVKSDKSPYYKKKYESLVKRRGKKRAIIAIARMILTAIYQMLSTGEQWNPSDLYKIDMPVALVEKQKAKAIKQAKKLLQREGLLPPDEPLAS

SEQ ID NO: 249961 - protein, 348 aa, unidentified
MTVYIGVDFHARQQTISYLTTEEGTIQHLVLLHDNPVTVRAFYAQFAGQRVVVGFESSGYAAWFEELLEELGCELWIGHATYIRQFAKRRQKNDRRDADLILELLHTGDFPRIHRYSRTTREMLQQLRYRQRLVKMRTMAMNMLLFMASSRGVSLRTQLQSKRGQAKLQQLALPATLGTQRDELLSLLQTLNEKISTIERWLEQQTKADLAVQRLQTHPGIGLLTSICLRYTLEDAGRFANTRKVSAFAGFDPMQDQSDERNRMGAISKQGSRWLRFYLVEAGQVAIRKDADLQRVYQRIARRGGHAKAKVAVARRLLVRAFIMLRDEIDYAEFQRRGVAARSSRGTA

SEQ ID NO: 249962 - protein, 357 aa, unidentified
MLSSNVKYIGLDVHKEAITIAVRNGDGKLVMESIVETKASTLLDFLHGQRGELHVTLEEGTWAAWLYDVLKPHVGEILVCNPRRNALLKEGSKNDRVDARKLSELLHAGMLRAVYHGENGLRTLRELGRSYQVVSKDLKRVMNRIKALYRSWGIPCTGTQVYSRRNREQWLKKIGEAGVCRRAELFYQQLDGLQALRRTVRGELLVESRKHQAVKVLCQIPFIGPLRAAQLVALMQTPHRFRSKRQLWTYSGLGVETHESAQYRYVDGQLQRSKKPQQVRGLNQNHNHTLKEIFKSAALSATLRAGPFQDFYEGLLAKGMKPELARVTLARKIAAITLTVWKKGECFDAKFLKPQAA

SEQ ID NO: 249963 - protein, 373 aa, unidentified
MKKSNSQKSQKPTVKTKGAAKCVTIGMDLGDKTSRYCMLSNDGEIVREGQVTTSKAGMAGAFGSLKRARIAIEVGTHSPWVSRLLEKMGHETVVANPKQVKLITESSRKDDRLDAQTLARLARIDPQLLRPIQHRSDTAQAALMVIRVRAALIAVRTSLVNTVRGLAKSMGERLPKCDADQMGVRQAVPLPPKLRQVLEPLLKEVESLTEKIKDSDREIEQIARKDYPETALLQQVGGVGPLIALTFILTVEDKGRFQKSRDIGCYVGLRPRRSDSGQSQPQLRITKEGDPYLRTMLVQGAHYIISRRGPDTDLKRWGLQLAKHGGKRGKKRAVVAVARKLGILLHRLWVTGEVYEPLRNHNLQQREQKKVAA

SEQ ID NO: 249964 - protein, 388 aa, unidentified
MIYVGIDIAKLNHFAAAVSSDGEILIEPFKFTNDYDGFYLLLSKLAPLDQNSIIIGLESTAHYGDNLVRFLISKDFKVCVLNPIQTSFMRKNNVRKTKTDKVDTFVIAKTLMMQDSLRFLTLEDLDYLELKELGRFRQKLVKQRTRLKIQLTSYVDQVFPELQYFFKSGLHHHSVYALLKEAPTPNAIASMHMTHLAHILEVASHGHFGKDKARDLRVLAQKSVGVNDSSLSIQITHTIEQIELLDSQLFHTELEMANLVTCLHSVIMTIPGIGFVNGGLILGEIGDIHRFSEPKKLLAFAGLDPSVHQSGNFQAKKTRMSKRGSRVLRYALMNAAHNVVKNNTTFKDYYDSKKAEGRSHYNALGHCAGKLVRVIWKMLTDNVEFNLE

SEQ ID NO: 249965 - protein, 345 aa, unidentified
MQSNIISVDLAKNVFEVAVANHLHRIVSRRRLSRAKFSEFLTQHPPATVLVESCGTAHFWARQAIAVGHKPFIVPAQYVKPYRRRHKSDRIDTEALLEAHRCAGIRPVPVRSVDQQQLQQLHRIREQWKKTRTARINALRGFLRELGYPIAEGAANAKRQVRIILDDGALPEPLRAAFSTLLDDVLQLEQRIKRVEQQLHQLTKDRDDVRVLRQVHGIGLLTSTAMVASAGSPHHFPSGRHFSSWLGITPREFSSGERRYLGRISKQGDKYLRTLIVHGARSVLTRAKQLQKTHQPLSRLHRWALQLEQRVGHNKATVALANKLARICWAVWKYNTDFNPEHIGA

SEQ ID NO: 249966 - protein, 419 aa, unidentified
MKIVYPTCCGVDVHKTFLIATIIKTEGITPKYARKRFSTFNNDILRFKQWLLENECRDVCMESTGKYWVPVYNLLEDEINVVVASPKWVRAVKGNKDDKKDSKWIGDLFRLGLVPGSFIPPKPIRILREYTRYRYKLVSCKSSEKNRYQNSFTVCNVALDSVVSDMFGKSATLITDYLIQTDDFDPEHCKSLLQRSLKKKADEVIDSIAGYKIDPAQKERMIMVKSHLSYVEKAIETMDAGIDALVEPYESHISLLCSIPGVDRRSAITIISEIGTDINQFTHSKRLCCWAGLTPGNNESAGKKKSVRITRAGVYLKPALVQTAHAAVKSIENPYYKNKYHRISKRRGKKRAIIAIARMILTAVYHMLRTGEDWNPTDLFKVDLPLVLMEKQKQKAIQNALKLLASEGITLMPNTHPAA

SEQ ID NO: 249967 - protein, 408 aa, unidentified
MNAVGIDVSKGKSMVAALRPMGEVALLPQEFLHTEVGLEQIAYAIIALGEDTRVIMEATGRYHEPVAAALHEYGIYVCVLNPLFIKQSGGGSIRKVKTDKADAMKIAKYGLDNWVDLREYTPMDTVRQQLKLCSRQYNLYMKTVVSLQNNLISLTDKTFPGVNELFSSPERADGHQKWVDFVMTFYHCDCICRVSENAFAERYQKWCKRKGYHFSAEKAQDVYLGSCGHFTTLPKNDNTKLLITTAAQQLLAGKMTLAALRTEMTRLAKQLPEYDIVRAMYGVGETTAVQLMAEIGDVRRFPRRSSIVGFAGVDPAVDQSGKHSAKSVPTTKRGSPHLRKTLYQIVCTYLKKSPVDEPVYQFLDKKRSEGKPYFVYMTAAQNKFLRIYYARVKECLEAFDAQQDTSQR

SEQ ID NO: 249968 - protein, 363 aa, unidentified
MIIIGADYHPGFQQIAFVDTETGDCGEQRLQHREEAEKFYRDLAAQGMKVRVGMEASGHARWFERLLAELNIELWIGDAAEIRTKRVRKRKTDREDARLLLRLMLEDRFPQIWVASWENRDLRQLLWHRHRMVQARTRLMNQLQAVALNEGLRCKKKLWREHGREQLESFRLAPWASRRREDLLKLLDQLNPTIAELTQAIEQEAENCPEARRLMTHPGVGALTALAFVLIIGRAERFQCGKQIACYLGLVPLEDSSGERRRLGHITKQGNALLRFLLVEAAQVTVRTIPQWRSKYFHLAMRRGRKIAKVAMARKLAVRLFWMMRQEWNYEQVQKFGSHVGQPENRHGVQENTELLTGASRSS

SEQ ID NO: 249969 - protein, 400 aa, unidentified
MISVGIDVSKGKSTVCILKPYGEIVSKPFPIHHTNRDLHELCAMISRFDDEVKVVMEATGTYHLPVVTYLQQKGIYVSVINPYLMKMYRSEDLRKAKTDKIDARIIANYGIEHWYTMNEYKSQSDKYAELKILIQQYHHYMELHISSLQDLTHLLDYTMPGIRKEFTCWKESTNKDKLSDFVERFWHYDTITSYSESEFIEEYKNWAKEKKYHQSPAKAKEIYAMACNGIPTLSSETESVKTMVSESVRVLKEIDATLMTILSRMQQIAITLPEYPVVRSMAGIGDVLAPKIIAEIGDVKRFHNANALIAYAGIDSPPYESGQYVGTNRRISKRGSATLRKVGYEIMLSIKTSPHPDDAVYNYILKKEAEGKSKKASKIAGLNKFLRIYYAKVKEVYKDL

SEQ ID NO: 249970 - protein, 354 aa, unidentified
MADETAVVGGVDTHTDFHQAAVIDSIGRHLTTQAFPTTPDGYHRLLDWLRSHGDLIAVGVEGTGAYGSGLARYLQDNQVTVIEVDRPDRQARRAGGKSDPIDAFAAATAVLTGRATGTPKTRDGIVEAIRALRVVRRSAVKARTQTINQIRTLIITAPDEVREQLRALAPAELIKHLARSRPRTQTSEPACAVKVALRRLARRHQYLTAEIGDADAELKALMAQAAPELVALPGVGIETAAQLLITAGDNPERLTSEASFAHLCAVAPIPASSGRTNRHRLNRGGDRRANHALHMIALVRMRYDQRTQEYVARRTAEGMSKKDILRCLKRFIAREIYKHLTRQHTPPQRLIQVA

SEQ ID NO: 249971 - protein, 339 aa, unidentified
MNILKQTIGIDVSYKSFDARFGTTNTQQQITLSPSKSFKNSLAGFKLFLRWLKKYVLSDDIPLVFVMEATGVYYEQLAHFLFQHGYQVAVILPNKIRNYAKSLESKSKTDPLDAAVITRFGLERQLHLWTPPSETVKALRDLCREYQSLKTNCTQIKNQLHALNASFKPHRESFKRKTLHLKFLQRQIGLIQKELRALVKTEPHLALRLKNIKTAKGLGDMTILTVLSETRCFELVSNLKQLASYAGFDIVFNDSGLKKGRTSISKKGNTFIRKALFMPALSACRANPQMKQLYQRLVAKGKNKKLAIIAVARKLLLLIYTLWKSNSPYRPDFKSVQHL

SEQ ID NO: 249972 - protein, 388 aa, unidentified
MYRILKIGMDVHSTNYTLCAMEPTIGAEDRVFGEVQVAPDYKAVICFIESLKMKLGLNNEYSIECGYEAGCLGYTLYHQLTGAGIKCVILAPTTMLTQQGQRIKTDKRDAHLIAQCLCYGGYHPVYIPTGEDDAVKEYLRMRDDHKLALKKLKQQIHAFVLRHGYSYTGTKWTVRHVTWLKKVELDPMYRETLNEYLASYEEQEAKIQRYDQRIEEIAAEARYQENVKKLGCFLGIRTHTALSLIVETGDFKRFAKGNTYAAFLGLVPGEHSSSKNVNRLGISKAGNTHLRCLLIEAAKSICKGAIGHKSKELRSRQSGQPAEVIAYADKGNTRLRSKYYKMIRHGKKTNVAVTAVARELACFVWGMMTGNISTTSRTDPSISSVSQG

SEQ ID NO: 249973 - protein, 314 aa, unidentified
MSKSLYFIGIDVSKDHLDVAIRPTHQQMQFGNDDEGVDKVIEALNPVSPTLIVLEATGSYHRLVLSRLLAAGLPAIAINPRQARDFARAIGRLAKSDTIDADILAAFGEKIRPELRAVADEATTQLEALCTRRRQLVGMLTAEKNRFHSSPASMRPLIKKHIQWLENNIAELEKDLDDQIRSSPAWRDKDDLLRSCKGIGPTTSHTMLACLPELGQLNRHQIAALVGVAPFNRDTGLYRGRRHIYAGRTDVRCVLYMATLAAIRYNAAIRRFHQRLIAAGKLKKVAITACMRKLLTILNAMLRSNTPWNVDFVG

SEQ ID NO: 249974 - protein, 454 aa, unidentified
MSNKVIFNLDDLFISVGIDVGADFSWMSIALPNQQFVGKPYKILHSSIDSLTTAVSKIKEAEELYSLESRIFLESTGIYHYPLFCYLRDKGFNCSVINPIITKNSTNINIRKVHNDRFDSKKAALVGLKPDLKVSLMPSDLALNCRNLCREYYDLMDNRSAYVNKLQGELRMAFPQYLGIFSKVTINTSLTLLETYTSPSAFLEADKQEIIDIIKSTARFGLTYAQNKYNAIIQAATDANQFGYIIDSNIKRIRLYISFIRKYDEEINNILESLHELVDANEDADFVKQIHLIETFKGAGFLSAVSIMGEIGDFSAFSKPKQLFAYFGLDPAVKQSGKFEGTKVQMSKRGSAIARRVIHTLTLQSISISRNGEAKNPVLREYYLKKCDSKPKLVAMGAVSHKVCNMMQQMGYRRCNLAVCDCLGCRMDRTCDWNCNLKATKLRPQPALQLTDTA

SEQ ID NO: 249975 - protein, 420 aa, unidentified
MTHPKMKYTYVGIDSHKDTHTAVFMDCFFEKLGEITFDNLPSKFPAFLANALKLQQDGTTLFFGLEDVSAYGRTLAVFLKDNRHPVKHVNALLVARERKNRNITEKTDSIDAECAARLLLSKFGELPDADPQDKVWVLRTLVNRRDMIIRNNTSLKNHLHTLLTGHYPGYRSYFDDICGKTSLAFFMRHPSPSTLEGVTVNELKALLYEPSQGYFGLEKAKEILDSLQGTTVQFQEVRDESVQSTIRQIQFNLTELERLEHNLALFLKGFDSTLTSMAGIDIVTAAQMLSCIGDIHKFSTPAKLARYAGIAPVTYASGKMDLQFANQRGNRELNSIFYNLAVRLSYAHGTNNRVLNPFFYDYYNRKISEGKTKRQALKCVQRRLVNIIWTMMTNNEEYVNPPAYNAPKEKNAPKKKKEAK

SEQ ID NO: 249976 - protein, 426 aa, unidentified
MAKVEHTSDARVLVGIDISKHRHEVLIAIPGKTRRRRLTITNSIDDFARLITILREYGLPVRIGFEATGNYHRVLMYHLGVAGFDLKLVSSVALARTREALHNSWDKNDPKDAQVILHMLQIGAVQIFQDPMVVGTNDIQELSKTHDAVSRSKTELWHRILTHYLPLYFPEADRFHRSSRTDWFLAFLEMFPSPHMISAMTKEEFTTTAWEVVGRKVEKSLLLSDIYETAKVSAGLPVAPDSDAVRMFRMMLAEGRSLIRQRNAIEDRAVELLGERPDYQLLRTIPGIGPINAMTILAETGDLRRFHHHRQFLKFCGMDLATVQSGMFRGRSKISKYGNARLRRTLWLAGQTAVLKKANSFRDKFERYIAQDRHNPDLRRKAYTAIAAKMARTIHAVIKSGEPYRPFFEGTSPGGRTSLSKGRGGA

SEQ ID NO: 249977 - protein, 405 aa, unidentified
MKQPAKLHYAGIDWATRTHAVCVVDQTGAIRARFEVPNTGKSFAGLCRRLGKLGVAGVAIERPDGPLVQAMLDQGLRVVVVTPRQVKALRSRYGASGAKSDPADAYLLADVLRTDGHRLAPLTHDSDPTTVLRALSRTRKDLQEARVALCNQLTAQLERCFPGAIRLFSELHTPVAVAFLRRYPTSHAAAGLTQAKLAAFLRRLHYPGRTPVEVLLGRIQTAPAAGISPAEQAGRAVCVLALLDAIQVTARQERELEAEIVERLEVHADAAIFTSLPKAGHGVRAAALLGELGDVRARFPDNDCLAALGGAAPVTITSGKRRIVKFRWACDKKLRNAIIDFADDSRHASPWAAKVYADALARTGRHPHAVRILARAWIRVIWRIWQDGVAYDPAKHQGAVRLLAA

SEQ ID NO: 249978 - protein, 358 aa, unidentified
MQVKGTTIDFKGQNVYAGIDIHLKSWKVTIMLGEREHKTFSQDPNAETLWNYLRKNFPGANYYSAYEAGFCGFNAHRELVNFGVSNLVVNPSDIPTTDKEKKQKEDKRDSRKIARSLKNGELESIYIPSKAIEELRGLVRYRKTLVKEISRTKNRIKSLLYFSGITIPVALDSASKHWSGRFTQWLKSVEMATSYGNLVLAGTLDTSEYLRKQLLLINKELRKISCDSQYAPKLKLLQSIPGIALITSITLLSEMEDIMRFKNLDQLCSFVGLVPTTKSSGEKEKTGKITPRSNLFLRSSIIESAWIASSKDPSLAYSFNQLCKRMQPHDAIIRIAKKLLNRIRYVIKNETEYVHSVL

SEQ ID NO: 249979 - protein, 426 aa, unidentified
MTRAWCMSCLTDPAGADPLGSERASTIMTNERGRVGGIDSHQDTIHVAVLTDIGQPLADQEFPTTQAGYRRAVGWLIGHGPLSAVGVEGTSSYGRGISTGLTNAGIKVVEVNRTRPAERRRQGKTDALDAYRAARSVLSGEASTDPKAASIEPLRALTVARRSAVKAQQAARRQIGALLVNAPAHIRDRYRDLPEAALLSTLARSRPDQCADPDEADTLHALRTLARRHRDLGAEITDLEQRMLTRATRANPGLMAVKGVGPVVGAQLLITAGDNPDRLRSSASFAALCGTAPIPVSSGRTDRHRLSRGGDRHANAALHHIVKNRMTHDPATRAYRDTHLDKGWTKAAVHRALKRAVARQVFQALIGNCAVPDYSDLRPARQAKNITLTNAATALGVWPARVGELELGRRRDDHFADRYRQWLNAA

SEQ ID NO: 249980 - protein, 328 aa, unidentified
MNFIGMDIHKQFTVAVVKDEQGNELAKEKFENNKENFSDFLKIFPKENTKIVMESCCVWEYIFEILEKMEYDVKLSNPSKTKAIAYARIKTDSVDASTLADLLRANLIGRKLYSSKKIRRLREIVRERKTFVKQSTQLKNKIHSMLIRRGIKLPTATLGKKALKLISEMVDENDIIEHYTNLLWYNKQELNFIEDKIKKIAEENQEANLLMTIPGIAEIRAMEIIAEIGEINRFPTADKLCSYAGLVPSIKQSGNTLRFGKLIKQSSKFLKNAFVEASWISIRKDNPLQAFYKKLAKTKGKQKAICATARKMCCIVYAMLKNREEFRY

SEQ ID NO: 249981 - protein, 421 aa, unidentified
MGYIGGNLQQAFVERIRGVDRERLLAVPIDVGKRSAVALVCDFYGELVVAPFSFALDERGLEVFVRAVATAEAERGSTWVRVGLEAAGHYHQTLLARLRDLAFDVSVLNPAQVKESRAQDLLRSLKSDERDLGAMAELLIRGKGRPVGHLDDAMATQAALCAHRRRKVKARTAVKNHVHKGLDLVFPGLSGCFGDILDTKVGRLLLAEGMDPARVRRLGPERLRAFCGHRGVVLRRAKASQIVEAARDAFALPEAIAAVHTGVLASDVALLASLDREIASTEQALAEVLPRTPAAVLITMPRVAVVRASCYGAALGDPNRFANPGQVYRLSGLVPKLYESAGRRRAGTRICREGKVELREAILELGMALRQGHPDFARYARELEARGKRPGVVACALGHRANRVAFAMVRHQVPFDPDRWR

SEQ ID NO: 249982 - protein, 338 aa, unidentified
MFIIGIDPHKGSHVAAVLDPAERVVDQVRVRADGQQRDRLLAFAARFEPRCWAVEGAAGVGALLAQQLVAVGEHVVDVPAKLSARVRVLDTECSDKTDSHDARSAAIVALRHPRLRIVQREDHSVVLRLLAKRHHELVAQRTRAICRLHAVLGHFVAGGLPRRLSAARAAQELRRIRPVDAVGIERRRQALELLTEIRRADSDLVQLKDRITDAVAASDTTVTGVHGVGPIIAAYLIGYTGDACRFPTAAHYARYNATAPIAASSGPNPRHRLNPRGNRQLNHAIHMAAVTQVRNDTAGRAYYLRKQAEGKSRKEAMRALKRRISDAVYRQLRADATH

SEQ ID NO: 249983 - protein, 323 aa, unidentified
MTKDIKYFGIDISKDVFDVCDNSFNYYQFKNSISGFKKLVKLLDSNSVCVMEATGYYHSRLAYFLLEKGLGVCVVNPLKIKRYIQMDLSKIKTDKSDSKMIQLYGKDRQPKLWTGQSKTQQESLQLSRMLSVYTKQKTQLKNKIHGEEVLGTPSKVVLSSIKRSLKQLKKEMDVLEKALDKNVKKEYQDSLTLLKSIPGIGDKTALMLLVFTDGFQRFESSKELCSYAGITPIIRQSGSSVKGRPRISKMGNPKLRNLLFMCSFNACKYNRACKAIFDRIVAKGKSKKLALIAVCNKLLKQAFSIVKNGVPYNEDYRSTLTIN

SEQ ID NO: 249984 - protein, 355 aa, unidentified
MNAIKYIGMDVHLATISIAVLDAKGKLLMEVTIATQAGALLDLIGGLRGSLHVTFEEGTSAHWLYTVLEPHVAKVVVCDPRQNPRRLGEKKSDRLDARKLAEGLRMGSLKPVYHGNALVPALKELVRSYRTLVSDTTRVMNRLKALYRGRGIGCAGTRVYSPRFRNQWREQLQEPGVRGRADLLYKQLDLLLPLRQEARAAMLAESRKHPAHKILGSIPALGPVRVAVLMALMQTPHRFRGKRQLWTYAGLALVTRTSADYQMVDGQVTRARKPALVLGLNANHNHTLKGIFKDAAASALAHPGPFKDFYTTRVAQGMKPELARLTLARKIAAITLTLWKKGERFNAEHVKTQAA

SEQ ID NO: 249985 - protein, 424 aa, unidentified
MKPHPDVEFAAFAGIDWADAKHDICLQAANSEDREFVVLAHRSAAIEAWAGALRQRFGGQPVAVCLELAKGPLVYALQKYDFLVLFPIHPATLAKYREVFAPSHAKADPTDAQLALELLLRYRAKLKALTPQSVPMRMLLRLVEQRRRLVGDQTRISNRLTDALKQYFPDVLAWFPDKDTLLFCDFLSRWSTLKQLKNARRATLLSFFHEHHVRSQARIEERLRAIKAATTLTDDLAVISPNQLLVLTLVEQLRVTLQAIERFDAEIATVSESLPDYSLFRALPGAGASLAPRLLAAFGEQRERYQSAAEIQRYTGIAPVTESSGKKRWVHWRLQCPTFVRQTFVEWAGATIPRSFWAAAYYRQQRDKGCSHQAAVRALAFKWIRILYRCWQSRTPYDEATYLNALSRRGSPLLASITEVAKNT

SEQ ID NO: 249986 - protein, 398 aa, unidentified
MAMRSEHPRVWAGIDAGKEFHWACVLGASGEILISRRVENDEADLCKLIDEVLRLAEGITWAVDQPGGGGAALLLALLWERNQRVLYVPGLSVDRARDAYRAESKTDARDARLIADQVRMRADLGELTPAEEDLAELQLFLTRRRDLVTDQTRTITRLRETLLSLLPALERTLDLNNKGALTLVAHYQTPSAIRRAGQKRIALYLRNRSVKGADALAHKALTAAKAQNVALPAESVAAAIVSELAEEALRLKVRVCTLDRELEKRFFARPEARILASLPGMGPVLGAEFLVCVGDLCAFESADRLAAYAGLVPAARDSGKRVGNDRRMRGGNKVLKRVFYQSAFASLRSSTHSRAFYDRKRREGKKHTQALIALARRRVNVLWAMLRDETTFEVPPAA

SEQ ID NO: 249987 - protein, 309 aa, unidentified
MFSYLGIDVSKDSLEIRILPEDIGMSYANNCAGFKALIDWLKPYNVRRVLLEATGGYERAAMKSLQAAGLDVLRINPRRVKSFAKAMGYRAKTDPIDARLLAEFAHVVKDSDSRITNVEQDNLRALIQQRENFVQQQSDDVRRLKTASVDLVKPLLQSHIDYLTQAIKALNNLIRQSAQVLDRDKIARLCSVKGIGIVTAASLMAYVPELGEVGRREIAALLGVAPYNDDSGNHQGARRIGGGRFAARRAMYMACWVVIQRQPEFKARYEALRQKGKCAKVALIACMRVLLIRLNAMIRDGAEWKERAV

SEQ ID NO: 249988 - protein, 391 aa, unidentified
MLYIGIDAAKDKHDCCIVDSDGEFKCDGFTFANSKEGFEKFLEIVKQSLSSKDKIIKVGIESTGHYSTNLLSFLNSQGFEVVVFNPLSVSRSRTANSLRRTKTDKNDSRYIVQLLMSGNFKPYHKQSYHILRLKSLSRARFRLVKEIQPLKNRYRRLIHLLFPELQGFFCKLDIPAVITLLTALPGAKDIAACNITKLTNILSTASRGRFKRAKAEALKQLAKNSIAEYNQGDAFELKLTLQRIQFLENQKAEIETEIRNVMSEIKTPVTSINGVGDVLGAAILAEIGDINTFSSSAKLLAFAGCEPSTYQSGKFTATNTPMVKHGSRYLRNALYLAVKSAYLHSPSFRAYIDRKRAQGKHYYTAMSHGIKKMVRVLFVVLKRNITFTEPI

SEQ ID NO: 249989 - protein, 382 aa, unidentified
MQSIKTWVGVDVSAKTLMAKRRRRNEDKDEAREFSNDVAGHRELLKWIGKGARVCMEATGVYHLQLALMLAAARVEVMVINPRVAKDFGRALMNRSKTDRVDASTLLEYVWRMDFVAWKAPRAAVLELRELGRRLSELVHAGAEEKNRFHAKNVAAISRTVIRDVETHVVQIEKRVKQIEKAAAVVIRGDAGLSEQYAILTKIPGVARRSAILLLTELAVLDPAMTVKQIVGHAGLDPREYESGSSVQKPTRISKLGNARLRATLYMPTLTAIRHDRGARLFYAQLMARGKKKMQAIVAVMRKLLHGIWIVLQRRMTFDSSILFAASLAKAESSDSAVAANQPEPRQDHPKGRSEAEELRQQLDPGSAEATRSRKRKRSKAA

SEQ ID NO: 249990 - protein, 333 aa, unidentified
MQNFYFIGIDVSKKKLDICVMSNSKVLKEEQVSNHPQAIATVIAGIKEELSMSNDCFIICAEHTGQYTYPLICACKSVGSKLWLENASQIKYCSGVTRGKNDKVDARRIAEYAMRFFDKAKPYQRPTEELMRLKQLEAERSLYLTDMAKYKAQLSDQEGFMEDKIFKRKAKRLKEMIKSLEKTLKEIAQEMTDVIDSSEGLSRQMRLLKSVEGVGPVVAMNMIIATEAFTRFDNPRQFNCYVGVAPFAYTSGSSQHSRNRVSQRAVKYIKCLLHMAAVAIVHKKTGDLKTYFERKVAEGKNKMTVLNAVRAKLVARMFAVIRNNRVYQPILSV

SEQ ID NO: 249991 - protein, 400 aa, unidentified
MTYDHVIGVDVGKYFHHACVLDPSGTAVQSTRVEQSEAALTEFFTQFTTTGSTLVVVDQPNNIGRLTVTIAKATGADVKYLPGLSMRQLARIHAGNSKTDIRDAFGIAYAGRFLPDALRAVDRTDPIFQQLKALNGIDDDLTRAYTRLINQIRSSLVGTYPEFERVLCGSVIHRRWILELLARYGGPTKLRRLGRSRTITCAKKRKARNPAPIVDALFDAITSQQLTLPGAGEAELGVALAATDALAKLDHRKRIHQQVPEIPDIIDQLPLIPVLLSMPGIGPATAAQPLMTTGDFSDFKTAAQLASYADLCPTTNQSGTSLNSHSVNRAGNKRLNNALWQSSFSAIRHHERSRQFYERKRQEGKRHNAAVVCLARTRLNVLFAMVKNVAFYSEDYANTP

SEQ ID NO: 249992 - protein, 345 aa, unidentified
MEPMYYIGLDVHKRKISYCVKDSSGKVFAEGLLPATRLDLDLWMKTLPQPWSAAMEATMFTGWIYDHLKPHAAVLKVAHPLMLRAIAAAKKKNDRIDAGKICDCLRCDFLPECYMASTAIRERRRTLRYRNLLVRQMVQMKIKISALLMEAGVSYNKQRLHKAGYFRELLARNPDIDEGLGSLLRLCRETVVRLQKTESALVRSLERDPLLLDRVERLMTIPAVGPITALTWALEVGDVQRFSSIKKAISYCGLCGAEKRSGNTVQRTPLSKQRNKHLQTTLIEATKMAPRNSPELAMLYDKEKQKGNANRATLAVARKLVAYLVAVDRRQKEFLTVERENRTAA

SEQ ID NO: 249993 - protein, 352 aa, unidentified
MDNTNSTAIIIGVDTHKSRHVAVAVNAHGARLATLSIPANTKGYRELESWSRSLGNVEAFGIEGTGSYGAGLSRSLLAQGHKVVEVTRPNRQLRYSQGKSDSLDAEGAARSVLSGQAIADPKTQTGSVEMIRHLKIVRDTAVKSRSQAMVTLKTLIINAPADLREVLDQINGKMALIRHIAAFRPAQITSTTASAKAAMRALARRWLFLHEEIQAHDKELDRLIADKAPSLLASHGIATMTVAEMLILIGDDPSRIRSEAALAKLCGVCPIPASSGKTNRFRLNRGGNRQANAALYRVAIVRMRSHEPTLAYVRKRTTDGKSKSEIIRCLKRYIVREIFSHLCAPETAPIPA

SEQ ID NO: 249994 - protein, 410 aa, unidentified
MEVMVSRGCGLDVHQATVVACLLTGEPGALPRKQVKTFSAMTEGLIELRDWLKSAGCTSVAMEATGIYWKPVHNILEGHFDLVVANARHIKAVPGRKTDVKDAEWIADLLRHGLLRPSYIPPPELRELRALLRYRVKLVNARSGERNRVTKLLESCNIKLSSVASDVFGLSGRLMLDALKRGQATPEEMAEFAKGRMRSKLPLLKLALDGRMEDHHRQLLSMQLDRLDRFDRDLKQMDAKLEAKLKPYAHQMELLDEIPGVNWVTAAVIIAEIGVKMSQWPTVGHLTSWAGLCPGQNESAGKRGKSNIRPGNPYLRSALVEASIAATCVKDSYFREKYYRLKARRGHKRAVVAVAHKVLIAIYHVLTSDTHYQELGADYLERLEPERLKHNLVRRLERLGYQVSLEPKRV

SEQ ID NO: 249995 - protein, 338 aa, unidentified
MYYTGIDLHKFTSYLTTVDSAGKIIKQADLKNVDHNFIQYFDSIPGQHKTTVESTMTWYWLNDLLSSIEIPLTLAHAKYVKAIAYAKVKTDKVDSHTLAQLLRMDYIPEAYKISKDKRVLRDALRARLKIVQRHTSVTNSMHLLLAKYNYDSPSQLTGIAEYQYEQLADVEELLKEQILDLEKQLYPSLIPNEDIQRLLWIPGIGKMNAFNIVLEVDDINRFPDVKNFFSYCRLVPSARNSGGKSKQRSSKDGNKYLKVVFMDASVHAVQYYPVIKKYYNSKLRKKNKFVAKSIIAKEIAKIVYYTLKYKTNFNNNFKGIELQHKKSLQWPRVVSPDA

SEQ ID NO: 249996 - protein, 343 aa, unidentified
MGSSIGVDSHKCSLAAAAVDELGRVIGVREFPNDPQGHLALLAWARDHETPRAIGVEGSGNYGAALCRALSSAGEQVYEVPATLTFRERRRKGSQGKSDPVDAVAIARVVAWDEALPSPRRAQALADLKLLSDYRDQLLCARTQLANRVHRDLVVLRPGYQRMVPNLVGAKHLSRAASLVKGDSSVRAELVRRRIAELRRVSNEIAETKARLREALAGSGTTLTEVPGIGPLIAAKILGEVGDVDRIRSQAAFAMMAGTAPLVASSGMSSRHRLNRGGNRTLNFALHYMALVRYRSDEETRGYIERRRAEGKTFKEAMRCLKRHLCNVVYRQMISDWRAMQSV

SEQ ID NO: 249997 - protein, 433 aa, unidentified
MSTFSSPSSAVWLKGTMKGTTPKEKYRRCCGMDVHKETVVVCVLAPDGEEGKPLKKVYGTFRNDLGRMRGWLKQLKVTEIAMESTGVYWRPLWNVLEGHGFHLILANPKQVKALHGRKSDKRDSQRIAEFLQDRRIDPSFVPPPELRRLRDLLRYRVSLLEQQNETHNKIRDLFETANIKLSSVASDLLGVTGQKIVEALIAGETSPDRLSWKVKGSLRKKEKEARQSLIGCFDEFHRQMLELLWKQYKFLSGQIEQVEAKTRREMEPHGELIELLDGVSGIDEMVAWTLIAEMGTDMGVFPTTGHVASWAGMCPGTNESAGKQMSTKTRKGNRYLRRALLQAAWAATRKQDSYLRAFFYRLMYRKGWGKAIVALGHKLLEIAYGILKTRTPYYELGADYYDQLNPEKTIQRLVRRLGKLGVEIVITPKEANA

SEQ ID NO: 249998 - protein, 346 aa, unidentified
MSRTKGDNTMPVVRIGLDIAKSSFQVHGVDAHGKVVIRKQLSRSKVRPYFAQLPACLVGLEACGGAHYWARELGKLGHDVRLMAVAMIQPYRTGQKNDQNEAEAICEAVSRPRTRFVSVKSEAQQAVLTVHRARELLVTERTALANQIREVLMEYGIVIAQGLQRLRRELPERLAAAETLPVLVREVVAELRERLLEWDRQSTEYAHRIEQLAKQNQAARRLMQVEGVGPITATAVVATIGEGHAFQHGRQFAAGLGLVPTQHSTGGKTVLGRITKPGNVYLRTLLIHGARAVLQFSANRTDAKSRWVERVRQRRGSNIAAVALAAKHARILWALRARGQEYQLAA

SEQ ID NO: 249999 - protein, 298 aa, unidentified
MSETNSVKIIIGVDTHKDVHAAVAINGIGARLGTLTIPVSPQGYRNLETWARAFGAIDAFGIEGTGSYGAGLSRFLQAKGHTVVEVNRPNRQLRHQNGKSDPLDAESAARAVLGGQANARPKTADSSVEMIRHLKVARDTAVKSRTQAMVTLKTIIINAPAALRQALDRIIGKMTLIRHLAALRPGPILSVIASAKAALRAIARRWLTLDAEISAHDADLEALTASCAPAMLEAHGISTSTAAEMLILVGDNPERIRSKAAFAKLCGACPIPASSGKTNRHRLNRGGNGRPMLPCIES

SEQ ID NO: 250000 - protein, 346 aa, unidentified
MYYCGMDIASKSSYLFVTTKTGRKVASGEVETTREALERRLKRYVKDGLAVAIEAGNQTAWIHDALVAMGAKVTVANPTKVKLIAESRRKTDKIDAKILCELLRIDALPCPVHMPGKQARALRGLLVARRQLISARTKLCNVVRGMVRQEGTQLPSRALSTLIGWKHLLGDGFNEPHVAVIVAAYFETFKALTASIREIDRELAEREQKDPRAARLQTMPKVGRVAALTFLAAVDDPKRFRSSRKLVGYSGLAPTVRSSGERTVYGSISREGRRELRGVWVQIAHLVAIDTSRATQPLRRWFNRTAKRRGKKTATVALARRLLVIAYHLLRDETVYDATRLKRRVA

SEQ ID NO: 250001 - protein, 321 aa, unidentified
MKEEKVYVGIDVAKASIDIAVHQSKQRWHLTNDDEGISQAVSCLEELSPVLIVLEATGGIELPLTAALAAAGLPVVVVNPRQIRDFARATGKLAKTDAIDARVIAHFAAAVKLTPRPLPDAEAREFSALLTRRRQVMGMITAERNRLRPTCSKVVRDLIKAHIASLQREVDKLDDSLRDSVRGSSVWREKDDLLQSVPGVGPVLSATLLAGLPELGTLNRKQVAALVGVAPLNRDSGNFRGKRTVWGGRAKVRSTLYMATLAATQHNAVIRAFYQRLCAAGKENKVALTACMRKLLTILNAIIKHRTPWRYAHSNIIGPCS

SEQ ID NO: 250002 - protein, 435 aa, unidentified
MNYVDDIRLKQFLQLKKEIRGSEKHLIVGIDAAKEKHNAFLGTARGKTLIKNLVFDNTLEGFQRLLAYVERIKVQYGLTAVVFGIEPTGNYHKPLAEHLIKCGHLVVLVGGVAVKNNRQLLDGRWDKHDVKDAANVADLIAQGKCLFYEYPLMTLRNVRVLIALKRRLKRREHGMSICIRNHIIAQYFPELDQHYGPSETLAVVRECLDPSEIAGMEYDAFCRTVAPGKMTLAKGRRVGTIWRAAVDSVGCTMGEAASFEAQVMVDSLKQIRQTIKSVEEKLEDACMEFPEYTYLLSIPGFGPDVSSKVLGAIGNSRRFTNAKQVLKMAGLDLCADRSGKKSNSAIPVISKQGKADLRYGLYQAAFIASLKNKDFIAYFTNKLKGRAKEKGIITKMRVKLAAKLLVIAWTLMKKKECFDPKYLKQEDQDTQKKAA

SEQ ID NO: 250003 - protein, 341 aa, unidentified
MSNTNTYIGVDLHKKTCYVTVMNSMGKIKKQIEISTNKDKVAKFFKRYSNIPVAVESTMNWIPFYENLESLGCKVSLSNPLQTKVIASARIKNDKVDSKILADLLRTNLLPTAYIQPRDIRDLKEIVRERANFVEMRTKIKNKIHSVLFKVGGSHSFTNLYGKAGMEWLKSLKLRSIYRKELDRYLETLEHLNEQINKISGLIEKTAKLDFDCKLLMTIPGISYYSALMIKSEIGDIKRFRNANKLCSYAGLIPSTYASADKVRYGRITKRGSKWLRKTLIDCITSGSRNPNRIACFYKKLKKSKGTGKAKVAAGRKLCSVIFAMLSDQQPFLDFAPTKKR

SEQ ID NO: 250004 - protein, 346 aa, unidentified
MKQITTIGLDLAKQVFQVHAAAADGSPIFNRKLRRAEVLRFFEKTPACLVGMEACGSAHYWAREISALGHDVRLIPPVYVKPFVKRGKTDAADAEAISEAVTRKTMRFVPAKSTDQQAAAVVLKTRALLVNQRTQVINALRAHLSEFGIIAAAGTTKVAGLISIVRDETDLRLPKAARFALLEVASQIEALKAQIEKLEKVIVATVKRDDDARRLVTIPGVGAITAASVRALVPDPGGFKSGRHFAAWLGLTPKPHSSGGKERLGRISKMGNPALRSLLVVGATAVLRHARGNPNASKWLTALLARRPYRIVAVALANKMARIVWALLVRDGTYQDKGTRNQIVAA

SEQ ID NO: 250005 - protein, 424 aa, unidentified
MSKKKSSLAGLQALYARACGLDVHKKLVVACVRILDSKDGTVQSTLRKFGTMTADLLELRQWLAELKVTHVAMESTGVYWQPVFNLLEGHFKVWVVNAQHIKKVPGRKTDMKDAEWIAQLLQCGLLRPSFVPERQQRELRDLTRQQTKLVQQRNAVDNRIQKVLETANIKLGSVASDVLGVSGRKMIEGLIAGEKDVTALADLAQRQLRSKIPELQRALEGELTEHHRFLLRQLLGQYDFLEKEIASISERLGAVAPPSFRAAVEQLDAIAGVGERGARALLAETGTDMSRFPTHKHFASWAGRCPGNHESAGKRRSGKTPAANRHLDAVLTEMAHAAVRTKNSYFKAQYHRLAGRRGKKRAIGAVKHSLLVTVYFMLRDNRPYKDLGVDYFDKLNPQQRIRYHVRRLQELGQEVELSPIADAA

SEQ ID NO: 250006 - protein, 371 aa, unidentified
MRFYQGQHRFYCGIDLHARSMHVCVVDHAGTIVFDRSLASRPEALLQALEPFRDGLVIGVECMFAWYWVADFCVTHDIAFVLGHALYLKAVHGGKAQNDRIDATKLARLLRGGNFPTAYAYPKGMRETRDLLRRRTYLVHKRAELFTHLQILNAQYNLTPFPKKLCYAANRADMKIAERFGDASVQKNAAANLAVIDRLDEVIGDVELYLIRMAKIDSVQTYQRLQSIPGVGKLLALILLYEMHDAQRFDSAGQFLSYARLVRCAHESAGKKLGTGGKKIGNGHLRWAFAEAACLFLQRSERAKQWKQKQTAQRGSGKALAILAARLARAVYHMLRKGEVFDEERFWAGGTRRTPTGSSSLFRKEAQHAGA

SEQ ID NO: 250007 - protein, 403 aa, unidentified
MTKQLMAGIDLHSNNMFCGIVDQDGKRVYEQKLPCELPRVLQALKPFKGRIEKIAVESTYNWYWLVDGLQDQHYPVVLANPAKMEQYNGLKVTDDKSDAFFLAETLRLNILPTGHICDRQWRPVRDLLRRRLSLVRQRTSLILSLKSLHVRTTGQDLPLGQLKALPPESAGGLFENPFDQLTAQVQTQLLDQFNQRIGEIEKALLGKVSGLPRYQVLQSLPGVGTILGLTITLETGDPTRFASAGCYASYCRCVDSRRLSNGKKKGRNNEKCGNKYLAWAYVEAANFAKRYDAQCRRFFDRKAAQSNTMVATKSLACKLAKAAWHMMSQQTSSDAGRMFPGQAGAIRPDETKAGGTAVGDAPIRTGQAGPLRGRDRRRRELKSSEARRRRRPARANKRRDDDL

SEQ ID NO: 250008 - protein, 267 aa, unidentified
MEHYVGLDVSLKQTSICVVSGTGSVVREGVVDSNPDAIAAFVRSKAPGAIRVGLETGPTSTWLWTELKRLGLPVICIDARHAKAVLKMQINKSDRNDAAGIARIMQTGWFKEVRVKDLHNHTVKALLASRALLVKIKRDLENQIRGLLKNVGLVIGRAKFNVFAVRAEELIEDRPELIPVVGPLLKARQAIEQQTEDLDRKVLRLTRNDAQVRRFMSVPGIGPITALCFKATIDDPTRFKRSRSVGAYVGLTTRRHASGEIDWTGRI

SEQ ID NO: 250009 - protein, 385 aa, unidentified
MERQPFVPRDYDVFAGLDVDKRSIAVTFTDHQGVSRSMRIPYSVEHLWTYVRKHFAGQKVAFAYEAGPTGYGLYDGLVAHGAPCVVAAPSMIPKAPGQRVKTNRLDSRGLSETLRGGQLKSIHVPTPPYRDLRHLTQLRDTFVRELVGMKLRLKALLLLEGIAFPPAPAGSQWSGRVKQQLRTLACSGTVRFKLDQLLDSVEFSEQQVLKTTREIRRFCQHDPELARCIALLRTIPGIGWLVASQLVARIGDWRVLDNVRQLGGFLGVVPSERSTGEKTERGSITRTGDSRLRSKLIQAAWSAIRQDGELRAFYRSVYRTHPRPLAARVAIVAVARKLTTRIAAVLMQQRPYVVRVRVHADSLTEEETPLQGTTRRLAEPGGSRS

SEQ ID NO: 250010 - protein, 351 aa, unidentified
MPHKLNSGIAVIGVDIGKNSFHVVGHDKRGAIVLLQKWSRGQVEARLANLRPCLIGMEACVGAHHLSRKLQMLGHDARLMPAKYVRPYSKGQKNDFRDAEAIAEAVQRPTMKFVATKTAEQLDLQALHRVRERLVSQRTGIINQIRAFLLERGIAVRQGLRFLRAELPRILAASCDALSPRMLRVIEDLAGDWRLLDQRIEGLSSEIEALARKDKDCERLMTVPGIGPIISSAMVAAVGTGDAFSKGRDFGAWLGLVPKQISTGDRTILGSISKRGNRYLRTLFVQAAWVVLVRIGPKHWDRYGLKSWIEAAKKRLHHNVLAIALANKLARIAWSVLAHGRAFEATKIQAA

SEQ ID NO: 250011 - protein, 372 aa, unidentified
MIQRFHGLDRHKKHSTISVLNREGQEVEFLSKWADLRGYIEKLGPEDAVVMEAATGSFFWADQVESTGATCYVLHPYKFKIIRDSWNKTDKQDARNMAKALWVYLVTGEFGIPTVYKPGVAVRELRRLFSQYYLLNRQVILLKNTIQAILADNGISLNYGQKTMLSSDTDAKKMLSTYDLSPASLFSIQINLEILWKVEEQKSNLKKEILLAGELFEAEVKLLITVRGITPLTALAFLADVADIRRFKTLRKMNAYLGLVPRVKESGGRSKTGHINRESRRLTRTLFTQSVMHFADASPYLRSYYSNLISRRGVGRARIALIRKICGMMRRMLLEQQEFRWVQPSNFERKLKRYECQLKKIKKMKEEERKSA

SEQ ID NO: 250012 - protein, 331 aa, unidentified
MKKLDFLYFIGIDISKLTFDVAIIDNGIITSFIFDNTKKGIRAFLNLLKNKRIPLNDSLICMEHTGVYGRLIIAKLLEKKATLCVEMSLRIIRSFGIQRGKNDKIDAIRIAQYAAKNCNEIELYEPIPEVLEKIKILIKIREQLVHFKANLNKHPNEIKLFDAELGKLAQKHIKKTNKCLTDEIKRIESEVHALILSDDKLNATIGLVSSVTGIGIMTALYFTIFTNFFTRYENPKQLACYCGVVPFEHTSGSSVQKRSRVHHIANKTLKKQLHMCALAAVRHDPELKIYYERKAKEGKNKMLVLNNVRNKLVLRVCAVIKRQKPYQKRVA

SEQ ID NO: 250013 - protein, 344 aa, unidentified
MKIAVLGIDLGKNVCSIVGLDASGKVVMRRRVRRETLIDFAGQLPACVVAMEACCGAHHLGRVFAVRGHDVRLMSPEYVRPYVKAQKNDERDAEAIAEAATRPTMRFVELKSQDQLDVQTLHRSRDRLVGERTALINQLRAVLLERGIVVAKGKRKLEQHLAVLFDEQDGGVLSPRLRLLIEDMRGQWRELDRRIAAFDAEFVAWAKTNEDARRLVTIPGVGVMIASAMIAAIGKAETFTHARDLAAWLGLVPRQSTTGGKPRLLGISKRGNRYLRKLLIHGARAVLPYLAERDSHLGRWVKGLLERSHPNVAVVALAAKLARIAWAVLRQAKPFTNYGVAKMT

SEQ ID NO: 250014 - protein, 328 aa, unidentified
MTKHITICAGIDTGKRKLDVAIEGRCEQLQVENTPEGHKALLAWLRKHRVKRVGIEASGGYEQPVVAELRRTRFVVVVFQPAQVRAYAKFHLQRAKNDKIDAALIAACTAAVRKIYAAPDPRLLPFAERLTLIDQISEDIARLKNRIESCRNAMIKKLWQEDIARLEKREKAELKALVASIRKHRDLARRLELINSVDGIGLPTAVAILVRLPEIGRITREQAVALAGLAPYDDDSGEQVGVRHIEGGRKRLRRALYTAALAASFRWNGQLIQLYQRLIAAGKEHKRALVACARKMLIFANTVVARGTPWRDEPPAVNASIAGPLSVS

SEQ ID NO: 250015 - protein, 431 aa, unidentified
MNKHNYLSVGIDVGSAFSFMSIVDPQERVILKPFKIIHNNPDSLARAVLAIKKAEESNSMKSRTFLESTGIYHFPLFCHLKESGFEVFVINPLITHSIKNMGIRKVKNDKLDSISIAKLGLKPDLKTSLMPTELVLELRSLTRHYYHLMDERASHVTAIKTALHTVFPQYLDIFSDIIGTTSKMILRQYPTPDKILRGHRKTMIEKISNASRKGLAKATERYEKLVHAAICAQSFGCRLDSEYFNIQLKLDLIECLDASISKTMERIQLLLEENATHTFVNQIRLLDTIPGVGLLTAVTIMCELGDFSAFSSPKQLFAYFGMDPNVNESGKFKAIEVHMSKRGSRIARRAIFAVALACIRTKRNGEALNPYLYEYYNKKKESKPKMVALGAIMHKVTNIIFAVLRNSSAFELRSPEEHRLSYRQQPIHMAA

SEQ ID NO: 250016 - protein, 317 aa, unidentified
MALQRIFVGIDVSKEWLDLWLEPQKRFERTSNDAAGWTATIGLLRSLGSAAGLVVAFEATGGYEIGLRQAMLEAGFEVRRLNPLRVRLYAKSLGRNAKNDRIDARVIARYAEAADTMPETLDPARERLAELVTHRRRLVDERVALGNQTNMLRCRVLEAQNRKRLALIERQLEETDALILEAVGETPSLRAKLQLLKTLKGVKDVTAVTLLALLPELGRISRRAIAALVGVAPFDHDSGVLKGTRSIAGGRSAARTALYMAARAAARSKSPLGAFYKRLIAAGKTPKVATVALMRKMLVTLNAILRDSQPWKHAKAC

SEQ ID NO: 250017 - protein, 389 aa, unidentified
MKSPDRWGDWGLTRMIRVAAPLGMIGRGPVCIGHKHRGEAAVGYFAGLDVSLEETAICIVDDEGRILREARVASERYALVAFFNALGMTMERVGLEACSLTAWLHQGLSEAGIPAVCIEARQAKAAIGAMPNKTDRNDARGLAQIMRTGWYRAVHVKSPSCRSWRALLTARRMLLNKRRDIENGVRALLREAGLKVGAPSRKDFPARVRELASGDAVLTGLVESLLSVIKVTTDEVARLTKRVLDEVRVEPTCRHLMTVPGVGPLTALAFRATVDRPDRFRKSRDVGAHLGLTPRRYQSGETDVQGRISRCGDELARTALYEAAHSLLIRSRKWSALRAWGMQVAKRRGIARARVAVARKLAVILHRMWVDKSEFRWGKQAATAAKAAR

SEQ ID NO: 250018 - protein, 392 aa, unidentified
MLSTNLQNPIDFDGQKFYVGLDVHKKSWAVTIRSLGLQVARFTQPPGAGALLNYLQRNFPGGQYHSAYEAGFCGTSIHEQLCKLGIINILVHAADIPATDKQKKNKTDLHDSSSIAGYLEKGDLHSIHVLTQEQQELRSLFRLREAKVKEVTRSNNRLKSFLMYFDIKIPETVSKKEYLSLKALEWLNLELASEAGTITLKQHVEELKYQRKRLFEITKLLRRQIQDFHNLSYKCLLSVPGIGAVTAMGLIAEIADFGRFDDPDEYCSMLGLCPWEDSSGDTIKTKGMQPRCNRHLRPLLVEASWTAIKKSPALFAYYSKHAVKDSKKAIVKVARKLALTARGVVLKQQLYQEGYLQKTKAEQTAHKKTSNNRFSSGITEQHINKQPGNVLA

SEQ ID NO: 250019 - protein, 334 aa, unidentified
MSIVSTVGIDLAKNVFSVHGVDAGGTVMIRRTVSRAKLAQLIAQLPPCLIGMEACSGAHEWARRFATFGHSVRLMAAKFVVPYRKGGKNDGNDAEAICEAVARPSMRFVPIKSIEQQSDLTLHRVRQGFVEERTAMLNRIRGLLAEFGHVLPLRAAEVRRRVPQLLETLPTRVAGCVKDLLEHAMRLEAKALEYEREIRAYVRTNALAQRAQTRLGIGPITASALVATVGNAHDFKNGRQFAAWLGLVPRQYSTGGKTRLGHITKRGDPYLRTLLVMGARAVLQGALRLNDPFSRWALALQQRRGYHRACIAIAAKNARIAWALLSKDTVIAGA

SEQ ID NO: 250020 - protein, 343 aa, unidentified
MKRKYYIGLDGHSKNCFFVVLDGRGNVVCREKVDTAENAILQFLNQFSGEVHLIMDETTITQWLYVLLHDEVTEIVVTQSEKHRKAKTDFKEAEEHARDLRANYVKRKVFHECNDLMELRSLVSGYRDLVQNIVAEKNRYNALFRQSAIVRSGDAFYRDFELISSLRTENQRFVAIPLYERIQQLEKHQTLYEKQFKANCRKFKTIRLLTSVPGIGPIRANQIVALVVSPYRFPTKYHFFSYCMLVGHNQNSDGVVYGRKRPMGQTELKAIFKSSRIAVVKGSSALKMKYDLMQANGATQKAAFNALSRSIAATVLGVWKNGKKYDDRKVERSLKRTYSHILT

SEQ ID NO: 250021 - protein, 397 aa, unidentified
MIAVGIDISKAKSTVAVIDSDGTVLASPFTMAHTQPEMESFVTYLKGLGEPTTILMEYTGHYHYPVLKKLQDEGFPVCIVNPYQMKKYGDVEIHKAKTDKKDALRIAAYALEKSYKLVPYSSMEQKYEDLKFLSRQYSQRITYVAKLKVQLIALLDQTMPGITRILPLNSRNPEKCALLLFIKRFKSFDEIQRIGKARFLASYDVLAKKTSERSASSKGLSIYELAVDSITTRGEDPYIWLSQNQCVDLLSTTQNAADEIISQMRNIAETIPEYKVLRAMHGVGDRLGPIILAEIGDVHRFHSGKALNSYAGNDAPPYQSRQFESRNRHISKRGSSTLRKACYEVMQALKLTKPQDDPVYLFMLKKEQEGKPFNVAKMAGVNKFLRIYYARAMELYK

SEQ ID NO: 250022 - protein, 381 aa, unidentified
MTNATHGNQTSQVTVYAAIELSKKSWVISIARPDRDQPSIHRITGGNFSELVGRLRTAAKNFGRILVCYEAGYDGFWLARLLTKVGIECRVLDPASLQVNRRARRVKTDRIDALALLRALIAIDRGDRHVCAVVRVPTLEEEDARRSHREHQRLVRERTAHINRIKGLLFGQGIRGVEPKLRLSRIDFAVLTTSEGHPIPDRLRRELEREYVRLNLVEQQLRTVEKERDTADRQDPAVDRKRQMLCALRGIGQASAAILAREVFVRSFANRRQLGSYLGLTPSAYDSGSTSRCQGISKAGNSWGRRVLIEIAWLWQKYQSGSSLSRWYEARAAGQSPRIRRIMLVALARKLAVALWRYVETGLIPDGAVMSDAIVPRATAA

SEQ ID NO: 250023 - protein, 341 aa, unidentified
MSVIAPVFSFGLNGYAGSGLALQDKAEKRLMQITIGIDISKETLDAYRFPDNHHIQVANGRAGHKTLVRWIGKQNGSLVVFEATGAYHRNLEAALAANGTAFAKVNPRQARRFAEATGRLAKTDRVDAIMLAKMGAILGLKAHEPRTEALHILRELITARRALMKDKVAAKTRLQTTRQTLLKNQINARLKQIKIQIQQVDAAITEKVAQDEALSNKLDILTSIPGIAETTAFSMLIEMPELGTLEGKQAASLAGLAPMSRQSGKWQGKERIKGGRAFLRRAIYMPALVATRYNPGLKAKYDQLIRAGKSGKVALTAIMRKLVVMANALLRDGRTWSELRP

SEQ ID NO: 250024 - protein, 341 aa, unidentified
MGEYIGLDVSMKDTAISVRRDGKRVWRGKCASDPQVIARVVRKHAREPERVIFETGPLSVWFYHALQAEGLPTICVDARHAKAALDMAANKTDANDADGLAHLAEVGFYREVRVKGFDSMLTRTLVAARTKLVRIKTEISNQIRGLMKTFGLVVPAGKGSTFDANVCARLNDSSDLAKIIMPLLEAWRSVRLRAAELTRRLIGDARQSEACQLLMSIPGVGVVTATAFATAIEDPANFGKSRSVGAWLGLTTRRYQSGQVDYNGHISRRGDHQVRNLLYEAACVMLTRSSAESTLRDWGLKLRERVGFKRAAVAVARKLAVVMHAMLKSGELFDRTASAPA

SEQ ID NO: 250025 - protein, 373 aa, unidentified
MKIIGCDFHPSFQQIARFDSETGEITELRLSHANGEATKFYESLTGPAVVGVEASGNMRWFQRLLARLGHTLLIGDATKMRAGNPRKQKTDKRDARYILDTLLEKRFPSIWVPSMEEVDLRQLLKHRHTLVQMRTRVKNQLQHIAINEGFQKKRKLWTVEGLGFLRNLALGPWTGRRRDDLLQLLEQLHGQIQEMNQAAEKEAAKQPLVQLLMTHPGVGPILGLATVLTLGTVQRFERSKNATSYVGLIPSEDSSGERRRLGGISKQGNSFMRFLLVQAGMVAARHEPELGRFYQRLVHKKHHGVAKVAVARKLLVRLYWMLRTNTPYPEVVVRTQGSSSHSVAKKAKTERLSGRPASRKKGKQNKQPGKNQE

SEQ ID NO: 250026 - protein, 347 aa, unidentified
MLYAGLDLSRHKLDVHVMNEAGEPVQVTTAPPDADGLRGLARQTAGYGEPVAAAIESMNGARFVHDQLELAGWQVQVADAQKVKGLAPLACKTDRIDAWVLAELARRELVPAIWLPTPEVRAERERARWRLHLVRHRVALKNRVHATLLAFGRPCPTSDLFGSGGRQLLDRLRLPEPWAGTTAAAVALIDDLDEQVHGCERELRHLGADHAYVPLLMTAPGIAWVLGYTIAAELGDIARFPSPKKLCGYTGLCPRVYQSGTRDHRGPLAKNGPKYLRWALIEAATHAARHPCYHDHYQATKRRLGRQRGPAVARVEIARKLAEAIWHMLTTQAPFRPARPHAKALAA

SEQ ID NO: 250027 - protein, 316 aa, unidentified
MDHNNVVYGVDVSKAKLVVAQDDVPTLTEVANRPESIAAWLAGLPKGAVVAMEATGIYHRLLAHLAHAAGMRVYVLNPQTLKHYAWAIGQRGKTDNCDARMIARYAANEQAKLRRWQPPARAADRLSQLLERRHTVVGVRQTLAQSLSGLPILKAARQSLLASLERTVRRLDILIRHEMARLPGAAALYERLKSIVGIGPVVAAQLVAVFSTLSFARAGAFIAYTGLDPRPNDSGVHRGRRSLSKHGPPLLRCQLYNAGMAAANSKVFKPVYKQLRERGLQTTEAIVILARKLARIAFALYKSGECFDAQKHLKMA

SEQ ID NO: 250028 - protein, 347 aa, unidentified
MECVAVDQTAEDMSRKDSSAVLSVGHHHCCGLDIHKDKISATSIRTCEDGSIEEDFAEFGTFTDDFCRLKKWLLEQGCQVVAMESTGVYWRPVHNVLEDIFQVILVNARHVKHLPGRKTDVIDSRWLAGLLRHGLLKGKEEELLKSIKGFLSEHHRFQLVSMLTLIETVEKQISLVHDRLCQLLSDRRDKIERLMEVAGISEVSAHALLSDIGETLDQLELAAFLASWAGLCPGNNESAGKRHSGRSPVRNGRVKTIMVEVAWGAVKKKGSYYRERYYSLRARKGSRKAIFAVAHRILKAVFFILKFDKSYRERGDVYLVQLNTKARLHNLQKLAAKLGYTLVAAQA

SEQ ID NO: 250029 - protein, 493 aa, unidentified
MGEGCRLVTAEPEYSEGVVCMIKSVGIDLGGIGEHKVRCLDENAQMCDGFGFDTSRVGLTKLEERIFSDGSNPVIVFEPTGLAWLLVAVYLKSRHPDSRLVRVQAQKVVALRKYLNRSSKSDKIDSLTLAKMPFIDPEKLEEIYLPPGKIYAIQRLARQRKRLESEIAGHKKRIGSIVDGHFPGIRSAFSDPWSAQARAFLRSRLNPLTVIRAGEKALCAFLTKARKHCRIEASVESHGIYLACREAAALYKASSSVGTIDDDFFSSLQDEVSRELRIMEMEEAESAAIANRIEGLYLEIHPSDNLRTIPGVGSITAPVFLATIGNPARFRSQSSFANYCGVVPGANQSSDSEAKGLRMTKAGPPIMRWALFQASQIARAHDPQLACVYYREMVHNGKNHMQAMGAVMSHMSARVLAVLREDKPYEIRDINGSIVSREEAKQIILAKYQVPEEIRRERRHRKTPGSPNLQKKLREMLVPRVHEAAAAPQPAVT

SEQ ID NO: 250030 - protein, 461 aa, unidentified
MKVGFGGLDASKGYCDFSLISKGNEFTNRRMNFIDNQSGLDELKKVLSQALLSIDKIYLAIESTGGYENNWYNQLVSFDKRIIMFRINPLRTHHESKKNMHRNINDAISSEIIARHVSENYEELEKAKPRSLHFYTAKQMHKTIQGFIKQKTRNINQLEKVVYSCIPGLLTFSKNGMPKYMYKVLQKYPSKAKILNAKTASLAKIKGLTMEKAEAIQKAVKLDSGSGNTILTELNIKTLAQTINLFSTQIKELQSELAKHGANDLADLLVTIPGCGIESAVSLSIEIEDINRFNSAASLCCYFGVHPENHTSGDISKKPKMSKKGSSSYRGTIYMVAKNAIMYDPYFKEVYSNQRAKGKTYNDALGVIMNKLTRVIYGMLTNKEAYDSSKPKTQKNKPVDADQQIEKLEKETADYKAELEKMQNAPVSRRAENKIKKAMEESQNSIEELRTRSKPLPSANI

SEQ ID NO: 250031 - protein, 431 aa, unidentified
MKNKTDKRLEEITPETLIVGVDIAKTEQWARFVDYRGVEIGKAYRFKNNLQGFESIITRISEIRNKKELKYPIGQVIIGVEPTGHYWKPFADYLNKLGYRVVGVNPYHTKRAKELDDNSPTKSDRKDAITIARLVKEGRFFSPYLPEGIYGELRGLANTRNSANKRLSSIKNMITAILDEYFPEICEVFKKPLEGKASRQILKSCPFPVFLLEMGEANVLLEIRKAVKKTVGIKKVQQLIATAKESVGVRYGLEAARMRLRMLLEELELIERHLREIEESMKTALYKTGYAEQLLGIKGIGIITAASFLGEVGDPLRFKNARQIANYAGYNLTEDSSGKSKSGTCISKRGRKQLRSILYQMAFTMVGHNAEMKTLYQYLTIKKTNPLKKKQALVVISKKIITVIHSLLKKQETYNPERVLGVAIKEMMLAA

SEQ ID NO: 250032 - protein, 359 aa, unidentified
MTSKTIGVDLHKTSLTATVLDPSGAILERKDLSTKCRNHVAAFFAAHGPDAQVAVESVGFYHWFWDTVKPTVRKLHLADPAGVRACAGRRTKTDRNDSLLLAELLRENRLPMAFVPDEPVRALRELCRHRHRLARQLALARRHLRWVGLKNNLPGPTTLTSDRAQQWLLRQDAKLNAVHRLSSRQFVDQITTLERQLADVEKVLADTVAAHADLAPTLALIQSVPGIGFITAVTILCECGDLTRFANIDELSAYAGLCPRVTQSGESAHHGHISKQGPPVLRWVLQQAAWVALRCDPNARRIYARISRRAGNKKAATALARKLLSYAWSVCRQGRPFVWPDPENKPGHHTPVPVWSFDI

SEQ ID NO: 250033 - protein, 472 aa, unidentified
MSKGSGSGMTRGDRRRNARRERLRALLPRDGAVAGIDLAEDKQALAVIDHDVRVLARKTVRVKAFGLGEALDWAVGQARVKGFDRVTVACEPTGPRWMQVQRLCAERGLPLVCIQPLISHIAREQQDYTTHKTDESDCVMIARLAVELHCYIPEELDETWAHLRHLGRRRQQLITAQTASGQRIMDFLSVAWPAVTETCAGPVESRTWLAALEVVTARCGADPGTLAAMGREGFTALTRGAVAGWGITRARGPICARVFAALTDTEGAVTWSRRGLLRRVADELGDLKRTRVQLRQVEADMVAVLDELGLSRLADIPGLTAVGAAAILAETGDPRRYDSSSSLVKHAGMSPSDNASGAFSGQAHISRRGRPGLRLTVWRAVWPMLQYNPVMAAKYQAMTRAADAAAAGAGPRQGTAAQAAARARRAKARVACAASLLRWIYCMVVHDTSWDPAVASGAASRHDTARTQAEAA

SEQ ID NO: 250034 - protein, 425 aa, unidentified
MNYKQNEKINQVKESTLVVGIDIGSTTQYARAFDWRGIELGKVFPFSNSREGFESFKAWMQHLQDKYKKLDAIVGIEPTGHYWFDLGAYLEDEGILLVMVNPYAVKQTKELDDNSQSKNDRKDPKVIAKLVTEGRYSAPYTPDGVYADLRIMVANRKRLIREMTQIKNRFARWFAIYFPEYTDVFGDYEAQSSMLLLKKVCTPEAIVELGAEKINQIWRDAKLRAVGMKRATTLCETAKRSIGLKKGSSAARYEMKLLLEDYEYKKAQLDAVMEEIEKLCRKIPESEQMLAIKGIGVITVAGFLAEVGDVRRFESPRQIQKLAGLSLRENSSGKHKGQTTISKRGRSKLRAVLFNAAIPLIAKNPEFKSLHEYYTTRANNPLKKKQSVIAISCKLIRVFYAILANGVTYDAQKLISDIHRQPQVA

SEQ ID NO: 250035 - protein, 343 aa, unidentified
MRKYAALDVSMEQTAICVVEEDGRKVVEGKVPTDPDAIAEWLAGKAGELERIGMETGPLAVWLWNELTKRGLPIVCLDARHASAALSMMPNKTDRHDAAGLAQIVRTGWFKEVRIKSHGAYVVRALLSARDLLVGIRGKIENEIRGLLKTFGVMFGKKVGGFARRAEEIVSGELAAAPEIKAIVEAMMEARRSIIERIKALDARVRAAAKQNAMARLFMTAPGVGAVIALSVASTYDDASRFRRSSSAGAYLGLTPRRYESGEVSRNGRISKRGDRLTRTHLYEAANVILTRQVGFSSLKAWGLRIAKGAGFKKAKVAVARKLAVILHAMWKTNEPFRYAAAA

SEQ ID NO: 250036 - protein, 420 aa, unidentified
MKKHSKSSQRSEPTLKRTKARGPVQGDAKEVMAEVLEKLTGRGTLDARVESGSARQGRRENTVGPNLDRLTVGVDLGDRWSQYCILGLKGETLAEGQLRTTQEDVREFFQALTAARVVIEVGTHSAWVQDVITEWGHEVLVANPRLMEGSKRRKRKSDRIDANKLARLGRVDPQSLYPIRHRSREVRQDLVVLRARDALVSVRTELINTTRGLVKSMGTRLPRCSSPSFAQKVKDAIPVEVREALLPLVQLVETVNDCIARYDERIEELGREKYGHTTLLRQVKGVGPITSLAYVLTLEDPQRFSSSREVGPYLGLVPKQEDSGDSQPQLGISKTGDRMLRRLLVGSSQYMLGTFGPDTDLRRYGLRLCERGGKNAKKRAVVAVARKLAVLLHHLWVTGDVYEPLHHTGTEIRTAQATAA

SEQ ID NO: 250037 - protein, 368 aa, unidentified
MNTVKFIGLDVHKKTITIAIADQGRENQPRSYGAIANDLDALDKFCRKMVSTASRLYFVYEAGPCGYGIYRHLTAKGFDCTVAAPSLIPKKSGERVKTDRRDAAKLASLHRAGELSAVYVPDPADEAMRDLSRARQDAVNATKKAKQRLKAFLLRNRIVYSGRSAWSKAYFRWLANITMAYAAQQVAMQEYIDAVHEGIQRVERLTDQIRQLVPGWRLAPVVSALQAARGVSLVVAVTLIAEIGDLSRFQKPSQLMAHLGLVPSEHSSGESTKRGGITKTGNRHARRALVEAAWAYRMPARVSRVLIKRQQDVPEQVCRIAWKAQLRLCTRFRRLAARGKVKQKVVTAIARELSAFLWAMAKQVQPAA

SEQ ID NO: 250038 - protein, 366 aa, unidentified
MLRPAMQTLAQKAHTENPMNALHYIGFDVHKKTISFCVKTAAGEMVEEGSVPAQREVLRKWAAARPQPWRGAMEATLFSGWIYDTLKPYGEQLEMAHPAKMKAISAGKKKSDTIDARTIADLVRCNLLPACYVAPPRIRELRRLLRYRSLVVSEAVRMKNKMAGLLMETGALYVKEKLHRKKYFANLLEELEEVPESVIDLLRLSRGALEMFESTQKRLVRELLADPELAQRVERLMTIPAVGEITALTWALEVGDPQRFPSCSDAMSYCGLTAALKSSAGKQQRGPISKQRNRWLQTTLIEAAKLAPRWNPQLAALHARELERGHCNRATLAVARKLVSYLLAVDKSCQPFQVRAPSELPTQKAA

SEQ ID NO: 250039 - protein, 411 aa, unidentified
MDIVNARCAGLDVHKATVVAGVRVPGPRPGERRGETKTFATTTRGLRELTDWLIGHGVTDVAMESTGVYWRPVYAALEGLVQVVLVNARHVKMVPGRKTDVKDCEWLAQLLECGLLRGSFVPPRAVRDLRDLTRLRKALIRERGHHVNRIEKTLELAQIKIGCVVTDLMGKTGRAILEALSAGIDDPDQLAEYAQGLLRKKRAALREALVGRLTPHYAFLLQQHLSLIDALDAHLATLQARIETAMVPFADTAALVQTMPGVAARAAQAILAETGVDMSCFPTPAHFASWARLCPGNHESAGKRQNTTTGKGATWLRATLQETAWAAVRSKKSYYRTLYYRLKARRGAKKAIVAVQHAMIVALWHMLKHRVAHHDLGADYFERRNTARIRRHHIRRLERLGYDVVITERAA

SEQ ID NO: 250040 - protein, 334 aa, unidentified
MALELLAIDLGKRAFHIYGIDTDGVILSRKVSRAKLAEVVGNLAPTAIAMEACASAHYWARCWLAAGCQVRLINPRFVKPFVKGSKNDAVDAEAIFEAAMRPTMRFVPVKSTDQQDLQSLHRARDRLICQRTALINHTRGLLAEYGVVLPQGPWRFMAQAPTAIADADLSDLARAIFGELMRQLEDLDRRIRKLDAMIVTLCRRNETCRRLAKLPGVGPIIATAIVGSVNDGRQFRSGREMAAWIGLVPRQYTTGGKPRLGGIGRRANHYLRRQLIHGARAIVSRSAKHDDRQSTWLKALVARRGFNRTTVAFANKTARIAWVLLSRKQEYAAP

SEQ ID NO: 250041 - protein, 453 aa, unidentified
MKEEKQKNFPAENVKKKRFSQGLPVFNPYAAGIDIGDTMNDVAISDGATGYEVREYKSFTEDLTNLVEWLVSEGITTVAMESTGIYWLNLYLMLEEAGIEPYLVNARHVKNVTGRKKDDTDAIWIQKLHSCGLLQKSFQPESEIRVLRTYVRQRKNLINISSDSVRRMQKALELMNIKLHTVISDILGKTGLQMVNAILQGERDEDELIKLKDPRIKASEEDIKKSLVGIWKDEYLFMLKQAYDEYFFYQSQINACEEKIKEQLLNQAASILDGDLTDIFVKKKPKKNQFSVEIGPLLKIIAGVDLTKVEGISEISTLELLSEIGTDMSKWQNGKHFSAWLNVAPNTKITGGKIISSKMQKKKNHAGQTMRMSASCLSNSKSSMGEYARKMKSKLGKKGGVVATAHRLARIVYTMIKEKKEYDPQITTTNNETWKAKKIKYLEKQLLQLRKTA

SEQ ID NO: 250042 - protein, 323 aa, unidentified
MEEGRIQSTRAAMEKHFASEAGMRIALEAGTHSPWVSRLLKSYGHEVIVANPRKIPTLTKSESKNDRNDAEQLARMAAFDPKLLHPIEHRNLERQQDLNLIHTRSVLVRARTMLVNSARGLVKSAGGRLPGCSSEAFPEKVSAAVPRELKAACEPLLKQIAGMNRTLVGMDKQIEGLAKKYPEIALLRTAPGVGPVVAACYVLTIGNPKAMETNRQAGAYLGLRPRQQQSGNCDPQCGITKTGNSYLRSLLVQSAQYILGRFGPDSELRCWGLKLAACGGKRGKKRAIVAVARKLAVLLLSMWRNSKKFEPFPQSATQLAKAV

SEQ ID NO: 250043 - protein, 402 aa, unidentified
MNKFNPTTAKVSTTSALGTIQTAQSALDKYAAYIGLDTHKDSIVVAIALPGRAQAYIDSELANNEKNISKLIHRLSKQFAGQLLLFCYEAGPCGYGIQRQIMASGHDCEVIAPSKIPKKPGEKVKTDRIDARKLAQYLRSGDLTAIWIPDHEQEAMRDLTRARSDMKSQELKARQQLNAFVLRHGHSWPSNKTRWTKSHYNWLESLKFNHDWLQVVLQEYIDAVKAATGRVTDITGQMERVLPQWSMAPVVDSLIALRGIDKLAAMVLLAELGDISRFDSPKQLMAYLGLVPSEHTTGSKRRQGSITRTGNSHARRMLVESAWSYRFPARQTMHLKRKAIKSSDKAKTIAWRAQKRLCGRYTTLIQAGKNTKQTTVAIARELIGFIWDIVCHEMPKVKMVAQ

SEQ ID NO: 250044 - protein, 419 aa, unidentified
MIAAEIERCAGIDVGKEQLDVHVMVGPLAGEPRCEYRQFGTITAELKRLRQWLEAEGVTDVVMESTGSYWKPVFKVLEEGFKVYLANPHEVKNRKGHKTDKKDSWWLAHLLRHAMIRPSFVPPRGLRELRDLTRRRRKIIGVATSECNRVEKILPDCNVKLRSALSDLFGVSGQLMLEALLKGKATAEQIAQFARRKAKRKIPEIIAALEGPRMSDHHRRMIRYSLEHLRFLEEHIQELDKQIVAKIEALGYTGQWQLLQTVPGVKENSAARVLAEVGPDMGQFGSEKKLSSWAGVCPGNNRSAGKNKGSKTTKGNRWLRGTLIESAWGASGKKNCFLKQKFWRLATKKQRKPPATMALAHTLLVLCYQVLKSGRPYKESGLPVMDQKQRDRLIRHHVRRLGKLGIRVRSLALAEALNA

SEQ ID NO: 250045 - protein, 408 aa, unidentified
MEVVHERCAGLDVHQHTVVACVRVASDGKVVQEVRTFDTTTQGLLALCDWIAEHGCTHAAMESTGVYWKPVWHVLESSFELVLANATHIRNVPGRKTDVNDAMWIADLLAHGLIRASFVPPTPVQELRDLTRTRKQLVREIAQHTQRIQKTLEDANIKITGVISNVLGTSGRALLEALVGGETNPERLVDLTSSRLKASRPQLVEALRGRVREHHRFLLKLHLGQIDGLNAAVRDVEARVGESLKPFHERAQLLTTMPGISETAAHVIVSEIGFDMSRFPTAGHLVSWAGLCPRSDQSAGKRRSTRVRKGAPWLKTTLIQAAWAASRKKDSYLRAQFLRLKSRRGPMKAIVAVAASMLTAAYHILRDGVPYRELTGTYFDSRDRTKLARRLIRRLSDLGVQVQILNAA

SEQ ID NO: 250046 - protein, 269 aa, unidentified
MTFRPHALHLKAELFVKSSRVHVRDDGFTRCNFHLKFFIMVYRGIDISKSSFVAAYPSTNGNPTKTFPNTTARMRELIGTLAVAEHHCVMEATSNYGCCCTCYIRTVLPSVLPPQKKQIKHFSRMMMPVTKTDEKDAYMIAMYGEKMNPPIYKMPSQATIRILTTEGFTYFDNAKQLSRFIGICPTYQQSRTSVNIREHINRNDDERLRSLLYIAFWTALRYNSRECYIRLKANEKPFKVALIAVTNKLVRPVLTITTINSIYRWICPG

SEQ ID NO: 250047 - protein, 368 aa, unidentified
MGQRITFVGLDVHKDSLSIALADAGRDEDVRYYGKIGGDIESLLKTVRKLQNSGATLRFVYEAGPCGYEIFRSLTKLGFDCVVVAPSLIPKKSGDRIKNDRRDALSLARLHRAGELKAVYVPTEEDEAMRDLTRTREDAVKALRISRQVLLSFLLRLGHRYSGKSHWSQGHFNWIADIKMPHRAQQIALQEYVHSVKENAERVDRLTKQIQELSLSWTHAPMVKALQALRGVSLIVAVTTISEVGDLTRFDSPKQFMAYLGLVPSLHSSGPTARYGSITKTGNGHVRKVLTEAAHAYSHPARESRILLKRLEGLPQEVRTIAWKAQVRLCARFKKLQARGKNRNSVVTATARELAGFMWAISCAMLPS

SEQ ID NO: 250048 - protein, 437 aa, unidentified
MAQRSGLTRGDHRRNCRIEKLRVVVRPDRAILSIDLGEDKQVAALMDHDGRVLGRRVITRKAHALGGLLEWAAAQAAGHGFAGVVAGCEPTGHRWRSVMQLADEASMGFVCVQSLRVHLAREADDYTRDKTDHKDAVLIGKLISRLDCYLPERAEEAWARLRHLGQRRFRLVGEVIACRNQISDLLSCCWPAALECAAKPLESTTWLACLAVTTDRCNGNPAALRKLGRSRFVAAVRRELPRFGAQRVCHRVADRFFEALTDGRGVAAQRRGALERVGLLMGDWRSTIAHLDEVETRMVAVLDGLGLTALVTSIPGLSAVGAAMILAETGDLRRFASARSVVKHAGLNPAENTSATLRGQSRVSHRGRPALRAAAWRAVWGALPHNPVRARLAPGQARVACAATLLRWLYAIVIKQRSWDADIAAGVARSGRHTAAA

SEQ ID NO: 250049 - protein, 369 aa, unidentified
MGDRIRYVGLDVHKDGIVVAVAEDGRRGEVREYGRIANTPAALQRLAGKLGQEGVELRFCYEAGPCGYGIQRQLSALGHQCIVVAPSLIPKRPGERVKTDRRDAVNLAKLHRAGELTTVWVPDRGHEAMRDLVRARLDAVRALRRARQQLSGFLLRQGCHYGRPAWTKLHRRWLAGLRFEQAVHHIVLEDYIAAVEAAEARRDRLTAQIEAMLPDWELAPVVAALQTMRGMALVNAATLIAELGDLSRFANPRQLMAYLGLVPSEHSSGASVKRGSLTKAGNSAARRLLIEAAWCYRFPARVSRELRLRQEAQPRLIREIAWNAQLRLCARYRKLARGGKPANIVTAAIARELAGFIWAIARHVSPAAG

SEQ ID NO: 250050 - protein, 348 aa, unidentified
MRFYKQQHQFYCGVDLHAKTMHVCVVNQAGEVLVHRNLPTRPDRFLNAIALYRNRDLVVGVECMFTWYWLADLCREHDIPFVLGHALYMKAIHGGKAKNDKIDSEKIAMLLRGGMMPQAYAYPQQMRATRDLLRRRMYLMHHRAEALAHIVNTASQYNLPPITKKLTYAANRQDVAQQFPDPSVRLNVEADLELIDHFDEQLRRLELELSRSAKIDNPQDYYLLRGIPGIGKILALVLLYEIHDIRRFPKAGNFLSYARLVKCAHESAGKRLGTGGKKIGNAHLKWAFSEATVLLMRQLPEAKLYVEKLAKKHGKGKAISILSARLGRTVYLILKRKEPFEAKRFLTN

SEQ ID NO: 250051 - protein, 315 aa, unidentified
MEAMIERCAGLDVHQETVVACVLFGPLDQKPKTSIETFSTTTTGLLALSDWLATLQVSDVVMESTGVYWKPIWNILEGSFHLVLANARHVKNVPGRKTDVKDAEWLAKLLRCGLIESNFVPPEDIRDLRDLTRYRKKLIHHRTSEQNRIHKILQDANIKLTSVLSDIFGVSGRRILEAILNGEKIETDGLRKMVDWRTKASITNIASAINGRIRRHHRDMLRYHWDHMGYLEQTIEELEKQIDQLLSPYRKEVGLLDGIPGVNKAAAATFIAEMGVDMSVFKSAKHLASWAGVSPGNYESAGKKKRVKPHKVTKL

SEQ ID NO: 250052 - protein, 338 aa, unidentified
MAILYVGIDLAKNVFALHGVNVSGKPELVQPKVARARLHELVAALGPCTIGMEACSGAHHWARLFVAHGHTVRLMAPKFVTPYRMSGKRGKNDAADAAAICEAVTRPNMRFVPIKSQEQQSRLMVHRARQGFVEQRTATLNRIRGLLSEFGVVLPLKAEVVRREAANRLEDLPGWANTVIGDLLSEVHHLDERIKQYDVHIRTMARQCTAAQQLMRLMGVGQTTATAIVAMVGNASEFDNGRQFSAWLGLVPGQYSSGGKTRLGRITKVGDAYLRSLLVLGARAVLNAAPNKADSLSRWAVKLRERRGYWKAVVAIAAKNARMAWAVLTKGEAFKLPA

SEQ ID NO: 250053 - protein, 375 aa, unidentified
MDRLLSRSGLAWLASTAIRRSGDETKHGDHGRALAVIGVDIGKEVFHLVGFGTDGKIAFRKKIRRLDLKGAFEQLPRCIVGMEACLSAHFVSRTLRALGHEPRIIPAIYVKPFLKGQKNDYNDAEAIAEAALRPNLRLVKEKSQDQLDLQACHRVRSRLVSRRTATINQIRAFLIEQGIAVRAGARALRNSLFAILENRKDEISPRTAKLILGLYEDWCHLDERIESVTEEIESLGKAEAKCQRLISVPGVGPLISTGIVAAIGSGEAFERGRDFAAWLGLVPRQHSTGGRSILGRISKRGSKYLRTLLIQAARVLLMRPHNWPRFSFGAWLKTASERLHRNKLAVALANKLARIAWSVLRHDKAFDTHLEVAAI

SEQ ID NO: 250054 - protein, 336 aa, unidentified
MRYIGVDLHKNNFQVCYLEGARRSFKHYTILGIEAFKKDLRKGDCLAVESTGNTRYFITQVKEYVSRIVVVNPRQFKVISQSVKKTDKNDAEQLALFLSKDMLPEVRMKEEKYSQLKSLANTRDKLVKLRTALKNKVHNILNAHGIVTSREAFSSDKSLERIREYDVNEMARVELEVIIGQLRSLNEGIKKLDKQIEDGGKGLDGFKNITSIKGIGKKSGTILLSIIGDINDFSDPGKLASFFGIVPRVQNSNESTHQGRITKQGSKLGRTTLVQCTLIAIRYSAYLSNFYERLKAKKGSGKAIIATSRKLLDIIYMTLKENLIFEDFPNFVLKSS

SEQ ID NO: 250055 - protein, 370 aa, unidentified
MKISVGVDLHKTQFTVCVLSEDRKVNESGIYPTSKQGYEAFRKKMTMLMGKGYEVTAAVESTGNTRHFCNQLLQAGIDVKVVNTMKFKVVTESVKKTDKRDARTLAEFLEKDMLPESVLCSQESEDIRRIIKSRSILVKALVSLKNQVHGLLMGYGIESKRGQLQSKKERQRILCGLEDHRSYGNAALAVKPLLDSIDQVASEVKRLEKVLAELVAKDEDVALLQTIPGVGLITAATIRAYTDDINRYESAKKYAAHAGLVPWVQNSNETIRHGHITKRGPVELRTAFVQVVMGMNRYRKVTSRYRIMTRYQEMKKHKGTGKSIIATARKMSTIIYVILKSREPFNPTKMAPTGKKVRVTPVKRPLALAG

SEQ ID NO: 250056 - protein, 409 aa, unidentified
MQPILKSCCGIDVHKSMIKVSIAKGHLDKPPKFFTRTFSTMTSDLLKLKDWLRENEVEAVAMESTGVYWKPIFNILEDEFRIVLANPQYLKKVPGKKSDVKDCEWIASLLRCGLIPASFIPPKVIRELRELNRTRRKLVGMMASEKNRIQKVLEDANIKLASVVSKIDGVSSIDMIQALLKQDKLSKEEIAAMARGKLKRKVDKLVEAMNGRMTDHHRFLLRLHLNDIAFLADQVEEIDRQIQKCMIPFRKEEALILTIPGVNKTSASAIISEIGTNMSQFPTEAHLASWAGMSPGNNESAGVKKSGKIRKGDRYLKAILTEVAWAASRTKNSAFSAIYNNIAKRRGKKRALIAVGHRILVAVYRALKSGEPFVDEGAEAVYQRNSKARQQSAIRLLEQSGYAVTKAPA

SEQ ID NO: 250057 - protein, 338 aa, unidentified
MFIIGIDPHRGSHTATVLDGAEEVLDELRVTADGRQRDRLLDWAAPFAPRLWAVEGATGTGALLAQQLVAAGERVVDVPPTLSARVRLLDSGRSDKTDSHDARSAAVVALRHQSLRQVQAQDHLAVLRLLAKRHHDLIAARTRAVCRLHTTLCYLAEGHFPQRMTTSQGAAILAGIRPRDAVSIERKALARDLLAEMRRADRDIAELRARIKTAVAASGSTVTEIHGVGPVVAAYLLGHTGQISRFPSAGHYARYNGTAPIEASSGPTQRHRLNPRGNRQLNHALHMAAVTQVRNDTAGRAYYLRKQAQGQSRKEAMRALKRRISDAVYRQLLADTGR

SEQ ID NO: 250058 - protein, 302 aa, unidentified
MPHVTSIGLDVHARSVAAAAFNPFTGEVVRRSFGTDASEIAEWALGFEDPRACYESGPTGFHMARELRALGLDCAVAAVSKMQRPAADARRKNDRRDAEFIARMLATHNIVEVPLPDMAVEAARDLDRALDDATRELRRSRQRLNMFLIRLGHVWDERNADGARKKAWTRAHWRWVSEIRLEGPQRDALEYYVTAARCAESDRRQLERRVVALAGTDRWRATVEALSCIKGVDTLTAFRLAAEAGSFSRFRSAPAFASWCGLTPSEHSSGESERRGGITKAGNALARTALIESAWHLSLIHI

SEQ ID NO: 250059 - protein, 344 aa, unidentified
MEHFAGLDVSVNETSVCIVDETGRIVREVKVASEPGALLAVLKNGAYRFKRIGLEAGPLSQWLYSALGEANLPVICVETRHMRAVLKAQINKTDRNDARGIAQMMRAGLYRPVHVKTLRSQKLRMLLTHRKLLQSKAIAIENDLRGTLRNFGLKVGTVRAVKFEVRIKELVENLPDLATLVEPLLVVRRVLREQIAVLHRRLLAIARDDEVCRRLMTIPGVGPVVALTYRATVDVPARFRNSRAVGAVLGLTPCKYQSGESERTGAISKCGDEMMRVMLYEAAQILLMRSTRWSWLKAWAMQVARRRGMKKAIVALARRLAVIMHRIWTDGTEFRWTRQQAAAA

SEQ ID NO: 250060 - protein, 403 aa, unidentified
MTSWSYFAGIDWASRAHALCVIDTAGGVRLRLEITHSQEGIERIVRQLKSFKGLAIAIERPSGVLVDALIEAALCVVPIHPNVLKASRARYRGTGKTDTGDAYMLADLLRTDGHRFRPLEPQSDEIRALRALVRTRDDLVAERVALANQLRSLLESFWPGAAEIFYDIDTPIALAFVARYPTPQSASHLGEKRLASFLAQHAYCGRRPASVLLERLRNAPNGCAGELEAEAKGELARSLAAILERLVDELAKLSARIEHTVTSLADGQIVMSFPRSGRICAAQILAELGSVRERFPTEAQLAAEAGVAPVTYQSGKHRSVTFRWACNHRLRRALTCFADQSRHASRWAAEVYHRARSRGCDHPHAIRILARAWVRVLWRAWSTKTPYQPHLHRSAAALEAPVG

SEQ ID NO: 250061 - protein, 410 aa, unidentified
MDLLIARCAGLDVHQKTVVATVRYPDGAGGRRSVTETFGTMTADLLALREWLQAYGVTHVALESTGVYWKPVYYVLEDAFTLLLINMQELKRVPGRKTDVRDSEWLAQLLECGLLKPSFVPPPPIRDLRDLTRYRVQQVRDRAQEVNRLCKVLEDAGVKLTSVATDVMGASGRAMVRALVEGTTDPVLLADLARGALRKKLPALRRALEGRFRPHHAFLIEQIFAKIDFLDETLDRLRAELDRRLGPFEPLLAQLDTIPGVNRIGAISVLAETGGDMSRFPSAAHLCSWGAMCPGQNESAGKRRSGKTRRGNAYLRATLIQAALGAMHTKDSALQARYHRVKRRAGHKKAVVAVGHQILEIAYYVMRDLVTYQELGADYFDRRHADRAAHRHVRQLEALGFKVTLEKPAA

SEQ ID NO: 250062 - protein, 361 aa, unidentified
MSMKATVLVGLDVHARQTHAAVLDLGSGELRERRLRVAPAQVAGFLAELGPEVRAVYEAGPTGFGLVRAARERGVIVEVVAPGSIPKGPGDRVKTDRRDAVRLVRLLAAGELRFAFVPSPADESFRDLVRAIDDARGDLMRARHRLSKFLLRRDERYPGGAWTATHMRWLRAHVFDEPCAQAAFVDYLAAVELLAGRRQTLISSLEQAIPSCAHAAVIARLRCFRGIDTLSAAGLSAEVGDWRRFTKPGLLSGFLGIVPSERTSDTKRRQGSITKTGPGHARRLLVEAAHHYRYQPRVGETLARRQASQDPRIIEIAWRAQRRLHQRWQHLHAQRRKPAGVVAIAVARELAAFLWEAATLD

SEQ ID NO: 250063 - protein, 400 aa, unidentified
MHLTANISIPQKNFIAIDLHSDNAVICVRRNALNKAGELVGKNIWCGRVSIRDGLDNFIKVLVPHCQDFDHVAVVESTYNWYCLADAFEERGWLLRVADPSTVSQANLKSSDDRTDAQYLAERLRVGSLKHYLPLNYSSRALRDLCRYRMAMVQDCASLKIKLINLYRNQLSKNVRVADLLERCQPHMQPNYRFNSDILEEFKDPNIRLRVAFEISRIAMLEEMIEECNAEIQKQCKDQELVKLCKTIPGCGPVLSAVICTEIGTMQRFKSAGDFVSYCRLCSTSKLSNGKSKGLGNAKNGNAYLRWAFTEVAQYASRNPVIREILQRLLRKYGGLRVKAIRTLAAKIARVTFYVLKNKQPFNAAKGFGIELTKSIKKKLAHKPLREDAAVVLPTMTGQA

SEQ ID NO: 250064 - protein, 343 aa, unidentified
MVDRVVFVGVDTHADVHHAAVVDELGRWLGDRGFATTPAGYAELWGWAGSFGAIAVAGVEGTSSYGAGLTRYLRAQAVRVVEVDRPDRKSRRMQGKSDPLDACSAARAVASGRAAGVPKSHDGVVESIRCLHLARRSAIKARTQAVNQIRALLTTGPAVLREQTRGLGRKALISRMVRLRPELNGAQHPEQATKIAVRGLARRCQALNEEIAALEVQLSQLTLAAAPRLLARPGIGIDTAAQLLITAGDNPDRLRSEAAFARLVGVAPIPASSGRTDRHRLSRGGDRQANRVLHTIALVRLHRDPRTWAYLNKRTAQGLSKKDILRCLKRAIAREVYHDLRPT

SEQ ID NO: 250065 - protein, 313 aa, unidentified
MDAIFVGIDVSKDRLDVALRPTGEHVAVARDAHGLAELIARLRPLAPAMIALEATGGYETIVAASLAAVGLPVVVVNPAQVRAFARAIGKRAKTDPLDASVIAHFAEATKPPVRPLPDTDTQRLADLLARRGQIIEMMGAERQRQKRLTETRIQKSIVRLLAALQKELSELDTEIDGAVRNSPAWRDKEDLLASVPGVGKIIARTLIAELPEIGTLDRHRIAALAGLAPWTRQSGQWKGRSFIGGGRSRVRAALFMGAMVAARHNPVLKAFHDKLLAAGKPKLVALIATARKLLTILNAIIRDATSWQEIKHV

SEQ ID NO: 250066 - protein, 355 aa, unidentified
MNEAKYIGMDVHQATISVAVRDSRGNLVMEAIVETKAETILQFIRGLRGSLYVTFEEGTWAAWLHDLLQPHVARVLSCDPRKNALLKAGNKSDRIDARKLSELLYLNKLSPVYHGEQGIRTLKELAGSYITITRDLTRVMSRLKAIYRSWGIPRGGQQVYASRYRAEWLAKISEAGVRRRAELYYQQFDALAALRQQVRRELLAEARKHPAMRLLWQIPSIGPIRAALLIALIQTPNRFRTKRQLWAYCGLALRTYTSGEYRFVGGQLKRSKKVLAVRGLNINHNHDLKNIFKGAATRAAAVAGPFQDFYQACVARGMKPHLARLTLARKIASTTLLVWKKGVRFDAEHLKQQAA

SEQ ID NO: 250067 - protein, 346 aa, unidentified
MSSSNVHIYGIDLGKNWFHIVAMDHQGHILWRKKLNRNQLKTFVINTPPTIVAVEACPGSQYWGRLFNDAGFSVKIIPAQFVKPYLKSNKNDFNDAAAIAEAGSRGTMRCVSLKTHEQLALQATHRVRQRFIVERTATVNQMRALLLEYGIAVPVGRKVFERSLPSILEDAENGLPDYIRALVFRLRERWQHLDVQIDEMSEQLQQASIVSEKCQLISSVPGIGPIVATGLIAAVGSGTQFKRGRDMSAWLGLVPRQYSTGGKNNLGGISKRGNVYLRRQVIQGAKALKIHMKRDKSALGRWIAKLEATHHHHVVLIALANKIMRICWKVLTSGQEYQPYPTSAVK

SEQ ID NO: 250068 - protein, 355 aa, unidentified
MDSKKYIGMDVHKESISIAVRNGAGKIVMECVIETKASMILQFFDGLRGDLQVTFEEGTSAAWLYDLLKPRVTKLLVCDPRKNASMREGNQNDQIDARRLAELLRLNHLHPVYHGEHGLRSLKELVRSYLTITKDLGRVMTRVKAIYRSWAIPCSGKQVYSPRHRAEWLGKIGEPGVRRRAEFYYQQLDALRTVRQEVRRELLAEGKKHQAWKRLCQIPSIGPIRSAVLLGILQTPHRFRTKRQLWAYSGFGIETQSSADHRRVNGQLQRVKKQSSIRGLNRNCNHDLKNLFKGAAIVASSKPGPFQEFYAALVTKGIRPEMARLTLARKIATIALIVWKRGACFDAQHLKPQTA

SEQ ID NO: 250069 - protein, 351 aa, unidentified
MQRFIGIDVHGQSCTLVVMGASGRRLGEHVVETSAKALIERIRSIPGDKYVCMEEGTQSEWLYEVLESHVKQIVVTQPLKRAGSKSDAIDAWALADMHRRDALERTVFKSPKTSTALRQAARGYIAVRRDMVRAKCRLNALYRSRGCNPTGEIYDPDTRNSWLAKLPPAYRTLGELLSEQLDGLCQSHQAAESWLLKEAERIPVARRLATAPGIGPIRAALLVAIVVTPTRFRTSRQFWSYSGLAIVTRSSSDWVRDGRGWTRKLTAQTRGLNRNRQPELKAIFKGAATTVIQQMPNHPLHKDFQRMTDAGIKPNLAKLTLARRIAAATLAMWKHQEDYDPSKQTRAPQSQ

SEQ ID NO: 250070 - protein, 330 aa, unidentified
MGNWNVVLGVDVSKLTLDISCAERRLHIKIDNQSKGFAMFKKWCKTNSIELKEVLVVMEFTGGYEYRFIQFLESQSIAYTRLSGLEIKNSMGMVRGKNDKDDSFRIGQYGEDKIKRLEASRPLNNNILILRQLLSFRKRLVREKAGLESTLKERIYMFSTGKDDRISKIIRSKIKADQKHQSEIEAEIASIIKQDGEMLKNYRIISSIKGIGKVNAWMTIAYTENFASFPDARKYAVYVGVIPFGNTSGTTIKGKPKVSYLAQKELKQELNQAAKSAMQHDPEISAYAERKQKTKGYNLVLNNVKFKLILRMFSLVKRGEMYVENYRRAS

SEQ ID NO: 250071 - protein, 407 aa, unidentified
MEVLYTRCAGLDVHASSVTACVRIAVDATVTYEHRTVSANTRGLLDLGHWLTAHGCTHVAMEATGVYWKPVWHVLESDFTLILANAMHIRNIPGRKSDMNDATWIADLLAHGLIRSSFVPPAPIQELRDLTRTRKQLMREIGRHTLRIQKTLEDANLKITRVVSDILGASGRAILTALVAGETDPERLADLTRGRLKATRAELIDALHGRVTTHHRFMIQLHLTQVDALGAAVQDVDARVGDALGPFRAAVSLLTTMPGLSDTAARVIVAEIGTDMTRFPSAAHLVSWAGVCPRLDESAGKRRSTRIRQGAPWLKTTLVTAAWAATRKKDSYLRAQFLRIKSRRGAKKAILAVANSMLTAAYHMLRDGVEYHDLGSQHFAHRDKDQVTKRLIQRLRDLGVVVEVKAA

SEQ ID NO: 250072 - protein, 414 aa, unidentified
MKVHRNCCGLDVHKETIAACALYDAPDGTPGKEKRLFGTVTQQLKELAHWLHERNVTAVAMEATGIYWVPVWNVLEDGGFDLVLINPEHYKAVRGKKTDMKDGERIAELLQDGRLRGSYVPPVEVRVLRDLTRYRTKLVQHQSALSNRIQKLLEQGNIKLASVASDVLGVSGRAMLEAMARGESDPEKLADMAKMQLRKKLDALQLAMDGCLLSHHRFLLREMLEDLSHVEDKIARVEAEIEQHMLPFQKAVAAWMTIPGIGQRLAWVLVAEIGPQVSKFETARNIVSWAGICPGNNESAGKRKSGTTRNGNCWARRALCEAAWAAARTKNTYLSAQFRRLAALRGTKRAIVAVASTILTIGYHLLQRGTTYYELGGDYFDRRNRARTTKRLVKRLEALGYGVILEPNHNAAAA

SEQ ID NO: 250073 - protein, 419 aa, unidentified
MDVIVERPGALDVHKAQVTACVRVPDEKGTRVQHLAEFKTTVRGLLALRDWLAAHGVTQVAMEATGVYWKPVWHVLEDDFELLLVDARHVKQVPGRKTDVKDAEWLCRLLEAGLLRASFVPPKPIRELRQLTRYRKAQIAERQREANRLHKALEDTGIKLDCVATDILGVSGRAMLDALCRGTTDPVVLAELAKGRMRAKIPALREALEGRFDELHALLIGAILAHLDFLDVQIETLSGAIEVKLAPFAAAVDLLRTIPGFETRTAENVIAEIGTDMTQFPSADHLASWAGQCPGNHQSAGKRRSGRSRKGSKWLNQALKEAAMAALRTNGSYLQALYRRKKSQLGHARALGAVKHSILCAIWHMLTTGELYRDLGGDYYQRRDPERQTRRLIAQLERLGHTVTLQATATATAEAVAAV

SEQ ID NO: 250074 - protein, 455 aa, unidentified
MRKKIKKAIPVRYHDGLSQLRPNAGGIDIGASEVWVDVGNKDAEPTRMFETFTADLNRMGDWLKSCGIQTVAMESTGVYWIPVCQILESKGIEVYLVNAKQAKNVSGRKSDMLDCQWLRILHSYGLLPASFRPTKDIGVLRAYMRHRQMLIEYAAAHVQHMQKALTQMNLQLQHVISDITGWTGMKIIRAIVAGERDRRRLAALRDARTKANEETIAKALEGDYRAEHLFALKQSLELFDTYQKQIASCHEQIEQHLKSLAMKADTAELKAARKVKKKRRNQPEFSIREQAFRISGVDLTQIHGIDETAALSLIAEIGVDMNAWRTEKHFSSWLALCPNIKISGGKILRRSTRKSANRAREILQLCAQSLLRSHSALGAYCRRMCGRLGTPKGIVAAAHKLAVLVYRMLKFGHQYTDIGQERYEQQYKQRVLQRLARKAQDFGFQLVPCPEKQVP

SEQ ID NO: 250075 - protein, 338 aa, unidentified
MEIKRIAVDTSKHVFTLVGVDDRGQVVMRRELRRHQVEPYFKKQSPVEVVLEACGGSHHWGRTLLALGHQVRLLPPQYVKPFVKRGKNDRHDAMAIAEASGRPGLQPVAVKSAEQQAAAMLLSVRELLVKQRTQLANAMRGHAAEFGVIVGKGIGHAGALVERVQNEPSMPEPAKAMISVLAAQFVALQVRIDELDRQILAEHKANPVSRMLAEVPGVGPLGALTLALTVDAAQFRSARHFAAWIGLTPKEHSTGGKPRLGGISREGNERLRQLLVVGAMAVIKVAKPGRRSASKWLLQLLGRKPRRVAAVALANKMARILWAMMRSGEAYRHAPVAG

SEQ ID NO: 250076 - protein, 340 aa, unidentified
MQVTTIGVDLAKNVFQVHGIAKNDVVLFNKPLRRAQFLPFFAKLDPCLIGMESCSSAHHWARELTALGHEVRLIPPMYVKPYVKRGKSDAIDAEAICEAVTRPTMRFVAIKTVEQQALLSLHRARDLLVRQRTQLINGLRGLVAEFGIYIPRGLARVIGFAEDITLGEVLDLPDIANEVIRNLSEQLMALHKRIRWYEERLKQVAKEDARVRLLRTIPGVGAVTASAIIASIGDGHQFRNGREFAAWLGLTPANKSSGGKEKLGRITKMGDQYLRSLLVVGMTSLVRQTRSHPERASKWLTSLLERKPARVATVAMANKTARIVWAVLTRDEPYSPRAAV

SEQ ID NO: 250077 - protein, 409 aa, unidentified
MIYCGIDWAERTHDVALVDDSGQLLAKRHITDDAAGYKVLLDLLAEYGDTEEHPIPVAIETSRGLLVAVLRQGKRKVFAINPMAAARYRDRHSVSRKKSDQGDALVLANILRTDMHAHRVLPDDSDLARAIAVLARAQQDSTWNRQQISNQLRSLLREYYPAALAAFESWKNGLCRSEAHEVLKLAPTPTRAAQLTRAQLQAALKRAGRQRGIEAETERLREVFREDYTHQPALVEDALGKQMLALLVQLQAACTATDDLAQAVEEAFPQHPDAEIILSFPGLGVQLGARVLAEIGDDRGRFADARGLKAYAGSSPITRASGKKASITRRWVKNDRLNHAGYLWAFSSLRASPGAMAHYRRRRDEHGDWHAAAQRNLFNRMLGQMFHCLQRRELFDENTAFPTALAAAA

SEQ ID NO: 250078 - protein, 366 aa, unidentified
MKKHTSNNQTARKGTAKETFAFYIGIDLGDKKSDICVLDEQGELHDQFRLRMNAQELQTYFGSLARSRVAIEAGAQSRWVAEVIQRCGHQVYVSNTRQVPYIHQSDAKNDPGDAYKLAELVRFQPRLLHPIQHRSQEAQTDLSWIRAREVLVRSRTQIINAIRGMSKAFGERLQKCSTASFTGKRADRIPAQIRSAVAPLLETIDHLNEQIGYYDQMIEQVARTRYPRHRLLDQVQGVGVHTALAYMLTIGEPERFDKSRAVGSFLGLRPKQKDSGERKPQMGITKAGDEYLRKTLVNCGHYILGPHGADSDLRRFGLRICERGGKNAKKRAVVAVARKLAVLLHRLWISGEVYEPLRNRPVAAAA

SEQ ID NO: 250079 - protein, 375 aa, unidentified
MGNHSEAFVAFDTSKLRNAVAIAEAGRAGEVRFFGEIENTEAATAKLVKKLAAKYQHLTFCYEAGPTGYEVYRQIKSLGHECIVVAPSLIPKKPGDRVKTNRRDALSLAKLLRAGELTAVWVPDRGHEAMRDLTRARETTMMDLRSKRQQISAFLLRQGLHYSEGKKTWTKTHMNWLASQKLEYAEQRLVFEEMMLAMRQAQERLERLAQAIRVAVPDWSLAEVVTALMAMRGIDLISAATFLAEIGDLSRFQHPSELMGYLGLVPSENSTGDKIKRGPITKAGNRRARRMLVECAWSYQHPPRVGQEKQEKVAAAPRAVREIAWKAQCRLHGRYRALVRRGKLKTVAVTAVARELAGFIWAVSRAITTARAVAK

SEQ ID NO: 250080 - protein, 452 aa, unidentified
MAKLAKKKQTAKGLRFEVVNPNAAGIDISPKEMQVCVPADRDGDCNRTFDVYTEDLHYIAEWLKACRIDTVAMESTGIYWLPVFRVLKDAGFDVILVNASDVKNYSGRKTDADDAEWLMMLHSYGLLKPCFQPENIARTMRNLIRHRDNLIRSASREVLHLQKAMEQMNLKLDNVFSDILGKSGQAIIKAIISGERDPKKLSALADPRCKTSKEEIEKSLQATWDEEHLFEMKQSDTLYQTYQQLIAECDDKISEIATKYAAMVDAPKAELLRSGKYNTKKNQIGFDVEKAAFELWGVNVMRIPGMSRASLLRLLGELGQNFTTKFADVSHFLSWANLVPNNKISGGALLSSKVPKKKNPVGIVFRQAANTLKAAKCPLGDYFRHIRAKGGHLQAMVATGKKLASIFFIMVQRKVEYDENIYANQRKAELQNKVLHLQKRLTRMQLELANCG

SEQ ID NO: 250081 - protein, 356 aa, unidentified
MSKILEDHYVGLDISDKTTAVCILDAVGNIVKEGFTPSEPDDLAKFLDDSGYEFRLIGLEASGIAIWLCRELLARGFQVVCVETYRSSAFLAAQKMKTDKNDARGLAQMMRCGLYRAVHIKSDESQRIKMLVNNRRFLVEQRVDIENQIRGSLKVFGLKVGTVSEKQYDGRVRELIMGDGELEVAILPLLEQRASGVERIKALEQMLATAAKHDPVCRLLMTAPGIGHLTAILFKAVIDDPARFKRSRDVPAQLGLVPRKYASGETDYNGRITKAGDVMLRHHLYRAAATLMQTNARPCALKKWGRNLRNRSSYKNSTVAVARKLSIILHAMWVSGQEFDWSDSPMSHSDELSNTA

SEQ ID NO: 250082 - protein, 341 aa, unidentified
MQHVAIDLGGRESQLCARATDGSIVKESRVCTKSLPQMFTTMEPSRVILETSAEAFLIADAALASGHQVRVVPATLVKQLGVGARRVKNDRRDAQVLSEASCRIDLPSVHVPSALARELKSLCGSREILVKSRTMLINNVRGWARTQLIRVRTGSTPTFQDRVRDYAQTHQIAIPDHIERQLVVLDSLKLQMKGADQQLATLASAHPVCQRLMTTPGVGPVTSVRFMAALDDVTRFRNAHAVQSYLGLTPGENSSSDRKQHTGITKAGAMEVRRVLIQAAWAAMRSAPNEPMVRWATQIALRRGQFIAVVALARKLAGILFAMWRDGTSYRRCPSKEVMPT

SEQ ID NO: 250083 - protein, 343 aa, unidentified
MKLSRIGIDLAKNVYQLHGVDCHGETVWKRRLRRHQWLQVLLDKAEPGCAIGMEACAGAHHWARELQSRGYTVRLIAPQFVKPYVKSNKNDANDAEAICEAMSRPNMRFVTMKSVAQQDIQATHRVRTELKEQRTAKANQIRGLVAEYGLVAPQTLLALRRAIPCWLEDADNGLTDYFRSLLHGLWGDLVALDDRMIELDKQIKTLADSNEVTRRLQQLRGVGPLVATALIATVGTGEQYKKGRQMAAALGLTPRQCSSGDKQRLLGISKRGDVYLRTMLIHGARAVVSQAKHRDDRLSLWVTGIAKRSHPNVAAVALANKTARMAWAMLRNDSNYNPDFATS

SEQ ID NO: 250084 - protein, 483 aa, unidentified
MAKRDKSTFERLRADRLNRKQKRELSRKVADGDPSLSIVNPNAGGIDVGNESHFASVPSDRDPNPVHEFGCWTSDLIRMAEWFVSCRIDTVAVQATGVYWIALDEVLTRHGIRVVLVNARNTRNVPGRKTDVQECQWLMKLHTYGLLRDSFRPSREMEGVRTIWRLRDRHVAEAGRAVQHMQKALTEMNIQIANAISDITGVSGMKIVTAILDGQRDPYILADLRDKRVRASREEVARSLEGTWREDLLFELDQALKSYRFIHKQMEECDKRLEGYLKKLPNVPAVPLAAENQQPAPKKTKKTKKVRDNQPRIANLEEELTRICGVNLCSIDGISVITAQTIVAEIGTDMKAFATEKNFTSWLGLTPGKDFSGGSVVSKGKRKVKNRVAAALRMAATTLLKSDSYLGARYRHLRRQLPSKKAAVKAMARHLGELVYRLFTHGQAWVDRGAAYYEKRRKEIDLARLTSLAGAKGFRLIPFAQAS

SEQ ID NO: 250085 - protein, 320 aa, unidentified
MEQHSRQQTAVKAAGIDVSKARLDVAVAGGESFVVGNDREGHGAIARRLAQLGVTRVGLEASGNYEAPVAARLRQEGFVVIVLDPAQVHGYRRFRKKRAKTDPIDAALIAAVTASVEELRPPPDPRLIDFAEELTLIEQIGEDIARLKTRRERFTAPVHQRHLAREITRLGTLQKLLRARITLKLSRHDDLKRRYDLARSIPGIGEIAALAAIIRMPELGQMSREQAAALLGVAPFNVDTGKHQGQRHIAGGRARLRKVFYLAAFAASQRWNPDLVSLHKRLSANGKSFKVALVACVRKLIIMLNAVLARGTPWLAKTTP

SEQ ID NO: 250086 - protein, 448 aa, unidentified
MSNAAAPVAAAPSEPEWAAFAAIDWADQKNFWRLTPAGSRQSESGELDNTPEAVEVWAANLQQRFGGRPIAVILEQTRGALVYMLTKYPHLVLFPVHPTTAARYRETFAPSGAKSDPSDTDSLLDLLLRHRERLRPLRPDTVETRLLHFLVEERRQTVDEKTRANLRLTDCLKLYFPQVLRWFDDVTSPLVGDLLERWPTLEQLQRVHPGTLRRFLHEHNCRSEEKNAERIAAIQQATSATQDQAVREACVLIAHSLVAMLATLRAQIGVFDQRIAELVADHPDGALFRSLPGAGDALVPRLIVAFGTQRDRYQSAYEMQCYSGIAPVTEASGNSQWVHFRFTCPTFLRQTFHEFAGCSIQQSEWARAYYDHLRNDKNKSHHVAVRSLAFKWLRIIYRCWKDGKPYDEAIYMQSLRRRGSLLAGILGTPTGVGWKSVAGFQKLSENSA

SEQ ID NO: 250087 - protein, 403 aa, unidentified
MSPEHSIDIFLGLDVGKSEHHACALDRDGNKVFDKPLPQLESELAGVFHQLQKLGTVLVIVDQPNTIGALPIAVARDCGCEVGYLPGLAMRKAADLYPGRAKTDKRDAFIIADTARTMPHTLRAVDRNDEVLSALKMLSGFDDDIARDCTRTVNRLRSVLTQIYPSLERVFAGSTLTRTPILELLIHYKGPQGLKRAGYQRVLNWMIKRTRKDPTPLVDDIFTALKAQTVTVPGSDAAELVIPQLAANIQALKEQRNTIAEQVEEMLADFPLCEVLMSMPGVGIKTAAQILLAIGDGSDFASAGHIAAYAGIAPVTRQSGSSIRGEFPARSGNKRLKNALFYSAFAVIRSHEPSRRYYQRKRAEGKRHNAAVICLARRRCNVIYAMLKNKEFFREIPPRPVAA

SEQ ID NO: 250088 - protein, 354 aa, unidentified
MLAELVDAVVGVDTHRDTHQVEIALPNGAPIACTTISNDTSGYAELLAWIVDHTPGPRLAVSIEGTRSYGIGLARAAAAAGLVVLECEQPHRKARRGKGKSDPIDAHLAVLAALRLDADRLPTPRADGDREALRILLSARQELTTASTAQTNRLRALLLGGDDTDRTLARGALTEARLASLARRRPPREASREQAVRHAEIRRLALALREAARALKANRAQLQTIVNDVVPRLIERPGIGPVSAAQAIVSFSHPGRCRNDAAFAALGGVSPLPASSGRTVRHRLNRGGDRALNRALHTIAATRMRSCPTTQAYVARRTAEGKNPREIRRCLKRYIARQLYRTLATAMTPAAETS

SEQ ID NO: 250089 - protein, 360 aa, unidentified
MNALKVNLGIDAAKDNCECNLSKLTSQLDVKVIASKIFLNTDHGLKELLKWLIKNTPAECSQLHVVIEASGVYHERFALGLQDAGYCISVVLPNKAKKYMEALGLKSKNDRIDAKGLARMGCEQKLEEWSPLSPFYQKLRTYTRLHEDIQQKKTETTNQLHALKHSAVQMKDAIKILERLVEVFDKELFKTKKLIEDQIAGNAEVKERMDKVCDIKGVGTLTVATVVAEANGFNLIKNIPQLISYAGYDVVEDQSGKRTGKTKISKKGNAHIRRILHIPALNMMTYKVGAMPALFERTLNKHGIKMKSYVALQRKLLVLIYTLWKNNKSFDENYHKDTSARVQEAEASSRLSLEEAGKAA

SEQ ID NO: 250090 - protein, 337 aa, unidentified
MKFSGIDLHSNNSVVVVSDEEDRIVYQKRLPNDLGQIRAVLEPHRDQLAGVVVESTYNWYFLVDGLMDAGYRVHLANTTAIKKYEGLKYSGDFADAAYLAQLLRLGVLPEGYIYPRAERAGRDLGRKRMQLVRCQTMQILAIENILARQTGGRMSSERVKRLTAKQVEGLGLVPDVALALEANRAVSEALQQQIAVLEKRLKQRVKLRPEYRLLKTVPGIGETLATTIMLETGTITRFASVGNFSSYCRCVDSRRESNGKKKGEGNAKNGNKYLAWAFVEAANFALRYCPEAKRFYERKKRKSNRIVALKAIAHKLARACYHMLREQKPFDVQRCFM

SEQ ID NO: 250091 - protein, 535 aa, unidentified
MTSVTAINCVVASFRCKSGLDPDGEVVKESLTEPSLADEFIEIKDGWTMARRKKKSTYERLRDGERLKHWEHKEVARQFQSEDPGWEVVHSKVAGIDVGNGSHFAGVDPRLTQQPVREFGSWTAGLQAMADWLKNYGVKRVVMQTTGVYWIAVQEVMEANGFQVAVVDARGTKNLPGRKSDVQECEWLRKLDTFGLLRESFQAPDKIRAIRTVWRLRQRLVTDAGRSIQQMQKALTSMNVQLANCISDISGVTGQAIIRAIVGGERDPMKLAQLRNGMIRASEEEIARSLEGNWREDLLFELEQVLEAYDFQQKQIAGCDERLKKYIGEQPTRELGGGLESAGGEGVAEQKKRGRKKKAQPKPLKNQPAFDLSGELRRVMGVDLTKIDGVKVMTVQTIYAEIGADFSAFRTEKHFASWLMLAPKRDVSGGKVIKHLSFSGNNRVANGLKMAAQSLKESDSYLGARYRSLRGRLGGERAVKAMARYLACLIYRMMTKGEAYVDRGAAYFEKRRQDRDLLYLQGKAAAMGMQLVARA

SEQ ID NO: 250092 - protein, 419 aa, unidentified
MSCLTGPAGADPSDRKGSTIMTNQQQNLGGVDSHRDTIHVAVITEVGQPVADREFPTTTAGYRRAVAWLIEHGPLQAVGIEGTSSYGVGIATAVTAAGIRVIEVNRTRPAERRKQGKSDQLDAYRAARSVLSGEASTDPKRASIEPLRGLNVARRSAVKAQQAAARQIGARLVNAPAHLRDRYRDLPEAKVVAALANTRPDQLHDIDDADILFVLRSLARRHRDLGEEITSLQDRMQARATTANPALLAIKGVGPVVGAQLLITAGDNPDRLRTSASFAALCGTAPIPVSSGRTERHRLSRGGDRNANAALHHIVKNRMSNDERTRDYRDTHLAKGWTTKAVYRALKRAVAREVFSALAGHCAMPDYTDLRPARRAKNITLTAVATALSVWPARVGELELGRRRDDDFANRYRAWLNAA

SEQ ID NO: 250093 - protein, 408 aa, unidentified
MTVVGIDVSKGKSMVAAMKPGGELVAAPYEVRHSDIELSHLALDVLCMEPDTRVVMEATGRYHEPVAALLHSEGIFVSILNPLLIKQSGAGSLRKVKSDPKDALKIAKYGLDNWSTLREYTPMEAIRQQLKLCARQCDLYNKNIVMLTNNLISLSDKTFPRVNELFSSPEKADGHLKWVDFYRSFWHCDCINRMSPNAFEERYKKWCKRKGYHFSTDAADALYAASCGSYTTLPRDNNAKLLVTVAADQLIALRENQSKLEAEMLNVCKQLPEYETVMAMYGVGKSTGPHLMAELGDVRRFPHRSSIVAFAGVDPGVVGSGKMQLFSVTTSKRGSPQLRKALFQVVSTYVKCKPENEAVYQFYAKKRDEGKPFFVCTTAAANKFLRIYYARVKECLNAAESATQVEEG

SEQ ID NO: 250094 - protein, 399 aa, unidentified
MLDALSLQLRVGVDVGSRFHTVAIGLSDGSLLEEFEISHTAEGFREFFTRIEACDRCHAVPIAVAMEGYNGHVRPLDSLVRARGWQLFNVNNLKLARFKEIFPGAAKNDRIDSRKTLELFQLRDHLPMAGEVLQEVMAAPEENDVLKRLSRRRRRLVNERGRVANALQADLQAVCPGLLDITRDASNFWFLNFLTCRKGLIKLARVRRTSLLIVPGIGATYAEAIEAWQSRAYFAPDANLVGDMIQQDAARILALKQQIKALDQQMAHVAGTSSLAGQFASIPGYGAVCAAELAGEIGTVKRFRNEASLALYLGMATLDNKSGKVRRSKPPRHVNVRAKAAMMIAVDHHRKLVPQSQTYYEKKRAEGKTHNQAIRALGRHLCRVIYKMLTQNRTYRINS

SEQ ID NO: 250095 - protein, 357 aa, unidentified
MKKRLNADRIDVNGKTVNVGIDVHKQSWQVTALIEGVVVMAVTIKPSYGVLQKLLAQFKGARIRIAYEAGPAGFNLYDDLTADGIECIVVPPSLLPVESGNRVKTDKRDSRKLAEYLEKNLLKRVYVLTKQERAHRQFVRTRRQLSNHRTDVMRQIKSLLLFHGIPLPGVDAGFWTPTFLASLRAVETEEYLSRSLNTLIDLYEYLTQQVKQLTKEVRGLARTEKYEKRVKLLKTIPGVGMLSAMEVLTELQDVSRFSTADQLAAYLGLTPSQYSSGQMVRMGRITHMGNHRLRTRMVECSWILIKKDSELHKTYEAIKKRRGGKRAIIAISRKLIIRIRRILLDEVSYRTEFASAA

SEQ ID NO: 250096 - protein, 397 aa, unidentified
MYIVGIDIAKRKHEAAVIDGEGAVIIKPFSFTNNCSGYNRLLAMLAKAKLPLDEVSFAMEATGHYWLALFTRLQKEGFRVQVINPVQTNSIRSFYIRQAKTDPRDALLIAEVIRFGHFSESTLHPENIYELRELCRGRHAIVSMQADVKRKVVALLDQVFPEYETAFTNLFGDTSMAILQTCPTPKELSEMPFEELCHLIEVSSHKRFRMAKAQELQELARNSFGFAMAGDVFSTMIRLYAKHLNFLKQQVREMDRKIAEIMDTLDTPITTITGIGPTLGAYILSEIGDISRFSSAAKLAAYAGIDPTMRQSGEYNGVRNRMSKRGSPYLRHAIWLAASSAVLHDPALKLYFQKKRDEGKPYMASVGHACRKMVSIIYAVMRDNKAYTPCIPNEISA

SEQ ID NO: 250097 - protein, 381 aa, unidentified
MTDFEGARSKACYAAIDLSKSKWVVAIDTGDALKPTVHVLPGFDTDGLLDLLSTSARETAGSSQHPADVVVCYESGYDGFWLQRLLTAEGHRAIVFDPVSFPVNRRAKQAKTDKIDAKQMVRFLKTWVESDPTICTAIRIPSPEEEDAKRFHRERGALVAERTRLAARCRALLALEGVHDIAPLAVTHVRRLDGLTTHDGRPFPAQKLAEVRRIFRRIKFINELIREVDAERDEAVQKDDARFPEAEKALQLERIKGIGRYSACLLASEIYHRDFTNRKQLASYLGLTPTPRASGDVEKCVGIDKAGNKIARTLLVELAWNWLRFQPDSALSKWYRTFTATRAPSSKKIAIVALARKIAVALWRYVGSGLIPTGVVMKAEA

SEQ ID NO: 250098 - protein, 394 aa, unidentified
MAFKIFRKNCCGLDVHKTWIYACIGITDTNGRTEYKQARFSSFTKGLQELADWLAKYDCNDVCMESTGKFWIPVFNILEKTCWVTLAYPKYTKPQKGNKTDHKDAKWICDLYMCDMVNPSFIPPPDIRQLRDLMRYRSKLTNIMTSEKNRALNCLTVSNLKLDDVFSDVFGKSSRSVIRYILEHPGETFQVAPFIDRRCKHPVEEIQAVIDGTISHQQAVKLRECLQHLDELEVHKTNVEKEILCLVQQYPYQLELLQTVLGFSGNIMTAIALISEIGADMSVFPSAKHLISWAGCCPRNDQSSKKVKSTRISRAGVYLKPLLVQVAIQPFTANADKLSAAGALEIRCQICDGRFLSMWAALFIFLGCPLSPCPKNLHVHNGRIVILASVAWIF

SEQ ID NO: 250099 - protein, 353 aa, unidentified
MDRYIGLDVHSQTCTLAVLGPTGRKLRLQVLETTGPALIQAVRAIPGPKHICLEEGTQSAWIYELLEKEADELVVTMAERRGGSKDDARDALQLAEALRTRAIKRRVYKACGPYSELRAAVRSYGLLRDDLARTKNRLKALFRSRGMLTGDDVFHPEKHLRWEKKLPTPQQQSAALLYAQVELLTKLWAAAEERLLAASKPHSIIKVLSTAPAIGPIRAAQIVAIVVTPHRFRTSRQFWSYCGLAIVMRSSSDWVRGPHGDWLRSNVRQTRGLNRNRQPTLKSIFKGAALQLATQMTNHPLHADYQRLLDAGTKPNLARLTIARRTAALVLSMWKHEEVYDPAKQRSHIIAQA

SEQ ID NO: 250100 - protein, 373 aa, unidentified
MFSLPVFVGLDYHQKIIQVCVMDQNRKILANQSVENDPAAVLRVVAPFGANVHAAIEASTGAAEFAEQLLHLSNWSVELAHPGYVARMKQTPDKSDWTDARLLADLTRAGYIPRVWLAPKPIRELRDFVRHRHGLVEQRKQVKLRIRALLRNHRIICPFSPWTIKGRKWLLDEANISSSRTLYLIRDHYDTIDFFNKKISSVTEKMQADVVNDPVVKQLLQQPGIGIITAITMRALIGRFDRFRTGKQLANFCAVCPRNNSSAGRTTTGGLIKAGDELLRIVLIETAHRLIRYNPYWRDMATRLRASGKKTCVVVAAVANRWIRKLFHQMRNPEPFDEVAVGFLRHGQKSTGVFKNPSDTGKRTSLGTGKLGT

SEQ ID NO: 250101 - protein, 414 aa, unidentified
MLFIGDDWAEGHHDVVAQDDAGKALARRRLPEGADGIARFHEMVASCLGEDAEPDPARVVVVIETDRGPWVKALAAAGYRVYPANPKQAARHKETIAVSGKKDDFFDAGALADMGRTRRHQMRELAADSDIAEAVKIAARAHQKLVWERTRHLLRMRSALREYFPAALEAYAGLSLTGPDTLELLRKAPDPASAARLTVTQVTAALRRAGRRGALDERARDIQAALRAPHLSQPAVIAEAHAASVQAGAAVIAALNEQCKVMEAKVSEFFRRHPDAGVYLSQPGIGDITGARILGEFGDAPGRYASAKARKNYAGTSPLTIQSGKKKTVHARYIRNRHLIDALRAQALSALIASPGARAYYDELRAHDTGHDDALRRVAGRLAGILHGCVKTSREYDETTAWSHRPEFPQAARP

SEQ ID NO: 250102 - protein, 407 aa, unidentified
MSQNKTDPDRFVGLDVHKHYLIAVAVDADKQEVIGPRRVPLVRLGTWVQKTLTPQDAVVLESTTNAFQLYDDLVPHVHSVTVAHPSHVSLITRAQVMTDKIAARTLAKLHAVGLLPSIWVPPLAVRDQRALVAQRTKMVRLSTQAKNRLHAVLHRHHLLPPAGKLFEPEMHEWWLDLEVSALERARIQCDLDTLVFAQGQIEHLEEVMVSLSVEDERVLLLLQLPGVGLITAFTLLAAIGDISRFPLAKHLVGYSGLGARVHDSGQTRRTGRITKAGRRDIRGAMVETAHTAVRSHPHWQAELERLEPRLGKNKAMVAIARKLLVAVWHCLSKGCADRFSDPERVARKLLHHAYRLGPTRRPQGQTAAQYVRQQLDRLGLGAELAAIPLGKARRIVLPPSQLGANAN

SEQ ID NO: 250103 - protein, 394 aa, unidentified
MFIVGIDIAKRSHEAIITEDGQVVRKAFSFRNNCTGYNLLLEQVRRLTLVKSQIVFAMESTAHYWLALYARLLKDGYTVMVLNPIQSHSLRELYIRKAKTDARDSLIIADLVRFDRCKASNVPQDKILALRELCRSRAYLVDMAADLKRKLIALLDRIFPEYESLFDSVFSKASIAVLRKYSTPQKVKNANLRKLTDILMESSNGHFGEWKAHQLKEAACSSFGIDDSGGVYSTLLGMFLEQILSLTAQADSLEKQISVFFQEFNNPLTSIPGVGTVLAATILSEIGDITRFSSADKLLAYAGLDPSVKQSGEFKSNQNRMSKRGSPYLRRAIWLASTVAVHRDPMFQTYYEKKISEGLHYMNVIGHVSRKMTAVIFAVLRDGQPYQPILQSAG

SEQ ID NO: 250104 - protein, 341 aa, unidentified
MTVIIGVDPHKSTHTVVAIDRAERPLARLRLVAERCQTQRLLAWAEPLGTERTWAVESAGGLGKLLAQQLLGAGEHVIDVPPTLAARVRLLGSTKGSKNDSNDALATAIAGLRHCGLRAVRVEDHTAVIRMVIDRYDDLVALRTQAACRLHVALRELIAGGAPRRLGASRAARLLQSIRPQGAAGLERKRLALELVADLRRLDRDIASAKRRVSDAVTASDTALLELHGVGPIVAGFILGHVGDPARFPTPQRFASYNGTAPIEASSGPRKRHRLNPRGNRKLNHALHLAAVTQVRHDTPGRAYYQRKIAEGKSKKEALRALKRRISDAVWRQLQIDLGRR

SEQ ID NO: 250105 - protein, 353 aa, unidentified
MKPRKDFSTAPLAVIGVDIGKEVFHIVGLGVDGKIAFRKKIRRLGFEDAFEKLPPSIVGMEACLSAHFVSRVLRRLGHEPRIIPAIYVRPFVKGQKNDYNDAEAIAEATLRPNLRAVQEKSQDQLDLQACHRVRSRLVSRRTATINQIRAFLIEQGITVRSGARALRNSLFAILENRRDEISPRMASLILGLYEDWCRLDKRIETVTSAIEELSQVEPKCQRLMSVPGIGPIIATGIVAAVSMGEAFECGRDFAAWLGLVPRQHSTGGRSVLGRISKRGSKYLRTLLIQAAKVLLMRPHNWPRYSFGAWLTAAASRLHKNKLAVALANKLARIAWSVLRNETAFDTHLEAAAI

SEQ ID NO: 250106 - protein, 322 aa, unidentified
MFKESRYLGVDVAKETLAVAFERQRWQWPNTKEGHRQLIAQIRKLAQRGPIHVVCEATGPYHLAMCLALQNAAIAVTISNPMQIHHFGRSEGQRAKTDPIDAALIERFGNARRPPADPPLCPQLLALNELVNHRRQLVELLKALRTQRQQVLSAAVGQEIERSIALVQDRIEALQEQMQKLIDANAAWQQRLKILTSTKGVGFLTAVILLVKMPELGALNRGQCGALAGVAPYDRDSGNQRGRRSIKGGRAEVRSALYMAALSAIRFNPHFQNFHQRLLKANKPFKVAITAVMRKLVLYLNALCKHAALTSSSTSALLSLQH

SEQ ID NO: 250107 - protein, 298 aa, unidentified
MAKAYLDAAMGSEKRRLANDGTGHRQLINWIKQMETNVQVICEPSGGYERMLIQALVGAQVKVSLVQANRVRQFARAAGILAKTDSIDAEVLCAFGQAMRPQTLSASKLQQEHLRELESQRRHLSRLLVMEQNRGARLGDSSVRTLNRSLTKQIQKQIERIDLLITEHIAGSQELSAKAHKLTAISGVGPHTAALLLAQMPELGQLNRREVAALVGVAPFNRDSGKWRGKRTIFGGRRHVRHGLYMAALVAARHNPILRAFYQRLRAAGKPAKLALAATMRNLVIALNSVLKPDPIYA

SEQ ID NO: 250108 - protein, 432 aa, unidentified
MSIQSLPVASNPVLRGCAMLKIVYRVCCGMDVHKSFVVACIAATNEQGVTTYKSKRFSTFTGDLRRCAAWLAENNCKDVCMESTGKYWIPIYNILEHTCNIVLAHPKYVKAIRGKKTDKRDAKWIADIFKHDLVAGSFIPPPDIRQLRDLVRYRWKLTNFTTGEKNRAQNCLTVSNFKLDDVFSDVFGKAASAITARILEDPTEKITDISGFRTKGMKATDEQVLAAVDGEMCAEQAEKLRIIRSHMDSLELCKLNLESLILSTAEKYLPQFNLVMSAPGIQSFAAIGIISEIGVDMSVFPTSKHLCSWAGLTPQNNESAGKKKTTRISRAGAYIKPLLVQCALCAIRAKQFPEVRNRYLALKKRRGHKKAIIAIARMLLTAIYNMLKKNEPYNPELYRQADRPPTHREVSVEEAIFILQRQGYLVTAPSVT

SEQ ID NO: 250109 - protein, 352 aa, unidentified
MRILSLDLSKYKTVACDYEAETGRHQFATALTTPKGLHDLIVDREPDRVVIEICSIAGWVCDLVRSLGIEMLVASTNDERWQWRKVKTKNDRRDALKLAQLSARNELDLVHVPQSEMRQWRALIAYRHHLVQRRTKIKNHIRELLLREGQLLPRQRSAWTQDGLAALEAMGKPLGEVALDELWRGELEVELAQFKAVQKQLTEAVAKLDALGAANHNVRLLQTASGVGPRLAEAVVTMFDDPRRFRRSGSVSAYIGMVPKQWDSGETERLGHITRHGNRLVRSLLVEVAWCALRHNPWARETYQRISGGKKSRKKIAIVAVGRKLLVRCWAMLRDQTAWRVSEPRAVATGSR

SEQ ID NO: 250110 - protein, 302 aa, unidentified
MEAAVWVGIDVSKARLDVALGAEGELFEVANDQRGIAALLARLSQPALARVVVEATGGLETALVAELGAAGLPVVVVNPRQVRDFARATGQLAKTDALDARLLARFAERVQPPLRALPTPAERELKAVVARRRDLVEMLTAERNRLGSAPKVLHREITAHIRWLEARLKERDRDLDRKLRGVPGVGPVLCATLLAELPELGRLDRREVAKLAGVAPLNHDSGRLRGQRTVWGGRAPVRAALYMATLSAVRFNPALKAFYRRLRSAGKPPKLALTAAMRKLLVILNAMLKHRTPWSPPCPVAL

SEQ ID NO: 250111 - protein, 344 aa, unidentified
MLYVGMDISSKSFVVHAINERKKVVLKKQIAPSRKELRGLVRELGREPKLFVFEAGNQLKWVADALKSQEGVSLHVVHPNEVKWISASSGKTDKVDAKKLAELARGDLLPRKVHLVEGKARKLRELLGARTQIMQKRVSLINTLRGYAKQEGKHLGEKFFAQKDWEERLMQMNLSETLKTIVIVFRESIEALKGSELELNERIAEIENAQTKLLETIPAIGVLSSRTLVAALDDVKRFDNRKAVAKYGALTPTIYQSGEVVHLGRINRNGRHEVRRVLLQCAHLLARMKSPAAKPLREFYERLARRSGKKKALVALARKLLTVAYGVLKSGLPFDPAKLLPQGA

SEQ ID NO: 250112 - protein, 406 aa, unidentified
MELTPIYKRVIGLDVHQAKISACAVAEQPDGTVTVERCEFGAFKRDRRALADWVRAFGPDVVVMESTGIYWKSPYAALEAVGIVAWVVNARHVKAVPGRKTDVGDAQWLATLARAGLLRASFVPPADIRYLRLIARQRQKLGGMLASEKNRLHKLLADAGIRLNVLVSDIHGQAGRAMVKALIEGKSMPEILNLAGRLRATRAELFEALQPEELSNSHRFVLQEIMAHIEELEARMARFEHALLQGLTRWQAQLVLLQTLPGIDRMGAAMLLVEISADMDSFGSAEKLASWVGICPGNNESAGKRKSGKTRKGNAWVRRLLCEFAQAAARSRCALKDKFAALSIRKGHKKSIVALAHKMLRIIFAMLKNNTPYHDKVVNYEALSVQRNAPRWIKMLVKHGFLPANA

SEQ ID NO: 250113 - protein, 345 aa, unidentified
MNMHMVRRPEDKRKNLVVEEFDHYVALEWSLQAMVIAHMGRRQKEPVMFEQSSNLRALKEYLARLKGRTILVFEETTTAQWLYLELRDSVERIVICDPHRNRLLSEGPKTDKIDARKLCLLLRSGLLKEVFHSSDGLYELRCLVSAYTDVIQAGVRAMNQRSALNRGHSDQTTHASFIVGHLDKSIELYRQTKEQYEAKFDEFCRQNKQLKFLRDVSGIGTIGAVKILATVVDARRFPSRGHYWSYCGLVKHEKYSGGRSYGRRKGQYSRTLKSVYKTAAMAAIGGNNPIREYYDYLLANGVAEHNARHAVARYVSAVTWGILKTGTRYEPYRWRTHRTQNRVTS

SEQ ID NO: 250114 - protein, 319 aa, unidentified
MTTNSVVVGVDVAKERLDVAVRPSGEVWSEANDEAGITALVTRLRPLGPALIVCEATGGFERAAIAALAAAGFPVVVANPRQVRDFARATGQLAKTDRLDAGILALFAERVRPTARPLPDAAAQLLDAVLTRRRQLLEMLVAEKNRLGFAPKPLHRGIQAHVRWLERQLEDVTKELAGLIEASSVWRAKDDLLQSVPGVGPIVSYTLLGELPELGTLSHKQIAALVGVAPLAHDSGTLRGKRLVWGGRASVRTALFMAALCGRRWNPALKRCYERLKASGKPAKEALIACARKLLTILNSMVRDDKRWAVPAPSVQYSC

SEQ ID NO: 250115 - protein, 344 aa, unidentified
MDHFAGLDVSVKETSICIVDDAGKIVREVKVASEPEALLAVLKNLAYHFKRIGLEAGPLSQWLFSALAEAGLPVICVETRHMQAVLKAQINKTDRNDARGIAQMMRAGLYRPVHVKTIRSQKLRMLLTHRKLLQSKAIAIENDLRGTLRNFGLKVGMVGKVKFEARIRELVENLPDLAVLVEPMLIVRRTLREQIVILHRRLLAIVRDDEVCRRLMTIPGVGPVVALTYRATVDVPARFRKSKAVGAVFGLTCAKYQSGEVDRNGRISRCGDEMMRVMLYEAAQSMLRSKKWSWLKAWAMQIARRRGMKKAIVALARRLAVIMHRIWVDGTEFRWTREQATAAA

SEQ ID NO: 250116 - protein, 373 aa, unidentified
MKKVRFLGLDVHAETIAVAIAEPDGEVRSLGIIPNREESIRKLVRKLGPAEQLQACYEAGPTGYVLYWQLTALGVKCEVVAPTLVPVKAGDRVKTDRRDATKLARSYRAGDLTAVWVPNEEHEALRDLVRAREAAKQDQLRARHRLSKFLLRHGRRAPAGIKVWTQKYQEWVQQQVHFEQPAQEYTLLDYLHEVEHMADRIRRLEQAIEEAVKLAPQRMQEVIQALQALRGIAQISAVTVVAELGEISRFEGARQLMGYSGAVSSEHSSGKRIQRGSITKTGNAHLRRIAIEAAWAYRHRPAIGAALRKRQEGLSEEVKEIAWKAQHRLHKRYRSFVAAGKEKQKVVTAVGRELLGFIWAIGVQVERNSKRVA

SEQ ID NO: 250117 - protein, 342 aa, unidentified
MQHVAIDLGGKESQVCVRAADGQILHEGKIATLRLPQFLRRQAPSRVIVESCAEAFRIADAAMESQHEVRVVPATLVRSLGVGARGIKTDRRDAQVLSEVSCRIDLPSVHVPTDLARERRSMCGVREELIACRTALINCVRGWARTQLIRFTPGDPRTFPARVRKATLQRLDGLPEYIERALKTLETLNEQLLAADKELEQLAEQDPTCQRLMSVPGVGPVTSLRFVAALDDISRFPTSHAVQSYLGLTPGERSSSERQQRTGITKAGPAPVRRALVQAAWNLRRFRPNDPISLWAAQIEQRRGKFVATVAVARKLAGVLFAIWRDGSRYEPGHLRPSQPTT

SEQ ID NO: 250118 - protein, 385 aa, unidentified
MSQFSGSPQTALDYDSTIIGALELSEKKWVLAVQLPGVNRHSRHVLDACGDGLASFIERLKARCAASGRKITRVILTHEAGRDGFWLARFLVRRRIEVHVIQPSSLPVDRRARRAKTDIIDVEMLLRTLMAWLRGEPRVCSMVPIPSEAEEEARRAYREREDLTRERRSIVNKIGGILATLGVKGYKALRRDRREQLKCARQPDGDPIPQKARARIERLLDRLDLVLKLIARVESERDAVLKKDAPADEAEGMIRSLTELRSIGPDVATLLVREAFVRQFRNRRALGGYVGLGGTPFSSGGSAREQGIGKDGNRRVRAAMVELAWTWLRWQPDSALSVWFRARVGAMRGRIRKIMIVALARKLLVALWRYVTDGVIPEGAKLKAA

SEQ ID NO: 250119 - protein, 420 aa, unidentified
MDQLIERCSGLDVHRDTIAACVRVPGPNGKRQHEVRTFGTTAVELLALRDWLEAHAVTHIAMESTGVYWKPVFYVLEEAFTCLLVNAAHIKQVPGRKTDVKDCMWIAQCLEHGLLRGSFVPPAPIRELRDLTRHRKVLIQERTRAANRVHKLLEDAGIKLASVATNILGVSGRAMLEALVHGTTDAEVLADLARGKLRKKLPALRQALAGRFRPHHAFLVSQLLAHLDYLDEAIATVSEEVEGRLAPFAAQLTQLDTIPGINKRTAEVIIAELGVDMSSFPSDRHLASWAGICPGNNESAGKHKSGKTRKGNRWLRMTLIEAAAAATRTKDSALQARYRSVMRHRGHKKAVVAVAHAMLRAVYHLLAEGTTYREPGAAYYDRRHTHRVTRRAIQLLERPGVPCGFGTGCLTVSLDLREIF

SEQ ID NO: 250120 - protein, 501 aa, unidentified
MSCRLRDEQPGPKEERLREVTVNVQVNGTGQVPVRRLVGIDLGIASEHTVRVLDGAGQKVCAARCVPARESLLAMEARALAGTPAGTRLEVVLEPTGAAWFPVARFLSARGHAVYRVSSAKAADLRKFYRRHAKSNGIDAETLARLPLAAPDGLIELELAAGDEAVLDRRVRACDRLTQQAARHKTRIKDLVRQLMPMTPLTGDVGKADLQVLERYADPRALLAAGSAQLAALIRSASRGHQGQARVTQWVAAAQAAIELYGPDDPAVPFADLAAEVATEIRLLQAIEAELTAHAAAREAAYRTVDPGQIARTLPGLAEVGGPAMTAIMGKPARFPGGHHFKSFLGLAPRASETGETDRKGEPMTKAGPSLGRATMIRAADTARKLDPQLARIYYTQMTERGANHFKACCVVAGHLSLRLHAAMLRGAPYQLRDTDGTLVTPEQARQIIAANWTVPEDVRKRRRSRKTKRRTPQQAGKPVQRGDPPRPGSRPGHTPVNPAP

SEQ ID NO: 250121 - protein, 441 aa, unidentified
MENKISFEQIHANAAGIDVGSEKIFVSVDGVTVKNFGTCSSDYHDCIRYLQEHAIERVAMEATGVYWLSLYGMLESTGIKVSLVNPKQTKQQRGKKTDVQDCRWIQKLFAAGLLQESFVPEGKMLEIRYLVRERLDIIEMGSSYVNKMQRCLELMNIKLTEVISQIHGASGIRMIEAIIDGQRDSQVLLQLCDKKIIAKKAEQVLKALEGNYNETWLFMLSQNLNLWRQHQLQIANIDGRIESLLTELTAGKQIDSSQLGKVKPIRHHKPHIKDLHEIMVKLFGANLSSIAGINNYSLLRLIGETGTDMSRFPTIKHFVSWCGLSPGRNQSGKKSKWIKQAPCNKAGQIFLEAAQSLGQSKYTAIGCFIRKLKSRRGAGVAYKAGGRKIAEAYYNALTKGTAYVEQGAKQYELQIKQRELATLKKLAKKHNLQVIEKQKAA

SEQ ID NO: 250122 - protein, 337 aa, unidentified
MGVDTHKESLAACAVNEVGRPVAERTFANDSRGHKVLRDWLKELPEPRRVGLEGAANFGAGLARVLLEADEDVREVPSILTRRERRRTGRHGKSDPIDALAIARVVARDEQLPPALPSRASEDLKALVDYRDQLISERTRVQNRLHADLQILAPGYRAKVRRLTTRPQRARAAELLSAAPGIRAELAGRRLERLEELDADVAILTRRIETAVRASGTRLVSIVGVGAITAAKLLGETGDPRRFRSMGGFAMACGAAPIPASSGQTNRHRLNRGGNRQLNRALHTIALVQARVDSRARTFVDRKQAEGKTWLESIRCLKRHLADVVYRRMVDDLVAGT

SEQ ID NO: 250123 - protein, 360 aa, unidentified
MAITITEGPRRIVGGVDTHKDLHVASVVDEQDQVIGTRSFATTRQGYRQMLAWMLSFGELQRIGVESTGSYGAGLLRFMQQANVAVLEVTTPDKQDRRRRGKNDDLDAQNAAHAAFAGQRTVTPRSRDGMIESLRILMACRKTAVSARRVALQMIHNTIICAPDGLRDQLRSLTRMQLVRTLAAWRPDLTAYRDVDSAYRIGLKSLARRYLELHDEIADLDAMIAAIVDELAPNLVARNSIGHIGAAQLLLTAGDNPERLRSEASFASLCGVSPVPASSGKTVRHRLNRGGDRAANSALHIIAIGRLRTDHRTKDYVARRIAEGHSKLDAIRALKRYLAREVFTLITQRRREINATRIAA

SEQ ID NO: 250124 - protein, 411 aa, unidentified
MELLVARCAGLDVAKDEVVACVRVPDGRGGRAQEVRTFPTFTSGLEALAGWLAGERVTQVVMEATGQYWKPIWYVLEEGGFELLLVNARHVKILPGRKTDVCDAAWLAELLEHGLLRGSFVPPAPIRELRDLTRYRKRLIQAHAAEGQRVQKTLEDAGIKLDSVAADVLGVSGRAMLAALINGERDPQVLAELARGRLRAKLPQLRQALRGRFRGHHALLIRLALGHLEQLEGAIATLDHRVDEVIAPFAWARDRLDTVTGVGKRAAETIIAEIGTDMAVFPTAGHLASWAGRCPGNNRTGGKRRSGKPTKGNRWLGEVLIECAWAAARSRDTYLSAQYWRLARRIGKKKAALAVGHSILVIAWHLLTNDCDYADLGGDYFVRRDTDRQRQRAVAQLQALGYRVVLEPVAA

SEQ ID NO: 250125 - protein, 345 aa, unidentified
MQTMYYIGLDVHKRMISYCVKDGSGTIHAEGTIPATRFDLDRWMKTLPQPWTAAMEATVFTGWIYDHLQPHAAALKVAHPLMLRAIAAAKKKNDRIDANKICDCLRCDFLPECYMASTAIRERRRTLRYRNLLVRQMVQMKNKIGTLLMEAGVSYNKQRLHKTGYFRELLATNPDIDEGLRSLLRLCRETVMRLGKTESALVRSLERDRLLLDRVERLMTIPAVGPITALAWALEVGDVRRFSSIKKAISYCGLCGAEKSSGNTVQRTPLSKQRNKHLQTTLIEAAKMAPRYNPDLAMLYDKEKQKGNANRATLAVARKLVAYLMAVDRGQRNFQVMHTSNCIAA

SEQ ID NO: 250126 - protein, 360 aa, unidentified
MQEEAGAIKAVGKMGHDGFENWVERKREAGWEVYSCYEAGASGYWLHRDLEQMGVKNLVVAPKAMGQDKGQKTDRRDSAELVDQLDRYLRGNRKALSTVAIPTTEQEEKRALIRYHRQIMADRTRYEARGKGLLCAQGIEVQGQWWQPQVWKELKTHGRFQAWMQTRLQGWRGKLLSAEQEQQKLRKQIEALAPALLPKGVGAYSAVALEYELKGLARFKTARALSSFTGLCPGIHSSDGRGKEGSINRCGNAAVRWNLVEMVWRLVKWQPNYQVVRQLGAGLVRSKRARKRLVVKAARQLAIDLWRLETDESPPKSWAWSCSQPLRPSKTTPLSHSPKQTPAFRSLWQQRRVSVPRVGF

SEQ ID NO: 250127 - protein, 345 aa, unidentified
MELHTIGIDLGKTVFHLVGLNLRGEVVVRKKFSRAQLLRFTANIQVTLIGMEACGGAHFLGRALGEQGHEVRLIPAQYVQPYVKTNKSDYIDAEAIAEAVTRPTMRFVPIKTDDQLDMQSLHRVRERWVMRRTAVINQIRGLLLERGITLRKGRHHVDAALPLILEDADANLSGAVRLLLTQLKLDLDQLSVRIDEADAVIEKTAHENEACRRLVAIPGIGPVTATALIAAIGNGGAFHKGREFAAWMGVVPREHSTGGQQKLLGISKRGNSYLRRLFVQGARAVLLQRTKQSSGLSAWLAQLTSRTHRNVAAVALANKLARIAWAVLAKNEQYRPSVVADVAAA

SEQ ID NO: 250128 - protein, 274 aa, unidentified
MEYFAGLDVSMEETHVCVVDRAGKIILEARTATAPKIIAAALAKGPAVERVLFETGRTAPTLFHGLMALGLPVVCVESRQAYQALRSLAAHKTDRNDARGLAHLARTGFFKPVHVKSFPSHAVRALIIARKKLVGQRVTLENQVRGLAVAFGVRLLRGLSSGFAEKAMAAGHGVPGLDGAMQGLLAARDAILKAIVAINADMKSLERSSAACRRLMTIPGVGRLTALAFVAAIDDPNRFRRSRDVGAYLGLVPRRYQSGEIDYTYPSAEDRSLT

SEQ ID NO: 250129 - protein, 440 aa, unidentified
MQATIGVVIAKDWLDTHRLPEGIARRFPNSASGHRALIAWIGEAPVDRVAFEATGACHRALERALAKAGVAKVKVNPLQAGRFAEAIGQRAKTDPVDAAMLARMVALLDPALRQPTSEALHQIRELHGARHALVKDRTAAHNRQKNLTLDLLKRQAAQRLEQIDAQLEAVDRETRRRINADEALARRFTILCSIPGIGETTAFARLIDMPELGTLEPKQAASLAGLAPLARQSGTWKGRASFAAAAPSCAKRCSCRRSSPSASTPTSPTSIDASSEPASHPNSPSSPSCASSCRSPMPCSAAIEPGPRNSLDHHGYSSRLRKKGVVEALLSWVNGPDRLGRRAGMRGGDARTESLFSYVSCEARVPAGHPLRPIRAIVDAALAALSPEFGRLYSRSGRPSIPPEKLLRALLLQAFYSVRPARQLMEQLDDNLLFRPSASC

SEQ ID NO: 250130 - protein, 345 aa, unidentified
MMREVSLIGVDLARQVFQLHGATSDGAVMFRKKLSRKQFLAFMQRHPACRVAMEACGTAHYWARTLATFGHDVRLIAPKFVKAYVKNQKNDMADAEAIAEAASRPTMRFVEVKSPEQQGLGMIFRMRDLLVGQRTQTINALRGHLAEFGLALGKGREQLDKLKSSELTDDQGNALPSSVCQMAQLFFDQIDDLSRRISELDVKINAASRQSHLAARLQKIPGVGPITSMALAAFAPPMECFHRGRDFSAWLGLVPRQHSSGGKIRLGRTSKSGQRDIRRLLIIGAMAVISGTKIRPPAEGSWLGRMLARKPRMLVAIALANKMARMLWALIAKNEEFRGGPHLAG

SEQ ID NO: 250131 - protein, 390 aa, unidentified
MFYLGIDIGKNNHVASLLDEKGKVVFKAFSFSNSTDGAKCLIEKIYSYSSAMEIGMEATGHYWLALYSFLFKQGFIIHVINPIQTDGWRNATEIRKHKTDVIDSVLIADFIRYGEFLETSLANEDVLSLRNLSRFRNYLVSSIGDLKRKTICILDQIFPEYQAVFSNVFGKTSKEILLQFSTPSEFESITAVQLESLLKEINLKNFAAKKIQEISSVAKTSFGITFGLDSMTLQLRLLIEQMNFIEKQVNEIERQTKTLLDKLNSPITTIPGISTVIGATILSEIGDISRFSNPSKLVAYAGIDASIHQSGNYQSSNNKMSKRGSPYLRTALFRAALIASTHDPVFKAYYQKKRSEGKHHLTCLGAVARKLCYTIHAVLKNNCAYKVQLP

SEQ ID NO: 250132 - protein, 311 aa, unidentified
MEHSLFVGIDVAKEHLDVHLRPTGEAFRVGHDDAGLATLTARLARLGPALVALEATGGYEVTVAAALASARLPVAVVNPRQIRDFARATGHLAKTDALDARVIALFAEAVRPPARPLPDAQAQALGELVARRRQLVDMLGAEANRRRLVRDPQLQRRIAAHIRWLERALEDLETDLHDTIRASPVWRETEDLLRSVPGIGPITAFTLIADLPELGRLTRRKIAALVGVAPFNRDSGTLRGRRMVTGGRAPVRRVLYMATVTATRRNPAIAAFYQRLRAAGRPAKVALTAAMRKLLTILNAILRDHRSWQPA

SEQ ID NO: 250133 - protein, 346 aa, unidentified
MGKVIARDVSLSMGFDVDGKHIAVCVGTRKDVVYEGRIAYRLESVDRLLDRFPGCTVTVVYEAGPFGFALARHVEGRGVRCKVVAPSLMPRAAGNRLKTDRRDARDLMEAGWSDRARPSRVPTEEEEAERQLVRVRESLVEKHRRVMAQIKSFAYQHYRHELLGDWRKEHMGRLRSAKFEQAYLRESLDEYLREYDYLTGRLKAMEKSLEELGASDRHAKAVDRMRAPRGIGVVTAVTFRVELFRAEEFKRAEAVSCYLGLTPSEHSSGGHRWLGHIHRMGNAHLRRVLGEAAWSMVRWDPRARGHYQRLLKRSGKKKAIVAVARRVGIGLWASIVRGEAFEYRWS

SEQ ID NO: 250134 - protein, 375 aa, unidentified
MRQDRAGEVIASYYGIDLHKDQITWHCIHKTGNGETARENGRISTDRILEVLVPMLSVNDSYLIVEASGSSFFFYSLVESHCKKALVVNPVAFRELYMTGKKTDRIDAKKLAERLKYHIECGDTESGFPEVFVPDAEIVKIRKMVTAYELVVKQGTQIKNQAKSVFRSKLMSVAVDIMEKGLEDALKDKRIDEADRSILIMLKRIYDTLMEEKEEIKKQILLLGSFRFREEVKLLMSIPGISLMSATVFMADICTVERFKSEKKMTSYLASVGTVDSSGGITRNGGLSRRGRRTSYRYILQGLEHIVNGNKDFQKFKERHALTRSNKVRAAIVRKTFVSMYFMLKNKETYRYLNEAIYTRKIRDLKKYGIDFKCG

SEQ ID NO: 250135 - protein, 355 aa, unidentified
MTNTKYIGLDVHKESISIAVLNSAGKVVMECVIETKASTILQFIHGLGGDVHLTFEEGTWAGWLYDLLKPHVTELVVCNPRKNALLKEGSKSDRIDARKLTELLYMSKLSSVYHGEHGLRLLKELSRSYLTITKDLGRVMNRLKALYRGWAIPCAGTQVYAPHYRAEWLVKIHEAGVRRRAELYYQQLDALRLVRQQARKELLAEARKHRATKLLRQIPGIGPLRAAHLVALMQTPHRFRTKRQLWTYSGLGLETHDSAQYRVVEGQLQRSNKPVTLRGLNTNHNHDLKDIFKGAAMRASTAAGPLRDFYEALLAKGRKPTMARLTLARKIAAITLIVWKKEVRFDANYLKQQAA

SEQ ID NO: 250136 - protein, 422 aa, unidentified
MDETEDEGVPFERVAAIDIGKAEVTVCVRTPLKPGGRRRRGVVRTFATFTRDLLAMSDWLRCEQVQVVGMEATSDYWKPVFYLLEAEGHECWLLNAKHVKNSPGRPKTDRLDSQWLARVVERGMCAPSLVQPKPIRELRDLTRYRRSLCREATREKQRVEKLLEDAGIKLSVVASDIFGVSGREIMQALIDGQRNPRLLAEMAKGTLRRKHDSLVESLTGFFGDHHGFLLRRMLDHIDALEADIAALDARIEESIAPFADRVAQLDEIPGVGIIAARELIAEIGVDMSRFPTPGHLAAWAKFAPIAHSSAGRGGANTTGKGNAWLAATLGEVVASLSRTDTFLGARYRRIRKRRGTRRAIVAVGNSVLHVVYQLLSAEPTTHFHDHGSSYYDSHINKERRQRSLIRQLEQLTGKKVDLHPAA

SEQ ID NO: 250137 - protein, 379 aa, unidentified
MHSMTQKDRPLVVGGVDSHADTHHFAALDQRGALLATKSFQTTTPGYAQALDWLYSFGEIDTVAVESTGCYAAALVRYLREHDIRVVEVNQPHAHTRRRVGKSDPIDAEMAARLLLAGKAKVTPKRTDGIVESIRLLRVARSSAVKSRTAATVQIRDLIITAPQQLRDQLADRKTLRGKATVCSHFRISASDLSHPTHAAKFALRSLAQRIETLDHEIVCLDQQLEQLVAAAAPRTVQLLGISTGHAGQLLVTAGQNIERLKGEASFAALCGASPIPASSGKTTRHRLNPGGDRQANRALHLIAVCRLRYCQRTRTYTERRTREGKSQREIMRCLKRYIAREVHSALSADLAELDLRPPQRTTTILCGSPGSGITRKRS

SEQ ID NO: 250138 - protein, 316 aa, unidentified
MNTINHREINIGIDTSQTVLDVYVRPEGSFQSFDNTPEGVRAAVRFIKPFKPARVLIEATGRLEMEFFCAAHKAGLPVCVCNPVQVRQFAKAAGRMAKTDKLDAQDIAHFGEALKPELTHLKPEKLRLISDLLTVRSQCLEMSTMQKNRLQRMPKSVHKPISNVLKSIRKEIASIDQQLDKLIAKIPQWQARVDQLTSAKGVGKVLAYTLISELPELGQLNRKQIAALVGIAPMNRDSGKHEGKRYIRGGRHKVRTVLFVSMMSAIQCHPKLKPMYERMVAAGKPRKVAIVACMRKQLIILNTMVRNGTFWDENMI

SEQ ID NO: 250139 - protein, 334 aa, unidentified
MKDPTTSPVVVGGVDTHKELHVAAVVDAHDVVIGTESFSTTRAGYRALLRWMRSFGDVSRVGVECTGSYGAGLMRHLDAAGIEVLEVTAGDKADRRKRGKDDTIDAEQAAHAAYAGVRTVTPRAHDGMVESLRVLKIARSSAISARRVALQLIHATIISAPEELRDQLRNMTRMQLIRTLATWRPDLSGYRDPVTATKISLKSLARRYLELHDEIADLQVPMHALVEELAPDLLARVGIGYESAAQLLITAGDNPERLTSEASFAMLCGAAPLPASSGMTTRHRLNRGGDRAANSALHMIAISRWRMDPATQAYVARKKTEQHSNPEILRCLIG

SEQ ID NO: 250140 - protein, 338 aa, unidentified
MKKNVFIGIDVSKHTLDTAFIIRNGESLSDPVWRQFSNTPSGLKEMKKWLHQMNVLLDQQTIIVIENTGIYHRLLWQYFSGIQVDLCIENAAQVKWSLGIARGKNDKVDSRRLAIYAVRHADRLKPTPRLHNNIMALKDLLTLRTKLVIQSRSISTGFNELKNVSDRAIMKAMEKLLRPAQDGLKESIKKVEVQIKTMLSQDKELSRIYKLLITIPGIGHITAVMLMCCTNLFTLCSSGKQLACYCGVAPFDHQSGISIKGKRRVHRMANKELKRLLHLCALTVIRHKREFKSYYERKKQEGKHALCILNAIRNKIILRVFAVVKNDRPYVNNYAQAA

SEQ ID NO: 250141 - protein, 403 aa, unidentified
MEGPLISLDVSKGKSNYRFFENGTDRKGKKGVIRHDIQGFDSIRDEAEKMEKRLRIKPSVIFESTGVYSDVVEKYFTDKGFDVYVISPLLSASMRKEGVRPAKNDSLDTLSIAKVFYSKDDLRKCSENDKKAERLREMSYELDMMNRRIRPMKCQFLRLLDKVWPCLDEVSDYSSRFMLDFIIAFGHPENIKTVKGVLSVIRKSEMGTAGRKDKIAQDLFDYCHTHLSAVSKDSSYVELLKRMAIELKAMAKKKSELIDRMAEEARNKDEFARLLTIPAVAKTTALKIMARVGDISRFRNAEALVAYCGLDPRVYQSGKMTGEHRTITKKGDCILRSTLFLAVKLMVMLYPDTKVARFVAAKAKNGLSYKQAVVAGSAKLARIIYSMLTHHENYVEFNADIVA

SEQ ID NO: 250142 - protein, 313 aa, unidentified
MTEHNIGIDISKSHLDAFHLEADDARRFENSAKGLRALQKWLNSFEVTRIVYEATGPYHRRLETALSGKLPLVKVNPLQARRFAQALGTHAKTDAVDAQCLARMGVALGLEPDEPISENLRDLRDLQTARVALIKERGRLRNRRLILTDTLLKRQSKTRLALVERQLVELDAEIARRISEDKSAARKRYILGSIPGIGPIAAAAILTFMPEIGTLGRKQAGSLAGLVPHTRESGQWKGKSFISGGRKPLRDALYMPALVAMRFNPDLKAKYQQLRDAGKPAKVALVALMRKLIEIANALIKADRLWAKRPACA

SEQ ID NO: 250143 - protein, 354 aa, unidentified
MNTTQNSTKSKIVKVIGVDLAKDHCDVIGYDENGKICLRLDGCSYAKLREILSNLPQAVVLMEACKGSMFHARSIADLGHEVRLVKGADVKALRNINHKNDLRDAAYIAKLYFVPGTTYVYIKSQQQQSLQFLQNEYKSLQELRIQAGNQIHAGLEEFGCPVRKSSKFIKTRMVAHLEKHAELIPEDVMASFKRRREIWLNLLQQEEEAKRRLEQVAATDANAKRIMTVPCVGPQTAVGLLVHVGVDFGRFKNSRQFAASLGLVPKQNSTGGNNTLNHITKCGPKRLRSNLVQCAQLVLMYAEKWKGNFGDWVRKMRDSGKKHGVIVCAIAAKLARIIYRLMKDKVDYTSVLSC

SEQ ID NO: 250144 - protein, 339 aa, unidentified
MTEIIRIGLDLAKSVFQVHAVDAQEQVAARRALRRNQVLSWFAKQPPCLIGLEACGTANHWARELSALGHTVRVMPAAYAKQYRRRNKNDAADAAAICEAVSRPSMRFVPVKTVEQQADSATHKVRQMLIKQRTMLMNSLRGQMAEFGVIVPQGPQHISKLLAILADSGDDRVPAVARTALNAVAETLSTLEKQIAVLDHDIKVRARANPTARRLATIPGFGPILGSAIAAIVTDPRHFDSGRDFAASLGLVPRQDGTGGKIKLGPISKRGNGYLRRLLVNGATAVLNGKNARNDPWRAKLLDGKPRKLAAVALANKMARIAWAVMTRQEDFRPRAVPA

SEQ ID NO: 250145 - protein, 345 aa, unidentified
MKLSRVGVDLAKNVYQLHGVDRHGKTLWKRRLRRGQWLQVLTDTVEPGCEIGMEACTGAHHWARELQARGYTVRLIAPQFVKPFVKSNKNDANDAEAICEAMSRPHMRFVSVKSVEQQDIQATHRVREELKAHRNAKANQIRGLVAEYGLVAPKTLLALRRAIPEWLEDAENGLTDNFRTLLHGLWNDLLTLEDRLKGLDKEIDKLARSFEVTERLQQLRGVGPLVATALVATVGDGSQYSKGRQMASALGLTPRQNSSGDKYRLFGISKRGDVYLRTQMIHGARAVVSQAKHRDDPLSRWVTDIAKRRHPNVAAVALANKTARMAWAMLQNETNYDASLAVGQA

SEQ ID NO: 250146 - protein, 413 aa, unidentified
MEMLHERVCGLDIHKKSIQACVRRRAPGGSVVSEVRSFGTMTRELMRLADWLMAEGVTHVAMESTGVYWEPVYNIFEGRFEEILVVNAKHVKNVPGRKTDVKDSEWLAQLLQCGLLRGSLIPDRPRRELRELTRQRTQLVGQHTAVINRIHKTLEDANIKLACVASDVVGVSGRAMLRALLAGTSSPTQMAHLAIGKMQKNIPALEQALEGHVTEHHRFLLTELLDQMEDLERRIDRFSERIGELCRPFEAQIAAIDAIPGFDVRGAQNVIAEIGTDMSPFPTAGHLASWAGMCPGNHKTGGRSKSGKTTKGSRWLRTGLIQAAYGASKKKNSYYRSQYGRLSRKRGKKKAAVAVGHSLLTTIWHVLKTGRPYADLGVDYFDKLDEDRIVSYHLRRLRQLGHTVTVTKSDQAA

SEQ ID NO: 250147 - protein, 343 aa, unidentified
MHIKRIGLDLAKYVFEVHAVDAQDKAVLRKTLRRDAVAQFFAELEPCIVGMEACCGSHYWARVLMDLGHEVRLISPQFVKPYVKSNKNDRNDAEAICEAIGRPSMRFVPPKSAEQLEIQAVHRIRQRVVANRTRLVNQVRGLLGEHGVVVARDITRIRRALGEIADSHESEFGDIFIDMLRDMRDELAELDSRLAGYNRRIKNLFRSNEMCQRIGQIEGVGPITATALVAAIGDKSCFKNGRQFAAWLGLVPKQHSSGGKARLLGISKRGDRYLRTLLIHGARAVLGKAAGKTDARSQWIERMRGRRHPNVVAVALANKNARIIWSLLSRDQEYRPGHEVSFT

SEQ ID NO: 250148 - protein, 349 aa, unidentified
MRFYNKMHTYYCGIDLHAKTMYLCILGTSGEPILERNIKSRPEAFLKTIEPYRDNLVVSAECIFTWYWLADLCRRERIDFVLGHALYMRLIHGAKAKNDKLDALKIAMLLRGGTMPLAYAYPPEMRATRDLLRRRLHLVRKRAELLSHIQNTHHQYNLRPPAAKIAYKSNRAGVAEAFAEPDARKSMEVDFLLIEQHDQIIKDLELHLSRQAKLHDPDAYHRLRSIPGIGNVLALTILYEIHDINRFPKVQNFLSYSRLVKPEHSSAGKKVGGGGGKKGNAHLKWAFSEAASLFMRHCDEGEKMARRLQSKHGKSKGLSILAAKLGRCVYYMLSREKSFDLERFLTGQK

SEQ ID NO: 250149 - protein, 350 aa, unidentified
MTSMTSARTVVTVGVDTHSDTHHAAVIDEVGRPLADAGFPTTPAGYRRLLAWASQHGEPTAFGVEGTGAYGAGLARFLRAAGQTVIEVDRPDRKTRRQRGKSDPIDAYAAATAVLSGAAAGTPKTRDGAVEAIRTLRVARRSAIKGRTQAINQLKAVLLTGPAELRQALGGQTTRELLGSCRRLRTDKRPAQAADPVTAATKLTLRRLARRIAALTEEIDELDAELRPLVSQAAPELMAVYGVGTEVAAQLLTTAGDNPDRLRSEAAFAQLCGTAPLPASSGRTTRHRLNRGGDRHANNALHIIALVRLSSHEQTKTYAARRRAEGLSNLEILRCLKRYIAREIHHALIA

SEQ ID NO: 250150 - protein, 355 aa, unidentified
MSQEKYIGMDVHDATISAAVKNAEGKLLMECVLETKAATILEFIQGLRGTLALTFEEGTLAAWLHDLLKPHVSRLVVCDPRKNARMRDGNQNDRVDARNLAELLRTNQVKAVYHGKHGTRALKELGRSYLTLTKDSTRVMNRIKSVYRSWAIPCAGSSVYSRRHRAEWLAKLVEPGVRIRAEHLYQQLDSLEPVRQAARRELLRESRKHAAVKLLRQIPAIGPIRSALLVALLQTPHRFRTKRQLWAYSGFAVQTYDSGEYRMVRGKLQRNRERITVRGLNRNHNHDLKNLLKGAAISAIERPGPLQDFYAALVEKGMRPSMARLTLARKIAAITLTMWKKGVSFDPQQLQRQAA

SEQ ID NO: 250151 - protein, 426 aa, unidentified
MKEHIDYLSTLFVGIDIASRIHVISALDFNQDFFIKMKPFENTKEGAGIVEKMIADVLADNHQFKYVVIGMESTGFYGVHLANYLSTSELLAPFSVRVYCLNPKEVKNYKKSFNDIGKNDGIDSFVIADFARVGRIAIKPWRGSQYLALQRLTRHRMHITECITREKTYMLNNIYLKFSEYALLRNGEHPFSNKYGATAEAILTEFTTNEDIVNSSIEELVEFINSKSKGRIADPEETAKIVQAAARNSYRLDKCLYEPLTISIASSFNCISSFEKELKAIDKAILQTVQGLNPEEYTVLNSILGIGKVYSAGILAEIGSIKAFQNANQLAKYCGIVWNDNDSGDFESEDSRMSKAGNRYLRYYIIEATGSVISHCPEYKAFYQKKYAETRNHQHKRALALTSRKFIRLLFGLLDKGQLYSPEKSR

SEQ ID NO: 250152 - protein, 326 aa, unidentified
MQCIGVDVGKQDLVTYDGEKERIFPNRKGLPEFAEFVDHGREVLIVFEATSTYSHKLEALCREKNIPTVKLNPRVIPSFREVQGKRSKTDQTDAELLYQYGVERGKDEAKHSLLVDRLAQAVSAQLAIYRVTQKARVAYQGLREALSQDPGTPGELLAELAETIASLKEKEQRCITQAQKLIEEEEAASWSLQSLISIPGLGPVTAITLLALFRRYPGTNRKQIVALAGLDLIEYRSGSSVHKKPRISKRGSSEIRKRLYEATLSAARFNPAVNGIYHRLKERGKPEKVARIAAARKLLLIAHAIYKSGESYHAPTDKGVDFQYSI

SEQ ID NO: 250153 - protein, 369 aa, unidentified
MEKDTTYVALDDSKRKIVAGILRPNDTAPELREIANDPHHIRRLLTRLQRERPVSACYEAGVSGYDLYRQLRALGVACDVIAPALTPRRPGRRIKTDRRDAAKLVHLYRAGELTAIHVPDEVEEGGRDLIRCRDDIRRDVLRWRHRLLKLLTRHGRMYVAGRNWSQAHWRWIREQRFDVPPLQRAFEATLFTLEQALARQAELDKEIEALAATVPYCEPVGWLRCFRGIDTLSAMILLAEVVDFQRFHRPRELMAYLGLVPSEYSSGETQRRGALTKAGNAHARRVLVEAAWHYRHRPTIGHALATRSQGQPPAIVAQAWRAQQRLHRRYRHLVGHGKRPPVAVAAMARELVGFIWAAMTGHESRLQTA

SEQ ID NO: 250154 - protein, 354 aa, unidentified
MKFVAGVDTHRDTHSVAILNELGAVVDSFTIEATAAGYAEAIARTASIEGLVWGLEGTGSYGRGFADALIAQGMRVYEVPGTITKRHRRRLRKPGKSDPQDAHAIAEAVLREGDILPQHLHADEEEATRLLYDRRDRLVHDQTVKVNRIRALAQRLGLPRAPDLTSGRALDRLEGSLNAKTAAGYAEAEIIDEVRELIADLRRIHDLIGQLEKRMRPFVERLAPGLLQIRGCSVISAAGLIGHAGAMENYASSDSFASHAGVAPIPCSSGNHQAVRVNVGGNRQLNRCLHNIANTQARTGGHAGKVYYDRKRAEGKTHREAMRCLKRRLARVVFHAMQTASQTRRGIIDDLAAA

SEQ ID NO: 250155 - protein, 320 aa, unidentified
MDYLGLDIAKARFDAGLLAADVKRHSSFANTQAGFEQLAAWLARNRPSATEPLHACMEATGNWGLDLAAFLHAAGFKVSIVNPRQVKAFGDSELARNKTDKLDAALIARFCRAHGPAAWTPPAAGMRELRELVRRCAALKANRAQELNRQKAGLVSAIVAASIERLLAHLDAEIRAITAAIRDLIAGDPAQQQNFQLLCSIPSIGEVTAALILAELPNIAEFTPKGLAAFTGLSPQEHSSGARRSLGGISRIGNATLRTALFLCALTARRHNPRLADFVKRMTGAGKPNKVILIALARKLLVMAHAVIRTQTPFNADAAA

SEQ ID NO: 250156 - protein, 342 aa, unidentified
MTIAVLGIDLGKNSCSLVGLDAAGRVVLRRRMQREGVIAFGAKLPGCVVAMEACCGAHHMGRALAKQGHTIRLMSPEYVRPYVKAQKNDDRDAEAIAEAATRPTMRFVALKSEAQLDVQTLHRVRDQLVGERTALTNQIRSVLLERGHVVAQGRAKLTACLAALLDTDAGASLTPRMRTLMAEVRERWQDLDRRIAALDAEFAEQARINEDARRLTTIPGIGALNATALVAAIGDVASFARGRDLAAWLGLVPRQVTTGGKPRLVGITKRGSKYLRKTLVQGARAALPSLRQSDTHLGQWLRGLLARSHVNTAVVALAAKMARIVWALLRHGRVYEPAAVAA

SEQ ID NO: 250157 - protein, 321 aa, unidentified
MAKHTTICVGIDTGKRKLDVAIDGSGKQLQVENTAEGHEALLTWLRQHRVKRIGIEASGGYEQPVVAELRRKGFVVVVFQPAQVRAYAKFHLQRAKNDKIDAAIIAACTAAVRKIHAAPDPRLLPFAAQLTMIDQIGEDIARLKNRIESCRNETINKLWQEDIARLEQRERAALKALVAAIRKHPDLAKRLALISSVDGIGLPTAVAILVRLPEIGQITREQAVALAGLAPYDDDSGDRSGVRHIEGGRKRLRRALYTASLAASFRWNPQLIQLYQRLTAAGKEHKPALVACARKMLIFANTVVARGTPWCGEPPGSLPAS

SEQ ID NO: 250158 - protein, 347 aa, unidentified
MQFTATLPVIGMDIAKHVFQLHVVDAQTGEVTRHKLRRDRVTAFFANRQKSLVAMEACGGAHHWARTLQTLGHEVKLLPAKHVRAFVLRDKTDARDAQAIWVAAQQPHIKAVPVKNEQQQACLTLHRMRAQLMKVRIMQTNALRGLLYEFGIVLPEGHRALLKLVQDALAKAQEQRLPEVVVVSIQDQLRRIDSLQCDIDQLDKRLASMVKQNQHMLALQAIPGIGPLTATALVSTATDLSSFESGRQFAAWLGLTPRQTGTGGKTRQLGISKRGDPYVRTMLMHGARAVIARSQRSGWIERLLLRRPYSVVVAALANKLARTVWAVLVKGKAFDQVKWNPVDLAAA

SEQ ID NO: 250159 - protein, 347 aa, unidentified
MVVVGVDAHKRTRTAVVVDGLGRQVGQRTVKALTADHLELLRWAERLGAERLWAVEDCRHVSRRLERDLLVAGERIVRVPPQLMAGARRQVRAAGKSDPIDALAVARAALREPDLPVAGLDGAAREVRLLVDHRDDLVGERTRIINRLRWHLHELDPSWDPPAGSLDRYCTLDRIAVRLNQHDGTVARIAGDLTVRARALTVDINRLEREITALITPLAPTLLAVCGVGALTAAKIVGEVADVHRFRSKDAFARHTGTAPQPAWSGQSDRHRLSRGGNRQLNAALHRVTITQGRYHPDAVAYLARRRPGGDTKAQARRALKRRLSDVIYRCLVADTALVDQTLATAA

SEQ ID NO: 250160 - protein, 486 aa, unidentified
MAKRKKSTFERLQRGSLNRKQRKELERRFHTESPELEIVHPNAAGIDIGNESHFVSVPPGQDQEPVREFGSWTADLQRMAEWLKSCGVRTVAMQSTGVYWIAVYDVLEQAGFEVYLVNARGTKNLPGRKSDVQECQWLRKLHTYGLLRKSFRPPEEIRAVRTIWRLRDRLVKDAGRAVQHIQKALTTMNIQLANAISDVSGVTGMNIVRAILQGQRDPRELAKMRDSRIQASEEEIAHSLEGNWQDDVLFELQQVVDAYDFHRKQVVACDTQLQKYMAALPSREPVGKTEPPVEAANSKQSAKQRKKLKANRKTKDNRPSFDLGTELARLMGVDLRIIDGIDLMTAQVLYSELGADLSAWPTEGHFTSWLELVPRRDVSGGKVIKQQKRPSKNRVATAFRNAAQSLVRSDSYLGARYRHLTARLGGLKGVKAMARYLACLVYRLLTKGPGWVDRGAAYYENRRRERDLVHLHRKAAAMGMQLVPNA

SEQ ID NO: 250161 - protein, 350 aa, unidentified
MKKNSKTVKQHPAETIGVDLGDKMSCYAILNEAGVVVEEGSFRNNVESIAKHFGKQGRARVALEVGTQSAWISREFSKLGHEVIVANARELKWITSSDTKNDRNDAIKLARLARADRNLLAPVEHRTAEQQAELAVIRARDALVKSRTLLVNTARSVAKGFGVRLPACITPTFGARALARLPQHLHAAMKGLLEQIDALGVKIRDYDQGIAEVAAKHPEVELLASVPGVGTLTATTFVLTLGRKERFAHSRDVGSFLGLRPRQKQSGERDPKLGISKCGDKYLRKLLVQCAHHILGHWGKDSTLRQWGLSKSDGSPGKKRAVIAVARKLAVLLHRLWTTGEIFKPFPKMV

SEQ ID NO: 250162 - protein, 364 aa, unidentified
MPTRKLQNPEDFEGQKFYIGIDVHKKSWAVTVRSLNFVVAHFTQPPSTQALQNYLQSKFPGGEFYSAYEAGFSGTGVHESLCKLGIKNIVVHPGDIPRTDKEKKNKTDIHDSRAIAFHLEKGNLHSIFVMSRKQQEFRSLFRLRESKARDLARAINRLKSHLLYFGIDYSSTFEGYISAKVITWLSQLRMAGEAGTYTLKKYIDDLIHQRNELGWITKSLRNQAKKEYGDAYKCLLSVPGIGFTTAIGLLAEIGNFDRFRNPGEYCSFLGLIPWQHSSGDSTHVKGVQPRCNRHLRPLLVEASWFAVRNNPSLLKYYRKHAVKNSKHAIIKVARKLALIARGVVQKLELYQADYTGSPKQEKIQ

SEQ ID NO: 250163 - protein, 373 aa, unidentified
MNYTQNRKIAQVTETTLVVGVDIGSQWHYARAFDWRGIEITKKAFRFSNDLDGYTAFEKWVHEAAENSAKMEVLIGCEPTGHYWYTFARYVGLHGMKLAFVNPYHVKQSKEMDDNSPRKTDEKDPKTIAKLVTEGRYSFPYLPTGIYAELREAMSVRDQIVKAMNAAANRIQRWLTIYFPEYLKVYKGFDSVSGLAVLWQAPLPEDVVKLGADGIVELWHEKKLRAVGKKRAQTLIEATKSSIGMPGGNCAKMDMHLLLEDYFTRKEQLERITAVLQEELLKVPNAEKLLAVKGIGIITVAGFLAEVGDLGRFTSPKQIQKLAGLEPKENSSGKHKGRTSISKRGRRKLRRLLFQAVLPLIRSNEDFREVYTY

SEQ ID NO: 250164 - protein, 372 aa, unidentified
MGHNTEAFVGIDTSKLRNAIAIADGGRGGEVRYLGEFPATEAAIRKLVAKLATKYRHLTFCYEAGPTGYGLYRLLKSLGHECLVVAPSLVPKKAGDRVKTNRRDAVSLAKLLRAGELTAVWVPDERHEAMRDLSRARQAVKKDLQGKRQQISSLMLRLGRIYPGKTTWGPAHMRWLMAQKIEHREQRIVFEELLEGIRQECERVERLENAIREVLPEWSLAEAVVALQAVRGIDLIAAVGVLAEIGDLSRFQNPRELMGYLGLVPSENSTGDKVKRGGITKAGNERARRILVEAAWSYRYPPRVSRDKQPKVEAAPRRVREIAWKAQTRLCGRFRSLERKGKRRTVIATAIARELSAFIWAINRELMAHRQA

SEQ ID NO: 250165 - protein, 461 aa, unidentified
MAVVMIGVDPHKASHTAVAIDAAEEQLGQLRVRACAAQAGQLLGWAQAWPERAWAVEGAGGVGHLLAQQLLAAGERVLDVPPKLGARVRLLATGNINKNDPNDARSVAVAALRSAGVREASRDDHAAVLKVWSKRHKDLGRIRTQVACRLHQVLCQLIPGGVPKAITAAHAAHLLETITPGDAVAAARRELAADFVADLRGIDARIRETRKKLAAAVAADGTSLTGLFGVGPVIAAAVIGDVRTVSRFPSRGHFAAYDGTAPIEVSSGGRKVYRLSRRGNRRLNHAIHMAAVTQIRHPGNEGRAYFDKKLAAGKTRKEALRALKRRISDAIYARLQADARRAAGAQGPGGQPGNDSDSSAAGSHPGHRLFGQATPGPGHHPTTTASADGRAGHSPIAATSPPATPQAQVERPQRSEDERPGGVARRRRYSAAGKASKPRPPAKSPPPKATSSAAKKTARTP

SEQ ID NO: 250166 - protein, 347 aa, unidentified
MQFTATLPVIGMDIAKHVFQLHVVDAQTGEVTRHKLRRDRVTAFFANRQKSLVAMEACGGAHHWARTLQTLGHEVKLLPAKHVRAFVLRDKTDARDAQAIWVAAQQPHIKAVPVKNEQQQACLTLHRMRAQLMKVRIMQTNALRGLLYEFGIVLPEGHRALIKIVQDALAKAQEQRLPEVVVVSIQDQLRRIDSLQCDIDQLDKRLASMVKQNQHMLALQAIPGIGPLTATALVSTATDLSSFESGRQFAAWLGLTPRQTGTGGKTRQLGISKRGDPYVRTMLMHGARAVIARSQRSGWIERLLLRRPYSVVVAALANKLARTVWAVLVKGKAFDQVRWNPVDLAAA

SEQ ID NO: 250167 - protein, 432 aa, unidentified
MPESIPYLSVGFDVGADFTWMSIMLPNGILIGKPFKIIHSDPQSRELAISKIKEAQEMYSLESRCFLESTGIYHIPLLCFLRDKGFDCSVINPIITKNSTNINIRKVHNDRFDSKKAALVGLKPDLKVSLMPSDLALNCRNLCREYYDLMDNRSAYVNKLQGELRMAFPQYLGIFSKVTINTSLTLLETYTSPSAFLKADKQEIIDIIKSTARFGLTYAQNKYNAIIQAATDANQFGYIIDSNIKRIRLYISFIRKYDEEINSILESLHELVDANEDSDFVKQIHLIETFKGAGFLSAVSIMGEIGDFSAFSKPKQLFAYFGLDPAVKQSGKFEGTKVQMSKRGSAIARRVIHTLTLQSISISRNREAKNPVLREYYLKKCDSKPKLVAMGAVSHKVCNMIFAILRDNKPFKIIAPQEHIKQYNSAKCDIAA

SEQ ID NO: 250168 - protein, 389 aa, unidentified
MTQIYVGIDIAKNLHYASIIDSNGEVLHKTFSFENNASGFQLLLSKTKDKSSLCFGMESTAHYSNNLSNYLLLHKYSVTILNPLQTHALRKTRMRDVKNDKVDSQIICLALSMNLGTPITLDATLSELNDLCKCYQNITKMCSKTKIQLIAYLDQTFPELAKEFKKSTHGKAVYALLKEYPLPSNINKVRIDKLTNILTSHSRGKYKKDKALRLKELCQNTVGIQRDSLGLQIQLAISQIELYSTQKAELKAQITVIVESLNSPIMTIPGMGHIHAAMILSSIKDSTLFSSPSKVLAYASLDPRVRQSGNFQAKTTRMSKRGSSMLRYALIYAAHNVCKHEPVFHEYYIKKSKEGKTHYCILGHAANKLTRLLYKLLTTNQTYDSHLLQ

SEQ ID NO: 250169 - protein, 356 aa, unidentified
MKTYRIQQYVAKEKEIFVGLEDSKRTWKLAVRSEKMVMHQVSMEAKYPVLIGYLRNKFPDCAIHLMYEAGFKGFNLYDALTEDGIDCVVIPPHVVTEPKVNRIKTDKRDARRLAKVLEDHDFQDSCYVPDKERREDRQVSRTLIALQKDIVRTRNRIRKFLQFHGIEVPFPDRWGRNEFRALKKLEIREPLRISLDIFLTQLEELWAHQVALRAALRKLCKKERYHKAFTIAKSLPGIGWFTAIRLVLELGEDLSRFTSGKKIASFVGLTCSEDSTGETEHKGRITGMGSGFIRSTLVENSWMSIAKDPVLLAKFTRVWHASGSRKKAIVAVARMLIVRYRACLTSGTPYVIGVAA

SEQ ID NO: 250170 - protein, 434 aa, unidentified
MFKIFRKNCCGLDVHKTWIFACIGITDANNLTVYKQARFSSFTKGLTELSDWLGSFHCSDVCMESSGKYWIPVFNILEKSCNVTLAHPKYTKPRKGNKTDRKDAKWICNLFMCDMIRPSFIPPERIRHLRDLVRYRTKLTNMLTGEKNRAQNCLTVSNLKLDGVFSDIFGKSSRSITDYILDHPGESFDVTPFVDCHCKTPIPEIQAAVDGAISPEQAIKLRQCLTHIDELDAHKEKIEQGILKICEPFSDCLTLLRTVPGFDHNPLTAITVLSEIGYDMAVFPSAKHLASWAGCCPRNDQSGGKVKSTRISRAGSNLKPLLVQVANALVRSDKHPEFKERYRRIKARRGHKKAIIAICRMLLTAIWNILKKMVPYSPDGFLSSRPVHSSKILTTSQAVNLLKSRGYIIKDEWSVAANNYKCFFAILRWFVCYA

SEQ ID NO: 250171 - protein, 469 aa, unidentified
MDLLKLPIYTFCCKFLDVEEKFMKKVFVGIDIGKGKDSIHVIDILGNPIIKKGFDIQNDYYGFIKLRDRLDLILKNLNLTYDDCLVGFESTGHYWFNVRDYLNDINIDTVMVKGDKVKHRRALEEGQKGKNDTLDARVIASCLRNNNYILIRNDERALRALKKLTRMRDNQTKDLVALKNKIHRCIDICNPVFFKIFGNLNSKTGLELMKLYPSPKDIINVDLLDIKEKLRVNVSKPNLRMVNLYKEECESWVHIVKEPTYAEKIEMVMYINKFFLEKEYKEELDKEIRKIAKDLFPLYSEFEKIKGIPMIQLISVLSEIGDISNFKNTRALLGFLGLTVIGKMSGQYVGEIKINKAGSRIVRKHLFNIMESLIKHNEYFRVAYCYYKSYRHKDPTKKRSMQIAVMCKFVRVMYGMLKYNASFDYKEMMKGYYFGDCNMQVFKEEFEGENRRKKIENCKIAYDIYTIYS

SEQ ID NO: 250172 - protein, 414 aa, unidentified
MDLLHPRCAGLDVSKRDAKLCVRVASGTRAAARSTVTTWGSVTNQVLALREHLIAEQVTLVVMEATGDYWKPFYYLLEDAPFEVELVNARHAKNIPGRKTDVSDAAWLAQLGAHGLVRGSFVPPEPIRQLRDLTRTRTMMVRERAKEIQRLEKLLEDAGIKLSSVASDISGVSGRLMLDALIAGQRDPGELADLAKRRMRSKIPALTEALTGRFTEHHAFLARVHLDLIDQRSHAIAELTTRIEVVIEPFRGARDLIVSIPGISVLVADVIVAETGADMSRFPSAGHLASWAGTCPGSNESAGRIKSTKTRPGNPYLKGALGVAAMSAARSHDSYLAAKYRRIASRRGPVKAIVAVEHAMLIAIWNMISNGVFYDDLGGEYFTKLNPDKTKNRALNQLRQMGYAVTLNPLTAAG

SEQ ID NO: 250173 - protein, 420 aa, unidentified
MAVPSDRDSEPIRCFPTFTVDLERLAEWLQQCQIRTVAMESTGVYWIPLFQLLEKRKIDVRLVNAHHVKNVPGRKTDVSDCQWIQHLHTVGLLRGSFRPDDEICAIRSLWRHRDSLIQLATLHLQHMQKALDQMNLQIHHDISDLAGTTGLTIMDAILAGERNPQKLVQLRNRHIQASEETIMKSLVGDYREEHLFTLRQSLKSYRHYQELIQEVDLQVKQMLQRLPSKTAAGNEPPKGDKIRRTPWRNEPPHLRNDLYRAFGVDLTEVPGINSLTVQMLLTEIGPNLSRFPTASAFCSWLRLCPNPKISGGQVLSSRTQPTKNRAALALRMATQGLHRSDSFLGDYFRRMKARMGAPKAMTATAHKLARIVYHMVTTQQEYDATIFQKQEERRQYQKSVRLHVQARELGFQLIPINVVP

SEQ ID NO: 250174 - protein, 340 aa, unidentified
MTITTIGLDLAKSVFQVHGVDESGATILVKRLHRKQMLPFFSKLSPCLVGVEACGTAHYWARTLAAMGHEVRLIPPSYVKAYVKRGKSDALDAEAICEAVQRPTMRFVPVKTVEQQSILMTHRARSLLVRQRTMTANALRAHLAELGLVANPGIANLAKLAEQALSDDDALPAYARTSMMILVRQIIALNDEVAALDRQLIAWHTESEASRRLAGIPGIGVITATALAATVTDPDQFRSGRQFAAWLGLTPQQHSTGGKTRLGGISKQGDRYLRRLLVVGATAVMRHTKDKPTPIANWIRKLMEKKPFRLVSVALANKLARIAWVVLTRQEAYRPYELTA

SEQ ID NO: 250175 - protein, 342 aa, unidentified
MLIIGCDYHPSVQQIAWVDTESGECGERRLAHRDGQAEEFYRELKKKDVRVRVGIEASGHARWFERLLTELDYELWVGDPAQIRAKQVRKQKNDRRDAQHLLKLMLENNFPCIWVPTPENRDVRQLVLHRHRLVGMRMRVMNQLQAIAMNEGVRRKRGLWSEKGRAQLESLPLPPWTTRRRQELLELLDRFDPTIDELTEAIQQEAERVPEVQRLQTHPGVGPITALVFVLVIGTPHRFNCGKQVASYLGLIPCEDSSADSWRLGHITKQGNPLLRFLLGQAALAAVRCDERWHRQYARMSIRRNHAVAKVAIARKLAVRLFWMWRRGWDYQQLQKFGSYVG

SEQ ID NO: 250176 - protein, 408 aa, unidentified
MDKLFVGIDVGSRDNAVYIMLPDGSKHSSFPMQNNLGGAQSLSKRVVAAVKEKNLASVAIGIEATGVYGDNLMCFLREDGALARFERKLFVLNPRQVSKFKGLYSDLPKNDPVDAFVVADSLRFGRIGLPIQIDDYRYTALQKLTRSRFHAVQDLTREKQRFMNNLFMKCSGLAQEGVFSNSFGATALAVYEEFESPDDIVNMDIDELSAFIAEKGNNRSPRPDEIAKAVQAAARGSYRLPKTINDSVNQVLSISISSMRAMQAQIKALDKEIERQFDNIPNTLTSIPGIGPVISAGIIAEVGDVNRFEKGQSGLAKYAGLVWKENKSGMFEGQITRLIKSGNRFLKFYLCEAAFSLVRCDTEYKRFYDLKYKEVNRFQHQRALALTARKLVRLVFRLLKDNRLYIPA

SEQ ID NO: 250177 - protein, 343 aa, unidentified
MQIRSVGIDLGKTTFHLVALGEKGKVLLKKKFTQKQLIKFTANLQTSLIGMEACSGAHFLGRALRAQGHDVKLIPAQFVKPFVKSNKNDFIDAEAIAEAVDRRNMRFVPIKTDDQLDLQALHRVRDRLMVRRTSVINQLRAFLLERGMVFAKSPVRLREAIPEVLENINENLTPRIRNLVAMLWSEWKHMELQIQEMNNEIERIASSDAACCRLRQIPGIGPLVATAIVASIGNGAAFHKGREFAAWMGLVPKQHSTGGKTKLYGISKRGNRYLRKILVHGARAVVLRSKRDRIAMGSWMTSLEMRVPRNVLIVAMANKLARIAWAVLSSGQDYKATPGATPA

SEQ ID NO: 250178 - protein, 342 aa, unidentified
MANHTLVAVDLGKAVFEVAVSHHPGQVAKHRRYSRARFPQALAQLPPATVIMESCGSAHYWARRAQALGHTPLLLPPHAVRPYVRRNKTDRADTKGMLEAFRNEEIHPVPVKSLAQQTLTSLHRLRSGWLSERTARINTLRGLLREFGILIPLGAHHAVPGAWAQIEDAQSEIPDPLRPALAELCSEIRQLEGRIKMVERQLAALAPQTPAVAHLMTIPGIGLLIATALVAFVGDIRRFPSGRHFASYLGLTPRENSSGLRRRLGAISKRGDVYLRTLLIHGARSVLHAAKRRTPDRLRAWAVSRERARGHNKAATALANKLARIIWAVWKHQSPFRSTPAA

SEQ ID NO: 250179 - protein, 409 aa, unidentified
MRYYVGVDWADQTHAVWVVDESGTQITARTVPHTAEGFVEWGRELDEWRVQGIERWAAIERPDGRGVDFLLDHGVVVYPVNPKALNRARDRFRQSGAKSDPFDARVLADFLRTDHLHLQALQPSSDAAQELKLLTEDCQRHIRQQTRLVNQLTTTLKAYYPRALEVAELTTALAREFLHAYPTPEALTVLTARQWQRWARGRRVSEARIGALWAVLQPPQLPVPAHVVRAKARLMQSLVEQLTPVVVAVAQYRKTIDDLFARMPAAQWARTLPIGKHGITAPTLWARLGDAPGRWESFRHLQAQAGAVPVTKRSGKQRVVHFRFACDKALRHVVDQVAFLSLLSSDWARVYYDQQRARGHGHRQALRALGAKWLKIIFVMWHRQVPYDEQYHLATMTRQQLRQRQTKIA

SEQ ID NO: 250180 - protein, 337 aa, unidentified
MQKDGVMDEPVVIGIDVSKAELLVAVHPSGATWASETTGAALDALVERLREYGPQLIVMEATAGYELPLAGACAAAQLPVAVVNPRQVRAFAQAIGRTAKTDVIDASVLALFGARVQPPARAIPDADTQALAGLVARRRQLLEMLGAERRRLGQAPPTGPVTRDLRNHIRWLERRVGDVDDEIGTAVQQSAVWRVHEDLLRSVPGIGPATARTLLAELPELGRLDRRAIAALVGVAPFNCDSGQFRGKRRIWGGRASVRASLYMAALVASRHNAVLAAFYRRLRDCGKPAKVALVAVMRKLLTILNAMIKHQHRWNPKGASTLASPSRPARAATVGA

SEQ ID NO: 250181 - protein, 358 aa, unidentified
MKTLNENSFAGSHFFIGIDTHLKNWRVTIRLNGYELKTLSMNPSPLELIKYLKRNYPGGIYHFVYEAGFCGFWAVRIFKELGQDCIVVNPADVPTSNKEKVNKSDPIDSRKLARELENNSIYGIYIPDIPHEELRCLMRLRYRIVQNQTRIKNRIKGLLHTRGIKIPDQFTGNKRWSAAFIKWLKEEVKFNTSAGNFAFQNMITQLLQIREHNKNILKQLREEAKNEHIAPVIKALQSVPGVGFIIAMAFYTEIIDINRFSYEDQTSTFVGLVPSIRSSDDNIYANQISFRQNKFLRPLIIEAAWRAVREDPAMTLKFKELTKRLEPQDAIIRIAKKLLKRMRHVWLKHEEYLYALVA

SEQ ID NO: 250182 - protein, 366 aa, unidentified
MDAIYIGVDFHARQQTICYLKTETGELVISALQHQDKEQVRAFYQQFQEPVIVGLEASGYSPWFEALLEQLGCEVWLGHATEIRRRARWRQKNDRRDAELIWDLMVHNEFPRLHRPAVASREVLRMLRYRQKLIKLRTMTKNSLQAIALQAGLAKGKQLFTAAGQEQFQAAEMSPVLQWQREHWFELLKPFNQQLLETMVWFKAQSKDDVNIRRLRTHPGIGLLTSLCLLHTLQPVSRFRNPRKVTAYAGFDPVERSSAERQHFLGISKAGSRMLRYLLVEAVHTAIRYDEDLKRFYKRLAERRGRPKAKVAAARKLLIRAYIMMRDEIDYAEFRRRAVVARLARTGQGPTNVPEVLIGQPASPGA

SEQ ID NO: 250183 - protein, 362 aa, unidentified
MTKATCLVGLDVHARQTHAAVLHLESGELGVSRLRMAPDEVVSFVAGLPAPVVAVYEAGPTGFGLARAARTRGIDVRVVAPGSVPKGSGDRVKTDRRDAIRLVRLLAAGELRFAFVPTVEDEAFRDLVRCIEDARGDLMRARHRLSKFLLRRGERFEDAQAWSARHLRWLRALAFEDACSQASFADYCASVELLVGRRGTLLGVLEQQIPQCTHAPVIARLRCFRGIDTLSAAGLCAEVGSFQRFPRPALISGFLGIVPSEHTSDLKRRQGAITKAGPGHARRLLVQAAHHYARQPAIGPTLARRQDGQDPRVIEIAWRAQRRLHQRWQHLRGERKKPSGVVAIAVARELAGFLWEAATLDV

SEQ ID NO: 250184 - protein, 425 aa, unidentified
MNAAPDTRSEAPSFAALIGIDWADEKHDICLLANGATQSEKSTIANTPEAIQAWAQGLQQRFGNRSVAICLEQSRGPLAYALMNYTFITLYPINPNQSAQYRKAFTPSGAKDDPVDAALLLDMLRHHRERLAPWHPDDVLTRKIRGLAEERRSTVNLRSNCTQRITARLKSYFPQILDWFNNDLTSVLVCDFLLHWPTAVAAKKAKPATLRSFFYGHNCRSETMITQRLDSIAHAVPLTEDAGVVEPAMLTVQTLARTIRELTNAIAVFDKQIAEAFGAHPDASIFESFPGAGKVMAPRLLAAYGSDRNRWTKPEDIQSFSGIAPVTERSGKSTWVHRRWQCPKFYLQTFFEYAQHSIPFSTWAGAYYQQEIAKGKSRNTIIRSLAFKWIRIQLACWQTRTPYDESRYLQALIKRGSPLAKIVTV

SEQ ID NO: 250185 - protein, 414 aa, unidentified
MSNPLLVGVDVHRKTNAVCVMNGQGQELIPRFTMDNNRPGTEAFVQQMAQLMLDGDFDVLQVAAEATGWYWFHFFQTLSQDPFLNQWPLELYPLNPRLTANFKKTFVDLDHTDHIDSFVVGDRLRLGRDLPAPFHYEEIYLPLRFLTRYRYHVVHNLAREKAYCLAILYLKVSEYTHKDRKPFSNVFGAASRAVLQEFASIEEIAAIPFHELVEFIDLKGKRRFPNPAENARKLQQVARNSYTLPEALQHPINLVLDLSLKHITFLERQAKRLNTAIAQHMEAIPHTLDTIPGFGPVFSGGIISEIAGIERFDYNQAKVAKFAGLKWRKHQSADFEADETRLTRTGNRYLRYYLCEAAQSVRLRDAEYKAYYERKFHEVRKHQHKRAIVLTARKLVRLVTRLLTTHQPYRPRRR

SEQ ID NO: 250186 - protein, 338 aa, unidentified
MSLVLQSFLPYPDSCQGTSPHKQGRDTKMETLSYCGIDVSKDRLDVVLLPEQSFLSVSNDPIGWAELVARLRPLAISAIGLEPSGGYERGVIRALLASGLSVRRINPNKLRQFARARGVLAKNDRLDARLIADYVAIMPTRVVQRDEAVEKIAAVVTMRRQLSDEHITVLNQAAHIEDIMLRRLNKRRLTRLETDIRLLDNRLRELLADDAALTERYHILISMPGVGPVLAFTLIALLPELGRMSRKQIAALVGVAPYDFDSGKLRGHRSIYGGRMPVRNVLYMAALSACRYDPALKAFHQRLTAAKKKSKVVIVAVMRKMITTLNAMLRDHAEWKSA

SEQ ID NO: 250187 - protein, 339 aa, unidentified
MARYIGVDLHRNQFTVCLIAENGREYLSEYRLDELPRFVSKLRPTDEVAVEVTGNTRLFYDAVAPRVAKVVVVNPSQFKVIRQSVKKTDPHDARALALYLSKDMLPEVRMKDKLHAQLASLTQTRDTLVKQRTALKNKVNNILLAHGINLRKEALSSEAALEEVLGMHFDAIVQTELRVIVGQIRALNQSIAELEKTIKAEGPKLPGHENLRSIKGIGDLGATILLSAIGDIRDFAHPGKLAAYFGIVPRVRNSNEVERSGRITKRGTKLGRTTLVQCALIAMRYSSYLAKFYHRIQARRGTGKAIIALAKKFLGVIYHTLKNNWIFADFPNFVLAKAS

SEQ ID NO: 250188 - protein, 354 aa, unidentified
MVLLGTNREKEPSIMDITTLGIDIAKSVFQFHGVDADGGVVVQKKLRRGAVLDFLGKVGPCLIGMEACATSHYWAREIAALGHEVRLIPPAYVKPYVKRQKNDAADAEAICEAVTRPSMRFVPAKTAGQQSVLVLHRARDLLMRQRTMILNAIRGHLAEFGIIAAQGPRQVIGLIARLRDEGDARLPEIARSALLALGAHLEALAGEIRTLERQLMVWHRADATSQRLETIPGVGLITATALAASVSDPSVFKSGRQFAAFLGLVPRQHSSGGKDRLGRISKMGDRYLRKLLVVGATSVIRRAASNPTKTGAWVRSLMERKPARVVTVAMANKTARIAWAVMTRGETYRTSPIA

SEQ ID NO: 250189 - protein, 352 aa, unidentified
MKNFFGCDAHKKYSMFTSMDEAGHNGGYIRVENDRVSFRSFLRGLPPRSKIAIESVGNWYWMIDEMEKAGHVPRLAHAGKAKLMMGQINSTDKLDARGLALLLRNGTLPSVWIPPGELRDQRELPRMRMALVHVRTMLKNRIHATLAKYALQIPEVSNIFGMSGQIVLRNRLKELPDYTCQSVETQLELLDQVETHIQVCEKQIKEVVATTPAMKLLMTLPGVGPILAVVIAMEIGDIARFPSPHHLASYAGTVPRIKSSGGRSFLGKVRPDVNRYLRWALVEAANVVAIHQSRWPSRHVAHLYRRIMKRKGHAKAVVAVARHLAEATYWVLRRSEAYKEPKENKPLSSTRK

SEQ ID NO: 250190 - protein, 387 aa, unidentified
MSSARATAASTRSIIYLGLDVHKESITIAVLPDGAAAPRRVERLPNDAVKLRRFCDRLAAQGELRACYEASGAGYVVHRALREWGYACDVIAPSLIPIKPGVQRKHDKYDAAQLARLYRAGELTAVRIPTAAEERVRDVVRCRETFQREILKSRHYILKFLARRGFVYRDSKPWGARHWQWLRTLAAAQSPLTPEDALVFREYFALLEYKITRREELDRQIEAIALAPQWATAVGWLQCFRGLQLHSAMVLATEIVDWRRFARPTQLMAYLGLVPREASSGERERKGSITKAGNHQCRHVLVQAAWSYRHAPQASPQLKARQAGQPPSVIAHAWKAQHRLHKLYQHLAYRKRPQIAAVAVARELVGFLWAVMHELPATPAVTVDAAA

SEQ ID NO: 250191 - protein, 365 aa, unidentified
MKKSSTTMAASNKNFKQKLTIGLDLGDRSSWYCVLDEAGEVISEQKMSTTPKAMREVFAAMPCSRIALETGMHSPWVSRLLSELGHEVIVAHARNVRLIGESRRKDDRLDARTLARLARIDPQLLSPVKHRSAQAQADLTVIRARASLVRARTALVNTARGLTKSYGERIRGCNPRNLDTEKAQALSPELQAALGPLLQALESLSERITEYNRQIEGIAQQSYPQTALLKQVKGVGTLIALTYMLTLEDPHRFRKSRDVGCYAGLQPGRRNSGQSEPQMHISKEGDPYLRTLLVQGAHHILGPFGADSDLRRWGLRLAERGGKAGKKRAIIATARKLAVLLHRLWVSGEVYEPLRNTKRTMSAAA

SEQ ID NO: 250192 - protein, 388 aa, unidentified
MTQTSVSLPHPVALDHNETLVLAIELSNKSWVLAAQVPGLTRVKAKQTIEPTAEALLAALQGYRERAKIAGRQVERVVAIYEAGWSGFWLARLLTTHGIETHVVQPSSVLVDRRARRAKSDGIDAELLLRTLLAWLRGEPRVCSMVPIPAEGDEDARRCVRERTELIAERVGLVNRIGAVLATMGCGDYDPLLRNRRQRLDELRTALGTSLPPHAHAKISRMLDRLDLVRKQIAELEQDRDAVLEEEVPDKAGEMIQQLTKLRGIGVQSATVLVREAFVREFANGKALGSYAGLCATPYNSGGTDREQGIGKAGNRRLRTVMIELAWLWQRYQPGSAVVNWFRARVSGTGARMRKVMVVALARKLLIALWRFATQGVIPEGAVMKPAP

SEQ ID NO: 250193 - protein, 348 aa, unidentified
MNATTIGLDLAKSIFQVHGEDGQGRIVFQKKLRRGQLDAFFAKHPRCVVAMEACGSAHYWGRTIAALGHGVRLIPAAYVKPFVRRNKNDARDAAAICAAIGRPDMRTVAVKSVAQQAMRSVERGRELLVKQQTQLTNCVRGLLTELGIVAAQGRRGFAQLRTEVEAGDARVPELLRATLQELMHQLDSLAEGIAKLEARIVATAKQDLAMQRLCKIPGIGPLTAHAIVAAIGDGRRFDTARDFAAWAGLTPRENSSGGKTTKLGISRQGDRRLRSLFALGASTVMRSARASEGRATPWQRGILARRPVKVAVLAQAAKTARIAWAVLVSGEAYRRPASPPVQAAAQAA

SEQ ID NO: 250194 - protein, 369 aa, unidentified
MDDITYVGLDVHKATVCVAVAESGRGGEVRQVGVFQNRPEILCKMAAKLGRGGRRLSFSYEAGPCGYGLHRLLTACGHSCVVVAPSLIPMKSGDRVKTDRRDAMMLAKLHRAGELTAIWIPDATHEAIRDLVRARATAGRVLSKARQHLQGFLLRHGRIYRGARAWTQAYWRWLTTVRFEHPAQQIVLQDYIHAVEDAEARRDRLTRQIEEMLPSWSMAPVVAALQAMRGVALVVAVTVVAEVGDFRRFANARQLMAYLGLVPSEHSSGSTIRRSGITKAGNTLVRRVLIEGAWTYRMTARVSRKLHDRLEPLSPVIRGIAWKAQVRLCARYRRLAASGKPKVVVTTAIAREMVGFIWAIACIAQLALA

SEQ ID NO: 250195 - protein, 353 aa, unidentified
MKYYTSTTEFNCGIDLHARQMYVCVLDRTGKKLVHTNIRHNDFAYFLKLVAPYRHDLTVCAECMFGWYWLADACAAAGIHFVLAHALYLKAIHGGKNKNDRIDSEKICHLLRTNLIPPGYVYPAAKRPLRALLRQRLLYVWNRSELLSRIQSHQLAYNRPPTRQTLYNREPWQKHLLASEPDPVRQLALQNDLALIGHYDAQLTSLEKELLHLTKQTASRDFTLLKTTPGIGDYLGLTILHEIGDIARFPSVKDFLSYCRLVKGTVASAGKIKGLRGAKLGNPYLRWAFGEAAIIAKRDALLGPLAQRLEARLANKFKANTVLAIKLARAVYFMLKTKTVFDPERLVAALSHN

SEQ ID NO: 250196 - protein, 411 aa, unidentified
MNPVVGLDIAKGESQVQAFLDKKKPYKSSFKVSHTLEGLDILHQFLREIENLTGVKPPIVLEATGHYHTPVVQYFEDRDYLLIIINPLISYRAKSSSLRKVKTDKIDAYHLCELYYKEDLEPYKKRGIHLLNLRNLTRQHENLTEIFVQAKLQFQAVLDQVFPEYKGVFGDLYSVVSLLTLLEYPTSNDVLETCEETIAARIKENCNSRSHSWAKTKAKELKASAARNPFQRTLYQSHILTLKMYINMLLEYQKHLSTFQAEIDALAKELIEYKIIQSIPGIGEKIAATIISEIGEIDRFNHPKKLVAFAGIDPSIFESGRFKGTVNRITKRGSSRLRRALYLAVKCAIRDCRKKKTTKDIIPRNKRLREFFDKKREEGKPYKVAVIACANKLLQWIYALLKSHSTFQDIA

SEQ ID NO: 250197 - protein, 345 aa, unidentified
MYYVGVDYHRRFSYLTVMDEGGKILKEAKLPNTKEALHTFLKDTLNGSSKQTKAVLEVGRNWPVMYDLLEEELGEVKLAHSYKIKAIASAKIKTDKIDSRILTHLLRANLIPEVYIPPKTTRQAKNILRQRLFFIRLRTMIKNRIIMILERHPEVKDRPQVSDLFGKAGLLWLKNLKLPSPDNKLLEESLELLENLNVRISETEHLVKKLAKTHPYVKRLLTIPGIGKFFSVLIAYEIDDIKRFPNEKKFASYIGIIPSTYASGSFLRHGRITRQGNRYLRWALIEAIWPAINKSYYLKTYYERIRKEKGANKAKVATARRLATIIYRVLSEKRDYIEKYPAASY

SEQ ID NO: 250198 - protein, 340 aa, unidentified
MEKRYIGIDLHRNRFTCCIRLENERTYVTEWELEDMGKFVKKLRRSDEIAVEITGNTRLFFDAVKPHVARVVVVNTNQFRVIRQSVKKTDPNDARTLALYLSKNMLPEVRMKDKEHGQLASLIQTRDTLVKLRTALKNKINNILSARGLNLPKEALSSEKRLNEVLSLPFDEIVQIELRVIVEQIRSLNKSIVDLEKTIGDAGSKLEGHKGLSSIKGIGKITSAILLSVIGDVNDFADEAHLASYFGIVPRVANSNETERSGRIHKRGTKLGRTALVQSALVAAKYSPYLKRFYEQVKARRGAGKAIIALAKKFLGVIYRTLKNKWMFADFPNFVLAEES

SEQ ID NO: 250199 - protein, 351 aa, unidentified
MVTVGIDPHKHVHVAVAVMDDGRPIGKPLIVKNDALLISTLLKWVRSITDGTATWAIEDGRGFARRLADSLLLAGQEVVWVPARLAAGHRRLHAATGAKSDPIDAAAVARAAIATPGLDRHRIDERVRELRVLVDYRADLVKRRTMVINQLKAQLHVWLDQTPGDLTRARNVNALATLISAAQLSPHVRQTLADMTADIATLSRHVGDLDTTIRNLVSPLAASLLQVTGISYNSAAVLIAEIGDITRFPSSARLARYAGCAPIPVYSADKERHRLHRGGNRRLNSVIYTAAIVQKRRSPAARELLARHEPGKGIRGARRILKRHLVDVIHRAMTADQATWQHHITRHQDAA

SEQ ID NO: 250200 - protein, 346 aa, unidentified
MITIGGDSHKRTHTFVAVDDLGRQIAETTVAATSDGHLAALDWARQWPDRRWALEDCRQVTRRLEGDLLRGGDSVLRVPTQLMAGARRSAREPGKSDPIDAMSVARAALREPGLPHARLDGRERHLKLLVDHREDLVGERTRIQSRLRWHLHELMPEHAVALRTLDRFHVLADVRARLDALDGPVAAIAVELVDRTRELTVRINELTREITAMVTDLAPTLLALQGCGPLSAAKLVAEAAGIDRFRSRSAFARWNGTAPIPVWTGNEKFRLSRGGNRQANAAIHRIAISQWRDHGPGHDYIARRIEGGDPKRSAIRALKRRISDEVFRRLRDDLDHRESAETASAA

SEQ ID NO: 250201 - protein, 472 aa, unidentified
MVHVHGVQAQRLAAVTDGADPHELIAVAIDVGKHSAMALVCDFAGELLARPFEFAMSRPGIELLVARVTAATSARSVRLVRVGIEAAGHYHRPVVSAGVLPVAWQVVQCNPAHVAAQRHVAGRRGVKTDHTDLVAISDLVRAGHGGDQPPVRPVLLELRAWVAHRDRRVAVRSATKNQLLGQVDRVFPGLAGCLADVLGTKIGRLLVSEGCDPAHLVGLGPDGLRALAADRGVLLQATLARRLVRAAQDALVTDHAAAARAVLATDVDLLTVLDAHVQAAEQHLARLLPQTAFQVLTTTPGWGVVRVTRYAAAVGDLARWPSPRQLYRASGLTPTVYASAGRRRDGAISREGSVLLRRALLDLGVGLWHCDPPARAYAAALRARGKPGGVIACALAHRANRIAYALVRDQLAYDPDRWPSQAPGTLTPDQPASCSLATTATPARLPGRKAGIDTVSVMADPTLPGTVVSRRG

SEQ ID NO: 250202 - protein, 465 aa, unidentified
MPQKSISPGNIKDVLIHHAIHGVGSTFISRSFRIARSTVHKYITLYRTSGLVYTDIVNLSAKKIVAIIHPKKNIYESCGRYVALSRYYDRLIAPFILYMWVKHIERRLPMRRDYQKGKVFAIGRDVFIGIDVHKGNWHITARVKGEEVFHVSMLSEYQCLRKFLERFKGSKVRIAYEAGPCGFGLYDKLSADGVETIVVPPSLIPVESGNKVKTDKRDSRKLAKLLESNMLKKVYVLTEEDRANRELVRTRRQLIEHRSDVMRQIKSKLLFHDIKSPFPAKQGWTKQYVKWLRELHFEHEVVKVSFDTLIDLYEYLGSQVAKISKDVIVLSQSDKYSHKVKLLRSVPGIGILIAMELLVELPDIERFKTADEIASYMGLTPSEYSTGQYVRQGRITRCGNTRARVCLVESSWHLIVKDLFWRGKYMKLKYRRGAKRAIIAIARNLIIRIRRILLNNEPYVITVAA

SEQ ID NO: 250203 - protein, 381 aa, unidentified
MTTLATRNTQDTTTEGTLFVAFELSEKTWKLGFTTGHGQKPRERTVTARQQERVLDEIAQAKRRLGLPATAPVVSCYEAGREGFWLHRFLQGHGITTHVVDSSSIEVNRRRRRAKSDGLDVRKLLSMVMRYEQGERHVWQVVKVPSVEAEDQRHLHRDLATLKQERASTTTRIQGLLSSQGLRVTSLTKLPEQLEALRLWDGAPIPPGLRRRVLRVYAHHTFLSEQIAALEAERRAQLQASTDARIDKVRQLMQLKGIGINGAWLLVMEFFSWRAFKNRREVGGLAGFTPTPYQSGESAREQGITKAGNRHVRWMTTELAWSWLRLQPDSALSVWFRERFGSGGKRLRRLGIVAVARKLLIALWRFLETGVIPAGAVLKEV

SEQ ID NO: 250204 - protein, 342 aa, unidentified
MEEGGTVYQLYVGIDVAAETFVAAWLAPGGKPVTGEQTPAGCAALQRRLRATAVAPIATLVVLEATGNYWVALAVALHEAGYRVAVVNPRQAHHCAKAQLRRAKTDALDARDLARLAAALRPAPWSPPPAVYHEVRQRLVARDGLLAMRTQARNQRHALLQWPVVVAAVRQHLDELVADLDRRVVTLEAEIAAILKESVWAESLACLTSAPGIGLVTASWRLVGTLNFALCPGPESLTAYAGLAPMPRESGHTIRGRRAIGHDGNGRLRTAFYMATLSAARYNPAIEAFYQRLRAAGKPKKVARCAAARKLLHQAWALGSKLQRFDPDHQQQQHDPLPQLAA

SEQ ID NO: 250205 - protein, 322 aa, unidentified
MAMLSFGGIDVSKDRLDVMVLPEEQCSSVPNDAAGWAKLVEQLRGFSISAVGIEASGGYERGAVRALLAAGMSVRQVNPFKLRQFARASGVLAKNDPLDARMIASFVAVMPTRPAQRQTLAAERLVEMLAVRRQLSAEKVAAENASRLLEDAMLQRLSRRRIARLAADIDMLDGHLVEVVGTDAALAHRYRLLTSMPGVGTVLACTLIALLPELGRMTRKQVAALIGVAPYAFESGTLKGRRCIWGGRANVRQVLYMAAMSASNWNPGLKAFHDRLEAAGKKPKVTIVAVMRKMITTLNAMLRDDVVWADRLRGRHSVPTVR

SEQ ID NO: 250206 - protein, 340 aa, unidentified
MNGRFIIGIDLAKNVFQLHGMASDGSVAFRKKLSRAKLLPFIAEHPTCLVAMEACAGAHHWGREIGKLGHDVRLIAPQYVKPFVKRQKNDAADAEAIAEAASRPTMRFVGVKTHRQQSQAMAFKTRDLLMAQRTQTINALRGHFAEYGIVVPTGPQNIRQLAAVLHEPEPDLPEAVVELGRELLKHLQMLNERIQTQDEVVRKSAQSDETARRLMKVPGIGPITAAAMVALSPDTSTFSKGRDFAAWLGLTPKQNSTGGKTRLGKMSKMGQRDLRRLLIIGAMAVVRHTAKQVSEKESWLGRMLARKPKMLVAVALANKIARVAWALMARGGVYESPATV

SEQ ID NO: 250207 - protein, 347 aa, unidentified
MRFYNRQHRFYCGIDLHARTMYVVIMDQAGEILLERNVKSDPKIFLTLLAPFREDVVVAVECIFTWYWLADLCAAEKIPFVLGHALYMKAIHGGKAKNDKIDAHKIAALLRGGMIPQAYVYPALMRSTRDLLRRRLYLVRQRAELLSHILNTNSQCNLPDFGGRINYKTNRLGVAERFADDSVRKSIETDLKLLDHYDELIAELELYIVRTAKVHDSDTFHRLRSIPGVGKILAMTILYEVHDITRFTRVQEFCSYSRLVKCSRESAGKRQGFGGQKIGNVHLKWAFSEAAVSFLSKCADGRSLVERLRRKHGKGKALSILAHKLGRAVYYMMAREKTFDMQRFASC

SEQ ID NO: 250208 - protein, 354 aa, unidentified
MSHLELTVGIDLGDRHSHLCLLDTESGEVIEQSRISTNPKAFEKRFRGCQRMRVAIEASTHSPWVSRLLEECGHDVLVANARKLRLIYAEGRKTDELDAEKLARLARIDPKLLAPLKHRGEASQAHLALIHSREALVGTRTKLVNHVRTTLKSLGYRLPACSTRAFHRRVAKHLPEPLRPALGPVLETIASLSAQIREYDAKLEAVAKELYPETRLLRQVNGVGPLTELDFIVTIEDTSRFEVSRTVGAYLGLVPSKDQSGGCDPQQHISKRGNEMLRKLLVSCAHYVLGPFGQDSDLRRHGLKIGGRGGKNAKRRAVVAVARKLSVLLHRLWVTGEAYEPLFNANRFGGGQAT

SEQ ID NO: 250209 - protein, 310 aa, unidentified
MIIAPGFIGIDVSKSHLEIFDPADGKPVQIDNTAPAIASLIEGWAQRDAFVLFEATGRYDLMLRRTLAAAGIRFARVNPGRARDFARAAGFLAKTDAVDARMLAVMAQCLRPPPDDARSQEREQLALLNKRRDQLVASRQQERTRRREASDPVSLDSIVDHLAWLDAAIGALQTQIAALIDAAPELNHDRRLLVSVPGVGPVTAATLLALLPELGKRSPKQLAALAGLAPFNNDSGARRGQRSIRGGRKRVRDALYIAAFSAAHHAPRFIAFYKNLTQAGKPAKLAVIAVARKLLTILNAILRDQTPFRA

SEQ ID NO: 250210 - protein, 376 aa, unidentified
MRKVALDLGTRKTAYCEVREGKVVLRETVTTVRSLDSLLGPDQPPAVVAIEACREAWHVHDLLTSWGNAVVLVDTTRSRRLGIGQHGRKTDRIDAEVLALALERGGIPPAHLLSPHRRELRRWLGVRRALAETRAQYVTTARGIARESGSPLPRCAVDNFVSNVRKMQLPASLQSALEPLLKMLETNSIELEGVEKNLAELCLTEPAIELLATAPGVGLIVAACFVSVIDDAKRFRCAHHVESYLGLVPSEDSSGGKRRIGAISKKGNKYMRALLIQSAWTILRTADRNDPLRLWTEAVAARRGKPVAVVALARRLVGVLWSMWSKGTAYEASRLAAASGRGLSRAAQTTEFLAEALKKASKKQSMKKLTAAAVTH

SEQ ID NO: 250211 - protein, 353 aa, unidentified
MDKYIGIDVHAASCTIAVVDARGKQTGSHVVATNGQEIVECLRAIPGQRHVCFEEGTQSGWLYEILEPHAVEVVVAGVGAGSRGPKDDKRDAFGLAEDLRQGAIKTRVFKNGGPYKALRELARTHRMVVRDVVRTKNRIKSMYRSRGVAVAGKSVYSSAGREPWQEQLPEACRGPVRTLYAELDALEEVRNDAEKALVQEARTFPITKLLSTCPGLGPIRAAQLVPIVVSPHRFRTKRQFWSYCGLGIVMRSSSDWVRDKNGQWQRAQVQQTRGLNLTHNHHLKAIFKGAATTVIAQHPDEPLNLSYQRWLAAGTKPNLAKVSLARKIAAIALVMWKTEEEYDSSKHNKTVSP

SEQ ID NO: 250212 - protein, 339 aa, unidentified
MKTYAGIDLHSSNNYIVVINENDKRLFEKRLPNTLEAIVPALEQFKETLTGVVVESTYNWYWLVDGLQDIGYNMHLANPAAIQQYSGLKHADDKWDSFWLAHIFRLGILPEGYIYPKEFRAVRDLLRRRLLYVKQRTTHILSLQSMITRNLGLRMSGNAIKKLKTEDAEELFTDSYLVFTAQQNIKTIEFLKNIIKDIEKKVLKVAELAPEFIKLKTFPGIGKILGLTIMLEVGDIKRFSKVGAYSSYCRCVKSERISNGKKKGENNKKNGNKYLSWAYVEAANFAIRFSPEAQRFYQRKKAKRNGIVALKALSNKIARASYYVMRDQVDYDVEYLFRK

SEQ ID NO: 250213 - protein, 345 aa, unidentified
MNYYAAIDVSLELSSVCIVEATGKVVKEVKVETRPEALVKFFKNFGLPLTRIGLEAGPLSQWLHAGLTEAGFETVLMETRHVKAALSAMTVKTDRRDARGMAQLLRMGWFRPVHVKSPELQEVRALLVARKQLQHKLTDIELSIRGILRGFGLKVGKVTDKAFEARIRKLASGHAMLEQIAEAMLAARATLLEQFNKLHKAVLDIVRHDEVCRRFMTTPSVGAIVAITYKSALDDPNRIKKSRNAGPLFGLTPKRYQSGETDVTGGISRVGDAMVRTALYEAANVLLSRVTRFSALKRWGLQVAKRRGLKRAKVAVARKLAVILHRMWLDGTAFRWTKTKVVAHA

SEQ ID NO: 250214 - protein, 349 aa, unidentified
MHATTVAIDLAKDVFELAYADDDHRIVARKRLSRRAFARALDNQGPLRVVMEACGSAHYWARRFVSQGHTLRLLPARDVRPYVRRNKTDRTDAAGLLEADRCAQIDAVPIKSPEQQGVEALHRIREQWKAQRTATINLMRGVLREFGVVIPLGAAKVRPAVFAALDDGENELPMALRHTLGEMLDRLAELTGAMNAIEQQLQACAHADPVCQRYQQAPGIGVLTATALRASAGPLERFRSGRHFAAWMGLAPREYSSGNQRRLGRISKRGDGYLRMLLIHGARATLRAALVREQHQQSLNRLQIWALTLQQRVGHKAAVALANKLARRLWAMEHHHVAFDANHVSVRPE

SEQ ID NO: 250215 - protein, 348 aa, unidentified
MDTIGVDLHKRETQLCIGQADGSITEQRIVTSRERFTAVLGHRPPARVLGEASTESEWVACHLESLGHEVIVADPNYAPMYATRARRVKTDRRDARTLMEACRAGTYRPAHRLSAARRHVRAELAVRDAVVRTRTRYVALAKALVRRDGLRVPSSAAERVGAHLAALAVSPPLAAELAPLLTLLPPLNATIAAADQRLAELERTDPSVALLMTAPGIGAVTASALVATIDDVQRFASAHQFEAYLGVVPGERSSGELRRIGPITKAGNRRARWLLVEAAWRILRSKDPASAPLRAWARPIAARRGPRIAAVALARRLAGILYAMWRDSVPYDARKVRRPRRAPGGPAS

SEQ ID NO: 250216 - protein, 343 aa, unidentified
MKLTRVGVDLAKQVFQVHGVDRAERPAWCKRLKRSRWIAELERAAEPGAEIGMEACGSAHHWARVLQGKGYRVKLIAPQFVKPYVKTNKTDANDAEAICEAMSRPSMRFVAVKTVEQQDLQAVHRVRSSLIRERTAKANQLRGLVYEYGLVAPRELISLRRAVPEWLENADNGLTARFRSLLAGLYRDLQRFDERVRELDQEIAVIAREHEAVGRLEQLRGIGPLTASALYALVGDARQYRNGREMAVSLGLTPRQHSSGGKERRLGISKRGDKYVRTLLIHGARSALRAAPGKTDRLSRWVLALAERSHPNVAATALANKMARVAWAMLRHGTNYEPEGVVA

SEQ ID NO: 250217 - protein, 411 aa, unidentified
MELVHLRCAGLDVHKATVVATVRVPGSRRGERHSETKTFGTIARGLTDLAQWLVGHGVTDVAMESTSVYWRPVYAVLENTVHVILVNARHVKMVPGRKTDVRDSEWLAQLLECGLLRASFVPPPAIRDLRDLTRLRKTLIRERGHHVNRIEKTLELAHLKVSGIVTDLMGKTGRAILQALSAGSDDPDQLADYAQGLLRKKRAALREALVGRLTPHYAFLLQQHLALIEALDTHIATLDARIDEAMMPFAEAAALAQTMPGVAGRAAQAILAETGVDMTPFPTAAHLASWARLCPGNHESAGKRQPTTTGKGATWLRATLQQVAWAAIRTKQSYYRALYHRLKARGGAKKAIVAVQHALIVALWHMLKHRVVHHDLGADYFERRDPARLRRHHVRRLEQLGYDVVLVDKAA

SEQ ID NO: 250218 - protein, 337 aa, unidentified
MDYFAGLDISMEETHVCVVDREGTVIHEGKSASTAEAIAKALAKAPSCRRIVFETGRMAPILFHGLSQLDLPVICIESRQAYQALKSLATHKTDRNDARGLAHLARTGFFKAVHVKSLSAHAVRSLIIARKKLVGQRVILENQIRGLAVVFGVRLPRALTTAFIDQALKASEGIVGFSAAMRGLIAARVAVMTAVAAIDADMRRMTTASGACRRLMTIPGVGQLTALAFVAAIDDPSRIRRSRDVGAYLGLVPRRHQSGEVDYLGGISKCGDRRVRTLLYEAANVMLTRYKGQLKLKEWAFAIARRSTMRKARVALARRLAIIMHAMLRDGTEFEAA

SEQ ID NO: 250219 - protein, 424 aa, unidentified
MKVTYQTCCGVDVHKSFLVATIVKTTGGIEPSYQKKRFSTFNSSILEFKQWLLDNDCHDVCMESTGKYWVPVFNLLEDEINVVIANPKWVKAVKGNKDDTKDSKWIGDLFRLGLVKGSYIPCKIVRILREYTRYRYKLVSCRSSEKNRYQNTLTVCNVALDSVVSDIFGKSSMSIIDYLLEQSGTSINHEEIASKLLRSLKSKEDAVIESVEGYQMTDAQKYRVRLVRAHMDYITAEINDVDKMIENMIFSNPDFENAVQFLCTIPGVKRDSAITIISEIGTDMSQFGGSKRLCCWAGLTPGSNESAGKKKSVRITRAGVYLKPALVQCAHAAVKSDKSPYYKKKYESLVKRRGKKRAIIAIARMILTAIYQMLSTGEEWNPSTLYKIDMPVALVEKQKAKAIKQAKKLLQREGLLPPDESLAS

SEQ ID NO: 250220 - protein, 339 aa, unidentified
MQLYAGLDLHSTNTYIGILDQEFNRIFKKRVSNNLDLILQTLKPFGSQLKGIVVESTYNWYWLIDGLMDNGFQCLHLANPSAIKQYEGLKHADDQHDAFFLAHLLILGILPQGYIYPKKDRPVRDLARKRMFLVQHKTAHILSLQSLIARCCAKKVSSNEMRHLTLDDLQHLLEEEHLVLSAQANLDNIRFLTRQIKQIEKTINKKIKLNEAFQNLLTVPGIGNILAMTIMLEVGDISRFAKVGNFASYCRCVSSQRLSDGKSKGHGNRKNGNRYLSWAFVEAAHLTRRHCQQFRRYYNRKVAQANTSLATKALSNKLARICYYIMRDNVPFREELSSQ

SEQ ID NO: 250221 - protein, 353 aa, unidentified
MAKVSVAGIQKFVEGGRGKGVFIGVDVHKRSYSVALLRPDGMWKEWTSSSNSKVLESTLLPLRSRIGSVVYEAGPCGFGLARRLIRAGVPVVVAAPSRIPRPVAASSKTDRLDGRKLAEYAASGMLRSIAIPTEEEEGLRSLVRRRHRLTDSIRQVKQRIRGLLLQFGIPEPAGINHWAKAAITEIGKLSLPPGADQTRDSFLRELAFLNQERDAIEETLRQMCRASEPSRRIKAMRSIPGVGEIVATTFAAEVFRPGRFRRPEEVTSYLGLAPVVRQSGDAKARSRICPVGQGRLRSLLVEAAWMWKQRNAEAETLYRRILGRTGVPQKAIVAVARKLAITLWRLSVSPMAA

SEQ ID NO: 250222 - protein, 385 aa, unidentified
MGSQAFIARDYDVFAGLDVDKKSISVTFTDHQGLLKSMRMPYSVDHLVNHVRKHYGDKKVAFAYEAGPTGYGLYDGLVAQQYPCLIASPSMIPKAPGQRVKTNRLDSLGLAENLRGGQLKSIHVPTTLYRELRHLTQLRDALVSEVVAMKQRIKSLLLMEGLEFPPAPPGSQWSFLVKAKLRKLPCSSVVRFKLDQLLDNLEFGEKQVLKVTREIRRFCQNDPELSQCIDYLKSLPGIGWIVASQMLARIGDWRQIKNIRELAAFLGLVPTESSTAERTTRGSITHSGDPRLRSKLIQASWSAIRQDGELLKFFRTVAKKHPRHLGPRVAIVAVAHKLCMRAAVVLMKQRPYEIREKVQSAPLTQEETVPQGTTRRRRVPGEKIS

SEQ ID NO: 250223 - protein, 503 aa, unidentified
MAKIAQTTRQKATRKKENSTPVGAESKAPKPEEKGKRGDRKRRTRKREAIENRPIVEPNAAGIDIGAREVYVAVPPDRDEQPVRIFETFTADLHALAHWLTACGITTVAMESTSVYWIPVYEVLEAHGIRACVVNARHMKNVPGRRTDWHECQWIQFLHSVGLLRAAFRPEAEVCALRAVIRHRGELVQMAAKHVQHMHKALTQMNLQIQHVITDLTGLTGLAIVDAILKGERNPSRLAQLRDPRVKASPETIEKSLVGHWQPEHLFTLQQSRRLYADYQREIGECDAEIERLVGSFQPRIDPELKPLPPDQKKNRNYAKSRKRRTRPPSNSRKFDLRTEVYKLFGVDVTQIPGLEFLALQLFSEVGRDMSRWANAACFVSWLALCPDNDISGGRVLWRANRRVHNRAGQLFRMAAYALDRSPTRMGAYLRRMKAKLGPQAAHAATAHKIAVIFYAMIKNQTEYDETIWEQRDAQRHQKRITGLKRQAQRLGYKLTPIEEEAA

SEQ ID NO: 250224 - protein, 463 aa, unidentified
MAKKNTTSRKSKSKARKSVLERINPNAAGIDIGANFHFVAIPEDRAEENIRKFGPFTSDLHRLADWLAEHHIETVVMESTGVYWIAVFQILEQRGFEVKLVNAAHVKNLPGRKSDVSDCQWLQQLHTFGLLNGSFRPKDEVCVLRTFLRLRDTLVKDCSSHVLRMQKALTEMNVQIHRVLSDITGYTGMAIIRAILTGERNALTLAQMKHPQVKASTEQIVKALEGDYRPEHLFALQTAVELYDAYHLKITGCENKIEQQLEQFETKLDFDQVLEQSGVLKVRSAKVRLELQRQAYLTSVCGVDLTRLPGLSTLAVEVIISETGLDMNCWKSEKHFCSWLKVCPDNRISGGKVLSSKSRKTKNRAAGMFRLAAQGAMQSKTAIGAYIRRIRARLGAPTAINAGANKLARLFYRMLKFGAAYVEQGQTYYEQRYKDRLLHNLNKRAKELGFQLTPCQPATVSVS

SEQ ID NO: 250225 - protein, 346 aa, unidentified
MRPNLFMEIDYVVSQCVGIDVSKEKLVATMCMFSLAEQAVYSRATEFENSKTGFNQLVKWSRKEAMKDLPLRFVMEATGVYHEHLANHLVKIGCTTIVMMPKKAREFAYWEGMISKNDTIDSRVLALVGCVKRSMRPWQPTSPIYRELRMMTRFSQDAKVLRTELNNHLEALSHSHEPEKSVIKHYEAMVDALDKRIEKNLENMKKKVASDAVLAKKVENIMTIPSVGFLSAVTVIAETNGFALIQSRNQLTSYAGFDIKDNQSGTVEGKSRISKRGNTRIRAILYMPAVQCQRRSKHLKDAYERIVVKHPDKKMIAVTAMQRRLLLLIYAIWKSNKAYSEDYNKE

SEQ ID NO: 250226 - protein, 412 aa, unidentified
MEALYERCCGLDVHKSSIAACILLEQKHRPQKHLRRFGCTTRDLLELAEWLRGFDVRHVAMESTGVYWKPVWNVLEEHFQMVLANAQHIKAVPGRKTDMMDCQWIAELLRHGLLRGSYVPAPIIRDLRDLTRTRATLSQEQSSISSRIQKLLESANIKLASTVTHTMGKSGRAMLDAMVNGEESPERLADLALGKLRSKIPQLQLALDGRIRDHHRFLLDSLLRQFRFLEAEIQALDARLEQLGQQHQELADAVSRWITVPGVERVAAWSLVAEIGSDMTAFPSAAHLASWAGLCPGNHESAGKRLSGKSRKGSPWLRRMACQSAWAAVRTKNCYLSAQFKRLSARRGSKRALIAVAHSLLVIGYHLQSKGCVYQELGSNYFDHLHAERLKRHLVKRLEGLGLTVTLQPQAG

SEQ ID NO: 250227 - protein, 354 aa, unidentified
MIIIGADYHPGFQQIAFVDTDTGELQERRLQHPEEAEKFYRDLGAQGASVRVGMEASGHARWFERLLSELHFELWIGDAAEIRTKRVRKQKTDRQDAQLLLRLMLEDRFRIWVPSWENRDLRQLLWHRHRMVQARTRIMNQLQAVALNEGLRYKKRLWREAGRKQLESFPLAPWASRRRHDLLELLDRLNPTIAELSQAIEQAVEKCPEAQRLMTHPGVGPLTALAFVLIIGRPERFRCGKQIACYLGVVPLEESSGDRRRLGHITKQGNSMLRFLLVEAAQVTVRSDPEWRSKFFHLAMRRGRKIAKVAMARRLAVRLYWMWRKGWNYEQWIKFGSHAGQPGHRHGVQLTPSN

SEQ ID NO: 250228 - protein, 341 aa, unidentified
MQITTIGLDIAKNVFQVHGIDAAEKVVVRKQLRRGQMMKFFEALPPCLIGMEACATAHYWARELRKVGHQVRLMPAKDVKAYVKRNKNDAADAEAICEAVRRPTMRFVEVKSAEQQGRLMQHRTRDLLLRQRTQVINALRAHLAELGIVAAQGREGLKELLAIIADERDARLPIDARASLIVLATQLQALQTMIGSIEKRIIVQHRASEESKRVATVPGIGTLGASAITATVTDPSAFRSGRDFAAWIGLVPRQDSTGGKQKLGPISKQGDRYLRRILVVGAHSVLRRAKQNPQKYPWLTQLLARRPFKVVAIALANKMARIAWALLASGGRYRAPRLAAA

SEQ ID NO: 250229 - protein, 341 aa, unidentified
MSDYSYFCGVDLAKNHFSIHAVDQNGKVILHKSVTRSKLLTTIANMPLMRIGVEACGGAHYWTRTLNKLGHDARIMAVKYVVPYRTKGKNDLNDAVAICEAVQRPSTRFVPIKSPEQQAILSVHRMREHWVRERTALMNRMRALLSEFGLIIPVGRSSLMKHVPLMLEDAENELPHLARTVIADAYHHLGELNQRIADTEQVFDSFAKVSANVQRVMKVRGIGPQTATAILASIGNGSQFDKSRDFSAWLGLVPKQYSTGGKPRLGRITKHGDKYLRTLLVHGARTVIANLGDKQDKLSQWCRGVLERRGMNRAIVALAAKNARIIWSLLHNQTEYENYAA

SEQ ID NO: 250230 - protein, 340 aa, unidentified
MDKVTTIAVDIAKRIFAVYWVDRQTGEIGDKTMTRAKFEEFMRRREPSRVVLEAGGSAHYWGRWLALQGHEVQLIAAQHVRPFVRTNKTDETDARAVWEASHRPGMKWVAVKSEASQAVLSLHRMRTQLKDMRRMQSNQLKALLYEFGIVAAKITTAQIEAWVSAGRVPQLLQASLGAQIERIAGLKRQELELTRCIERHNAGDALATHLLAVPGIGTLTASALAAELGEGAAAGYTNGRQYAACKGITPRLSGTGGKVRAGAISKRGDPYVRTLLIHGARSVISHQRRAKSLSPWLKGLLERRPLNVAVVALANKMARTAWALAAHGRDYEQNYAAQAV

SEQ ID NO: 250231 - protein, 316 aa, unidentified
MSELVYVGIDIAKSSFEVAVTGESQTLNLANDEAGHAKLCQLLVPLTPRLILLEATGGYEQDLALALAGAGLRVSVVNPRQARDFARCVGKLAKTDRIDAQALRGFASMLDAQGHEPRALADDERRELTALVVRRRQLVAMLVSERQRLGVAHRKAKPSILAIMDAIAAQLHDVDGDLKAHIQAHHADLAKLLTSVKGVGPTTASTLLAQLPELGQLNRKQITALVGLAPMNRDSGTLRGQRHIFGGRADVRRVLYVAALVGTRFNPILKAFYAKLLAAGKAKKVALVACMHKLLVILNAIARTRSPWRNDIADGL

SEQ ID NO: 250232 - protein, 350 aa, unidentified
MDYFAGLDVSLETVSICIVNAAGDVVLERKVEAEPAAIAAVLQHVGRPLKRIGLEAGPTSSWLYSELRGIGYPAICLECRHVKAGLSAMRNKTDRNDARGIAQLVRLGWFRQVHIKSGQAQRVRMLLVNRQQLLTKALDLENSVRGSLKVFGLRVGTVTRQTFEARVLELVAEDHSLRAITEPMLRVRRALIAEFERLDRFCRQWALQDPVCHRLMTVPGVGTVVALTYRSGVDVPERFAKSRDVGAHFGLTPQRYSSGQTDYDGHISRCGDAMVRTALYQAANVLLHHGRWSSLRSWAMRIAKRGSTKVAKVALARRLAVVMHRMWVDGTDFRWSAVAPPAPTTPALAS

SEQ ID NO: 250233 - protein, 377 aa, unidentified
MEIAIGIDVHKDKCAAFAKFAGKGEPRPRHETFLEKFNERFRRFDSDYRGMTELADSVRDHSVHILIENSTKSQDVYWMLRGLGLEVTVAHATDLKQITESMNKNDDNDAAKLAGYMRRRLWGEMEFAQCYIPMQDTLLQRELCRYDLGLRSELTALKCQIHAHMLIRGWKLTRDYANIVSVAALRELNAADIDIFRFDVAKAKYLKQLIAETDRALRARMETNRMFGIIWSIPGFGILSASYTACMIDDISRFRDGRSLAAWMGLTPKLDESADKPRNCGITRRGDPELRKLICQATFVHIFHSESFISEKYKRLKSRGKSHNEALVACANSMAQMIFAMLRDDTGYVSDPKTLAKARALADSEEIEDEMEASARV

SEQ ID NO: 250234 - protein, 352 aa, unidentified
MKNDTTELRTMGLDLGDKESTYVVLDRDGVVEAEGKVATTAPALRKLLGKRERTVVALEVGTHSPWVSVLLKEMKHHVIVANPRQIPLITRSQRKTDRTDAETLARLARVDAALLAPITHRGQRAQEGRALILARAHVVAARTALVNHIRGTVKAHGGRLPQCDADAFAMRMWERIPERLQASLGPLLELVRQHTLLIKAYDGEVNRLAEKEYPESGVLRQVHGVGALTAVTYILTLEEKGRFKKSRQAGAYLGLAPRQQASGEQNPQLGITHAGDRYLRTLLVECAHRVMRGTDCDLRRFGERLTARGGKNQKKRAIIAVARKLAVLLHHLWVSGEVYEPLRSESSAPMAA

SEQ ID NO: 250235 - protein, 349 aa, unidentified
MVTLGIDAHKRTHTVVAVDDAGRELGQKTTVATTSDDHLAMLAWAERFGPDRTWAVEDCRHLSRRLERDLLGAGERIVRVPPKLMAHARDSARTYGKSDPIDALAVARAALRYPDLPTAQLDGPAREIRLLVDHREDLVAERTRHINRLRWHLHELDPTWDPPAKSLCRYKHLDATAARLETIEGPVAQIAAELVERIRDITVRERDLERQVTVLVAEQAPTLLARPGVGALTAAKIVAETADVRRFKSKDAFARHNGTAPLPVWSGNRERHRLSRTGNRQINCAIHRIAITQARCHDDAKTFIERRKAMGNTNTEALRALKRRISDAVYRDLLADARPAAASYLAHAA

SEQ ID NO: 250236 - protein, 345 aa, unidentified
MDIEVLGIDLGKSVCSLAGLDATGVVVFRKRLQRHRLLNFLEKLRPCVVAMEACGGAHHIGRFCLQHGHEPRLMSPLYVRPYVKVHKNDDRDAEAIAEAATRPTMSFVAIKSEEQLDLQALHRARERLVTERTRLINQGRGFLMERGIRVGTGRHVFQKELMRLTEDGTSDLSRRILLMLSDMASELATINGRVDAIDTEIKTLARADTDMQRLMEIPGVGPTIASALVAAVGTGSSFAKGRDLAAWLGLVPRQTSTGGKAKLIGISKHGNRYLRKLFIHGARTVLHLVRDRTSPIARWADGLKERAHVNVAAVAMANKMARIAWAVLTKGERYRPAALVGQHTG

SEQ ID NO: 250237 - protein, 395 aa, unidentified
MEDPIIACDVSKGKSHIQGFIGLSKPIGNPFVVRHLKSDLKLIKELAKSLESQTHKKPKFVFEFTGIYHECIAKYVQSLGLDLYAISPLESAKVRKSQIRVTKTDSKDCLNIATVYYTRSIRKFESDNCDIKSLSRSKRDIRNALIEQRGVYHRYLDLIWPCFDEYFKADSKISEIIVSAYKHPYVIKKRSVNMVAGILLNNGHYSKNRAFDIAYKIKEYASECVSGVDEKSEYVNALISSFNKIQSLTNEMEEINLKLDNSLRKSLVYQLLKSVPGIGANLLIQMSAEIGDYTRFKTSKQFVAYIGLDPSILQSGNNDGEHYSITRKGNGILRSCLYLAVSQMLTQKLDNQITRFYYKKKSSGLSHKVAAVASCRKLACCVFGMLNSGTCFETI

SEQ ID NO: 250238 - protein, 373 aa, unidentified
MNYSIVYVGMDVHKETFSLCCYTNEKEKAEYNQKVEGHYSKVLNYLEAMRFHYGNDATFICGYEAGCLGFTLYHQLTEHNVKCEILAPTTMLKPQGKKKVKTDNRDAELIARCLAHHDYSAVHIPTEKDEQTKEYIRMRSDHKLALKKIKQQILSFCLRHNYRYEDGVNYWTQTHIAWLRALKPAGLYQEILDEYLLTFDNLTDKIERLDKRIEELASDEEYKEKVHNLTCFLGIKTQTALSLVAETGDFNRFATAQHYASFLGLTPGEDSSGEDQTHLGITKAGNRHLRTLLIEAAQAFSRGQVGYKSKALKERQQGCAPKTIAYADKANERLRRRYYKLTLSKGKKMNIAKTAIARELACFIWGMMTEDIA

SEQ ID NO: 250239 - protein, 406 aa, unidentified
MHVVHERCCGLDVHKRVIVACVLSGRERTIRSFGTMTEDLEGMAAWLEECDVTHVAMESTGVFWKPIHNVLEGHAFELLVVNAQHMKAIPGKKTDVKDAEWIADLLRHGLLKPSFVPSRAQRELRELVRYRKALVRERAAESNRVQKVLEGANVKLASVATRVLGLSGRAMVEALSSGVTDPTELADLARGRLRAKHADLQRALRGMVGPHQQMLLAAQLRHLHYLDGEIESLSQEIASREQPDEAALAQLQTIPGVGRRTAEVILAEVGADLSRFPSAGHLASWAGLCPGQNESAGKRRSGRTRKGSAALREALTEAARAAARTRQCYLAAQYRRIAARRGANRAAVAVAHSILVIAYHLLTKGSVYEDLGSNYFDDRDKVATVNRAVARIKRLGYEVTVTPHAA

SEQ ID NO: 250240 - protein, 375 aa, unidentified
MQQEKTGEVVTSYYGIDLHKDQITWHCIHKTGSGETAREYGKISTDRILEELVPMLTVNDSYLIVEASGSSFFFYSLVEAHCKKAFVVNPVAFRELYMTGKKTDRIDAKKLAERLKYHIECDDDKSGFPEVFVPDAEIVKIRKMVTAYELVVKQGTQIKNQAKSIFRSKLMSVAVDIMEKGLDEALNDKRIDEADRSILIMLKRIYDTLMEEKEEIKKQILLLGSFRFREEVKLLMSIPGISLMSATVFMADICTVDRFKSEKKMTSYLASVGTVDSSGGITRNGGLSRRGRRTSYRYILQGLEHIVNGNKDFQKFKERHALTRSNKVRAAIVRKTFVSMYFMLKNKETYRYLNEAIYTRKIRDLKKYGIDFKCA

SEQ ID NO: 250241 - protein, 348 aa, unidentified
MRFYTKKHRYCCGIDLHARSMYICILGDEEKPLVHRNCKASPEAFLKAIEACRDDVVVGVECMFVWYWLADVCAKEKIPFVLGHALYMKAIHGGKSKNDRIDSQKIAALLRGGTFPVAYVYPRKMRSTRDLLRRRNHLMRKRSELLAHIQNTNSQYNLPELEKKIAYKANREGVTDHFPDPSVRKSIEVDLQLLDFYDQLLTNLELYIVKKVKAHDVRSWYLVRSIPGVGKILSLVLLYEIHDIRRFPRVQDFVSYCRLVKCPRESGGKKFGAKNSKIGNVHLKWAFSEAACLFLRGNEQAQHYHSRLVSKHGKGKALSILAHKIGRAVYFMLKRKEPFNMETFFVRA

SEQ ID NO: 250242 - protein, 352 aa, unidentified
MSSLFVGCDAHKHYSQLEIQDDSAKVFRRLRIDHRRGALSSFFSSLPTDTPVALESVGNWYWIADEIEAAGCLPVLTNPGKAKLLMGHVNKTDKLDASGLATLLRLGSLPSVWLPPAALRDQRELPRTRMALCTWRTRIKNRIHSLLAKYALSPQDGSTLFSQRGRSWLTSALPSLPPETARCLAQQLQLLDFLSLQVSELEDRIRSTIALTPTMQLLKSLPGVADMLAIVIEREVGSIARFPCAPQFSSYSGTTPRVTSSGGKTHYGKMRTESNQYLKWAFIEAANVVAAHHAQRGWTERHCSKLYVRVRARKGASVAIGAVARHLAESAYWVLNKNEPYREPAKVSPRQG

SEQ ID NO: 250243 - protein, 385 aa, unidentified
MSQLNDLSRSLTSLEQDNAIIAVIEMSQSSWLVAGIVPGIERHPLKKLEPNEAELLRLLMRWRAEATKMGCTITRIAVAYEAGRDGFWLARWLRAHDIETYVIHPTSVAVSREHRRAKTDRLDTGLLKRVFIGWLRGEPDHCHMVTIPTLAEEDAKRPNREREGLVRERTRIVNRMKSCLARFGVRSFKPTLRKAPERLAMLVTPEGVPLPANTLLELRRDMARLRFIMDQIKEVEEARGQRLEQAPQEKSHAMVRMLARVIGVGIETADMLVHEILSRSLRDRRAVARYAGLTGAPDESGSRRQEKGLAKAGNARVRRGMIQLAWRFLLFQKDSALAQWYRTRTESAGKKRKTMIVALARKLLIALWRLVTIGEVPAGVVLRAA

SEQ ID NO: 250244 - protein, 354 aa, unidentified
MSQKLNTAIAVIGIDIGKNSFHVVGLDKRGAIVLRQKWSRGQVETRLANMPPCLIGMEACVGAHHLSRKLKGLGYDARLMPAKYVRPYSKGQKNDFRDAEAIAEAVQRPTMRFVATKTAEQLDLQALHRVRERLVSQRTGVINQIRAFLLERGVAVRQGLRFLRAELPDLLATRTEALSPRMTRVIEDLAGDWRRLDERIESLSTEIAALAHQDAACNRLMTVPGVGPIISSAMVAAIGTGDVFSKGRDFGAWLGLVPKQISTGDRTILGKISRRGNRYLRVLFVQAAWVVLIRPKSWERYGLKPWIEAAKKRLHHNVLAIALANKLARIAWAVLNKERNFECNSMDKMASRPA

SEQ ID NO: 250245 - protein, 344 aa, unidentified
MQITTIGLDIAKRVFQAHGVDATGAVVVRKRLRRSELPAFFAKLPPCLIGIEACATAHHWARELMALGHQVRLVPPSYVKAYVKRGKNDAADAEAICEAVTRPNMRFVPVKSTEQQGVLVLHRARELLVRQRTMLVNGLRAHMAEFGIIAPQGIQQVPKLVAVLEDETTGIPQVARETLAAIVAQIQNLSASIKQMEKRIVTWCRANAAARRLATIPGVGPITASALAATITDPTLFRSGRHLAAWLGLVPRQHSTGGKTKLGRITKMGDQYLRKLLVVGMTAVIRSARRTKAPAYAWVNALLERRPARLVSVALANKAARVAWAILVRGETYRAPTVSVAAAA

SEQ ID NO: 250246 - protein, 356 aa, unidentified
MKQVKTLSFAGQDIYCGIDVHKKDWSICIRDNERELRCFSQPPQPAILADHLKRNYPQANFQAVYEAGFCGYWIQQALSQQGISCIITHAADVPTTDKDRRQKTDRVDCRKLAQALKERSIRAIYIPSQQIIEDRSLVRGREQLVQDQTRYKNRILSWLHFFGIAIPEGYKKSTHFSKRFISWLEQLPINENAKFSLQAKLGALQGIRNQLLLVNRSLRKLAQSEKYQKKIELLRSIPGIGITNAMIFLTELDDISRFKTFDQLSSYAGLKPDIYSSSDTTIIKGITHRCNLLLRESLVESAWKAVAKDPALLMAYKKYKNRMHYNKAIIRITKKLLRRICYVLLHQIPYVTGIVG

SEQ ID NO: 250247 - protein, 372 aa, unidentified
MKRILKIGADVHSSNYTLCAVEPLLEGDVNELFTVDVEPCYQEILRFIEKLKKRFRGDELSITCGYEAGCLGYKLFHDLEAHGVKCVILAPSTMEVPGGKRIKTDKRDAFLIAKCLAKGGFSAVHIPTQTDEAVRDYLRMRDDHKQSVKTYKQQINAFCLRHGYKYERTKWTQPHMKWLREIELGEIDRETLNSYLATYEQLTDAVERYDARIEELSYMDEYREKVQKLRCFVGIKTHTALSLIVETGDFSRFVKGSFYGSFVGLVPGEKSSGPHTNRCPITKAGNKHLRTLLTECAQAIGRSRPGYKSKELKSRQKGCPPEIVAYADKANDRLRRKFHKMIYRGKHKNVAATAVARELSCFVWGMMTDNIA

SEQ ID NO: 250248 - protein, 402 aa, unidentified
MNAVGIDVSKGKSMVAIMRPFGEIVSAPFEIKHTASDINSLVELINSVEGESRIVMEHTGRYYEVLAHQLSEANLFVSAINPKLIKDFDNDSLRKVKSDKADAVKIARYALDKWQNLKQYSVMDELRNQLKTMNRQFSFYMKHKTAMKNNLIGILDQTYPGVNTYFDSPARSDGSQKWVDFASTYWHVDCVRKMSLNAFIDHYQNWCKRKKYNFSQSKAEEIYGKAKELVPVLSKDAITKLIIKQAVDQLNSASTTVESLRTLMNETASKLPEYPVVMAMKGVGTSLGPQLIAEIGDVSRFTHKSAITAFAGVDPGVNESGSYEQKSVPTSKRGSSDLRKTLFQVMDVLIKTHPQDDPVYQFLDKKRAQGKPYYVYMTAGANKFLRIYYGRVKEYLSSLPES

SEQ ID NO: 250249 - protein, 338 aa, unidentified
MLYVGVDAHSERSHITVMDEKGKIVKRANVASNRECVRKALGAYRQPMKAVVEASYCWGGMYDWLDEVADKVVLAHPLKVRAIAEARIKTDKIDSETLAHLLRADLIPEAYAPSSDVRARKRVLRQRMFLVRVRTMVKNRMKALLAQHEVTRPEVSDLFGKKGCEWLSALELPSPDGELLKENLALLKVMNERINSTEDLIARLTEGDAAIGWLVSLPGIGVFLSVLIRYEVDRIDRFPSAKKFAGYTGLVPSTYASGERMVHGRLTKQGNKWLRWALIEAVTPAVRTSPFLRRHYEAIKSRRGAKDARTSTARKLAELVWTIWTEKRCYEERQRHER

SEQ ID NO: 250250 - protein, 356 aa, unidentified
MSSIVSEQYEFVIGVDTHAATHTFALVAGATGAVLDHAVFPTSAAGLSRAEGWLARRVGDAPTLVVIEGTGSFGAILTERLQSAGREVVEAARMPAGDRRGTGKSDELDAVRIARAVLGLAAADLRTPRALATDRARVAMRVLVVARDQMTRERTRAINALIALVRTIDLGIDARKPLTAGQIATIAAWRERDEDATTATCRHEAVRLARRIRTLDGDLAGNRANITELTRQDTPQLLELTGVGAVVAASVLIAWSHPGRVRSDAAMASLAGTCPIPASSGNTVRHRLNRGGDRRLNRALTTITIVRMRVDPATRAYVTRRRAEVRTTKEIMRALKRYITRQLFRTLAAAHPIPTG

SEQ ID NO: 250251 - protein, 385 aa, unidentified
MPAFEWVHVQLHQQKGMISLSPPTICNSADKVTEAAVVGGVDTHKDLHVAAVVDQNNKVLGTQYFSTTRQGYRQMLAWMTSFGTLKRIGVECTGTYGSGLLRYFQNAGLEVLEVTAPDRMERRKRGKSDTIDAECAAHAAFSGIRTVTPKTRDGMIESLRVLKTCRKTAISARRVALQIIHSNIISAPDELREQLRNMTRMQLIRTLGSWRPDASEYRNVTNVYRISLKSLARRYLELHDEIADLDVMIAAIVDELAPELIKRNAIGYESASQLLITAGDNPQRLRSESGFAALCGVSPVPVSSGKTNRYRLNRGGDRAANSALHIIAIGRLRTDAKTKEYVARRVAEGHTKMEAIRCLKRYISREVYTLLRNQNRRINSIPITA

SEQ ID NO: 250252 - protein, 420 aa, unidentified
MNKSTSINIASGSLLIGLDWAKHKHDYCLKTPEGGYERGQVEHGQAELRQLIDYLSGRFEGQRICICMEAGRDPLLWLLETYEDVDLYVVNTATAARYRKTFTPSGDKNDQRDAASILDLLERHPEKVRVHKKSSLPARAMHQLSSARRNAVDRRTAVISSFREVLELYYPVAPKLFEDLSTGLALEFFKRWPDPQSLSKARETTLIDFFHKHRSRSQERIQKRLEQIAQSHPTIEDLTLLEVGRMRVSDHISQIQILNKSIKRYEKQIEEVFEAHEQSSLFSELPGAAKNLAPRLLAAFSLLEPKDAVEMQTMVGIAPIRVQSGQSTKTFMRQRCPKFIRQSFHEFAGCSVKSSAWAKAYYDHMTKTKRCGAHAAKRALAFKWIRILFACWEKNEPYNEIKYIAALQRRNSPLVKLISM

SEQ ID NO: 250253 - protein, 356 aa, unidentified
MSRDVKYIGMDVHKEAIVIAVRNGSGKLIMESIIETKASSLLQFLQGLRGELHVTVEDGTWAAWLYDVLKPHVHQLLVCNPRRNALLKEGSKNDKVDARKLAELLRAGMLRPVYHGENGLRTLRELARSYQTISKDLTRVMNRIKALYRGWSIPCASTQVYAPRYREQWLHKIPHAGVRRRAELLYQQLDGLQALRRNVRPEFLAESRKQKAAKLLCQIPCIGPIRAGLLIALMQTPHRFRSKRQLWTYSGLAVETHDSAQYRYVDGQLQRSKKPQQLRGLNQNHNHEMKHIFKSAATTASCGVGPFRDFYAALLAKGMRPEMARLTLARKIAAITLTLWKKGGRFDPEQLKPQAA

SEQ ID NO: 250254 - protein, 405 aa, unidentified
MDLLYSRCAGLDVHPRSVSACVRLVTDGRVSQEVRTFGTNTRELTEMAEWLASAGCTHVAMESTGVYWKPVWHVLEGRFELVLANAMYVKNIPGRKSDVKDAVWISDLLAHGLLRGSFVPPERIQELRDLTRTRKQLVREITRHTQRIQKTLEDANVKLTEVITDVIGMSGRAILRALIAGETDLDRLVDLTGGRLKASRATLKDALQGRVTEHHRFMLKMHLDQLEHLEAAVRDVEARADQQPFRTATELLKTIPGVSAVTARVIVAEIGDDMTRFPTAGNLISWAGLCPRLDESAGKRRSTRVRHGAPWLKTVLVQAARAAANTRDSYPRAQYLRLKARRGPNKATLAVAASLLTAAYHMLKYGVEYRDLGPNHFERDKDVQAHRLLRRLKALGLEVTIKPAA

SEQ ID NO: 250255 - protein, 414 aa, unidentified
MDIVHPRCAGLDVSKRDVKVCVRLHLRGRVKATSTVTTWGSVTSQILALRDHLVAEQVTLVVMEATGDFWKPFYYLLEEGPFDIMLVNPRHVKNLPGRKTDVSDAAWLAQLGAHGLVRGSFVPPEPIRKLRDLTRTRATIVRERAREIQRLEKLLEDAGIKLSSVATDLHGVSGRAMLDALVAGERDPAVLANMAKQRLRSKIPELTEALTGRLSEHHAFLVRVQLDLIDQRARIVDELTARIEEEMVPFRAARDLMITIPGISTRVPDVIIAETGADMSRFPSAGHLASWAGTCPGSNESAGRVKSTHTRPGNPYLKGALGIAAMAAARSHDTYYSVKYRRIASRRGPIKAVVALEHAMLVAIWNMLQTGTTYNDPGDDFYSRRSPDKTKRRALDQLRSLGYTVTLEPTGEVA

SEQ ID NO: 250256 - protein, 373 aa, unidentified
MDDYSDAFVGFDTSKLRNAVAIAEAGRGGEVRFLGEIENTPAATTKLVRKLAAKYKRLTFCYEAGPTGYGLHRQIKDLGFECVVVAPSLIPKRPGDKVKTNRRDALSLAKLLRADELTSVWVPDGRHEAMRDLTRARETAMLDLRTKRQHVSAFLLRLGRPYPERKKTWTQAHVSWIAGQKLEHPQQRLVLEEMMLAVRQAQERLVRLEQAIAAVVPEWSLAPVVTALMAMRGIDLVSATTLLAEIGDLSRFRTPSELMAYLGLVPSENSTGDTVKRGPITKAGNRRARRMLVECSWSYQHPPRVGQAKQPKVDAAPPAVREIAWKAQCRLYRRYRTLIRKGKLKTVAIVAIARELAGFIWAVARAARVAAPA

SEQ ID NO: 250257 - protein, 319 aa, unidentified
MAMNTQAIQIGIDVAKEELVIYRHDLDQLDSLPNTIPSIRRWLKTLPEQAALAVEATGTYHMPLTEQAHRAGHSVFVIDGYQLKHYRESVRARAKTDPCDARLLARYLAREGDDLRAWTPPPKAYRTLQSLLRRRSKLIQARVALQQSLGQEPSLKAPLKRLVAQINRIDQLIQKRMDQAVRQAGLTEQVARCEAVEGIGPLSACALVMAFLRGDFRNSDAFVAFLGLDVRVRDSGKQVQRRRLSKRGDPEIRRLLHNAAMAARRHPYWANVYQRYRDRGLKTTQVLVILARKLARIAFALMKNQTTYQAKAKQACGTT

SEQ ID NO: 250258 - protein, 352 aa, unidentified
MNSPFTIGIDLAKEVFAICVLDERGAVRERRVLRRAAFERWAAQPPDGIIAMESCSSAHHWDRWFSARGHAVRLIAPEFVTPFRKGGKNDDADAEAIAVAARQPTMRFVTVKTVEQQAILSWHRARQGWIEERTALINRLRGLLAEFGIVLGRSRSTLRTALPRLTEDARLPVQVRALLLEAREQFTALEVRVARCDAEIAAHLLDNAPAQRLRVLLGIGPLTASALVATVSNASSFKNGRQFGAWLGLTPQQHSSGGKAQLGKATQHGDGYLRGLLVQGARSALQSALRCLPERLSRLGRWIVELFHRKGYHKTLVAIANKHARMLWAMPAHDETYDPLAWQRYRAPAATV

SEQ ID NO: 250259 - protein, 462 aa, unidentified
MQDPREVESRRRRQVEGLPVIRPGVAGIDLGSERHWVCARTADGAGREIADFGATTPELIRMGKWLKARNVESVAMESTGVYWIAPHEVLEAEGFEILLVDTRQLARVPGRDKKTDATDCEWIQRLHSCGLLKSSFRPREDVCMLRTLVRDKANLVAESGDWVRRMQKSLDQMNVRVHRAVSDIDGVTGMAILRAIANGERDPRQLAKLRDPRCRKNMEEIAEQLSGHWREDHLFSLRQSLQMYDAIQQRIADYDHEILRKLAEMERDESRGQPTPPVKNPQKAKAIKKRGEEQMRQALYRMSGVDLTSIDAIGVETVQVVLSEYGPDLSRFPTEKEFVSHATLAPRRPMSGGKPVRKKRRNTASTRVAAALRMAALSLRNSTTALGAYYRKIARRIGGDVAVFATARKLATLIYRLLRWGQPYVDEGADAFEKRYLDKRIRFLQAKVKELGYQLVQREVTG

SEQ ID NO: 250260 - protein, 353 aa, unidentified
MIVLGADMHKRSHTIAAVAAASGELLGEKTIAVGDRGFAAALDWARGLQEARVWALEDCRHVSGAFERFLLVHGERVVRVATRLMAGERRGGRDRGKSDLIDAIAVARAALREGVDRLPVAQLAGVELDIRLLVDHRERLVRMRTALYNDLLWHLHDLWPEQTFPACALLSKKWTTRVARRLARAEQSARVRIARDELRHLRELSDTINLLGAQIADLVAQVAPQLLAEPGFGALTAGKLIGEIAGAHRFSSDAKLARAAGIAPIPVSSGNTNRHRLDRGGNRQINTAIHRVAITRLRCHPETKTYIERKRGEGKTNREALRCLKRHLARRIWHLLQPSPPVLNNTPNINLLT

SEQ ID NO: 250261 - protein, 348 aa, unidentified
MKNTQKTLQTPSFFLGIDVGKADLYCHILTPELKASERFDNTSSGIKKLITWLKSKANPDQISACMEQTGHYGMAAAKALHALGLCSLHLVNPRQIKAYGNQKLRRNKSDTADARLIAEFLKSEQADLMPWSPQSAENEQITELSRYAESITKDNAKLKTKCEAVSNPAILRSLKRRIKAQEKEIKDTRQRINKIINNKEELKTKTKLLISIPGIAETTSHLIIAEIPDIALFNNARQLAAWAGLTPQHYESGTSGRSTTPITKIGSSILRRGLFMPAMNARVFNPLLKTFADKLKDNGKNPKQIIIAVMRKLLHQIYGILKSGEPFNPKKRGFISTSKPLKHQLKIN

SEQ ID NO: 250262 - protein, 319 aa, unidentified
MQSKLTIGMDIGKAEVVVACHESAFAVLKMANAVPVLRRWLATLPAGSRLGLEATGGYHEPVAELAHSLGFTVYILNPKDVHHYARALGARGKTDRLDAQVIAAYVAEHNARLHAFVPLSADEKLLRELARRRATLVNAKSMLQQSLRVLPGFEREGRELLRAMGSFADRLERKLAQIAARSSERATLVKRLQTIDGVGTLTSIRCATLFTRVPFHSSDAVVAFFGLDPRPNDSGQHRGRRRLSKRGPSEDRRLLYNAAMSAIRTPAWRPLYLHLRNRGLASTEAIIIIARRIVRIAFAMYQNHSNFNPRLVPRPYCPA

SEQ ID NO: 250263 - protein, 316 aa, unidentified
MGDQAIYVGVDVSKARLDVAVRPSGEGFAEANDKSAVSRLVKRLKALACTRVVVEATGGYETIIVAALYAAGVAVVVVNPRWVRNFAKGMGWLEKTDRIDAKLLALYAERAELKVQQLPDEATRQLAELCARRIDVLEMMETERNRLEHASSAVRRAINSHIDYLRKQLKRIEHDIDGAVRGSELWRHKDELMDSVPGVGPTLRACMLAWLPELGQLNRGEAGKLVGVAPLPDDSGTVRGVRRIFGGRAPLRKVLYMATMGAMLHNPHLRAHYDRLRTRGKLHKVALVATMRKLLLILNAIIKTDTPWSESCLESA

SEQ ID NO: 250264 - protein, 342 aa, unidentified
MKKCNVIGLDLAKNVIQVCKISADGELIYNKAVSPKKLRELLAKEKASIVALEGCGSCHYWGRFAQQYEHDVRIISPKKVKAFLQGQKTDANDALAIAVASIQVGMIFSQLKSEEQQIIQTVEKTRKFLDKSVTALSNHIRAFMYEYGITSPQGKKGLRETVTLVVSDEDHRLPANLQGMLALLWERYKITLEHLTANEKIRESLVNSIEPCRRLLDLESVGPVGAARLYAALGNGKTFQKGRDASVYIGVTPKQHSSGGNVYMRGINKGGGDKELRAVLFQGAFSVIYKLPMQARTKKQAWLINLVARVGVKRAAIALANKTVRTAWALLVSGEKYKAELV

SEQ ID NO: 250265 - protein, 392 aa, unidentified
MIYVGIDVAKDKHDCFIINSDGEILFNPFTISNNHEGFNTLFQRIESVSDDFTKVKVGLEATGHYSYNLLGFLLDKGLPTYVINPLHTNLYRKSLSLRKTKTDKVDSRTIATMIMSDMNLKSYSDISYHNEELKSLTRYRFDKVKERAKLKTSISRLVNILFPELEKLVPSLHLSSVYALLSEFPGAAQIAASHLTKLSNLLSQASKGRYGKETAILFRETARSSIGSVMPAKSLELKHTIKLIQELTAEIDEIEAAIKQIMDEEIHSPILTIPGISYRMGAMILAEIGDFNRFDSADQILAYAGMSHSTYQSGQLNNCYSHMEKRGSRYLRYALYHAAKYVCHWDSSFGAYLQKKRSEGKHYNVALSHAAKKLVRLIFAMEKSGRTYQPAA

SEQ ID NO: 250266 - protein, 332 aa, unidentified
MNLVSTLGIDLAKSTFSLYGVDAVGAVVLRRTLSRAKLTELVAQLPPCLIGMEACSGAHEWARRFAASGHTVKLMAAKFVTPYRKSGKNDGNDAEAICEAVARPNMRFVPVKSLEQQSDLTLHRVRQGFVEERTATLNRLRGLLAEFGHVLPLRAVEVQRRVPQLLGKLPTRVAACARDLLEHAARLAAKTLEYEHEIKVHVSSNALARRTQTRMGIGPITASALVATVGNGRDFKNGRQFAAWLGLVPRQYSTGGKTRLGHITKRGDPYLRTLLVMGARAVLQRAASLTDPLSQWALAVRERRGYHRACIAIAAKNARVAWALLAKEPVTA

SEQ ID NO: 250267 - protein, 371 aa, unidentified
MSVAGFEIGADTRHLAKGADLKSLVPIENDVIGGVDTHQDLHSAAVVTIDGTPLGTASFPTTRSGYRRLLFWMRSYGSLLRVGVESTGTYGAGLVRLLAREGVPVLEVTAPDKAARRRKGKDDVIDAISAARAAASGQRVQVAKDRNGQVEALRVLRTTRKTAIKCRRAALQQLHNTIVAAPEDLRDELRHFTRMKLLRTCAAWRPNITGYRDPAVATRIAIRSLCRRILQINDEIAELDHLIKPFVAELAPTLVALKGVGTECAGELLVTAGENPERLQSEASFAMLCGASPIPASSGKTNRHRLNRGGNRQANSALHMIALCRMRSDPRTKTYVQRRLAEGLSKREVMRCLKRYIAREVFSILMARSTA

SEQ ID NO: 250268 - protein, 437 aa, unidentified
MISKAYRATRVNHVDWDRLARGHDGLDLTLGIDVGKHDLWPVVRWADGQFERPWRVKNPVEIPTLVALIQRMNVGRKLVVALESSGTYGDALRQALADAQVPVVRVSNKASHDYAEVFDGVPSQHDGKDAAVIAELAALGKCQPWTYEPASAWEQELSYWVEWMVVHRQILASWQGRLEGLVSRHWPEATGVLKLSSVTLLRALEQYGDPKALASDPQAAQRLSRWGGRFLAPEKTQQLLAEAGSSAGVRVEEWSRRQIQDYARQALAARWEAQRAQRRLEELAADNAVLQAQGKVVGVPTACVLWTSTGDPRKYHSAAAYRKAMGLNLTERSSGKYQGRLRISKRGSARTRQWLYFAALRLVQNSGVRPWYEAKKARNEDDARRVVVALMRKLSLALHHVGVKGQEFQPRRLFGRLGRRRGDQAQRQSAARKIPEA

SEQ ID NO: 250269 - protein, 406 aa, unidentified
MQQSNAKSVIIENSTALETIRRQQKGGNHYAAYIGMDVHKDTITYAVALPGRANGQYRGEIAHTRKAVNKLMGRLSAEFGGELLLFCYEAGPTGYHLYRQMMASGHDCQVVAPSQIPHKPGERIKTDRRDALKLAQYLRSGDLTAVWVPDQEQEAMRDLTRARGDMKGQELKARQQLNGFVLRHGHSWPSNKTRWTKTHYNWLESLAFPHPWQQVVLQEYIDAVKAATRRVADLMDQILQALPSWSLAPVVDSLVALRGIDKLAAITLLAELGDISRFDNPKQLMSFLGLVPSEHSTGKRRRQGAITLTGNGHARRMLIESSWSYRFQARQTMHLKRKAVNASDEAKTIAWRAQKRLCGRYRRLVEAGKNQKLVVVAIARELVGFIWDIVRIEMARLPVQQSAQAA

SEQ ID NO: 250270 - protein, 333 aa, unidentified
MNKQRYVGVDVSQERLDVATRSEGVAPRTGQFANTSAGHRQLVKWLTKGGSGARVVLESTGVYSLDLALALTAAPRIAVMVVNPRAARKFAEACLQRSSTDATMAVALREYAARMEFVPWTPPSAEVREVRAIARRIAALTLEKTRELNRQHAAGASAETPAVILNDVAVNVRHLERRIAALERHAVARITADAQLQRVYQRLLSVCGIAETTAIQLLGELLVLPPDMRARQWVAHSGLDVRHVDSGTSVHKVPRISKQGNAHLRRILYMPALVAIRHQPHVRAFYDQLLTAGKLPMQAVVAVMRKLLHAICGMLNTNTDFDGSKFRKLPEAA

SEQ ID NO: 250271 - protein, 446 aa, unidentified
MDVVFTHCAGLDVHKKSITACRIVPDPTGLDAEGVAELQTFGTMTIELLALVDWLAAAGITHVAMESTGEYWKPVYNLLEGSVTVLLVNAAHVKNVPGRKTDKADARWLAKLMRYGLLQASCIPPAGQRDLRDLTRYRTKLVQERVREVNRVQGVLERANIKLASVASDIMGVSGRAMLEALIAGRADPAAMAELAKRRMRRKLPLLEQALTGLVRDHHRRLLAIQLAHIDFLDEQIDTLSAAIEANLAALSAEERATPAVSAAAGASLSTAPVSPPPLTFTRAVELLDTIPGVNRRGAELIVAEIGIDMTRFGTAPRLAAWAGVAPGNNESAGKQRSSTTRKGNQALRAGLTQLAQAAAHTKETYLSALYGRLAARRGKQRAIMAVAHSIMVSVFHMLTRQEPYRELGARYFDERRRHYTVDRLAQRIERLGYRVHLEPIATTAT

SEQ ID NO: 250272 - protein, 449 aa, unidentified
MKSVTTKQSGLPVVHERAAGIDIGSRFHVVAVPPDCAEEPVQTYQAFTGDLQRMADWLVRTGVKTVAMESTGVYWVPVFEILEERGIEVILANAREARAVPGRKSDVNDAQWLQRLHACGLLRASFRPARDIAALRVYLRQRERLLDFTAAHIQHMQKALTLMNLQLHHVVSDVTGVTGMKIVRAIVGGQRDPQVLASMRDVRCKSSLETICAALVGNYRPEHVFTLTQALALYDFYQERIEACDRQIEHALAILNVDKVCPEAPMPKAKHRTKQPNDVSFDVRSVLYQLTGQDLTQIHGLGPYLALRLIAECGTDLSKWRSAKHFTSWLTLSPGCKISGGKVLSAHTKKTTNRLTAHLRLAAVTVGRTHTALGAFYRRLAARIGKAKAVTATARKIAVLFYNAMRFGMAYQDPGADHYEKQYRDRVVKNLHRRAAEFGYTLAQAQGVS

SEQ ID NO: 250273 - protein, 402 aa, unidentified
MNCVGIDVSKGKSMIAVMRPFGEVVISPFEVQHTASELSELAKLLKSLDGETRVVMESTGNYHTPVAWLLHDAGLYVSVVNAMLVHDYGNNSLRRAKTDKKDAVKLANYGLDHWLTLPRYVPEEDTRLLLKTCYRQYQQYSKVQTMLKNNLISLLDAIFPEVNRLFNSSPRADGSEKWVDFVSTFWHCQCVSTLSLKSFSARYLKWCRKHGYYFSQEKAFEIHSKAQSCIGVMPRNETTKLLVQQAIAQLKATSAALAALKQEMQSLAASLPEYPVVMEMFGVGSTLGPQLMAEIGDVRRFHSKKALVAFAGIDAPPCQSGQMDIHSRSISKRGSAALRRTLFLVMGIYLQSAPLDEPVYQFMDKKRSEGKPYKVYMMASANKFLRIYYASVTAYLNTLARI

SEQ ID NO: 250274 - protein, 322 aa, unidentified
MSQPNPLCVGIDVSKATLDIAASSDVAQFTVSNDSDGFNAIITGLRRHSVALVLMEATGGLEVAVACSLQAEGFEVAVVNPRQARDFARAMGYLAKTDRIDARVLTQMAEVINRHPERKRFIRALPDAERQALAALVVRRRQLIAMLVAERNRLYPSHPQNKKSINTIIKALEDELARLEKDMNSHIRNHFKEIAERLSSIKGVGTMTVSAMLAEIPELGTLSRREISALIGVAPVNRDSGTMRGRRTIFGGRAGVRSALYMAALVATRFNPVIKTFYVRLLAAGKAKKVALVACMRKLLTILNAMLRKNEEWDESYHHVAP

SEQ ID NO: 250275 - protein, 404 aa, unidentified
MNQLDRTKCVFVGVDLHKNNHVAVLTDCFGDKIKAFNMKNALSAFPAFVEQVKTKSDGKEIVFGLEDVNFYGRSLAKYLLDAGYIVKEVNASYTKKQRSIGTNHNKSDERDAHAVAKTLIFEYKHLPFANPQDVYLAIKQTLNTRNNYVQMAVNIKTSLQNILVHHYPMHKEFFKDVESKTAKGFFKTYPSPNLLKGVTEEELMIVLKKFNKSVPKKKAQEILTAVESNGWNKTDYQKEQNESVISFINSLEHLESQIINLDQVLDDLIEVTGYPLKTINGIDTVLAATFVANIGDIMRFPKANKLAKVAGIAPLEHSSGESQRNYSNKLGNRELNKAFYSLALTQIRKDMNPIMYEYYQNKIKEGRKKKQAMVYVERRLVNIVFSIMKNKTPYRQPELENESA

SEQ ID NO: 250276 - protein, 482 aa, unidentified
MAMRKLSTFERLQPGRWNRQQRRELGRRIAAADAGLAVVHPDAAGIDIGNQSHFVAIPPDRDPVPIREFGAWTAALQELAQWLTAHGIRTVALQATGVYWIAVQDVLEQAGLEVYLVNARGTKNLPGRKSDVQECEWLRKLHTYGLLRNSFRPPEVIRAVRTIWRQRDRWVQEAARAVQHMQKALTTMNVQLANTISDLSGVTGQAILRAIVAGTRDPWALAKLRDRRIAASEEEIAHSLQGTWREEVLFELRQALEAYDFYQGQLAACDRELATYTAAVPSRERPAPPEGPAGAAPRRPAKPARRAKSRRQGHPGFDLAGELHRTLGVDLTRIDGIDVLTAQVVFSEIGPDFSAFPDENHFASWLTLAPQRDISGGKVIRHVPAAGRNRVANALRMAAQSLCRSDSYLGARYRRLRARLDGPVAVKAMARYLACLVYRLVTKGQAYVDRGAAHYEAKRQERERRALERRAATLGLTLVPAA

SEQ ID NO: 250277 - protein, 404 aa, unidentified
MWYVGLDWADTHHDVAVLDEAGKRVGARRFAHSHAGLNELKQFVLSIAAQPEHLACIVETNHGLLISFLLEAGIPVYPVNPKTANQLRKAAGAKTDQIDAHLLAKIGRLELAELRCLEPDSALVQELKTLTRDQDALIQTQTRLVNQLTACLKEYYPAALHLFAKVQQRSTLVFLQTYPTPQAAQAASLDEISATLHTGKHTNPTQVAPKIFEELHRPHLVANAVIVRAKSRLMLALVKQLLVVIQEMSSYDKQISTLFLTHNDQAIWSSLPGAGKRLAPRRLPEWGEDRSRYADASSVQSLAGTAPVPFQSGNYAKAHKRFACLKPLRNALHQFAWQSTRQEAWALAYYRRKRAEGKTHSMALRALATIWVRIIYRMWVNKTSYQTAIFEAARLTHAPRQHVA

SEQ ID NO: 250278 - protein, 368 aa, unidentified
MGKFITYVGLDVHKKTIAVAFADQGDSEVRPYGVVDSNLSSLDKIVRKLVSRGGEPRFVYEAGPCGYGIYRHLKEQNIECMVAAPSLIPKKSGDRIKNDRRDAIKLARLYRSGELTAVHVPNSEDEAMRDLTRAREDSKNAERKARQQLGAFLLRHGLVYSGKSHWSLAHWRWISDIKMEHEAQQFTLQEYVDTVRSCSERVERVTEKIRLLVGQWRFGPVVETLQALKGVCLVVAATVIAEIGDLSRFDNPRHLMAFLGLIPTQHSSGDNIKLGRITKTGNGHARRMLIQAAWSYRLPARVSRRLRDRQENLPEKIWKIAWKAQVRLCTRYRRLLARGKPTQVTTTAIARELAAFMWAIFRTVEVGA

SEQ ID NO: 250279 - protein, 343 aa, unidentified
MQTVTTIGLDIAKSVFQVHGVDAAGQVIIRRQLKRRYMLAFFEKLPPCLIGIEACASSHHWSRELQALGHSVRLMPPAYVKPYVKRQKNDAADAEAICEAVSRANMRFVATKTSEQQSGLMLHRTRQLFIRQQTSVINAIRSHLAEFGIVAPIGRNGVEELLNVVMDTHDNRVPEVARVCLAALGAQLRRFKEQILEFDRLITAWHRSNEMSRRLDEIPGVGPVLATALVASVADPKAFRSGRNFSAWIGLVPKQHSSGGKDRLGSISKQGDRYLRSLFVIGALAVVRYAKIHGTKHRPWLAALLARRPTKVAAIALANKIARMAWAMMAKGERYKEPVALAA

SEQ ID NO: 250280 - protein, 343 aa, unidentified
MKFIGVDLHKKTISLCVVAVVGGKRQVVSRKRFKCEAPAKIRAFFEKQGSFQMVVEATANYEWFLLLIEDLADRCVLAHPKKLRVIAECKHKSDKIDAQVLAEFLAVDMIPEAYRPSPRIRQYRVLVRHRRWIQGRITSLKCKLRDKAAHYNADIAELFTAKGEKHLAEIAMSHADRFQTAQLLALLHHCQEQMEAVDVELRRFAKTAPGIEREARAVLQTTPEVGPVTIDVVLSELGDWRRFRSAKRVTSFAGLDPGYRESDGKGKRLSITKEGSRLLRWAMIETAWRLVHKYQRWKHIFTTLQKNTGSKKKAIVGVARRLLCVMFAMLRDGKAYRLEAVAA

SEQ ID NO: 250281 - protein, 310 aa, unidentified
MTNIDQNYIGCDVSKARLDFFDPARGRHCRIANEAEAMAAFVAGLRPGVDFIVMEATGSYDRLLRLALSAGGVAFSRHNPQHTHHFSRSAGRRAKTDRLDAVMLAEYGRLHTPAADAAPDAQRERLQVLARRRDQLVDIRAREKKHLAEAFDADVRADIAALVAVLDARIAALETAIGNAIRQSRELAQDYAILTSAPGVAAVTALTLIAHMPELGHRSPKTIAALAGLAPIASESGKRSRRSAIAGGRTRVRRALYMAALGAIRASARFKAAYDEIAARAGSKKLAIIAIARKLLVALNAMKRDKKQFQ

SEQ ID NO: 250282 - protein, 370 aa, unidentified
MGNRSMFVGLDVHKETIDVSIAEGARHGEVRHYGVIASDLEPLDKVVRALRAPDRRLHFVYEAGPCGFGIYRHLTTRGEDCVVVSPSMIPKRSGDRVKTDRRDSQMLARLHRAGELRAIYIPDATDEAMRDLVRAREDAVGVGTQVKYRLKAFLLRQGRRYPGREGWTLPYRRWLTDLSFPSAAQHIALQEYRDAIAETEQRIDRLTEQLRQLAPTWRWAPLVAALQALRGVSFITAVGLVAELGDFTRFRHPRELMAYLGLVPSEHSSGPTVRRGAITKAGNPHVRRLLAEAAWAYQGIPRIGRQHAYRQEALPKVVCDIAWKAQLRLTTRFRRLVARGKAKPKVATAIARELTGFIWAIAQEVSPAPR

SEQ ID NO: 250283 - protein, 370 aa, unidentified
MRTDNLVTIGMDVSDKRSHIVVLDEHGEVVVEDSVTTREPAMRKRLSGFAGARIAIEVGPHSPWLSRVLADLELEVIVANPRRVGLIYGNDRKSDKQDALALARLARFDPALLHPVRHRREDTQAVLAILRAREALVRSRTLLINSVRGLVKASGGRLPSCSSESFHRHLDDVPELLRDAVAPTMDVIECTSARIAEQDRLVHELCCDVYPETEMFTVIDGVGDITALTFLLTIEEPGRFRSSRQVGAYLGLRPRRDQSGELDKELPITKAGDNRVRRLLVQAAHRILGPFGKDSDLRRWGLRLVERGGRGAKRKAGTAVARKLAVLMHPPGVTGEGYGARRTAPPRDPTGWNPRPPPAPPPDTTSPRSP

SEQ ID NO: 250284 - protein, 402 aa, unidentified
MNAVGIDVSKGKSMVAIMRPFGEIVSAPFEIKHTASGINSLVELINSVEGESRIVMEHTGRYYEVLAHQLSEANLFVSAINPKLIKDFDNDSLRKVKSDKADAVKIARYALDKWQNLKQYNVMDELRNQLKTMNRQFGFYMKHKTAMKNNLIGILDQTYPGVNTYFDSPARSDGSQKWVDFASTYWHVDCVRKMSLNAFIDHYQNWCKRKKYNFSQSKAEEIYGKAKELVPVLPKDAITKLIIKQAVDQLNSASTTVESLRTLMNETASKLPEYPVVMAMKGVGTSLGPQLMAEIGDVSRFTHKSAITAFAGVDPGVNESGSYEQKSVPTSKRGSSDLRKTLFQVMDVLIKTHPQDDPVYQFLDKKRAQGKPYYVYMTAGANKFLRIYYGRVKEYLSSLPES

SEQ ID NO: 250285 - protein, 354 aa, unidentified
MTRATKYVALDVHQATTLASVRTETGQVIARSVLPTEASAVVEFFRGMRGTVHVVFEEGTQAQWLYDLLVPLVHRVVVCDRHGEKRRGNKGDRVDADQLSARLWRGELRAVYHGSAERATLKELTRAYRSLVEDATRVMLRLKALFRARAIPTRGTRVYQVRDRASWLAQLPERGVRFRAEVLYAELDLLRELRPKAKTAMLAEARCDPAWRVLRGIPYLGPVRVALLLATVQTPWRFRTQRHLWAYTGLAVVTHSSADHEMQQGRPVRRRRAPLTRGLNQNHNRVLKDVFKGAATAATARPGPLQTFYQGMVARGMREELARVTLTRKLAALTLRLWKRGEQYDPTQLTQQAS

SEQ ID NO: 250286 - protein, 355 aa, unidentified
MKIVGCDLHARQQSIALLDTETGELIERTLDHETDQVREFYSSLTGPVVVGIEATGAMQWFLQLMEELEIECRVGHPAKIRAAETRKQKHDRRDALLALQLLLEKRFPTIWMPSTEQRDLRALLRDRHQWVKMRTRVQSTLQAIALNHGLRKGKALWSQAGVACLEALPLLPYTGQRRNELLRLYGQLQKRIQELNQQVEQAAEQRPQARRLLTHPGVGVVTALATEVFLGDPRRFAHGKAVASYIGMIPCEHSSGPRQRLGQLSKQGNALLRYLWCEAAMHAVNKDADLKRFYRRKLVQKGMGKARVAAARKLGIRLWIMLRDQIDYEEFCRRGRQEGEAHAGMPDSNSGPAVQ

SEQ ID NO: 250287 - protein, 312 aa, unidentified
MDLFVGIDVSKAVLDIAVAPTGEAWSVGNSTEGMQQLVSKLGEISPRLIVLEATGGLERRAIAALAGASLPVVAVNPRQVRDFAKATGRLAKTDAIDASVLALFADRIRPQVRPLRDEETQELEALVVRRRQVVDMITAEKNRLAAAPPSKSVRTAIGKTIKWLQKQLEETDSDLDNAVKGSPIWREKDDLLRSVPGVGKVLSRTMLSLVPELGTLGKKQLAALVGVAPLNWDSGQQRGRRCVWGGRAHVRAVLYMGALAAARFNPVIRAFHARLIAAGKLPKVALVACMRKLLTILNAIVRDRTPWTREAA

SEQ ID NO: 250288 - protein, 392 aa, unidentified
MFFIGIDIAKRSHQAAVTDVSGNIIIKPFNFKNSSLGFNQFLSVLESNSVPKDDCVIGLESTGHYWYPLYFFLVEQKFNVKVFNPIQTAAFREITIRKVKNDNLDSIMIADFTRFGRYSETHIPSENMLALKNLSRFRLSVSDICGTLKKRTIVLLDQVFPEYDTVFCDIFGTTSKLLLEKFSTPEEFSEISTTKLANFIHKVSRGRLGREKAELIKAAANNSIGISYAVDTFSFQIKQLIEQIEFMENQLSEIDAEMAKLLALSEYSVITTISGIGPTLGSIIVSEIGDIERFETSSKLVAYAGLDASVKQSGEFNSSQNKISKRGSPYLRRALWMAAFMSLQCDPALYDYYSRLRARGKSHRLATTAVARKLCIIVWAIMKSKLPYSPNI

SEQ ID NO: 250289 - protein, 349 aa, unidentified
MSRSPFTDAAVFGVDLGKTRFDVMAADASGKPLRRAKLTRSTILPFFEQVPRALIGMEACPGAQWLARKLAAMGHTVRIIPAQFVKPFVKSNKNDARDAEAIAEAVVRPTMRFVEIRQEAQIDLQALHRIRDRISANRIQLICQMRAFCLEYGIAMRPGAGVFKLDMARILTDEDNDLTPMMRTLLRELWDEFVVVDARLAAVSKQVEAIADRVDAARRLMSIPGIGPLGATALLAAIGDGRQFRKARDLAAWLGLVPRQNSTGGKTTLLGISKRGNPYLRRLIIHGARSCIAHLNRERDRMGEWIGQLEQRMHRNKVVVAFANKIARMAWAVLTRPGNLYERVEPTQA

SEQ ID NO: 250290 - protein, 421 aa, unidentified
MEEVDELDQIVDRVAGLDLGKTGLVACVRVPSDRPGRRQQEVRSYDTFSRSLLELADWLRAERVTRVAMEATSSYWKPVFYLLEAEGFECWLLNPRHVKHLPGRPKTDTLDAVWLAKVTERGMCRPSLVHPAPIRALRDLTRYRRTLIRDRTRERQRLEKLLEDAQIKLSSVISDILGVSGREMLEAMIGGHRNPRVLAQLARTRMRTKIGVLEEALTGHFTDHHAFLTRTMIDRIDQVGADVEKVNAAIEEAMAPFRAEARRLDEITGIGIRSAQELIAEIGVDMTRFPTPGHLVSWAKFAPIVHQSAAVTRNGSTGKGNPWLAGTLGEVVAGVSRTHTFLGERYRRLARRRGKKRAIVAVGNSVLKIVWHVLADPDARYQDLGEDHYLSRHTTVRRRRTLIRDLELLTGQHVTLQPHAA

SEQ ID NO: 250291 - protein, 339 aa, unidentified
MQLYAGLDLHSRNTYIGIMDKEFKRVFGKRVSNTLPLILTTLDPFRDQLKGIVVESTFNWYWLIDGLMDAGYQCVHLANPSAMKQYEGIKHTDDQHDAFFLAQMLILGILPQGYIYPKEDRPVRDLARKRLFLVRHKTSHILSLQSLIARCCGQRVSANEIRKFTVEDLQQLLEQEYIVLSAQANLQTIVFLKQQIRQLEKAIQKKVKLSKAFQQLMTVPGIGLILAMTIMLEVGDISRFPQVGNFASYSRCVSSQRLSDGKSKGHGNRKNGNRYLSWAFTEAAHFSRRYNENFRSYYNRKLAQANTSLATKALSNKLARICYYIMRDQVPFRKELLSH

SEQ ID NO: 250292 - protein, 344 aa, unidentified
MEVAIGVDPSKSSLAVAAVDPLGRVVGTAEFSNDPRGHRALLGWVGERGPDRVIGIECSLSYGATLSRVLLRSGEDVREVPTTLTHRQRRRRASQGKSDMVDSVAIARIVASGEVLPSAHRLEVLADLRALVEYRDQLVRARTQVANRTHADLVNVLPGYERQVPNLRAKAHRTTARSLLRGDRSVRGELVRKRLGELSRLEGEIAAMDRRIRASVQKTGTSLTSIPGVGPFIAAKILGEVGDPSRIRSKPAFAVLSGTAPLSASSGQVQRHRLNRGGNRQLNWALHYIALVQCRVMPEAQAYMARQREAGKSHKEAMRCLKRQLSNVVYRHLVADARRAELAA

SEQ ID NO: 250293 - protein, 428 aa, unidentified
MSENSTTHPEPEFVAFVGIDWADQKHAWCSQRAGATQREHGEVEHTPEMVEVWVSQLAQRFGPGPIAVAVEQVKGALVYMLSKYECLHLFPVPSTMSASMRKSLYPSGSKDDPRDAELLLDLLLQHRKKLRRLTPDDEVTRRIQNLVEERRTLVDEKTTQLNRLTGYLKVYFPQMLEWFEKLDTQLVCDLLERWPSLEELQKVPPAELRKFFGQHRGRHQELTERRLEGIGQAMPAIRDRAVLEAKRAMVQVSAQLLRILLEGIANLDSKIEEAASAHPDFFIFESLPGAGSALAPCLLAAFGSQRDRYGSAEEVQTHSGIAPVMEKSGKKKWVHFRWACPKFLRQSFHEWAGHSISQSTWARAYYQQQRGRGKDHHAAVRALAFKWIRILFRCWQDRVAYDENKYLAALARRGSPLSSVLPVTAATL

SEQ ID NO: 250294 - protein, 345 aa, unidentified
MALYVGLDVSLRMTSICVVEADGSSVWEGKTESEPVPLVKVLSPWRDKIALVGIEACPLSEWLYGALADCGFQMVCVETRHAQRFLSSRPNKTDRSDARGIAEMMRLGHYRSVHVKSKPSQLLRTTLIARKKFVDHMLAIEDTIRGLMKVHGLKLGAVHRSRFAARVATLLADAPDLRMAIEPLLEARNMMRKHKALMDRQLSQMARKDDICKRLMTVSGVGPLVSLSFKATIDDPNRFKDSKAVAAHLGLTPRVYQSGEIDRSGNISKCGDKLMRHALYEAANSHMRISKKWSILRAWGLNLAKRIGSRKACVAVARKLAIIMHRMWIEETDFRFGKPPVTQST

SEQ ID NO: 250295 - protein, 391 aa, unidentified
MIYVGIDVAKDKHDCFITNSDGEVLFKSFTIPNNREGFETLFQKVQSVSDDLTKVKVGLEATGHYSYNLLGFLLDKGLPTYVINPLHTNLYRKSLSLRKTKTDKVDAHTIASMIMSDVNLKSYSDTSYHNETLKSLTRYRFNKVQERAKLKVSVSRLVCILFPELEKLVSHLHLASVYALLSEFPSAHAIASAHLTKLTHLLSENSHGRYGKDTAVMFREAARNSIGSNMPTKSLELKHTIKLIHELTSEIDEIETEIKKIMDKINSPILSIPGISYSMGAMIIAEIGDFNRFGSADKILAYSGFSPSIYQSGQLDGAYSHMEKRGSKYLRYALYNATKYVCHWDPTFAGYLAKKRSEGKHYNVAISHAVKKLVRVIYHLEKTNQQYIKAA

SEQ ID NO: 250296 - protein, 472 aa, unidentified
MSRHQRPPAQAKSPTSKAPPKSRPRPPRPQPPAMPLLNPNAAGIDVHSDMHMARVPPGRVPPAAAATADSPANVRRFGANSCDLVAIADWLAGCGVTTVAMGSTGVYRAPLFELLQSRGFEVWLVEPGQLSHCGARPKADVPDVQWIQRLHSYGLLRPSFRPPDSPLALRGYYRQRQRQVRYAASHTQHMHKALEQMNLKLTEVVSDITGLTGRRLIAAILKGQRDPAQLAALRDPQCENDAATIAKALGGTWRPEHLFALRQAYDLYQSHHQQIAQCDRMTHAELARLPSRAGDKPFTPKPRRCGGKPNDLNFDACGPLFKALGVDLTQIEGIGVGTALVILAESGVDVSRFPTEKHFASWLGVCPRQHESNKAKQKRGPRKGKSRVAIALRMAAQAPGRTQPPLGLFYRRIKSRSGGKGAVTAAAHKLACLVYRMLKYGTGYVKRSMEGYGQKLRGQLERALRGKAAALG

SEQ ID NO: 250297 - protein, 382 aa, unidentified
MQTIDTINPTILLAIELSASTWLVAARVPGLEKPHLHRIDGGDTAALLALISSLQARAARGLDATIGVVCCFEAGRDGFWLHRLLAAHGVVCHVLEPTSILVNRRARRAKTDRLDAEGMLRVLAAYLRGDHQACSMVRVPTPEEEDAKRTHREREKLVQERLRIENRIEALLFAQGIRKRPSLRSWERDLAVLRTGDGREIPRHLRAELDRLRRRLVMTLELIREVEAERDQAAKTKPQDQAYHKIAALSRIRGIGENFAAVLTREVFYRSFDNRRQIASYVGITPMPYQSGGMDRDRRISRAGNPRARTTMIQLAWLWLRYQPGSELAEWFRERVGPLAGRTRRIAIVAMARKLLIALWRYAETGVIPAGAEIRAETTVAA

SEQ ID NO: 250298 - protein, 361 aa, unidentified
MGNTIICGIDAHEKTLVTRIGVNQEPAETKRFSNTRSGREALFSYVKKLSGEYAGGKMVMAYEASTLGYGIYDESVAAGIECHILAPGKMPSARKDRKKKTDERDAQRIFEIVRAYALAGNELPGIWIPDHQTRDDREVVRGRLDAAQKLTGLKCQVQTLLKRTGVVKPAEAGDSWTQRYRLWLKQVCIKPGAQIALQSLLRQIEGMEEEIKILDQAVEQLAEGERYKAVAGALVRAVKGVGLLTAMVYVTEMGDLSRFNNRKQVGSYLGLVPSSNESGEVADHKGHITREGSARVRKVLCQATWARVAHDKEEAVVYQRLVKKNPKHKKIAVVASMRRLGVLLWHIGLAAQKAAVQEQAA

SEQ ID NO: 250299 - protein, 602 aa, unidentified
MFAVEIYAAVRRFVFVEGKSRREAARVFGLSRDTIAKMCRYSAPPGYVRSKAPERPKLGLLVPVIDAILEADKTAPPKQRHTAKRIFERLRLEQGYAGGYTVVKDYVRIARSRSREVFVPLAHPPGHAQVDFGECIGVIGGVGMKLHVFCFDLPHSDACFIKAYPAETTEAFLDGHISAFAFFGGVPLSILYDNLKIAVARIFGDGKRQCTRAFTEFVSHYLFQQRFGRPGKGNDKIPWGLPPAMLPVLARSAIEELIMEANVCNREPSLSNSVEEAAIFVSIELSRARWLVTSLSPNTNKYSRHSVPGSDIAELLRLLGELRAKAERRINAGVRIICIQEIGFDGFWIHRVLESNGIESHVVESASIAVSRRHRRAKTDAIDGELLLRTLMAFKRGEPRVCAMVVVPTPEDEDRRRLSRERKTMVKERIEHINRIKGLMASQGIVGFEPMRSKSRDLLDNLRTGDGRPLPERMKAEITRELKRLELLRKQIAEIEAERDALLRPCETTEPSPGAQLLKLRGIGPEFASVVWQEGLYRQFANRRQLAAYAGLAPSPWQSGDMNKEQGIAKSGNPRLRTTMIEAAWHWLRHQPKSALTLLSLS

SEQ ID NO: 250300 - protein, 311 aa, unidentified
MSSKSYVGIDVSKDQLEVFVLSTGGNQTATNTEEGIASLIPLLQSTDPKLIVLEATGGLERPTAEALTAAGFPVAVVNPRQVRDFAKAKGILAKSDRIDARVLADFGEAIRPEARPPKAPEVQELEALTTRRRQIVDMITVEKNRLGSAPKRTRLQIQDHLRYLGKALKDINQELNKTLKKHPQFKERNRIIRSVPGAGPVLAVTLLSELPELGSIDRKAVAVLVGVAPLNRDSGRFRGRRCVWGGRARIRAVLYMATLAATRCNPVIRAFYNRLLKAGKEHKVALTACMHKMIGILNAMIKNQTTWRLAS

SEQ ID NO: 250301 - protein, 337 aa, unidentified
MNPTKSNHKFCLGIDISKADYHVALLHRESGESIARSKFANNPQGHAKLLDWLAKHTGADLPVHACMEATGSYGESLADHLDGKVAILSVVNPRAIKAHGDSDLRRCKSDPADARLIADYCRSKQPRAWQAPSPAQRKNKAISRCLANLKKDRTRESNRLDLCSDKTVVKALKAHIKWIEKQIAKLEDELLAAVKEDAASARALELIVSIKGIGEKSAAYLIAELPDLKLLKNARQLAAYAGVTPRIFQSGTSGKTRTPMSKAGNRHIRKALFFPAMSAMRFNPICKAFAERLKEKGKPSIVIIGAVMTKLLHLIYGVLKSEKPFNPDILKKAQITP

SEQ ID NO: 250302 - protein, 347 aa, unidentified
MRFIGLDVHRDFCEVAIAEAGVVRLAGRVQTEPAALELFAQSLGGDDEVALEATGNALGIARILEPHVGRVVLANPKAVKGITRAGAKTDKIDARTLAKLLAGGFLPEVWLPDEQTRILRRRISARAQLVRQRTRAKNQVHATLVRNLKGKPPVSDLFGVRGRRWLAAQELPADERETVTACLRQIEFLDGEIALIERALAEQVLASAEMRRLLTLPGVNFVTAAALLAAIGEIGRFPTARQLVSYLGLDPRVRQSDTEPARHGRISKQGPGEPRHVLVEAAWHATRTPGPLRAFHQRIASRRGGNIATVAVARKLAVIAWQMLSRGDRLRLRPPPPSPARRSAGSS

SEQ ID NO: 250303 - protein, 340 aa, unidentified
MDKITTIGLDLAKTVFHVVGCNAYGKIVRKRMLKRSQVLAYFANLPVSLVGMEACASAHYWARELGTLGHEVKLIPPQYVKPYVRGNKNDYNDALAIAEAVVRPEMRFVGVKTPEQQDIQALHRLRERRLGDRTALCNQLRGLLAEYGLVFPKGITTLRRRLPELLEDGENGLSDLFRQLLAQGYQQLQELDVHIQFYTQELVSQSQQDDACQRLQTIPGFGPIVASVFRSVVGNGEAYRRGRDVSACVGLVPRQHSSGGKEVLLGISKRGDRYLRSLLIHGARSVVIQAKRKDDRLSRWINRLVSARGFNKAVVALANKLARIGWVILAKKTTYQAHEA

SEQ ID NO: 250304 - protein, 345 aa, unidentified
MLYVGLDFHKYFSFLTAMDGQGEIVKRAKVQNHPDTLLAFFGQLEDEVTVAVEATWNWYWLQELFEDHHIPMKLVHPQRAKAIACARIKTDKIDSEILAHLLRTDLLPEAHIPTRETRLLRERLRYRASLVRLVAQLRNKLHAVVAKNGLRLPNRNILSKKSLSYLREISLADAFRQGIDGYLRVAELLRQEIEQVNETIASEAQQDPRALRLTELYGIGYYLALLIVTEIGDITRFRRAKNLCAYAGIVPSVHSSGQTHYTSSITKQGSKWLRWALVEAAHHIHKKPPFDCFYHRVKSRRGPKVAQVAVARKLCKTIYHMLTEEENSIIVRQTRWGHGLRGPQV

SEQ ID NO: 250305 - protein, 373 aa, unidentified
MNGSIKVSVDKEITVGIDISKNYLDVYVLELEEMRRFEYNSRGVRKLIKYLTSLNPFIVSMEYTAGLERNLIFALQQHNIPCCCINPYNLKNFTKTMNVRAKTDLISAKLIAQYTKLYKTSPMQKIDKNLIYLKDLVKRHIQLVNILSSEKNRLSGSSLNKKHIMKFIKGVEKSIDENYEEIKKMVESNNEVKKKAEILKTMPGVGEYSSIVLAILLPELGYTTRRQISSLCGVAPYVNQSGKYKGKSYIRGGRKDVRNLVYMVTMAAIRYNPVIKEYYYSLISKGKPKKVAIVACMRKVICILNAMVRENKVFMADYNKLQKEENKNESKIIEKVENQEKHNENIKQSEPLDFNKDLKDVVLVVKSDPNMVT

SEQ ID NO: 250306 - protein, 389 aa, unidentified
MLHDHPSVRPTAILTQFGAIFVSLELSRSNWLVTSLSPGKGEKMSKHSIAAGNVAGLLTLFAELKRKAAIRTGQSYPIVTIQEAGLDGFWLHRILQQEGIESHVVDPASIATPRRRRRAKTDRLDGEALLRALLAYKRGEPRVCAMVVAPSPEEEDRRRLCRERRTLIAERIRNVNRIKGLLFAQGISDYAPMRRDRRARLEALRTGDGRELPSHLKAQIGRELDRIELLLGQIKEVEAEQDALLAAARKPASEEAAPDPVTMLLALKGMGANFATVLWSEAFYRQFANRRQVAAYAGLAATPWQSGGIRHEQGVSKAGNPRLRTTMIQIAWLWIRHQPQSALTRWFKARSQQGRKRAIVALARKLLVALWKYVTQGVVIEGAVTKPAA

SEQ ID NO: 250307 - protein, 415 aa, unidentified
MSLKIVYKICCGIDVHKTFVVACIASTNDKGVTSYESHRFSTYTSGLKTLLQWLLKHNCKDVCMESTGKYWIPIYNILENDCSIVLAHPKYVKAIRGKKTDKKDAKWIADLFKHDLVAGSFMPPADIRQLRDLMRYRFKLTCFQSSEKNRLQNCLTVSNIQLGNVVSDTFGKSAQAILDKLLENPADTSFDLEPLVYKSLKKKLPQLRDAINGYITPEQVGKLKVIKAHYESLESRKAELEELILALATPYQQELAILQTAPGIRSLFTAIGIISEIGTNMEAFPSAKHLCSWAGLTPTNNESAGKKKSVRVSKAGCYIKPLLVQCANAVVTSKKHPEIRNRYLRLKKRRGHKKAIIAIARMLLTALYHMLKNGENYNAELYRKSYLPSVDREITVEQAVIIARNQGYKIKSATA

SEQ ID NO: 250308 - protein, 430 aa, unidentified
MTKRSSTPADAVLVAIDMSKHRQELLIERPEGGRRRRMTVMATKADYDRLATDLSDVGRPIVVGFEATGNYHRTLAHRLLAAGFELRLISSVALARTREALHNGWDKNDSKDAQVILHMLRIGATQRYVDPLAAGINDLQEMSKTHEAISKAKTQTWHRILTHYLPLYFPEIERFAGNSRSDWFLALIERFPTPASMTALGQEAFTREAWSLVGRKVSKARLINDIYETACASVALPVDEDSIAITMFRMVIAQARSLIRQRDEIERTAHAVLAENRDYQLLRKIPGIGPINALTILAEAGDLRRFAHHRQFLKFCGLDLATCQSGTFRGRTKLSKYGNARLRRTFWMATQVAIRQRDNSFRDKLGRYVAGHGNDPDRRRKAMTALTAKMARVAHAVIKTGTEYRPFVERADTRWKDPSLSCREGATATL

SEQ ID NO: 250309 - protein, 456 aa, unidentified
MARRLRRPTRPVTMPILQPNAAGIDIGATEIYVCVPLDRDPEPIRRFGTFTGDLHALADWLTRCGVTSVAMEATGVYWIPLYQILETRGFEVCLVNARHVKHVPGRKSDVQDCQWLQYLHSVGLLRASFRPPEAVCAVRTLLRHRDGLVQAAAAHTQHMQKALSQMNVQLHHVLTDITGVTGLAILDAILAGERDPQVLARHRDHRVKASAETIAKALVGDYRPEHLFTLRQSLASYRHYQRLLEACDVEIQTRLGAFASTIDPARHPLPPPTGSRRKPRGTTPGFDLRTELYRILGTDLTQVPGLQTPTVSTLFAELGADLSPFPAGDHFASWLGLCPDNRISGGKVLSVQTRHVKHRVADALRLAAQSLSRSPSVLGAFFRRMRAKLGAPAAITATAHKLARIVYHLLTTREPYDESRLAAAEADHRRRTESRLRAQARALGFQLVPAIEQSVS

SEQ ID NO: 250310 - protein, 338 aa, unidentified
MIVIGVDVHKHSLTAVAVDEAGRMLDEKTVAAADGELVAWASGLSGERLWALEDCRQLTRALERELLAVGEQLVRVPPKLMAPERRAGRVRGKSDPIDALAVARAALREPRLSRPRPDEQPFRDLKLLVDHRDDLVDERRRAQQRLRWHLHQLDPSFAVPAKALDRPVHVDRVGRWLARRPAEVQVRVARELIVRCRSLTRTIVELDRELEQRTAQTAPALLELPGCGALTAAKLLAEVGPIGRFQTDAQLARHSGVAPLEASSGRVQRHRLDRGGNRQLNCALYRIAITQARYHPAALAYLERKQAEGKSRREAIRCLKRQLVRVVFNTLKASPALT

SEQ ID NO: 250311 - protein, 375 aa, unidentified
MKEKLRFLGLDVHAETIAVAIAEPDGEVRSLGTIPNRLESIRKLIKKLGPTEKLRACYEAGPTGYVVYWQLAELGVKCDVVAPTLVPVKAGDRVKTDRRDAEKLARSHRSGDLTAVWVPDEGSEALRDLVRTREAAKQDQLRARHRLSKFLLRSGQRPPTGIRPWTRPYLIWVAQLRFTQMAQEATRLDYLHEVEHMRERVERLERAITEAVKLASPALQQVINDLQALRGIADISAVTIAAELGQVSRFDGARQLMGYCGAVPSEDSSGKRTRRGSITKTGNAHLRRIVVEAAWSYHRPPCIWYGLRKRQESISEEVKEIAWKAQHRLHKRYMRLAAAGKDKRKITTAVARELLGFIWAIGTRAETTVRQRIAA

SEQ ID NO: 250312 - protein, 452 aa, unidentified
MVKKKKSGRKKAIKYLHVLQPNSAGIDIGATEIYIAVPEDRSSKPVRRFDTFTDDLHDAAKWLKECGIESIAMESTGVYWIPIFQILDIYGFEVILVNARHVKNVPGRKTDVIDCQWLQYLHSVGLLRGSFRPAQDICAVRSLLRHRNNLVKAASSHIQHLQKSLTQMNLQIHNVISDITGVTGLAIIDAILSGERNPKILAELRDPRIKADKKTIVKSLTGDFRSEHVFTLKQTLQSYRNYRQLIQDCDGEIENHLNEFESSIDLDDSPPIPPSTPKRKPKGNELNFDLRKHMYRLLGTDLTQIDGISSLTAHVIFTEIGPDLSKFKNVKYFCSWLGLCPNNKISGGKILSSHTRPGSNRAAQALRISANSLWNSKSYLGNYFRRMRSRHGAPKAITATAHKLARVIYHLVKNQKLFDDTIFAEQEKNHQKRFEKKIITQAKSLGFKLIPV

SEQ ID NO: 250313 - protein, 317 aa, unidentified
MAALICGVDVSSISLDARVGSQGSEARFENTPEGVGRLIAFCHEHGVELVAMEATGGYERLAFGLLWGSSVPVALLNPRAVRRFAQGMGLEEKTDRIDAGVIAWFAEVKKVVPTEPASAAQARLEAMVTRLRQLTELHAAQRNQRLLVSEPSVLDSFCELLALVKAQIRALETAIAELIAADPLWQQLDTAFRSIKGVAGRTVSRLMAEMPEIGTASNKAVSKLAGLAPLAKDSGKSQGKRVVRGGRSNVRTILYVVADVVRRYNADFAAFADRLRAAGKPKKVIRIALAHKLLVRLNAKAREVRQQHSTAACSATG

SEQ ID NO: 250314 - protein, 419 aa, unidentified
MKPTKTKKIKIINKKTMIAALDIGKATHYAYLRAPNGKDTKPFPFYNFRKDFDKFWIKLCQFKREHELEDIVVGFESTGSYAEPLFHYLRKKPVRLVQINPMHSKRLKELTGNSPNKTDKKDPRVIADVISLGHALTLVVPEGPAAQLRRLTHARERALKRRTAAINQVQDLIFVIFPEFLAIMKDISTKTASYLIKAYPTPESIVALGVDFLATIIKEISRGKLGRQRAEELFNAAQRSVGVNEGKRSILLEIEYLISQISADKKFIANLEKKMEEYLEKIPYSYYLLSIKGIGIVTVAGLTGEVGDFKKFHTISEMMKLAGLDLFEVSSGKHRGKRRISKRGRSLMRKLLFFAAINVVKSNGIMHKRYQEMLERGMPKMKALVAISRKLLMLIFALARDNTVYVENYSNIHHFKLAA

SEQ ID NO: 250315 - protein, 424 aa, unidentified
MFRYLIESGEYMEAMVKRCAGLDVHQETIVACVLTGELDKKPESEIRTYGTYTKDLEELHEWLLEKEVEQIAMESTGIFWKCVWNIIEDEKYEIKLANAKEIKNMPGRKTDVKDAQWIAELLRCGLIKSSFVPNVEIRELRDLIRYRRKIIQEASAEKNRIHKILQDANIKMTTDISDIFGDTGRKLLEKIIEGKEISNEDLIEVTAGRGKASLRGKIPQIKEGLKGTTRAHHRKMIKLIYEHLKYLEKEQDEIDKMINEACEKYKKEIELLDSIPGINEESAKAIIAEIGTDMNQFPTVKHLTSWAGMSPGNNESAGIKKKGKTTKGNRSLRATLNECAWSCVRSKKNRISATYWRFVKRMGPQKAIHAVGNLILRLCYHILVSGIKYEEREKEDYEKILQKKKEQRMIKELKEKGYKIEIAS

SEQ ID NO: 250316 - protein, 292 aa, unidentified
MSQPNPLCVGIDVSKATLDIAASSDVAQFTVSNDSDGFDAIITALRRHSVALILMEATGGLEVAVACSLQTEGFEVAVVNPRQARDFARAMGYLAKTDRIDARVLAQMAEVINRHPERKRFIRALPEAERQVLAAMVVRRRQLIAMLVAERNRLHPSHPQNKKSINTIIKALEDELARLEKDMNSHIRSHFKEIAKRLSSIKGVGTMTVSALLAEIPELGTLSRREISALIGVAPVNRDSGTMRGRRTIFGGRAGVRSALYMAALVATRFNPVIKTFMCACLQLERPKKWRW

SEQ ID NO: 250317 - protein, 473 aa, unidentified
MKQSRRSQCASSDCILTQQASCLPVLSPPYTGLEERMAKKGKKNKPTPENMPIIPPHAAGIDVGAEEHWVCVPADRDAQPIQKFSAFTCDLHRLADWLTTCRITSVAMESTGVYWIPLFQILEARGFAVALVNARHVKNVPGRPKTDRFDCRWLQKLQTDGLLAASFRPPEDICQLRSLLRHRDNLIQMTVKHIQHMQKSLDQMNLHLHHVISDITGVTGMRILRAIVAGERDPRTLAQYRDYRIKSSLDTIAKALEGDYRPEHVFTLTQSLALYDFTHQQIAACDQEIERVLSTLDSLVDLEAHPLPPPTTAHRQPQRNEPAFDLRTHLYRITGVDLTQVPGLQAMTIHIVLAEVGLNMHKWPTDKHFASWLGLCPDNQISGGKVLSTGSRRVQNRASRALRMAAQSLRTSPTYLGAFFRRMRSKLGPAKATTATAHKLAKILYHMLKEQTPYRARGAEEYLHKDHERQLRQ

SEQ ID NO: 250318 - protein, 215 aa, unidentified
MPLAKKSETIADEEADIEQFRKTFKRLKSPVMVVAEATGGYEILLIRSLIKNEISAAVVNPRQVRDFAKGIGMDAKTDLIDAQVISRFAEVVKPSRVAMTSDQEQKHSALVVRRSQLLQLINRGEVAKLVGVAPIHRDSGTKTGKRMISGGRGYVRRVLYMATLSAVRSNPAIHVFYQHLKSRDKESKAALVACMRKLITLLNLLIKTDQMWQTK

SEQ ID NO: 250319 - protein, 360 aa, unidentified
MFTERTSVGLDVHARSVAAAAIDGVTGELFQTKLTPAHDHIRSWIQKLPGPVAVAYEAGPTGFGLYRSLTGVGIRCQVAAPSKLQRPAGDRVKTDAKDAVHLAKLLRLDEITAVAVPSVEQETARDLVRVREDCRGDLMRARQRLSKLLLRQGIVYYDGNAWTGRHDIWLRRQRFDRPALQLAFESDYETVLTTTARRDRLDTAIAAMAADSEFTDVVRRLSCLKGVSTLTAFALAVEIGDWRRFTGNSIGSFVGLVPSEHSSGSSRALGPITKAGNTHARRLLVEAAWHHRARYAPGKTMRERWELAPPAARVRGDQGNRRLHARWVRFSDRKKMPVIANVAIARELAGWCWSLAVMEE

SEQ ID NO: 250320 - protein, 406 aa, unidentified
MAAVMIGVDPHKGSHTAVVISPAEEPLGELRVRASAGQAGKLIGWAAAWPERTWAVEGAAGLGRLLAQQLVAAGERVLDVQPKLASRVRLLQAGDTNKNDPNDALSVAVAALRSTVCREVIADDYRVVLKVRAERHRDLARTRNQVACRLHSVLCDLVPGGHQKEISAAHAARILAQATPSGAVALARAELAAEFLADLRHLDGQLRDTRKKLAAAVRASGTTLTQVFGVGPVIAGTVIGDVGDVARFPGRDHFASYNGTAPVEVSSGNRKIHRLSLRGNRRINHAIHMAAITQLRHKHSEGRAYYDKKVAEGKTHKEALRSLKRKVSDAIFARLQADARQASAAGTKGPGGQPGNGSDSSAASSHPERQLFGPATPGPDTTIRPGTTAGTPSPSKPALKKTRPAT

SEQ ID NO: 250321 - protein, 457 aa, unidentified
MSQRRRKSRKSQVNMNNLPPHLRHINLFAAGIDIGSDRHFVAVPEGSDKVSVRQFGAFTSDLHDIADWLKRCGVTTVAMESTGVYWIPLFELLEQRGFEVKLVDARHVKNVSGRKSDVLDCQWLQQLHTYGLLQGAFRPSDEICVLRSYMRQKEMLTQASSMHIQHMQKALQQMNVLLHNVVSDITGVTGMKIIKAILAGERDPNVLALNRQKECRNTQQTIAKSLVGNFRDEHMFALKQALDLYEIYQAKIAECEAAIVKHLGSQPDITDDQPPESGKTVRARERIRAGVDVRHKLFKMTGVDLFATPGFAADTLLTLASEVGFDMRSWPTVKHFTSWIGLCPGTRVSGGKTLDRRTKRNANRAAQAFRMAASSLARSQTALGAFYRRIRSRTGGKQAITATAHKLARLYYFMLTRGTTYVEQGQLQYEQMFKERRIKALKKQAHSLGYQLLQLAS

SEQ ID NO: 250322 - protein, 358 aa, unidentified
MQTNILKQALGIDVSKDSLSFCLGALKDTLEKEFKLGSDVSNDKSGFKQLSKWLKSHSNKEGLPIVVMESTGVYHEKISYYLHNLGYKVCIMQSGRVKRYAQSLVQRSKTDALDSKMLSMLGLERNLTPWTPPSETLLELRLLSRERSTLVKERTVEKNRIHAIKAASHTHKNTVKRFNKRVKLLNLQITEIEEEMLEIVNQDSVLSMKLKFLKSIPGVSFISGITVIAETLGFSTINNAKQLVSYTGYDVVLRQSGNYTGKTKISKKGNKHIRAILHMPSMTAIRLNPTLKPFYDRLKSKKAKPLIALVAVQRKLLVLMYSLWKNDQYYDAEHELKKAARKQVLAAQDRDKIEFVTS

SEQ ID NO: 250323 - protein, 352 aa, unidentified
MISSEITATPKLFIGMDVHKKSWTCHFKTDLFDHKTVTMPADVDCLKDYVFKNFPEHEVCCCYEAGCCGYWIARSLQQLNWNVLVVNPADVPRTSKQDWQKTDKIDCRNLCDHLRKNDLHSIYIPAEQQEQLRSLFRRRNHLSRQLRTIKNHIKSQLLYYGIKLPEQFDNPNWSHEMKTWISNINWKFTSASIALQSRLKQLDFLWYEALDISTALRAYCRKHYKKDYYLLKSVPGIGGITAAGLLAELGDIRRFNRLDDLAAIVGLVPGIYESSDNKICLGLSRRSNRYIRSLLVEATWVAVRTDMALQSYYRKHSAKEPNKAIIKVAHKLLSRIRAVIITGVPYQTGVMK

SEQ ID NO: 250324 - protein, 423 aa, unidentified
MISAVLECCAGIDVGKKWIAVCVLTGPAHGDAQVEHRKFATTNQSLEQMCAWLVECGCTHVVMESTGEYWRPIYNVLEEATDIEIILANSQQVKGLRGHKTDPKDAHGLAHLLRHGMIRPSYIPPLPIRQLRDLTRRRKQLVRHGAQERNRIQKVLEDANIKLGNVLSDVFGLSGQLMLDKLLEGEAMPAEIAELAQKSAKKKIPQIRACLEGHRMNALHRRLIDMSLNHMAFLEEQISTLDHAIVQHIQAHGLEKPYQLLQTIPGVKEEAAASVLAEFGPDMQAFGSAKKASSWAGVAPGNNESAGKKKRAPALRGNPWARATLTESAWSASRKKESEFQNAYQRWKPRLGHKRAIVAVAHSLVETVFEVLSTGQPYTGPGASPLPDSKAAHLIRHHTRRIKTLRQRLHPQPQRPQPQPATP

SEQ ID NO: 250325 - protein, 341 aa, unidentified
MEEVSTIGLDLAKHVFQAHGASASGGVVFRKKLRRAQVLTFFAGQPRCVVAMEACASAHHWARGIGELGHEVRLIPPAYVKPFVKRQKNDMADAEAICEAAQRPTMRFVAVKSEAKQAAAVIFRARDLLVGQRTQIINALRGHIGEYGLIAPQGPSHVERLIAQIEDPASGIPDAARSCLSRLVAILRGLQVEIVELDREIAARAKADDVARRLMTVPGIGPLIATAIEALAPAPETFRSGRDFAAWVGLTPVQRSTGGKERLGRTSRMGERTLRRLLIVAASSVVRWAKRKGVPARSWLGRMLSRKPPMLVIVALANKNARVAWALLAKGGVYQAPAVAA

SEQ ID NO: 250326 - protein, 344 aa, unidentified
MATYYIGADVHASTTELAFERNQQIVKRLRVPTTIPALREAVASVGGTRALVIEEGPMADWLWRNLREDVDQMVVCDPRRNRLISEDGDKDDVIDCGKLAELLRGGYLRPVHHPESAERAELKRWVGLYHDRVKQAVREVNKIRMLGRQYGLRVPGRVLKNRKAQRTWLGELASLALAKQLSVLLRGYEAMQQQVLAVKRELGRLAAGQAVVGRWSEVPGVGLIRAVTLLAYLDTPWRFARRSQAWKYCGVGLERTASGTDKHGKPQKGRLQLAWRVNRRLKNVVVGATLSAIRQKDNEFARMYQRLLQAGLTAGNARHSVARHLLGVLLGMWKNGSCYQPDRV

SEQ ID NO: 250327 - protein, 409 aa, unidentified
MSYTVAGIDVHKKLLVVVVADVSQPELSFECRRFGTVASELYNLGLWLCERGVAEAVMESTAQYWKPVWLELEPRLRLNLAQAQSNRAPKGRKSDFGDAKRLLRRFLAGELALSFVPDAEQRGWRTLTRARLQLVCERVQLQGQIESLLEDGRIKLSSVISDLLGVSGRRILRALADGQTDPQQLAQLGDERLRCGRAVLADALTGSTSAIHRKLLGQHLDRVQLIDRQIEELSRLSAEQMQPYQEAIVRLIELPGVGVEAAHQIIAEIGPRAAAFPSGRQLASWIGVCPGSNESAAQNHSGHCAKGNRFMRRLLCQAAQAGVKKKGSHLQGLFRRLIVRLGYVKALWAIAHRLCRIIWNVLHEGARFIEHGEAVNPKAVRRAIQHHLTALRRLGYIIPQEAPLPHPSA

SEQ ID NO: 250328 - protein, 415 aa, unidentified
MHVQLPADRQVTVGVDTHADQHVGAALDPLGRLLGTQAVPSTAAGAAALLAWARRFGAVERVGIEGTGSYGAGLSRWLRARGVVVVEVARPKRPARRGRGKSDPVDAEAAARAVQAGTATARPKAGTGPIESIRALQAARRSALKARTQAANQLRALVVTAPDDLRARLRRLGLARLVATAAAFRPGAPSTPSAATKLALKSIAARHRRLSAEVAALDAHLGRLVAAAAPDLVALKGVGTDTAATLLVTAGDNPDRLRSEASFAHLCGVAPIPASSGKTVRHRLNRGGDRQANRALHLLAVRRLRWDPATVAYAARRRAEGLSKPEILRCLKRYIARQLYPLLAGHAALGPATLGPGGPRSGPPATPLSGGAAVTRQGRSVAEDPAAGGVDGRRGRSHRVPTPPAPAPRPPIHHP

SEQ ID NO: 250329 - protein, 346 aa, unidentified
MNQIIRIGMDTSKHFFQLHGVDTAEHPVLRRKLRRKEMLAFFAKLPSTVIGMEACGASHYWARVLCELGHTVKLIAPQHVKPYIKRNKNDGRDAEGLCEAMSRPTMQFVPAKTAEQQAALMLAGMRERLVGQRTQLSNAIRGYAAEFGLIAAKGLDKIEPLLADIAADEALPVLARELFAMHGREYAQLQAELKNIDARLKAWHRANADSRRLAQIPGIGPIVATALIMKVPDPRLFPSGRHFAAWIGLTPKDHSTAGKTRLGKITRAGDERLRSVLVAGATAVIQQAKHGRGHPLPWLLALLKRKPPKLAAVALANKIARIAWKLMTTGESYDGMRMPSASAFAA

SEQ ID NO: 250330 - protein, 434 aa, unidentified
MGLDLSKGEITVCVLLQNGEIVDRWSETNNRPGAEAIAQRLVGLAKRHGFDRVRIGMEATNLYWWHIACFLKDTPLLTELTPEVYLLNPRLVSGLKKAYSDRGKTDRIDAFFIAERLRIGRLPAPFQLDLLYAPLQRLTRFRCHLAKTLAREKNYFLTFLFLKFSAFGQVEPFADPFGATSCALLDEFTVEELIETPLEKLADYLDKNGHGQFVDPIARARTLQRAARDSYRLGKVLEEPLTLILGTTMATIKTLQRQLKDVDATIARELEGLPFDRRIIRTIPGLGPVWTAGLVAEIGNIHRLEDEASIAKLAGLVWNPHQSGSFQAEDTTMAKTGNTYLRYYLIEAANSVRQHCAEYQCYYHTKLVQSPKHAHKRALVLTARKLVRLIDTLLRTGMAYQTPEARQGQREVRAPNRATRPGRLRNDHMVTTVG

SEQ ID NO: 250331 - protein, 441 aa, unidentified
MCGGSVTAFLYYYERSAVMKLTYPICCGVDVHKTFLVATIITSDFESPKYKQKRFSTFYRGLLEFKQWLLDNNCKDVCMESTGKYWVPVWNALEDSIHVVIANPKWVSAVKGNKDDKKDSKWIGDLFRMGLVPSSYIPEKDIRVLREFTRYRSKLVSMRSSEKCRFQNAFTVCNLTLDAVVSDMFGKSATDIENYLLESDSVDPNHCVSLLRGSLKKKSEEIINAVEGFDMTAEQKERARIIQGHFADIDNRIAQVDEVIGRLVSEYEGAISLLCTIPGIDRRLAITIISEIGTDMSQFGSSKRLCNWAGLSPGRNQSAGKKKSVKISRAGVYLKPALVEAAHAAVKATAANPYFRIKYGRIMQRRGKKRAIIAIARMMLTSIFAMFSTGEVFNPSDILKFDMPEELKKKQTLSAAKDAVKLLVSLGLVAENSISLQPLAS

SEQ ID NO: 250332 - protein, 406 aa, unidentified
MNDSGKRYIGLDVHKHYLIALGVNVDLEVALPARRVELSNLESWMKKNLTREDEVVLEMTTNTWQLYDELSAYAGSVIVVHPPHVALITRSQVMNDKIAASILARLLAKGLLVGVWVPPQEIRELRGLVAQRQKMTRLATQAKNRLHAVIQRHHLKPPEGNPFAKTNNGWWGSLILGRLEKMNLQSDLETLQFAEKQQARMQEEMTSIAAEDEEIGRLLHLAGFGVITALTVYAAIGDISRFVEPKKLVGYAGLGARVHDSGLTTRTGKITKAGRRDLRVALVEAAHVAANTHPHWKAELVRLEPRLGYNKAIVAIARKLLIAVWYVLAHKVADRFAEPEKVSKKMLRFAYEVGKQNRAGKTAAQFTRERMDILGLGSELTSIPWGAKKPIPLPPSKLKKRERRPK

SEQ ID NO: 250333 - protein, 525 aa, unidentified
MYNVSAWLLDLAERGKQMIQIPAVRERCAAIDVGKRELAIALITGPADEDGKMQTRISGTTVPALEGLKVWLIQEGCTSVAMESTGSYWIPVKNVLEGSMEIILVNARTHQPKKGDKTDLRDAAHAAHLHRHGLLKGSYLPERGIVELRDLTRRRKKLLGNLGAEKNRIQKVLEVANVKMGNVVSDVFGVSGQEIVSALLQGKTLPASAIADIARARLRKRIPELVETLQGHQMNEHHRWLIQQSVDHSVLLDEQLEQLEERIAIKVQPYARQEQLIRTIPGFKGEHNAPSLLAEIGPNMNQFPSAGSLCKWAGVCPGNNRTAGKKKHSHIRKANKFLMATLVQAAWGAIRTKDSIFQRKYRRWRNRMGECCALIAVCHALLKVVYHVLQADRPYAEADAARLAEREKDKRIHHHANALRKLGADEATIQQLIAQMTEVPKPALEAVAASSGPEAIRTPETKPGACRKTSKRPIQSPVTRRGALGFRARQTKMQTRSTFQKPMEGYPLRESSDEKAKDVGAKNQP

SEQ ID NO: 250334 - protein, 310 aa, unidentified
MHPCVGVDVSKHHLDWTFGEDGPVEQLPNTPAGIRQLLVRARRHEPPLIAIESTGGYERKLVVALQDAELPVVLVNPWRVRCFGEGLGKLAKTDPIDARLLALYAERAQPPRRPLPGPRARRMADLVARRRQLLAIVVAEKSRLENAPAWLRKDIASLVAVVERRIAKLDVKVDAAIALDPEQHETSEILQSTPSVGPGVARTLIVDLPELGTLSRRQITSLVGLAPYARDSGRKSGMRRIRGGRPAPRTALYLAAMNAARFNPVLKDFYQRLRAAGKPAKLAFVAVARKLLTLLNAMVRDRTMWRETIT

SEQ ID NO: 250335 - protein, 395 aa, unidentified
MQVMHPVCCGIDVHQKSIVCCILDGPLTSNEPKKYQTTFGTTTKELKAALDWLLEHQVTHVFFESTGQYWIPLFNIFSDSDLELVLANPQHIKNVPGRKTDVKDAEWIAQLGRCGLINQSYIPSQEVLQLRYLTRYRLSVKQRLTQIKNHIHVILQRGNIKITSYLSDIFSKTGQALLTLFIDGEVINEDNVESCIHGRIKASTRQLIEAMEGKLSTVDRFLIKECMEEYKLQKKISDELNKEINEYILEHFPEEYQLLLTIPGISDNCCATILAEIGPNVDAFKTDKNLASWAGMCPGSNESAGVKKSSHTTQGNKYLKQALVMSVLSVQRAKEVTFSLFYQRISSRGSKMKAIIACGHKMLRIIYKILQSHKPYDSQKALGLRQQTNALSLTI

SEQ ID NO: 250336 - protein, 349 aa, unidentified
MLYTGLDFHRSFSYITTMNDKGEIINQKKLPSNGEIVDFLKEFGESMEVAIEATPSWYWLYDHLEDEGFEVKLSHPLRTKAIAYAKVKTDKVDSATLAHLLRSDLLPLSYVPEKPIRLNRELLRYRASLVKIQTRIKNKIHTILAKNNISHDYTDLFGKAGMAFLHSLSIPENYKIALEGYLSVLETLKYEIKGASERIRQLAEDDQDSRLLMTIPGVGYYSALLIKSEIGDVRRFPSAKQLCSYAGLVPSTHASWNVCYHGHITKQGSRWLRWILIEAAIHVVKRPGPLRRFYFKVERKKGGQIAKVATARKLLEWIYHILKDSKSFQEVEKVVEALGRGGPDNCPGQ

SEQ ID NO: 250337 - protein, 347 aa, unidentified
MKFYTKIHKFYCGIDLHARSMYLCILDQAGNTLVHRNIPANGERFLQAVENYREDLVVAVECMFTWYWLADLCRREGIRFVLGHALSMRAIHGGKAKNDKIDADKIARLLRSNMLPQSYVYPAEMRATRDLLRRRNHLVNKRAELLAHIQNTNSQYNLPEFGKKIARQSNRDGLSERFVDPCVQQSIELDMALIDTYDRQLSEIELYIVRTAKGHDANTFYRLRSIPGIGKILALVILYEIQDIHRFERVGNFLSYSRLIKCAKESAGKRYGTSGAKIGNVHLRWAFGEAACLFLRGNPEGQKLHQRLVKKHGKAKALSVLAQKLGRAVYFMLKRNQSFNMNKFLTS

SEQ ID NO: 250338 - protein, 350 aa, unidentified
MTTIAVRTGAVTVGVDTHKDIHVAAVLDEVGRLLGSCGFPTDPAGNAALIGWVEQHGSITRVGVEGTGSYGAQLTRDLQRAGHHVIEVDRPDRKARRLRGKDDHLDAEAAARAVLSGRATTVPKARDGQIEAIRALRVARRSCVTGRTVAMNQLKALLVSAPRDLREQLRGLSSTQLIKTAARLRPGDDLADPLNGTKYAMREIGLRHQFLTEQLKRLDATLRPLVAAAAPALVARFAVGTDTAGALLVALGDNPGRLTSESSFAHLCGVAPLPASSGKTSGRYRLNRGGDRRANNALWRIVLVRMGTDQRTKDYVARRTTQGKSKPEIMRCLKRYVAREIYAALTDPRT

SEQ ID NO: 250339 - protein, 429 aa, unidentified
MTANNHTPQRLTLVAIDIAKDHHDVLIEPPAPARRRRLRVANQREDFEHFARYLRGLKSAVLIGFEATGNYHRPLAYFLHCQGFALRLIPTLALARTREAMHNSWDKNDPKDAQVILHLLKTGLTQIWHDPVVNRINDMRELSKTHCQITLARVRVWHTLRNHYLALYFPEIDRFIRSNYNVWVVQLLAAFPTPASIIAMHEQEFQAQAWNLAGRKVNKQALLAEIYAAAKQSIGVPVALDSAAITMFRLVLEQYLALNRLRERIAEQAATLLADNPDSRRLMTVPGIGPANALTILAEAGDLRRFRHHRQFLSFCGLNLSTRQSGKARGQSHISKYGNARLRTALWMAAQSAVRMRENSFRRKFEHYVRGNPLDADLRRKAYTAVTAKLARVVFGLIKQQTDYRPFFEHQFQVEEPSRARAVGAAVTP

SEQ ID NO: 250340 - protein, 411 aa, unidentified
MEVIYERCAGLDVGKDEVVACVRVPDDAGGRRQELHTYPTFSSGLESLAQWLQDHDITQVVLEATGQYWKPIWYVLEERGFQLLLVNARHVKILPGRKTDVCDAAWLAELLEHGLLRGSFVPPPAIRELRDLTRYRKRLIQAHTAECQRIHKTLEDASIRLGSVATDVLGVSGRAMLRALLAGERDPKVLAELARGRLRNKLPELREALRGRFSAHHALLVRLALDHVEQLERSITALDAEVDRVIAPFAQARDRLDTITGVGKRAAECIIAEIGVDMAVFPTAGHLASWAGRCPGNNVTGGKRRSGKPTKGNRWLGEMLTECAWAAARSRDSYLAAQFWRLARRIGRKKAAMAVGHSILVIAWHLLANDCDYADLGSDYFVRRDADRARQRAVAQLQALGYQVTLEPLAA

SEQ ID NO: 250341 - protein, 419 aa, unidentified
MQAIIERCCGLDVHQETVVACLLVGAPGAQPTKEVRTFRTVTRDLEALRDWLREAGATHVGMESTGVYWRPVYAVLEGHFELIVGNARHMRNVPGRKTDVKDSEWIADLVRHGLIEKSYVPPQPLRELRELLRYRRKLVESQAAERNRLLRLLETANIKLASVASDVFGVSGRAMLRALIEGEASPEAMADLARGQLRRKRTDLILALDGRVEEHHRFLLAVQLRRLEAIEADIAALDLRIGERLEPYSAPHALLMQIPGVDWVVAAVLIAEIGVDMSVFLSIYHLSAWAGVCPGSYESAGRQKSGRARKGNIHLRAILVGAAMSAARTKGSYLKDKFHRLKARRGALRAALAIAHKILVCAYHMLAKNLPYRDLGEAYLDQIGQTRTVANLKRRLERLGYRVILEPNAPAQATPAPAR

SEQ ID NO: 250342 - protein, 316 aa, unidentified
MHQEEVFVGIDVSKARLDIAVIPSGDASALPNNEEGISRLVDLMKSLSPTLVVLEATGGLEMASVGALAESGIPVVAVNPRQVRDFAKATGRLAKTDAISAQVIARFGQAIRPQVRPTKDLETQELAALSTRRRQIVGIMAAEKNRLSAAPKWTRKNIQEHLAWLEECLTKVNNDLSKAIKESSLWREKEDLLRSVPGVGPVLSATLLAELPELGKLDRRQIAALVGVAPLNRDSGLFRGKRTVWGGRANIRTAMYMSTLVATRFNPVIKDFYHRLCDAGKGHKVAITACMRKLLTILNAMLKNRTYWAPLASADS

SEQ ID NO: 250343 - protein, 416 aa, unidentified
MSPQADGVVIGMDPHKRSVTIEVMAADEAVRDGGRFGTDRAGYRAMLTCAQRWPNRVWAIEGCQGIGRHVALRLLRDGEDVVDVPPKLSARARVFAIGHGRKTDATDAHSVALVGTRMAGLRPLVNNEQLAVLRVLADRRRSLGEDHTRMVSQLHQLLLELIPGGAKKNLSAAQAKALLATVRPRDVAGKARRRVAAELISDLERIYQRKKAANKELKELVAATGSTLMDLHGIGPSGAARLLVEVGDITRFPTRAHFASWNGTAPIDASSGDQVRHRLSRAGNRQINRTLHIMATVQLRNRTEGRAYYDRKKAAGKTSMEAMRCLKRRLSDIVYRHMLDDAITSTVTSPGGHRGTTTDSSVTDSHPHAGSSDKSLPGPARPETTPATAGLPSHPPARSRRPIPAPTRSRRQAQSA

SEQ ID NO: 250344 - protein, 311 aa, unidentified
MTNLICGVDVSAATLDARVGRSGIVGRFANSAEGVAQLVAFCRDHEVTLVAMEATGGYERQAFGLLWAHGVPAAIVNPRAVRRFAEAMGFLEKTDRIDSGIIAWFAEAKRIAPQPPASEVQRTLAALVTRLRQLTELRVAQKNQRRLVREPSLLSGIDELLGLIARQSKAIETEIAKLIEQDPLWRKLDAAFRDIKGVAGRTVARLLAEIPEIGTLSNKAASKLSGLAPLARDSGTLAGKRAVRGGRASVRSILFVVAGVVRRHEPDFAAFHRRLSDAGKAKKAIRIALAHKLIVRLNAKARDVRAAITAA

SEQ ID NO: 250345 - protein, 317 aa, unidentified
MDNSTPITAGIDTAKAKLDVAIHASPVRLTVDNKPTGYKRLSAELRLAGVARVGIEASGGYERGVIKHLREDGFEVILMQPMQVKAFAKLHLRRAKNDTLDAALIAACAAIMQPRTTEEDQRLQPLADALTFVEQLEEDIVRFKTRLEKTTNPQHARMLRDDIKRQTTRRRAELARIVAVLLKHADLARRLELVQSIPGIGERTAVAILVRMPEIGTIRREQAASLSGLAPFDDDSGKRRGLRHIAGGRERLRRSLYAAALPAAFHWNTALKALYQRLIAAGKPHKLALVACARKLIIYANTVVQRDAPWTCKNETI

SEQ ID NO: 250346 - protein, 378 aa, unidentified
MKRIKFVGLDVHAETIAVAVAELEGEVRSIGVIPNRCESVRKLVKKLGPVEELRFCYEAGPTGYVLYWQLTALDAKCEVVAPTLVPVRAGDRVKTDRRDALKLARSYRAGELTAVWVPDAAHEALRDLVRAREAAKRDQLRARNRLTKFLLRHGKRPPEGVNPWTLNYMNWVRKDVHFEPLAQQATLLDYLHEVEHMAARVTRLEQAIEEAVQLAPQQMREVIEALQALRGIAKVSAVTIVAELGELSRFGEARQLMAYSGTVSREHSSGESCKRGGITKTGNVHLRRIVVEAAWAYRHAPAVTACLRKRQERVSEEVKEIAWKAQHRLHGRYRKLTARGKNTGKVITAVGRELLGFIWAIGVKVEAEQRKALLRQAA

SEQ ID NO: 250347 - protein, 376 aa, unidentified
MAMRKREDEVFPNAAGIDIGASSHWVAVPRHLAEAAGCDPVREVGAMTADLEALATWLVSVGVDTVAVESTGVYWIPVFEVLEQYGLKVWLVDARQLKYVPGRKSDVQDCQWLQKLMSLGLLRAAWRPSAEVCVLRAVARQRETLLTSQASWVQRMQKALVQMNIQLTEVLTDVMGVTGQAIVRDIVAGVRDPGQLARHRQRRVKASQEEIARALQGNWREEHLFVLKQSLAMYDDIGRHLAECDARLDALLDVRARSQVDLGKLPRAGSKTRMEHEVRQRLANWAGVDLTRINGLGVTVVMKLLTEIGPDVSRFASVKHFCSWLGLCPGTKISGGKVLSSGTKRSANRARQRSIAALKRRAASLGFQINPVETAT

SEQ ID NO: 250348 - protein, 366 aa, unidentified
MQRERTSVGLDVHARSVVACGIDASTGEMFRARLGPQPEAVLGWLRELPGPVAVVYEAGPTGYGLARFLTDHNIRCVVAAPSKLQRPSGDRVKTDAKDAQHLARLLRLDEITPVVVPTVAQEAARDLVRAREDVRGDLMRARHRTSKLLLRQGTVWSGGTAWTVAHHDWLRRQTFSQSALTIAYDSALETVLLSAERRDRLDKAIVKMAADPAWSAIVTRLGCLRGVSTLTAFGLTVEVGDWSRFTGSSIGAFLGLVPTEHSSGGSRSQGSITKTGNTHARRLLVEAAWQHRRPYRTPSATLRSRWNQAPAAARARGHAGNQRLHQRWQVFTDRKKRPVVANVAVARELAGWCWSLAMLDDTGAAC

SEQ ID NO: 250349 - protein, 349 aa, unidentified
MSHKLNAGIAVIGIDIGKNSFHVVGLDRRGAIVLRQKWSRGQVETRLANLPPCLIGMEACVGAHNLSRRLTSLGHDARLMPAKYVRPYSRGQKNDFRDAEAIAEAVQRPTMKFVATKTAEQLDLQALHRVRERLVSQRTGIINQIRAFLLERGIAVRQGLRFLRAELPRILATPCDALSPRMLRVIEDLAGDWRRLDQRIEDLSSEIEVLARRDVGCERLMGVPGIGPIISSAMVAAIGSGDAFTKGRDFAAWLGLVPKQISTGDRTILGKISKRGNRYLRVLFVQAAWVVLIKPKSWDRHGLKPWLEAAKKRLHHNVLAIALANKLARIAWSVLARGRAFEASRIQVA

SEQ ID NO: 250350 - protein, 433 aa, unidentified
MLKINYMSTLFVGIDVSSKTNAVYAMDFEENKYISSSFGNNQPGADQLVTMIAECMHKHKNLDTVLIVLESTSVYSVHISSFLSTSEVLMPYKPYVFCVNPKATSNYRKSYIGMEKTDPTDAYLIADFGRVGRTKKLEPWRGGQFIALKRLTRHRMHLSECITREKTYMVSNLYLKFSELQLLEGDDKPFGSLYGAASSAVLTEFLSPQEIIDMPEEDLLTFLAQKSRNRISDLSKTSELLRKAARDSYRLGKCMYEPLNISLASSFNCIHAYQKEIKLIEQAIEKCINGMNPNALIILQSIPGIGPVWASGILSEIGDITAFHSSDALAKYAGLYWPKGDSGDFTSEDNKMSKAGNPYLRYYLGEAANSVRKHIPEYADFYARKYAEVTKHQHKRALALTSRKFVRLVFGLLVKNQLYTGEKLDAEYNIESN

SEQ ID NO: 250351 - protein, 321 aa, unidentified
MTGEVKFRKKLTRPQFMAFMADHPAAVVVMEACGSASYWARELSKAGHEVKLIAPQYVKPFVKRQKNDAADAEAIVVAAQRPEMRFVPPKTEEQQARAVLFRARERLVHQRTELSNALRAVLYEYGHAVPQGAVHLKRIVEILEAETCDLPELAREEARDLLEQITEKTVRIEAKTRKIAAQAALTPTARRLQTMPGVGPMTALAVEAFAPAMATFKCGRDFAAWLGLVPRQMSSGGKERLGRISKAGQSDIRRLLIIGAMSRLNWMGARSIREGSWLDRLRARKPKMLVAIALANKMARMIWAMLTKQQDYKDPVPAGAA

SEQ ID NO: 250352 - protein, 414 aa, unidentified
MLFVGDDWAEDHHDVEVLDEAGRRLGRARLPEGVAGIDRFHALVGRFADPDDESGAGQVLVGIETDRGPWVAALVAAGYRVFAVNPAQAARFRERHAISGAKSDTGDAHVLADMVRTDAHQLREVAGDSALGEGVKLLARAHQSLIWERTRHLLRLRAGLVEYFPGVLAALAAGGLDLGDRDALELLATAPDPDTAAGLPAEQITDLLSRGARRGDLPARAEAITAALGAPQLTQPPVLAGAYAIVTRSLVAVLTTLAAQGTELESQVGAYFGQHPDAEIYRSQPGLGVILGARELGEFGDDPHRYTSAKARKNYAGSSPITRASGRKSVVLARHVRNRRLADALHAQAFSALRASPGARAYYDALRARGIGHHAALRQLSNRLVGILHGCLKTRTLYDEHTAWAHHQDQQKVA

SEQ ID NO: 250353 - protein, 381 aa, unidentified
MEEVVIGLDPHKSSNTIAVLQRDETLLARRRFTHSDDGLVAMFDAVSDYPKRVWAVEGANGIGLNIAQRLVACGESVIDVPAKLATRVRVYSTGHGTKTDDTDAVAIARAAIHSRHLRFVQAGGSSEALKLLSDRRTELVQARTRAVCRLHRLLRELISGGARTSLSAEHAFDLLTTLKTDNPADQARVEIALEHIDDIARLDLKIDEATRRINKTVKVSGTTLTRVYGIGPISAAVILGEVGNIARFANRDKFASYCGTAPIAVSSGDQNRHRLSRSGNRQLNRALHMAAVTQIRNDTPGRDYYRRKISEGKSKLEALRCLKRRITDAVFRQLQIDRQDDQTQDDSWPRRPSTRRGGPSYYSPATLRQNGKPMQPKPAKV

SEQ ID NO: 250354 - protein, 387 aa, unidentified
MTYYIGIDISKYKHDFCIISNTGEVIVENASFDNNKKGFQYLLDYLKSYNKSQVHIAFEATGHYSLNLELFLIDQGFSFMKMNPLVIHQFLKTRSLRRTKTDKADSLTIATYLMSVPFKPNSDLLYHIYTLKSLCRARELLIKERSKFLVLLTNELDKSFPELKQFFNNRISTTLLYILEKYKNTEHIALMRDFDSLRSISHGKFSYAKFAKLKEIAKNSVGHHDNNSDLLISTYVSIINNFNDKIDPIDKQISTIIKELNPRMLSIPGLGEISAATILSEYGDISNFSSSNKMLAFAGLEPSIIQSGTIVHNGKMVKHGSGHLRYSLMNISLTILKFSPTFYDYYLKKRSEGKCHRVALSHVCKKLIRVIYSLEKYNMDFNPDLLK

SEQ ID NO: 250355 - protein, 399 aa, unidentified
MTQVIIGIDPHKGSHTALALDEREGKLGQLRVIAAPGQVQQLQRWAASWPERVWAIEGARGLGQLLAQQLIGAGERVVDVQSKLAARVRLLNTGKVNKNDPNDARSVAVAALRTHDAVEVIAENETSVLKLWSRRYQDLGSLRTQLVCRLHAVLCDLVPGGFARRISATQAIQILDSVTAQGAVAAAKLELARELVADLQRIDAQRLAMKRRLANTVAATNTTVTEIHGVGPIIAAAVLGYASDIRRFPDRGRFAAYNGTAPIDVSSGGNNVQRFSRRGNRQLNHAIYMAALSQIRYPHTIGRGYYDRKISEGMKPKCALRALKRKISDTLYAHLINDARRRAVQDPGGQTGNDSASSAASSHPETPALRTSHSRVTTKPTTVNPTRQHPEPKRSPHTT

SEQ ID NO: 250356 - protein, 311 aa, unidentified
METKPNYVAIDIAKESLQIQTDHAAWSVPHTDTGHRQLLERLQPLGPVQVVCEASGGYEQPLLRFLHQQAVPVSLVNPARVRAFARSEGQRAKTDPLDAAMLLRFAHEKRPVPTPPPAPPQAALAAWLDRRAQLSEQLAREKNRLQKSPVLLHPGIRVMIAFIEDQLAAVDRQLHSVVQADATLRDRAAVLQSVTGIGAVTTWSLLAYLSEIAATDWHRNQLVALAGLAPWNRDSGKWKGKRSISGGRAKVRRCLYMAAQSAAQHNPIIREYVQRLIARGKPYKCAIVAAMRKLLIHLQSLLKHHQNALAS

SEQ ID NO: 250357 - protein, 324 aa, unidentified
MIDGILGIDVSKNTLDVSIAICTKVRSKSFANSSDGWRLLLDWLIAQNIQRVHACLESTGRYSLGIAYALYEAGHVVSITNPAQIRDFARTKLGRNKTDGVDASHIREYCELFKPSPWEPPTQAHRRLGELQTIRSGIIAGLTEWKNRKNSGIVDVEAQALADATISHFTSQLGAVDEAITRTIDNDCDLRSKRDLLLSISGVGETLAGVVLAELPGPDILRSSAEVVAYAGLNPRQHQSGTSVDRATRISKIGNAVLRAALYMPALSAMRYNPAIVALVTRLKSQGRLKPKQIVVAAMRKLLVLCFGVLKTRRPFDAAIAMGC

SEQ ID NO: 250358 - protein, 338 aa, unidentified
MKLYAGVDLHSNNNYLGIMDKKEKKVYKKKLPNDLSEVLKALNPYRKDLEGIVVESTFNWYWLVDGLMENGYRVHLANPSAIKQYEGLKHSDDARDAFHLAHLLKLGILPEGYIYPKEERPVRDLLRKRLQLVHHKTAHILSFKNLVSRNLGFQMPSNDIKKLSEEDVEGMFKEEHLVMAGQANIATMHFLKERITEIEKAVLKRAKLKEEYHNLLTVPGIGKILALTIMLETGEITRFPEVGNYVSYCRCVGSTRISNGKSKGEGNRKNGNKYLSWAYVEAANYAIRLYPYVRRYYQKKTAKTNNIVAIKAISHKLARASYYVVKDQEVFNPKKAFG

SEQ ID NO: 250359 - protein, 344 aa, unidentified
MDISVLGIDLGKNVCSVVGLDASGAVVMRRKVRRETLIALAEKLPPCVVGMEACCGAHHLGRVFAAHGHDVRLMSPEYVRPYIKAQKNDDRDAEGIAEAATRPTMRFVELKSQDQLDMQTLHRSRDRLVGERTALINQLRAILLERGMVAPQGKRKLEQFLAVLMDEQGGAGLSPRMIVLVADARTQWAEIDRRIAAFDAEFVRWVKENEEARRLMTIPGVGAIVASALVAAVGQAESFERGRDLAAWLGLVPRQFTTGGKPKLLGISKRGNKYLRRQLIHGARAALPYVAERDTPLGRWAKGLASRAHRNVAIVAFANKLARIAWAVLRRGERFAVTGMPVAA

SEQ ID NO: 250360 - protein, 350 aa, unidentified
MIIIGADYHPGFQQIAFVDTETGELQERRLQHREEAENFYRDLAAQGMKVRVGMEASGQARWFERLLAELQFELWIGDAAEIRTKRVRKQKTDRQDAQLILQLLLEDRFPRVWVPSWENRDLRQLLWHRHRMVQARVRVMNQLQAVALNEGLRCKKRLWRDAGREQLESFRLAPWASRRRRDLLELLDRLTPTITELTEAIEQEVEKCPEAQRLQTHPGVGALTALAFVLIIGRAERFQCGKQIASYLGLVPLEESSGQRRRLGHITKQGNSLLRFLLVEAAQVTVRSDPEWRRKYFHLAMRRGRKIAKVAMARRLAVRMYWMLRKGWDYEQLKKFGSHAGQLGTGDGVR

SEQ ID NO: 250361 - protein, 356 aa, unidentified
MPTMPDQALEVILGVDTHEEEHVAALVDDLGRLLATRSFKATTRGYRGLLAWARTYGPLVRAGVEATGSFGVGLARFLAAEGVDVIEVTRPNRRGRRHLGKTDTVDAEAAARMVLSGEATATAKRRDGAVEAIRVLQIARRSAIKARTQAGQQIRSLIITAPAELNGALAGLTLKRQVTRCARLRRGAGDDASGSPRRALRSLGRRWQQLDDEARELERELATLIKTAAPPLLAEPGVGPDTAGKLLVIASDNADRLRSDAAFAALCGVSPIEASSGKTKRHRLNKGGDRQGNNALWTIANNRLIHHPETRAYAIRRSAEALSRREILRCLKRHLARRLHRLIVADLTAAAALDLT

SEQ ID NO: 250362 - protein, 421 aa, unidentified
MLKIHRFNCAGLDVHKNLIVATIGITDKKTHVTEYIQQDFSSLNFDLYNLKNWLIQYDCFDVCMESTGKYWIPVFNVLETEPKMNIVLVHPKYVKAIKGKKTDKKDSKWICDLFKHDLLKSSFIPPKDIRELRDLSRYRFKLICMRTGERNRYQNSMTVSNIGLASVVSDPFGKTAQAVMNEVLSTEVIDEDKITKLIHGGCRNKDKILESLKDSKIEPDQRFKMTEIQTHLNELDKHIEAVEVEVIKRASRYFDDFLHITEIDGIQLMSAILIISEIGVDMTQFETDKQLCCWAGTSPANNESAGKKKSVRINKAGQYLKPVLVQCALAAIKNKNSYFGQKYTRIKKRRGHKKAIIAIARMMLVSIYHMILTGEKFNPSDYESFKNPKPQREKNNYTVETALDFLKSQGFDVSLIQDIPK

SEQ ID NO: 250363 - protein, 405 aa, unidentified
MEVVYSHCCGLDVHKKIVVACVVTPEGKEIRTFSTMTEDLISMVDWIKGKGCTHVAMESTGSFWKPLFNLLELENIQTLVVNAKHMKNVPGRKTDVKDAEWIAGLLRHGLLQGSYIPDRDQRELRELIRYRRSLIDERAREVNRIQKVLEGANIKLSSVASDVLGKSGRAMLEAMIAGEEDPEILSELAQRRLKSKKPELQKALNGLIGHHQKLMLKTQLRHIDYLADEIKKLDEEIKQRMLPFDEDLELLDTIPGVGRRTAEQILAEIGTDMNQFPSSAHMCSWAGLSPGNNESAGKRKSGRTRKGNKKLRSALVEAARAAGRTKNTYLSSQYHRLSARRGANRAAVAVAHSILTIAYYIIKRKQPYIELGPTYYEERKRDIVTKQSIKKLESLGYKVTVESVA

SEQ ID NO: 250364 - protein, 340 aa, unidentified
MEKRYIGIDLHRNRFTCCIRLENERTYVTEWAMEALGRFVKKLRATDEVAVEITSNTRLFFDAVAPQVKRVVVVDTNQFHVISQSVKKTDPNDARLLSLYLSKNLLPEVRMKDKDLAQLASLTQTRDTLVKQRSALKNKINNILSARGLNLAKEALSSEKKLAEVLELPFDEIVRIELRVIVEQIRSLNKSIAELEQTIGEASSKLEGHKGLSSIKGIGKITGAILLSVIGDVNDFADEGRLASYFGIVPRVSNSNETERSGRIHKRGTKLGRTALVQSALIAANYSPYLKRFYEQVKARRGAGKAIIALARKFLGIIYRTLKNKWVFEDFPNFVLAEET

SEQ ID NO: 250365 - protein, 317 aa, unidentified
MSNPESFVGIDVAKGWLDVAWLTGETLRIDHAEKAIAVLVERLRSQPPALVVMEATGGLETGVASALAAAGLAVAVVNPRQVRDYAKACGRLAKTDRIDALILAAFAAAIRPQVRELPDEHTRALGDLLARRRQLVEMRVQEKLRLQRASNVQRASLREHIVWLDERIGRLDIDLTHALRSSPAWRDKDDLLKPIPGVGSLTRATMLALLPELGTLSRRQIAALVGVAPFNRDSGQHQGGRVIWGGRAQVRRTLYMAAVAAMRCNPVIRSFYQHLRSQGKPAKVALTACMRKLLVTMNAMLKHHSAWSNRLDTQHSC

SEQ ID NO: 250366 - protein, 377 aa, unidentified
MKNVRFVGLDVHAETIAVAVAEKTGEVRSLGVIPNRAESVSRLIRKLGKPEQLRVCYEAGPTGYPLYWQLTQLGVKCEVVAPTLVPVKAGDRVKTDRRDAERLARCYRAGDLTPVWVPDAAHEALRDLVRAREAAKTDQLRARHRLSKFLLRHGRRASEGVQAWTGKYWDWVKSRVHFEQPAQTATFIDYVHEVEHAAARIQRLEQAIDTAVETVPPKMRAVIEALQALRGVAQVSAVTIVAELGQISRFARARQLMGYSGAVSREHSSGARIRRGAISKAGNAHLRRIVIEAAWSYRHRPGIGKALAARQRGQSEAVKEIAWKAQHRLFHRYRKLMAVGKSKQQVVTAIGRELLGFVWAIGVQAEQAPQPRLAAAA

SEQ ID NO: 250367 - protein, 358 aa, unidentified
MQTQSKVLNFEGQNIFVGLDVHLNSWNTSIYTENLYHKTFKAPPKPEALFEYLKKNFPNGNYFSAYEAGFCGLWAHYKLVELGIHNIVINPADVPTTQKEQMHKSDPVDSNKIGRSLRANELKGIYIPRVETLENRSLIRVRSTIVKDMTRIKQRIKSMLYFYGIEFPQEFENGNGHWSKRFINWLKTIQLQYSTGTDSLQLWIKEAEQQRAILLNATKKIKELSTSEQYSKNIELIRSIPGIGLITGMILLVEIEDITRFENSDKLAGFIGLIPTCHSSGERENKGEITPRRHNSMRRTLIESSWIAARRDPALSLAYSKYCKKMESNIAITRIARKLVNRIFFVLISQKKYENKIV

SEQ ID NO: 250368 - protein, 417 aa, unidentified
MSEYAALVAIDWADQQHAVCLSDPSIGEREQTIVKHTPAALQAWALGLRQRFAGAPIAVCLEQSRGPLIYALLQYDFFVLYPINPATLAKYRQAFSTAHGKDDPTDADYLLDLLEHHRNRLRPWHPDDQKTRTLRLLVEQRRRLTGDRTRVSNRLTALLKGYYPQVLDWFEDIRTQLVCDFLDRWPQLSLLQQARPATIDKFLRSHHSTSKPTNLRRLTEIKTALPLTTDAAVMTSSVINVKALVAQMKTVIAAISEYDRHLEALCQTHDDYHLFAALPGAGPVHAARLTAALGSDRSRWQSADELVTFAGIAPIIERSGKQFRIRWRYFCPKFFRQTFHEFAAQSIQDSFWARAYYSSQRAKGKEHHAAVRALAFKWIRVIWKCWHTRTPYNEVVYLESLRKKGSSLLRFAADHQH

SEQ ID NO: 250369 - protein, 367 aa, unidentified
MKKNSTVKQSPKRAKVLALGPITIGLDLGDKTSRFCVLDQHGEVQAEGSVATTKKAMTQKFAAMRRCRIALEVGTHSPWLSRLLSSFGHQVIVANARQVQLISASSRKDDRMDAQMLARLARVDPELLRPIHHRGEKAQQDLMAIRVRAALVEARTSLVNAARGLTKSMGERLPSCDTDSLNVERLESLPEKLREQLMPLLKEVESLTEKIQQSDQKLEQIARTEYPETRLLRQVSGVGPLIALTFVLTLEDRGRFEKSRDVGCYVGLRPKRSESGESQPQLRITKEGDIYLRKMLVQGAHCILSRRGPDTDLKRWGLRLAERGGKNAKKRAVVAVARKLAVLLHRLWVTGEVYEPLRNSTAKQAAA

SEQ ID NO: 250370 - protein, 457 aa, unidentified
MARVKRSRRRRDMSPIHPHAAAIDIGARMHVAAVGPGRDAEPVRTFGTFTSDLHRLADWFARCGIRTVAMESTGVYWIPVYEILEQRGFEVLLVNARDAKHVPGRKTDVSDAEWLQRLHEYGLLRGSFRPQGEIAALRAYLRQRERLLDYAAAHIQHMQKALTQMNLQIHHVVSDITGVTGMRIIRAMVAGERDPDTLASYRDRRCHASVEAVRQALVGNDREEHVFALAQALELYDVYQAKVAACDKRIEALLKRLKEASAKPAEPLPTPRHTTRQPNAPAFDVREALYAVLGVDLTQIHGLGPYLALKLVSECGTDLSAWPSAKHFTSWLCLAPSNKISGGKVLSSRTRRSGNRAAALLRLAAVTVGRTETALGAFYRRLSARAGKAKAVTATARKIAVLFYNALRHGMDYADPGASFYEERYRRRVLSNLRRRAKSLGYVLQQTDPVPATTVVS

SEQ ID NO: 250371 - protein, 482 aa, unidentified
MKKRNIYKNRSQELLSIFEKAGNSAKVMCVPIDYAKKDHVVMFCNGNGDILRKPFSVKNSPEGIKHLTEQVTRSCRHRKINKKHVFFGGEDVNSYAENFVTTLRIKGWLVASVNAYEAKLQRANLQASTDRLDLMGIATMLINRRANCCPHQSGIYRNLRTLVRHRRKLVVMSTEVRNQIHTIVDRLFPGFLDSRKSGIVAFTKSSLYLMEDRFSSHQIRRRRQQKLIEILKRFSTQRPEVTAVKLQQYAAKVLNTPDEHISTLQLSLTQHVKHLKCLQENISQLEKEIAVYLAQTQGAFLTTIRGIGFVLSAGVTAEIGNPFEQKPINNLVSYSGIIPRVKQSGGPEGKTYTGSVSKRCNRILKDYVARSGMHLGLYGPQDLMTDYKRRDAAGQHADFGMGRRFLRMAMCLMRNSQIYMPVELRKDDASMEDKAGYYLTLWPYLRGKWRKVDALDVAFANDRPLGQWRDMVQRLYGIELKL

SEQ ID NO: 250372 - protein, 357 aa, unidentified
MIYVGVDIAKQIHFASAIDSDGVVLIEPFEFCNDNDGFYLLLSKLSAFDKQDVILGLESTAHYGNNLVYFLVSKGFTVCVINPIQSATLRKNRIRKTKTDKVDALIIAKAITLLEYPRFFTLQDVGVMQLKNLGRFRMKLVKQRTRLKIQLTSYVDQVFPEFQFFFKSGIHQKACYAILKEAPSASSIASMHLTHLKNLLVSNSHGHFKKEMALELRVLAQKSVGTADRALSIQIVQSIQQIELLDSQIRMIEGEITDIMGSLDSVIMTIPGIGPINGGIILGEIGDIHRFSSPRKLLAFAGLDPSVYQSGNFTEKHTRMSKRGSSALRYALMNAAHNVVNNNATFRAWSSFMHLIV

SEQ ID NO: 250373 - protein, 375 aa, unidentified
MKEKVRFLGLDVHAETIAVAIAEPGGEVRSLGTIANREESIRKLVKKLGSVEQLRACYEAGPTGYVLYWQLAELGVKCDVIAPTLVPVKAGDRVKTDRRDAEKLARSYRSDDLTAVWVPDESSEALRDLVRAREAAKQDQLRARHRLSKFLLRSGQRPAPGVKTWTQIYMAWIRQIRFVQMAQEWTRLDYLHEVEHMGERVARLEQAITEAVKLAPPGLQEVIKGLQALRGIAHISAVTIAAELGEFSRFEGARQLMGYSGIVPSEDSSGERTQRGSITKTGNAHLRRIAVEAAWSYRLRPCVGPALRKRQEGVAEEIKEIAWKAQHRLHKRYCRLAATRKDQRKIITALGRELLGFIWAIGIKTEAAARPPRSA

SEQ ID NO: 250374 - protein, 325 aa, unidentified
MKKWFAGLDIHMEKLYGTVLNKQGEIIVQGSLPNSKLGIQSFFAGLSSSKLVVAIEACGLWRGAYNMLTELGYDVVLANPLKTHQIAVGKKTDKVDSRILADLLRTGYLPLVYIPGEDVLKLRDIARHRARLVRVRTSLQNKIKSYLIQSGVKFKGGWSKKNLEYLKTLDPMVASFVHVIEVVSEEIKKVDREVNRVAGSLRLAGLLQSVPGIGRFGSLMILGEIGDVRRFPNPKSLVSYAGLCPGVYQSGDRCFGVVNRSCNRWLKWIVTECSGRAARMNNRYMRHYCQVKHRKGFRVARRSVARKMLTDIWYILSREEPFRDL

SEQ ID NO: 250375 - protein, 484 aa, unidentified
MKTKQQEGAREGKKASSRVTQGKWHDMNRKQRREMMRKIQGETLSLEVVHPDAAGIDIGNESHYVAVPPNRDSQSVQRFGCTTAELKAMAAWLKQCRIHTVAMQSTSVYWIAVYDILEQAGLEVYLVNARDTKNLPGRKSDVQESQWLMKLHTYGLLRNSFRPSQEVRTMRTYWRQRNDLVRAAARHIHRIQKALTQMNIQLANVLSDVSGMTGQEIIKAILAGERDPRKLAAFRDPRVKASEEQIAQSLEGNWQQDLLFVLKQEQDGYEFCQRQMTECDRQLNHYLDQREDRSHAAPLPEEKRKERLKKKKGNKPQFDLRQGLFRMTGTDLTQIDCVDVMTATTILSEAGWDMSKWETEHHFVSWLRLCPDNRISGEKIIGKGRLPTNNRVTTALKIAASNLRLSNTYLGAQFRRLRSKLGAPIAIKAMAAKLARLVYRILRYGMKYVDRGAAFYEAQHRHLQIKHLKSKAAKLGFKVIEVAA

SEQ ID NO: 250376 - protein, 341 aa, unidentified
MKPAMSVLGIDIAKRVFHAVGMDERGKIVLRKRLSRHDLIPFLAKLPPVLIGMEACGGAHYWARRFREHGHEVKLMAPQFVKPYVKSNKNDSRDAEAIAEAMTRPTMRFVPTKEVDQQDLQALHRVRERLIGARTALVNEVHGLLHEYGIVIPKGVAKFRQAVVGKLESEQDKLTPLSQEMFWKLIDEFAALEKQLAYYQEKLEALAQSHPECQRLMTIPGIGPFTATALVAAVSDASAFKNGRQFAAWLGLVPRQHSTGGKERLLGISKRGDSYLRKLLVHGARTTIRWVGCKTDRRSQWIRQLVERRGKNRTAVAVANKNARIVWALLTSHQDYQLATG

SEQ ID NO: 250377 - protein, 412 aa, unidentified
MLKIVYPICCGIDVHKGFIVACIASTNGQGVTTYQSKRFSTFTNDLRRCAAWLAQNHCKDVCMESTGKYWIPVYNILEASCTIVLAHPKYVKAIRGKKTDKKDAKWIADIFKHDLVSGSFIPPADIRQLRDLMRYHWKLTNFTTGEKNRAQNCLTVSNIKLDDVFSDIFGKAASAITARLLENNEPFDVTPYLTKNIKAPVEKIQAAVDGEMCVQQAEKLRIIRSHMDALELCKLNLQSLILTTAEKYLPQINIVATAPGIQAFSAIAIISEIGVDMSVFPTSKHLCSWAGLTPQNNESAGKKKTTRISRAGAYIKPLLVQCALNAVRAKQFPEVRRRYLALKKRRGHKKAIIAIARMLLTAIYNMLKKNEPYNPDLYRIADRPPTHHEVSVEEAIYILQRQGYLVAAPSLP

SEQ ID NO: 250378 - protein, 364 aa, unidentified
MKTTTLWVGMDVHKESISVSVLAGDREARPTVKIGNDSAELRRLFGRLKKEGEVRACYEAGSCGYEVQRQLAGMKVPCDVIAPSLIPVRAGDRVKTDRRDAEKLARLYRAGELTSIRVPSEAEEALRDLVRCREDVREDVLRDRDRLLKFLLRHGRKFTEGQKNWSMAHWKWLRTQRFDDATAQTVFTEYLARLDGTLGRLKALDQELAAAAEKEPYKTPVAKLRCLRGIDTLTAVILVAEICDFHRFEHPDQFMAFVGLVPSERSSGGKERRGSITKTGNGHARRVLVEAAWQYRRPPRQSKVIQARWEGQSATVVAHAWKAQERLHRRFHRLVSRGKPSQVAAVAVARELCGFVWSIARTSA

SEQ ID NO: 250379 - protein, 370 aa, unidentified
MGYATILGLDLGKFKSVCCVMDAATGGHGFETIGTTPAALHELLVRHAGAAPAAVLLVVETCDAAGWVHDLAAALGVAVTVVHTQGDERWRWRKVKRKTDRDDALKLARLARLGELPQPPVYVPSPRRRQWRRLVLHRRSVVTRRTQSRNGIRSIYSQQGLPLARGNKQWTRAGVAQLEADARAVDACAADDLWRGRLHAELQLMAAADAQLKALDRRLDGLASDEPRVALLQTVRGVGPRLSEAVVLHVGDDPRRFRSGDQVANYAGLVPKPLQSGETCRLGHITRRGPALLRSLLVESAWMVWRLNDWAKAFVEKVSRGGRGRRKLAIVALARKLLILLWGMLKTNKPFREPKAETPKAKTPKAAAMA

SEQ ID NO: 250380 - protein, 449 aa, unidentified
MKDQKQLSIPVVHSHAAGIDAGSRSHFVAVGQEKSDVREFGVYDKDLRDCALWLKSCGVETVAMESTGSYWQNFYDVLIESCFDVLLVNGAHTKHMKGRKTDVQDCQWIQYLHSVGLLTGSFLPDFDTEELRTLYRHRDFLRRQAAKYINKMQKCLRLMNFRLDIVLNDITGVSGQAIIKAIIAGETDPVVLAGLANSRVRKSKEEIAKALSYNGRKDYLYELTDCFDTYHSYLGKIDACDKKIAELMQGQIVRLGKPQTEPPPLDKPKQKKKNTPKIPLEKLSWQRNGEVNLMEIKGVSHATVLAVDCEVGLSINKFPTAKQWTSWLRLSPNNRKSGGKVLSSHVPKGSNRVAAALRHAAESVGKQKDAPLYPFFQRILHRKGRCAAIIATARKLAVIIWNMLYKKVAYKPYDTAKIEAQIRDKQIKKINKLLNVFDIKVSEIIFATC

SEQ ID NO: 250381 - protein, 315 aa, unidentified
MSESKVEVFVGVDVCKDTLDVRIEPPGESFQVGNDDEGIKALCSRVSELAPTLIVMEATGGLETRAAGELAARGLCLAVVNPRQVRDFAKASGQLAKTDRIDTHVLCGFGRAIRPAARPMKDALTQQLDDLVTRRRQLVEMRVQETLRLHGASKVQAKSVKAHIAWLDKRIKSVEIDLGTRLRSSDAWRVKDDLLLSIPGVGEITSRSMLSRCPEIGRLSRREIAKLVGIAPLNNDSGKYRGQRHIWGGRADVRSVLYMATVSAIRCNPVIKAFAASLKSTGKAPKVVIVACMRKLLTIMNAMIRTSTRWNPQPA

SEQ ID NO: 250382 - protein, 353 aa, unidentified
MSKDITLTVDYHDRACVVRWFDHSTRCDRVLSEVLTTKHALDEIVEQARRAAGRKGGVTWIQESTTGWARIQALVGDRARFLLANVLQMPLPPKGRRRKTDKIDTARIQREYLNGSLPLAYQPPAQWRELRRLVAYREGLVKRQTALRNWINRYLAHETWFNRTGLWSPKGQTRLRASLEKLPRTDALIIGQKLDELMRLEEQLRIAVSELVSVYSVCPEAKRIDAIAGIDVVSAVSIVARIGPVERFPNADSLIAFAGLAPGIQESDQTRRNGRIGGGGTDSHLRHYLIEATMWARKLPRYKRVYDRIAKRRGKKVGRLVVARMLVRSIYKMLKTGVNFDAGALAPAEAIAG

SEQ ID NO: 250383 - protein, 433 aa, unidentified
MDVLIERCAGIDIGKDEVVACVRTPAPEGRGRRKQTRTFATFTSSLEAMADWFAAEGVRAIAMEATGSYWKPVWYVLEDRQGQGPGQGQGWELMLVNAHHVKILPGRKTDVLDAEWLAELLEHGLLRGSFVPPPVIRQLRDLTRYRKRLIQDHTSECQRIQKTLEDAGIKLDSVASDVLGVSGRAMLAALVAGERDPNVLAELAKGRLRKKIPALRQALRGRFTAHHATLIGLSLEHTGYLEGAIARLDDRVDTLFATHTGPDRDGRDGIPFARARDRLDTITGVGKRAAETIIAEIGVDMTRFPTAAHLASWAGLAPGNNITGGRRGSGKTTTGDVWLTDILVQCAWSAARTRDTYLSAQFWRLARRIGKKKAAVAVAHSILVISWHLLSGDCDYTDLGGDYFTRRNTDRQRDRLVGQLHNLGYRVTLDKTA

SEQ ID NO: 250384 - protein, 352 aa, unidentified
MRRPKHQVTSEEDLFVGIDLHKIRWHVTIRTVDLELFSASIPGNWESLQRILARYAGHQLQAVYEAGYFGFRLHDHLVEHGIPCLVTPPSLVPQEYGNRVKTDRRDSSKLAHLLAKRMLKRVWVPSEEELYHRQVIRRRRQLVRDRVRTQSRIKAELSFFGIRLGEPRGRWTQIYFETLRRIKFGNRWMQESFNRLLEQYEFLSAQIDKQTQLLRELSETELYQERVKILQSIPGVGLISAMELLLELQDVSRFRRAEQLAAYVGLTPSQYSSADKVRMGRITGIGKNTLRAILVEASWKLITKDQVMREKYERIKIRSGGKRAIVAIARTLLLRMRRMLLDGRAYALPLAA

SEQ ID NO: 250385 - protein, 339 aa, unidentified
MSKHNLLAIDLAKNVFQVCGMTQQNKVTFNKKLNRSEVMEFMANQEPVEVAMEACYSSHYWARCFEAMGHTSKLLPAQHVTPFVRGNKSDRNDAMAIGEAARRPNIIPVPIKSLGQQDIQCLHRIREQHIAHRTGLSNQARGLLSEYGVISPKGHKSFCKLLREASQPETKAISLLLKTQFNYIADEYNAHTDRIEGIDITLKEIANHNPLCKILLSIPGIGIINATAIYSAIGDGSQFNNAREFAVWLGLTPKQFSSGDTFKSAGITKRGNRYLRKQLVHGARSALSRCKNKTNRVSNWANKLIARRGFNKASVAMAARMARTCWLLLNKREVYKQIN

SEQ ID NO: 250386 - protein, 405 aa, unidentified
MNAVGIDASKGKSMVTILRPVGEIVSSPHEVKHTSDQIDDLIREIRSLEGESRIVMEYTGRYHEPMARWLSDAGLFVSLVNPKLIKDFDNDSLRKVKTDKADSVKIARYALDKWHKLKQYGVMDELRNQLKTMNRQFGYYTKLKTTMKNNLISLLDQTFPGANTFFDSPARSDGSQKWVDFVDTYWHVDRIRSMSLAAFTEHYQKWCKRKGYNFQPDKPAEIYESVRNIIPVLPKDEVTKFIVRQAVNQVNTASAAVEELRTRMNDIASQLPEYPAVLAMKGVGMSLGPQLMAEIGDVTRFTHKGALTAFAGVDPGKNESGSYAQKSVHTSKRGSAPLRKTLFLVMDSLIKTMPQGDPVYEFMNKKRSQGKPYYVYMTAGANKFLRIYYGRVKEYLSEHPETAVN

SEQ ID NO: 250387 - protein, 388 aa, unidentified
MQTVADRPEAPTAIRTDLGAIFVSLELSRSTWLITSLSPGGGEKMSKQVVRGGDVAELLERFARLREKARARTGKVFPFVVIQEAGLDGFWIDRALQNEGIESHVVDPASIATSRRRRRAKTDGIDGEALVRALLAYKRGEPRVCAMVKAPTPEEEDRRRLCRERKVLIGERVQHVNRVKGLLFSQGISGYEPLRRDRRERLDTLQTGDGRLLPDHLKAQVCRELDRLELLLEQIKAVEAERDVLLAAQQVAAPAPAAMLLDIKGIGPEFAAILWSEGLFRHFDNRRQVASYAGLAPTPWQSGSVDREQGVSKAGNPRLRTTLIQLAWLWLRHQPQSALTLWFEERVRRNGGRLKKTTIVALARKLLVALWKYVTAGVGIEGAVMKRT

SEQ ID NO: 250388 - protein, 341 aa, unidentified
MKVSKTVVGIDIAKRVFQLHWIDQETGEIGSLQLKREKFLEHFANRASCLIGMEACGGSQHWARKLTGMGHEVKLMPAKAVRPFVGGNKSDVHDARAIWTAVQQPKVKAVAVKTEEQQAVLALHRMRQQLVKFRTAQINGLRGLLTEYGEVMCQGKVGIKKGLAEALQRLSDRLPAMVIDTLREQWERIGKLDDQVGEIEQRLKAWHKKDVASKRIAEIPGVGLLSATAAVATMGDARAFKSGREFAAWLGLVPRQTGTGGRIRLLGISKRGDTYLRTLLIHGARSVLTHSKEPAPWITKLRQRRPLNVAVVALANKMARTIWALLAHERTYEKKFVIQPA

SEQ ID NO: 250389 - protein, 403 aa, unidentified
MVFLGIDWAEAHHDVCLLDEQGKVLGKRRVVDGLEGVRRLHELVAEHAEEPEQVVVGIEIDRGLLVHALVAAGYQLYAINPLAVSRYRERHGTSGAKSDPADAKLLADLVRTDRHNHRPLAGDSELAEAIKVLARTHQNLVWSRQRQVNQLRSLLREFYPAALEAFGTDLAAADAIAILERAPTPYQGRSISQAKITSALRKAGRERNLESKAAEIQTGLRAPQLEAPALLAQAYGRSVASTIRLLRQMNQELAALEQELAASFELHPDTEIYLSLPGLGKVLGARVMAEFGDDRTRFKNPKARKSFAGTAPITRSSGRRKTVLRRLACNHRLLDACYLWAFASLRRSPGAKHYYQQRRNRGQSHPQALRALANRFVGILHGCLDHRELYREELAWPLLRAAA

SEQ ID NO: 250390 - protein, 343 aa, unidentified
MTQYVGLDVSLKETKLHVLDGAGNRLWRGRCATDPAAIAAAVRRYAPTAVRIGLETGPLTAWLWTAFTAEGLPMVCLDARHAKKALDMKVNKTDANDAEGLAHLVRAGWYREVRVKSRSAMLAKALLGARSQLLSMSLALENQIRGILKTFGRIVPKGAGGLFEKNVRALIMDDGEIVAVIMPLLQAREMAHSKCAALDHRLIRSVQGDATCRMLMSMPGVGPITAVAYVAALEKPDTFKRSRAVAAWLGLTPRRFQSGEVDYDGHISRRGDRQLRALLYEAAAVLLTRVRKESALRRWGLMLWKRLGFKRAATALARRMAVVLHAMWKSGTPFNPTLGAATP

SEQ ID NO: 250391 - protein, 461 aa, unidentified
MKRKRITTGRKKFTSGRAVKIARKEAALSRINEHAAGIDIGAQSHFVAVPPASCDAPVREFGVFTRDLYAIADWLKECGVRSVAMESTGVYWVPLYEALEERGFEVKLVDARKVKNVSGRKNDVLDCQWLQELESYGLLAGAFRPADEIVILRGYMRQRQMLVKTAAIHIQHMQKALQQMNLRLDNVVADITGRTGMRILKALLGGERDVNKLADMRDPNCKATHEVIAKSLIGNYRQEHLFSLKQAVELFEFYQQKIRECEQEIEGYLKTLPHKRDDEPPPVEGRAKRSRVSFNVRDEAYKLVGVDLFRIKGLNAETVLRLLSEVGVDLGPFPTEKHFSSWLSLSPNNKVSGGRVLSSKTKASSNRAATAFRQAAISTQASDSDLGAYYRRMKARLGGPKAVTATAHKLARLYYRLVKHGEEYVEVGARVYEEKHRERVIRSLQKRARGLGFELVATVTM

SEQ ID NO: 250392 - protein, 398 aa, unidentified
MPELWAGVDAGKTDHHCVVIDVEGRRLLSRRVGNDETALLELIGEVTTLAAQDSVTWAVDLNGGGAALLIALLVNHDQRLLYIPGRTVHHAAASYRGDGKTDAKDAAIIADQARMRRDLQPLRPGDEISVELRILTSRRTDLTCDRTRTINRLRAQLLEYFPALERAFDYSSSKATLVLLTGYQTPDALRRLGQARLEAWLRHRKVRNAAAVAATAIEAANAQHTTLPGQRLAAAMVARLAKGVMALNEELAETDALIEGRFRQHKHAEIIMSMPGFGVLLGAEFLAATGGDMSQFASADRLAGVAGLAPVPRDSGRVRGNLHRPRRYDRRLLRACYLSAMISIRCCPASKAYYDRKTAEGKRHTQAVLALARRRLNVLWAMLRDDTRYQATPASAAA

SEQ ID NO: 250393 - protein, 401 aa, unidentified
MTKLWAGIDAGKAHHHCVVIDAAGNRLLSQRVPNDEPALLELIVNVLKLGDGDEVIWATDLNHGGPALLIAILVAHGQTILYIPGRIVHHASKLYRGEGKTDAKDAAVIADQARMRRDLQPLRAGDEICTGLRLLTARRADKSADRVRAINRLQAQLLEYFPALERAFDYSRSKAALTLLTKHRTPDGIRRTGQTRIHAWLKKHGTRSSAAVAQAAVDAAKSQHITVPAQHLGEQIVAALAQEIITLDKELAELDALISEKVSEHRHTPSLLSMPGFGPVLAAELLGATGGDLTVFETADRFAGVAGLAPAPRDSGRITGNHHRPRRYDRRLLRVFYLSGLSALKSCPASRTYYDRKRAEGKTHIQAMLSLARRRLNVLWAMLRDGTTYTPVPARAARLAA

SEQ ID NO: 250394 - protein, 413 aa, unidentified
MDVLHPRCCGLDVHKSSISACILVQIAGRVQKHQRRFGAMTRDLQELANWLRQFEVTQLAMESSGVYWKPVWNILEGEFTVVLANAQHIKNVPGRKTDQKDAEWIAQLLQHGLLRPSYVPCEVIRDLRDLTRMRASLSQEASRISSRVQKVLEDANVKLSSVATNTLGKSGRAMLEEIIAGQNDPEYLASLALGHLRAKTPQLKLALEGKIRPHHCFLLRRLLDQLDFVEHEIDLLDERLEEIGRGRPELSQAVARWDSIPGIDRVAGWALLAEVGHNMAQFPTAEQLASWASLCPGNHESAGKRLGGATRKGSPWLRRMACQCAWAAARTKNTYLSAQFRRLAARRGNKRAVIAVAHSVVIIGYHLQKNQRNYEDLGGDYFDRIDSDGLKRYFIKRLEKLGHKVTLAPNKAA

SEQ ID NO: 250395 - protein, 416 aa, unidentified
MELQKNKVCGIDVHKRFLIATILFRDGKKDTQRFSVTLEDLLKFRDWVIENGCEQVAIESTGIYWHPVHSVLEGKIDLIVANSYKIKHTPGRKTDVGDSEWIAELCLNGMIEPSRIFPKDDRELRRLTRAREGYVKQMTQEKNKIHQSLDSACIKLASVISDIFGKSGMYLLNCVLEGRDIDEIIEGIPSGRLKKKADQIKESIKSRLEISQVILIRGSLSLMKSIQERIDELDGEISARIQYRKNDLAIAMSIPGTGFVSATAILAEIGNCTDFKKPEQLAAWCGLVPSLYQSAEKTILGGITKQGSKHIRRMLIQVAYAISRTKDSKLKKFFLRIQAKKGSKVAAVALARKVLCILHHLLMKQEMYLEDRDKKNMRQKVLTPPSPIKMSMQEMIDCIVRAGYVVTKSDSRGGFG

SEQ ID NO: 250396 - protein, 430 aa, unidentified
MEEVTDEPLYRDRVCGIDIGKAGMVATVRVPSEMNPARRMAETRAFATTKRGVLALADWLRCWQVPAVAMEATGDYWKGPFYRLEAEGFECVLADARQIKNLPGRPKRDSSDSAWIAVCFERGSITSCFVPTGEFRLIRLHTRYRRDLTGDRTRDKNRVEKLLESAAIKISAVLADVHGMTGRDIMQQLIAGQRDPKALAQLARRRARAKIPQLEQALEGADFFTEAHAGLLKAMLERIDRADEEIARLSQVIEQLLSPYEEQLQQAESMPGWARRAAQDVIAETGVDMSRFPTPGHLASWAGRTPLDHQSGARRGKARRKHGNRYIGAVTGETAVAAGRTDTREGARHRRLARKRGKGKACVATGNTQMRVFHVLLSNPGMRYTDLGPDWYADERQAARRLTRLVGALDAMGYEVTLCRKPEPQDSPAA

SEQ ID NO: 250397 - protein, 383 aa, unidentified
MPSLRHGRRAVGEDRSVCVGLDTHKVKIAVAVAEPGRLGEVRFQGEIANQPEAVRRLIGRLGERHGRLRVCYEAGPCGYGLQRQITVLGHDCTVVAPSLVPLRAGNRVKTNRRDAITLARLHRAGELTAVWVPGPTHEAMRDLIRARTAAMEAVRRARQQLQGFLLRHDRVFTGRKAWSPAHRRWLAGLRFAHPAQQIVLQEQIDAIEEAERRRDRLGQQIRELVPDWSMAPVVAALQAMRGIAFLSAVVLAAEIGDFRRFANPRQLMAWLGLVPSERSSGPRVERGGITKAGNDRARRVLVEGAWSYRFPARVTGLIQARLDEVPEGVRAIAWKAQLRLCARFRRLVAAGKNANLVTTAVAREMAALAWAIACRVQPKGAAA

SEQ ID NO: 250398 - protein, 335 aa, unidentified
MKNYLFHVGIDISKLKLDVVLVNKSDTNLKKHFIVTNNTTGLKRMVSLLKKEGIDLKQTLFCFENTGVYTFPLSCFCYDNNYDYWIVPALEIKRSMGILRGKSDKNDAKDIAFYSIRFRDKLKLSSIPEKEIQKLKLLYAEREKIKKSILIFKSTKENEDFTPSDIYKTVKTHNKRTVKFLEVSLKAIESKMRDIIKQAPKLKRQFELIKSIKGVGEKTAIYFIIATKGFNAFSSARKLACYAGVAPFEYSSGSSIRGRTKVNHMADKTMKALLQMCAMSAVRHDAQLKDYFLRKQDEGKNRMLVLNNVRCKIISRIFAVIKRDSPFVDTYKFAA

SEQ ID NO: 250399 - protein, 392 aa, unidentified
MVVSVGVDVSKDKHDCFIVSSEGEVLADVFTIPNTMDGFHYLLQRIRHCTAPQDKIKVGLEATGHYSYNLLGFLLDNGLTTYVLNPLHTNLYRKSLSLRKTKTDRVDARTIASMLLSDAGLKPYTDTAYHNEELKSLTRYRFDKVKERAKLKSSIARLVCILFPELEKLVPSLHIASVYALLEEFPGAKQVAAAHLTRLKALLETASNGHYKRDMALEIRNAAKNSIGSQMPAKSLELQHTIRLIRELDREIDEIEEQIQSIMDELHSPITTIPGLGFRMAAMILAEVGDFTRFDSPDKLLAYAGMSPSTYQSGQLKNCYPHMEKRGSRYLRYALYNATKYVCHWDPAFADYLAKKRAEGKHYNIAISHAAKKLVRLIFAMEKSRQPYCSAA

SEQ ID NO: 250400 - protein, 393 aa, unidentified
MKLVGIDIEKKHFFCIMDKDSGEVLLQPSSFSNTKDGFDSLIQKLSSYSKDSILIGMEDTGHYYFALLKYLLEKNFTVALINPKTTDYTRKMQNGITKNDKLDTLTICDVLDTPVRKKQYRITKVNSFDLYEQKQLTRHHHNLKEELNVYTNRLQKCIDIVFPEFNSLFSSKYGIIYMNVLKTFGSAENIASTDIRTIRKCFEIKGRGNRISLTAQQLKDSAKSSIGISSAAEVIKIKHLISQIELINEQLAETDKKIEEFSIQNNSPILSIPGISHFSGTSILAELGEISNYSKPSKIIKAAGVAPYHYESSQYNAQHTAITKKGSPYLRKTLYQIILPVINNNPVFKQYYDLKISQGKGHRCACGHCVRKLLRIIYHLSSTNQQFDDALLR

SEQ ID NO: 250401 - protein, 413 aa, unidentified
MKLFVGIDVSSKDLQVVALDSEDQNKRLINDSFVNDLYGASELKKQILDLAQNKHYDQIIIGMEATSIYSFHPAYFFQNDEDLQKLNVETDVINPKETSRFHKVFEESKTDPLDAYYIALYLSFGHYRVSIARQDNYLALERLTRTRYELVQELTRTKQHFIEALYYRVNKLITVDKDKINTPLFGAAMMSIVTDSKTLDEIADMPTEDLISYLQVKGRGRFSDPDTLAKAIKKAVRGSYRLGKVMTDSIDAVLSVHYNMIQSFNESIKDLEKAIDRIVDALPESKILESIPGIGKTYTAGIIAEIGSIDRFDKEEQLAKYAGLTWNQYQSGDHSNEHTPMARTGNRYLRYYLIEAANLARLHDPVFKKYYQKKYDEAVYSPHKRACTLTARKLVRVIFKLLKDDKLYRTPRS

SEQ ID NO: 250402 - protein, 420 aa, unidentified
MDVVVERCAGIDVHKRVRVVCRLTVDATGQRSAQTRTFGTTTGDILQVCDWLTEGACTHVGLESTGDYWKPIFNGLEGLFEVWLLNAQHIQAVPGRKTDVKDAQWIAELLAHGLVRPSFIPPREQRDLRDLTRYRVSFVRERATLVNRVQKLLEGANLKLCSVLTNVMGVSGRAILSALLAGETDPQTLAELARGQLRKKRAQLAQALEGQLRPHQSFVLAELLTQIDALDETIARFDTQIQIACATVADEAVVVALLDTIPGVAPTAAQILVAEIGTDMQRFPSAAALASWAGLAPGNKASAGPQHSGRTRKGNTWLRSVLVQAAQAAAHMKHTSLASRYRRIAARRGAKRATLALAHTILVSAYHVIARREPYYELGEDYLRRADPEARVQRLVRQLGHLGFEVALTPAAMLAPSGGS

SEQ ID NO: 250403 - protein, 523 aa, unidentified
MATKSRTKRRRSARSHLIHKPHGTLHPRVQEVGPEHFGIVSVDCAKARSKWMLADFYGKVLVPPTPVEHTRNGLTAMVQAIRHVIAQFDLRDVIVAIERTGQYHKPVQRTCVQAGFDTRLVHPLTTKQFRQPANPANKTDDTDLSAIHLATVNGFGLVEHPADPVSARLQLLARYRRDWVEKKTALRCQIHEHLQVIMPGYAKCFDDIYECHIPLLIARSLGSATSILRAGLSGLTQQVRQASIRPHRPTLEKILAWAQTAVAAPDEASIHHQIMIERDDDRVIKLRAVRKVEGELAEVLVQTPYVLLLGIPGINVVSAAEFAGEMGPIQFYTKARSITGRAGLFPSRYQSDEVDRADGKLVRCANRRLRQAIMMIADNLIECNDHFRVMAAQWKLEGRDAREIRVRVAGRFCRIAYQMVAGRTSFRHPCCQQRDYILRKMITFYMEHNIDISRIMKDLDAAVAQIPGAAHREEGAALAEALDELQKKRGSGPRSLAEILPAVLAKLGVKLIESSKSGEANLS

SEQ ID NO: 250404 - protein, 352 aa, unidentified
MLIIGCDFHPGFQQVAIFDNLTGEIEGKRLQHRAEAEQFYRSRAGQEVRVGMEACGHYPWFERLLAELGMELWLGDAARVRAAEVRKQKTDRRDAEHLLQLLRENRFPRIWVPSLEVRDVRQLLVHRHKQVQARTRTKNQLQAMALSCGVQKKYKLWTRAGRAELEQLPLLPYAAQRRKRLLEALDGLEAEISELDRGVAEEARQRPEAVRLMTHPGVGPVTALAMVLTLGPAERFGSGRQVGSYFGLIPSEESSGGKQRLGRISKQGSSFLRFLLVEAGQTAARLDPQLKRFYRRLAARKNRSVAKVAVARKLATRLYLMLREDWTYAQLRQSVMQVSPSHSVAGESEPSV

SEQ ID NO: 250405 - protein, 352 aa, unidentified
MHASTVAIDLAKEVFELAFADAQGRIIERKRLSRRAFIRSLETRPPLRVLMEACGGAHCWARRFQRQGHAVRLLPARDVRPYVRGNKTDRNDVAGILEADRCAGIAPVPVKTPEQQGIQALHRLREHLKAERTATLNLLRGVLREFGVAVPLGSTKVPAAVRDALEDGDNDLPMALRHSLAEQIDRLSQLARDMLAIEQRLEEFASRDVAVQRYRTVPGVGLLTATALRASAGDLSRFRSGRQFSAWLGLTPREHSSGRQRRLGSLTKRGDVYVRTLLIHGARAVLQAARMKQRRGQDLDPLQAWALKVQDTRGHNKAACALANKLARRLWAMDHHGTPFDPRHVSERPRAA

SEQ ID NO: 250406 - protein, 326 aa, unidentified
MSFTSNNILVALELSNSLWLVGTRMPGAQKSHMHRIDAGDTAALLSLLSGLQSRQRAQVSRAPIAVCFEAGRDGFWLHRLLTAHNIPTYVVEPASILVNRRAKRAKTDRLDAEGMLRVLAAYLGGDNQICSMVHVPTPDEEDGKRVHREREYLVQERTRIENRISALLATQGIRSRPSLRSWERDMADLETGDGRKLPRHLAAELNRLRRRLVLVRDLICELDTERDEHLAATSGDAITTKVTALSGIYGIGDNFAAVLAREVFYRHFGNRKQLASYVGLAPTPHQSGNVDKDRRIGRAGNARARKTLVQAAWLWLRYQPGSELAA

SEQ ID NO: 250407 - protein, 415 aa, unidentified
MALKIVYKICCGIDVHKTFVVACIASTNDKGVTSYESHRFSTYTSGLKTLLQWLLKRNCKDVCMESTGKYWIPVYNILENDCSIVLAHPKYVKAIRGKKTDKKDAKWIADLFKHDLVAGSFMPPADIRQLRDLMRYRFKLTCFQSSEKNRLQNCLTVSNIQLGNVVSDTFGKSAQAILDKLLENPADTSFDLEPLVYKSLKKKLPELRDAIDGYITPEQAGKLKVIKAHYESLESRKAELEELILALAAPYQQELAILQTAPGIRSDFTAIGIISEIGTNMEAFPSAKHLCSWAGLTPTNNESAGKKKSVRVSKAGCYIKPLLVQCANAVVTSKKHPEIRNRYLRLKKRRGHKKAIIAIARMLLTALYHMLKNGENYNAELYRKYDLPPVDREITVEQAIIIARNQGYKIKSATA

SEQ ID NO: 250408 - protein, 350 aa, unidentified
MTTMPLRVIGGVDTHLDVHVAAALDHRGALLGVESFETTPAGYRGLLGWLRGFGALELVGVEGTGSYGAGLTRHLQREAVRVVEVDRPNRQRRRRRGKSDPQDAITAARAAQSGDALGEAKTRDGNVEAMRVLRVARSSARKARTQALNQMRSIISTAPEPIRAELRNLNVYRLLEHAAAYRPGQRRDVATLTKRTLRMLARRAQALESEVAELDAILEPLVAETAPALAARPGIGTDCASALLVAAGDNPQRLRNEATFAHLCGAAPLDASSGKHERHRLNRGGDRQANSALWHPVITRMVNGPPTRRYIDRRMKEGLTKKEAFRCLKRYIAREVYNHLPRPHLALDSP

SEQ ID NO: 250409 - protein, 398 aa, unidentified
MTDKLIVGIDIGKRTHVATIIDHSGAVIGRAFSFANTTIGANLLLERIIAVNPEHLPIVFGLEATGHYWLALYSFLTGKGYPVSVINPYQSDAFRKVHLSTTKTDKEDSFLIADLMRFGSFQETKMAGEQMVSLRNLSRFRVTMSQQITDTKRRIVTIMDQVFPEFETLFSNSFGKTAKVLLEEYPTPESFESITTRKLTNVITKLSKGRFKKEKAEEIKQKASVSFGVDFALDSFKLELSLLLKQLDFLTAQIAVVESEIGQSMETIPTTLKTLPGVDTILAAAIISEIGDITRFQTSAQLVSFAGINPTVHQSGQFTGNKNHMSKKGSPYLRLALWRASVTSVRFNPILKTYYEQKIKEGKNHMTVIGAVSRKLTGIIFAMMRDNKKFDETARPLV

SEQ ID NO: 250410 - protein, 396 aa, unidentified
MSTAFADRLSWPYFLDGRTAMLDQAHNHSAPTIYAAIELSKKSWVVAILRPERDQPSIHRIKGGALPELISKLRAAACNGERLLVCYEAGYDGFWLARALESAGIACRVLDPASLQVNRRARRVKTDRIDVLMLVRAIVAVDRGDRHVCSIVRVPTVEEEDARRSHRERQRLVRERTAHINRIKGLLFGQGVRGVEPARKRTRIDLSELRTGEGLPLPDRLRAELEREYARFDLVERQLRTVEAERDTVDAQDPTVERKRGMLIQLRGVGSASAAILAREIFGRPFANRRQLGSYLGLTPSAYDSGSTTRCQGISKSGNSFARRVMIEVAWLWRKYQPESALAKWYERRAAAQSPRIRRIMLIALARKLIVALWRYVEIGLVPEGAVFCAANVAAA

SEQ ID NO: 250411 - protein, 342 aa, unidentified
MDHFAGLDVSVKETSVCIVDDTGRIVREVKVASEPDALLAVLTNPAYHFKRIGLEAGPLSQWLYSALAEPGLPVICVETRHMRAALKAQINKTDRNDARGIAQMMRVGLYRPVHVKTLRSQKLRMLLTHRKLLQSKAIAVENDLRATLRNFGLKVGMVGTVKFEARIKELVENVPDLASLVEPLLIVRRVLREQIVILHRRLLVIVRDDDVCRRLMTVPGVGPVVALTYRATVDVPARFRKSKAVGAVFGLACAKYQSGEVDWSGRISRCGDEMMRVMLYEAAQSMLRSKKWSWLKAWAMQIARRRGMKKAIVALARRLAVILHRIWVDGTEFRWTREVAVA

SEQ ID NO: 250412 - protein, 347 aa, unidentified
MTMVGGFDVHRKQITFDYVDDDGLVRWGQIRPATRSTLRGWLREHCPDGDGEFALEGCTGWRYVSEELAAAGVGVHLGDPAEIATLRGPKKRAKTDRADARLLRTLLLEGRFPESWVPPAHVVEVRTLGRLYCTLMDERRAWQQRIHAQLFHQGCPPVKGLLSAAGRDALAGAELSAAGRQYVDVALDRIDELTAEIEPLRTQLVNVARRQPGCRALQARHYGVGWLCAAIIWAEIGDARRFAGSDQVVRFAGMDVTVYSSDGKRSPGHLSRQGSPELRWAAFEAARCAARRGSPDYVYYHRLAAAPHSGKNPALAVERKLLRRCYHTLRELGDAAVSAPQPAREAA

SEQ ID NO: 250413 - protein, 357 aa, unidentified
MSKSIIDTSAVTRVGLDLAKRVFRVHAVDATGKVVIARSVNRRTLLKFFDALPRCVVAMEACSSAHHWGRQLQALGFTVRLIPPAHVKPYVRRNKNDAADAAAICEAAGRPGQRFVPVRSVENQAALMRHRARELMVGQRTAALNALRGHLSEIGVVAAQGVQNVYALKELAVGGVDENGEIVVPDCVRLALAPLVRQIDALDEAIEAIDRELEASARTDETARRLMTIPGIGPVTAMALLATIQDFAAFSSGREFAAFLGLTPREHSTGGKPRLGRITKMGDRYLRKLLVVGACSALAARKGHNDALRRWASGMLERKTVKYKFKLTAVALANKLARIVYALATKGGHYDDRPVAA

SEQ ID NO: 250414 - protein, 340 aa, unidentified
MKIKTLGIDLAKNIFHLVGVDERGEVTLRKKRRRKQVLAFLANLEPCRVGLEACGGSNYWAREMAKFGHDVRLMSPQFVKPYVKGNKNDYNDAEGLCEAVSRPTMRFVPIKTVEQQDVQSLHRIRQSRVKARTALVNQIRGVLGEYGIVVVQGINAVRTKVPEILEDGENGLTDRFRRWLSEQYTHFQVLDEQVNHYEKEIEQLYQASEVCRRIGAVEGIGSLGATAIVSAYGEAREYKNGRQFAASLGLIPRQHTTGDKPVLLGISKRGDSYIRSLLIHGARAVVRRVENKEDSRSRWIQRLVMTRGKNKAAVALANKNARIIWALLSRQEVYRPAVQR

SEQ ID NO: 250415 - protein, 407 aa, unidentified
MAVVMIGVDPHKGSHTAVAVSGDERQLGKLRVRTSAEQARQLVKWAAAWPERAWAVEGASGLGHMLAQQLVAAGERVLDVQPKLGSRVRLLTTGNVNKTDPNDARSVAIAALRSAACREVRLDGHAMVLKMWAKRHRDLGRSRNQVACRLHAALCELVPGGVRKEITASHAARLLEDAQPAGLAEAARWQLACDFLDDLRRLDDLMSQSKKKLAVAVKASGTTLTEIFGVGPVIAAIAIGEVQDVSRFRDRDHFAAYNGTAPIEVSSGKRKVHRLSLRGNRRFNHAIHMAAITQIRFAHSEGRAYYDKKLAEGKTSKEALRALKRRISDAIYRQLLADARRAIASGQVTGPGGQAGNDTDASAADSHPEHQLFGEATPGPNPTLRPAPAAQPKKPRSQTSKKMPRTT

SEQ ID NO: 250416 - protein, 360 aa, unidentified
MFSERTSVGLDVHARSVVAAAIDGQTGEVFKARLTPSHAEVLEWIGTLRGPCAVVYESGPTGFGLARALTAAGWRCEVAASSKLHRPAGDRVKTDARDAVHLARLLRLDEVVPVRIPTQAEEAARDLVRAREASRQDLMRARHRVSKLLLRHGIVYSGGKAWTVLHERWLRQQRFDSMSTQAAFDDAYETVVLATARRARLDEKITAVAADSEFSPLARRLACLRGIATLTGFALAVEIGDWQRFTGASIGAYLGLVPSEHSSGQSRVQGAITKTGNTHVRRLLVEAAWQHRTPYRPSIVLQRRWDQVPAAARARGHAGNQRLHARWVNLNLRKKRPVIANVAVARELAGWCWSLAVMPD

SEQ ID NO: 250417 - protein, 343 aa, unidentified
MQIRSVGIDLGKTTFHLVALGAAGKVLVKKKFTQRQLLVFTANLQTSLIGLEACSGAHFLGRALRKQGHDVRLIPAQFVKPFVKSNKNDFVDAEAIAEAVERKNMRFVPIKTDDQLDLQAIHRVRDRLISRRTAVINQLRAFLLERGMVFAQTPAKLKAAMADILENAEADLTPQMRSLIDMLWSEWKMVEQQTVELTTQLERISDADAGCTRIRQIPGIGPIVATAIVAAIGNGAAFRKGRDFAAWLGVVPRQYSSGGNAKLLGISKRGNVYLRKVLIHGARAAVLRIKRDRAPIGAWLDRLDARAPKNVVVVAMANKLARIAWAVLSSGEDYRPLPSISAV

SEQ ID NO: 250418 - protein, 408 aa, unidentified
MEIVHPICCGLDVHQASISACLRTVTPEGMIKLENRVFDTTMRGLTSLLEWLVNNECPIAAMESTGVYWKPVYHVLSPVVTVWVANAAEVKQRKGKKTDKTDAKWLAELLAHDLIQPSFVPPPLISALRDMVRTRTALVNSRTQAKSRVLAVLEDTNIKLSSVVSDPFGKSGRAMIDALLAGFHDPKALAQMAKGILRRKIPQLEAALEGSFTIHHATLIRLSLAAVDLFDVQIKELDVHIAAMVDPIRTEVDLLKSIPGVEETAARSIIAEVGTDMSRFVTPGRLSSWAGLCPGNNESAGKRKSGKTRRGNRHLKRVLVECAWAAGKTNTFLGRTFRRLQARIGGKKAAVAVAHKILVIIFHLLNEGSLYCDEKYDRPSPQEEAKQQKRAIDTLNRLGFEVILKPAA

SEQ ID NO: 250419 - protein, 344 aa, unidentified
MEVNYSITNNIITHCGEFMVYFGIDISKLTFDVTALLDNKSRHKKFNNNPQGFQLFHKWIVSFEVENYICMEATGVYGAHLASFLVKMKHKTIVSNPYKIKNYARMKMNRNKTDKADSLCIAQYCKSLQNEGEIDSHLYFPKSKYFQRLQALVTRLEQVKLLKSQEVNHLESTLDKVALKFIKDTVKQLDKQIKAIKNSIIKCVNQDSTLKKQVNLLVTIDGIGEITAWSILAYLGDISLFSTSGQVTSYVGINPFVENSGTSLKVSRLSKMGHKRLRKSLYMPAVVAKKYNPILVEFYDKLLNKGKPKKVAICAVMRKLLVIAYGVLKSETEFNPNYKRCKAN

SEQ ID NO: 250420 - protein, 403 aa, unidentified
MSIRYAGLDWASRTHAACVIDEHGSVLLQFEVNHDAAGLADLCRRLRGATVTAVAIERPSGLIVDALVEAGLAVVPIHPNVVKATRPRYRSHGGKSDASDAYLLADLLRTDGHRFKPLAPQSDDIRALRALVRGRDDLVATRVQLANQLRSLLQSFWPGAAEVFADVDSPIGLDFIQRYPTPESAARLGPKRMAAFCAQHAYSGRRSAQELLDRLHQAPAIALGELEMEAKGELALSLARTLARLVEQIRLLSSRIEHHVGSIEDGRILMSFPRAGRICAAQILAELGSVRERFDSDEHLAAEAGVAPVTYASGKSKAVTFRWACNHRLRAALTCMADNSRHANAWAASVYAKARARGCDHPHAVRILSRAWLRVIWRAWTDRKPYDPRRHGAAQLVLKTAGG

SEQ ID NO: 250421 - protein, 340 aa, unidentified
MQHITTIGLDVAKHVFQVHGMDHEGRAVLRKKFRRGQVVKFFATLPPCLVGMEACGSAHHWARELSAQGHQVRLIPPQYVRPFLKTNKHDAADAEAIAEALVRPTMRFAPIKSADQQAVLMLHRSRELLVKQRTMLINAVRGHCSELGMTASQGASRVNDLMVLIKTPDDPRLPTFAREALGVLIVQLQAVKEAIRTLESKLQAWHRSQHASQRLATIPGVGVITATALVATIGDGSQFKSGRHLSAWLGLVPRQHSSGGKSRLGRISKRGDGYVRRLLVHGSRAVLRWQRAAPTRPSPWIGELLARRPTNVVLVAMANTTARTVWAMMRDQQDFNAVCR

SEQ ID NO: 250422 - protein, 343 aa, unidentified
MNYYAGLDVSLEETAICVVDADGRIVREIRAVSEPGALEAALRATGLSLERIGLEACSLAAWLHDGLRDAGLPAICIETRQANAAMRTMPNKTDRNDARMLAQIMRTGWFRQVHVKSRDCRLWRSLLVARRTLVNEMRSLENVVRAVLREAGLKVGPTSRAGFAARVRELADGDRLILGIVEPFLGVLAVMLEQFARLTKQVLTIVRQETICRRLMSVPGVGPITALAFRATIDRPERFRRSRDVGPHLGLTPSRYQSGEIDIQGRISRCGDELARTALYEAAHVLLLRSRKWSSPRAWGMSVDRRRGLARARVAVARKLAVILHRMWRDGTEFRFGQEPGSA

SEQ ID NO: 250423 - protein, 366 aa, unidentified
MKKISTVEVFGNEILRGQKLTIGLDLGDRWSFYCVLDEAGKILLEQKVATTPEAMKQTFGKIPRSLIALETGTHSPWVSRLLTELRHELIVAHAQKVELITKSNRKDDRHDARTLARLARIDPQLLGPVRHRSAKAQIHLTVIRARAELVSARTALVNAARGLVKSYGQRLPKCGTQQVSRELGAGLPAELREVLEPLLKEVESLNERIQEYDERMEKIAKEVYPEVSLLKQVKGVGTQISLTYVLTIEDPYRFPKSRAVGCFLGLRPGRRNSGESEPQKGISKEGDRYLRTMMVQGAHYILGPFGEDSDLRRWGLKLAERGGKNAKKRAVVAVARKLAVLLHRLWVSGEVYEPLRNSQKAMRAVA

SEQ ID NO: 250424 - protein, 316 aa, unidentified
MKNYIGIDVSKATIDVYDGKKSYKFENNEIGFKQLVSLSEDIKNSIFIFEPTGVYSYALTNFCSTSKIKVVMVGPKESRDFARSLKVRSKTDKIDAKVLYKYQSHVEPKMVKVPTVNHQALKIQEMLNVYEGILSAKQKFKNQIESTSKEHKDLVRILNKIIDNLEVEAQKLFNKIELLLLKDEKIKAKYDAISTIPSIGQKSALYLAAFFLKYPLANAKELTALMGLDPVMKDSGMFRGKQRISKHGGQQIRNLLYLPTLCAIQHNSRIKKFYEGLTARAKTKKLAVIAAMRKLILMAFSIFKSEEEYQPLLVKI

SEQ ID NO: 250425 - protein, 316 aa, unidentified
MQEKVFVGVDVSKDCLDVALRPIGQVQTFPNDNTGIDKLVQDIAEAKPCLIVLEATGGYELALTAALMKGGMPVVVINPRQARDFAKATGKLAKTDKIDANTLAHYAEAIQPPVRPLPDERQRELSLMLARQRQLVDMLAMEKNRLHNCPSTRVKKDVEVHIKWLKAQIKQLDKDIGSLILKSPAWRAKDELLQSVPGVGSTVSRALIAYMPELGKLDRQKIAALAGLAPFNRDSGNMRGARTIWGGRSKIRSLLYMAAVASLRFNPTIRAFYDRLVAAGKPKKLALTACMRKLLTILNAIVKTGSPWDIKNPSTP

SEQ ID NO: 250426 - protein, 348 aa, unidentified
MASLSSPAYRCFVGVDIAAASFTAIWSTDGTILPRAVTFSQSLAGFAAFQEQLQATGVAPTQTLIVLEATGSYWIALAATLHAAGYAVAVLNAAQLHNSAQSLPRRGKTDALDARVFLRFAEERKPAPWTPPPAVYHELRQRLVARDGLLSMRQQARNQRHALQQWPVLVASVLVQLDGVIADLDVRLASLEKEIAEVLADGAWASSAALLRTIPGIGLVTSAWLLVSTLNFSLCVTPEQAAAYAGLVPLQKESGTSVRGRAQLGHGGNGRLRTALYLASLSATRYNPPIKVFYERLRAAGKPMKVARCAAARKLLHVAWAVVTTGQPFEATRAEQRCAARAAVALAA

SEQ ID NO: 250427 - protein, 389 aa, unidentified
MSQPFDARKSLTALEQHNTIIAVVEMSQSKWLVAAVVPGIKRQPLKKLDADQESVLKLLLRWRKEAEQAGHPIKRVVVAYEAGRDGFWLARWLRSRGVEAYVIHPTSIAVSREHRRAKTDRLDTELLLRALLGWLRGEKRHCSMVAIPTAEEEDAKRPNRERDSLVTEQTRIVNQIKAILIRFGIRSFRPKLRKAEQLLRDLRTAEGSPLPDNTRAEMYRHLVRLRMVREQIRAVEKERLQKLKAEHGRKKGPHAMVRLIARVVGIGVETADMLVNEVFSRQFRDRRAVARYAGLTGSPDESGKRRREKGLARAGNARVRTGMIQLAWRFLRFQEDSALAQWFQTRAADGRGSTRKTMIVALARKLLIALWRLVTTGEMSDDIVMRPAS

SEQ ID NO: 250428 - protein, 327 aa, unidentified
MIIIGCDFHPSWQQICWLDQRTGETAEQKLVHATGEAEKFYQGLSSPALIGMEATGNCQWFVDMVTKAGHEVWIGDAAKIRAQEVRRQKHDRRDAALLLKLLEEKKFPKIWTPSSQQRDLRQLLIHRNKLVRLRAQVKNGLQHLAMNRGLQKQRRLWSAAGQQALRDLVLQPWASRRRGDLLGLLEVLDGQVGSLDMAVKEAAEKDSQAQLLMSQPGVGPVTSLAFVLTIGDVTRFARGKNVASYLGLIPGEYRSGGKQRLGPITKQGNRFMRMLLVEAAQVAVRCDPQFRSEYLHRCHHKPKGVAKVAAARKLAIRLYWMLRTQKR

SEQ ID NO: 250429 - protein, 419 aa, unidentified
MSFKILKNNCCGLDVHKTWIFACIGITDSLKRTEYKQARFSSFSKGLQELYDWLSKYNCTDVCMESTGKYWIPVFNVLEKNNIWVTLSHPKYTKPQKGNKTDRKDARWICDLYMCGMVKPSFIPPADIRELRDLVRYRFKLTCMITGEKNRAHNCLTVSNFKLDDVFSDIFGKSSRSITEQILQHPGETFDVAPFVDGRCKTPIGEIQAAVDGAISKEQAVKLRQCLNHIDELEMHKVEIEREIFRFSDKYESVLYLIRTIPGFDKNPLTAIQVLSEIGGDMSVFPTAKNLVSWAGCCPRNDRSNHKIKFTRISRAGSYFKPVLVQIANALIKSKKHPEFTTRYRRIKARRGHKKAIIAICRMILTAIWHILTDLKPYTPEGFLESRPVNKEKVLTISQALNLIKQRGYIIKDDVGPVT

SEQ ID NO: 250430 - protein, 412 aa, unidentified
MLFIGDDWAEDHHDVEIVDGRGHRLAQRRLPEGLEGIARLHALIARCMPEQWAQLDPVEAASRVKIGIETERGPWVRALVAAGYEVFAINPFSTARYRQRHSSSGAKSDAGDAHVLAEIVRLDRAHHRPVAADSDDGEAIKLLARTHQTMVWERTRHLLRLRSALREYFPAALQVFDDLDAPEAVELLAAAPDPDRAARLSKAKITAALKRANRRAVQDKAAQIQSILRASALHQPAPVQGAFAVIATSEIRIIATLNLEIERLSEVVAKHFGRHPDAEIYASQPGLGVILGARVLGEFGDDPHRFANAKARKNYAGTSPITRASGTKRIVAARYARNDRLGDAVQQWAFSALRGSPGARAYYNTMRARKIGHQAALRQLANRLVGILHGCLKTRTLYDETTAWAHPSSAAA

SEQ ID NO: 250431 - protein, 347 aa, unidentified
MKKIVKQVVGIDVAQKELVITLGRMQDDWMPELYARKSFENTKKGFTALVSWVGKLTVDGCQIRYVMEATGVYHESLAYFLDENGHGVTVVLPNKISNYFKTLEVKTITDKTAADAIALFGLEKKLNLWKKPKPIFKKIRQLTREREQLIQSRTIAKNQLHAEQSEAEPGKKTIERLKKQIAFFNKQENEIKEELDALQQSEEQVNKTIKRISSITGVGKLTAATVLAETNGFELVRNKRQLSSYAGYDVREKQSGTSVKGRSRISKKGNKYLRKAMYMPALTAIRHDDRFKAVYARLIARHGIKMKAAVAVQRKLLEMIYTIYKANVPYDKNYLKKKGEKKHIEVE

SEQ ID NO: 250432 - protein, 366 aa, unidentified
MKKISTVQVFGNEIFKEQKLTIGLDLGDRWSFYCVLDEAGKIILEQKVSTTPGAMKQTFGKIPQSLIAMETGTHSPWVSRLLTELGYEVIVAHAQKVELITKSNRKDDRHDARTLARLARIDPELLGPVRHRSAKAQIHLTVIRARAELVSARTALVNAARGLVKSFGQRLPKCGTYQVSEKLAEGLSAELREVLEPLLREVESLNERIQEYDERMEKIAKEVYPEVSLLKQVKGVGTQIALTYVLTIEDPYRFPKSRAVGCFLGLRPGRRNSGESEPQKKISKEGDRYLRTMMVQGAHYILGPFGEDSDLRRWGLKLAERGGKNAKKRAVVAVARKLAVLLHRLWVSGEVYEPLRNSQKAMRAVA

SEQ ID NO: 250433 - protein, 326 aa, unidentified
MKKLISGIDISKNTLDYCILDYQKVQVESRGIIDNTPKAINQWLKNFDKNNDTFALEHTGHYGALLIDCISKSGFQFYVINPLELKKSLGIQRGKSDVKDAYRIAEYAVKNKHKLKPYSLPSKELSALKALITARERYVKMSVQVQNSQKANEILNQSIDVKMLIEEEKRQIKSLKKSIVNIENQMKAIIQSDQNLSGSYRKISAVIGIGPVIATKCIVETANFTKFDNPRKFSCHCGLAPFPYQSGSSIRGKTKTHFLRDRSLKAILTKGAISAVRYDPQLKAYYNRKIKEGKHHMTVINAVANKLVLRIFAVAKRNEPFVKFAA

SEQ ID NO: 250434 - protein, 343 aa, unidentified
MMRYIGLDIHKKMCVATEMDKDGTILRENQRIETTQEALHDYFAPIEQGKVAIESTGNWEYVYEILDDLGLDVVLVNPVKARAIAEAKIKTDTIDSRILAHLLRSNLIPAVYVGDKAMRDLKRRITERLFLTKQATQLKNRIHATLLRRGIRPAIRLFTKQGNDYLHSLGIPSIKRALTLLKAVKTEIAAIDNELKDIYQDNNDAQLLTSIFGIGRYTALSIVAVIGDINRFTSSEKLSSYFGLVPSTHQSAEKAYHGHITKRGPSTVRFLLIQCTWIHVTRSQSFLTRFYRRIAHKKGKSKAIVATARKLTRVMYWMLKEKEPFHSEGYVPRRVHAARTARI

SEQ ID NO: 250435 - protein, 347 aa, unidentified
MLHAGLDLSRHRLDVCLLDAQGSTVQVTAAPPDADGLRGLARQTAAHGQPVRAAIESMNGARFVHDQLELAGWQVAIADAQKVKGLAPLACKTDRIDAWVLAELSRRDLVPEIWLPTPGVRAERERARFRLHLVRHRTALKNRIHATLLAFGKPCPVSDLFGAGGRQLLARLTLPEPWIGNVTAALALIDDLDDQIDGCERELRRLGADHPYVPLLMTAPGIAWVLGYTIAAEVGDITRFPSPKKLCGYTGLCPRVYQSGSRDQRGPLAKNGPPYLRWALIEAATHAARHPCYRDHHQRTKQRLGRQRGARVARVEVARKLTEAIWYMLTRQQPFAPARPPTSALVA

SEQ ID NO: 250436 - protein, 345 aa, unidentified
MKTFFIGIDVSKEKLDATLIRYESESDSEQQLAYTTVENNPKGFRSLVSWSKKNAGQGVKTDTMLFCCETTGGYDRALCDWLYDNGLNIWRESALQIKRSMGLRKGKDDKADSEMIAHYALLFRSKAALYKPLDGNMRSLRDLFLYRQSLVAERRAKTVSAKEKRHISSKSKVDNFIYRDAQKAIDLLTKSIKECERRMLEIIKEDEEMYRHYLHLISCKGVGLVTSVMLIVYTDNFKGWSAKKMASYCGIAPFYESSGSSVFHKSNTGGYSNRRLKGILTQAARSAITHNPTLRQYYLRMKAQGKPHGVILNNVNNKLLHILLSLVAHDCDFELDHEAKRVLRA

SEQ ID NO: 250437 - protein, 312 aa, unidentified
MTEITIGVDVSKDTLDVHLYPAGDHRQFENTPKGFRAVVRWIADRPVARLVFEATGPYHRAFERAMGEAGLPLCKVNPRQAKRFGEALGQLAKTDRMDAGMLARFGALLEPDVRPAPSKIISDLKDLHVARTALIKDRTAARNRKKSLQSPLLKRQSRERLAQIERHLEAIEDGMLAIIESDQDLARRFAILTSIPGVATRSAFALIADMPELGTLDSQATAALSGTAPMTRQSGKRTGKAFVTGGRVNVRQALYMPALVAARFNPDFAAMYQAMTARGKPPKVALTAIMRKLIILANALIKADRKWEPRVA

SEQ ID NO: 250438 - protein, 422 aa, unidentified
MTQPPALAAWIGIDWADQHHDISLQESGSATVERRRLPHTPEAIAEWLGELRGRFPGQQVGIAVETSRGPLVHALLEHEFVVLYPINPRSLQRFRETFAPSGAKDDVPDADLLRELLVKHRDRLRAWMPEDVATRALRRLVESRRKTVDLRTKLLQQLTAALKEYFPQALRWAGEDLASPMACDFLLRWPTLEVVQRVRAQTLRQFYRGHHGRRAERIEQRIQEMREAVPLTRDPAIVETTALMVQTLARQLQALGPSLERFDQEIAQRFGAHADADLFSSLPGSGAALAPRLLVVFGADRTRFASAAEVQQLTGIAPVTQRSGQRSTVHWRWAAPTFVRQTVHEFAHHSIRYSAWARSYYALQRRRGKGHHAAVRALAFKWLRILWRCWHDRTPYDETHYHRSLIQRGAPIAPDLVSAEAA

SEQ ID NO: 250439 - protein, 382 aa, unidentified
MPAYADPTPTPISADTIFLAFELSGTSWLVALHAPDADKVERHRLSAGVAAEVLGLIARTKARVTRRLGTTPRVACCYEAGRDGFWLHRVLEAEGIASHVMDPTSLQVDRRARRAKTDRLDAQALLRALMAWSRGERQVCSMVRPPSPEHEDERRLSRERGTLLKERLRLSNRIKGLCAAQGIYDYEPLGADRRERLARLVTGDGRALPGRLAAEIGRQLDCFELVLRHLAEVEAVRDARAAQAREEGGSKLATLLRLKGIGPELATVLELEVFHRHFANRRDVAAYAGLAPSPYASGGTSREQGISKAGNRRARKALIELAWLWLRHQPESALARWYRDRVGTATGRVKRIAIVALARKLLVAIWRYVETGLVPAEATVRT

SEQ ID NO: 250440 - protein, 420 aa, unidentified
MKSARNTLPEEPAGNVTCGIDWARDDHAVSVVDVRGREICRCSVEHSAAGLRELLAVLERTGAREAAIERPDGPVVDTLLEAGITVVVISPNQVKNLRGRYGSAGNKDDRFDAYVLADTLRTDRARLAPLTPDSPATVTLRRACRARKDLVGHRVALANQLRAHLRNAFPGAVGLFAEIDSPISLKFLARFESRDRAGWLSPRRLAAWLASVGYCGRVDPAVLHARLIAAPRGAAGDDGTAQACITLALHAVLATLVEQIRALSEQIGEQLALHADAHIFTSLPRSGTVRAARLLAEIGDCRARFPAPEALACLAGVAPSTRQSGKMRAVSFRWACDKQLRDAVTDFAGDSRRASPRAADLYNRARGRGHDHPHAVRILARAWLFVIWHCWQDETAYDPARHHALQRLLATRDSTAARAA

SEQ ID NO: 250441 - protein, 334 aa, unidentified
MKELKSCVGIDVSKDSFEVCIKQLKDERAVIKATRSFQNDYPGFEKLLSWTLSKVSNPIFVMETTGVYHEDLTHFLYESDQKVSVVLANKMKHFAKSLNMKTKTDKADAQMIAQYGLERPLDWWKPMMPQMKSLRDLSRERLSLKKDLVRCKCQIHGLKHAHSTLSVVLQVKEQQISFLESNIQIIENEIIRLTNEDKEFSRRVKNIETIKGLRLLTIVTVLCETNGFAQFNNIRQVVSYAGLDIAERQSGLFKGKTRISKKGNARIRECLYMPALSATSYNEPIKALYQRVVERNPTIKRKGVVAGMRKLLILIFVLWKKNEAYNDQYQWDAR

SEQ ID NO: 250442 - protein, 370 aa, unidentified
MKKDISTSKSPLRKQTTKIRKSDRMTIGMDLGDKASRYCVLNAAGEVILEGSCVTTKKGMAQMFGAMPHCRIAIEVGTHSRWVSQLLKSLGHEVIIANARQLKLISQSSRKNDKLDAQMLARLARTDLALLRPIRHRSEEAQRDLMTIRIRSALVESRTGLVNAARGLTKATGERLASCDADQMDTAKLEELPADLRETLKPLLEEVKSLTEKIKECDRKIEQIARDRYPETKLLRQVSGVGPLIALTYILTIEDKGRFQKSRDVGCYVGLRPKQSESGERQPELRITKEGDVYLRKLLVQGAHCIMAKRAPDTDLKRWGTKLAGRGGKNARKRAIVAVARKLAILLHHLWATGEVYEPLRNSLAMAKAA

SEQ ID NO: 250443 - protein, 344 aa, unidentified
MDHFAGLDVSVKETSVCIVDDTGRIVREVKVVSEPEALLLVLKNPAYHFKRIGLEAGPLSQWLYSALAEAELPVVCVETRHMRAVLKAQINKTDRNDARGIAQMMRVGLYRPVHVKTLRSQKLRMLLTHRKLLQSKTIAIENDLRGTLRNFGLKVGIVGTVKFETRIKELIENLPDLAVLVEPLLIVRRVLHEQIGILHRRLLTVVRDDEVCRRLMTVPGVGPVVALTYRATVDVPARFQNSKAVGAVFGLTPSKYQSGEINRTGAISKCGDEMMRMMLYEAAQVMLTRTNKWSWLKAWAMKIARHRGMKKAIVALARRLAVIMHRMWVDGTEFRWIREQAVAA

SEQ ID NO: 250444 - protein, 365 aa, unidentified
MQKISTTQTSGKSIFKGQLTIGLDLGDRASAYCVLNDAGEIVLERKLATSPKAMTEIFGKMARCRIAMETGTHSPWVSRLLTALGHEVIVGHAQRVRLITKSRRKDDRQDARKLARLARIDPELLSPVKHRSVQAQLHLTEIRARAGLVSARTALVNGARGLVKSYGERLRKCDTRQFRREATGGLSTGLRDALEPLLREIESLNDRIQEYDRRIERMAKLTYPEASLLKQVKGVGDLIATTYVLTMEDPHRFRKSRDAGCFVGLQPGRRNSGDSEPQMHISKEGDEYLRTLLVQGAHYILGPFGEDSDLRRWGRKLSERGGKTAKKRAVVAVARKLAVLLHRLWVSGEVYEPLHNNQKAMTAAA

SEQ ID NO: 250445 - protein, 373 aa, unidentified
MQQNIRVFVGLDTSKMKISVALAEEGRQGEVRFLGDIDNTPDAIRRLVNKLTGKYQQLLFCYEAGPTGYGLHRQITAFGHECSVIAPSLIPRRPGEHVKTNRRDALTLARLHRAGELTAIWVPDPGHEAIRDLVRAREAAMEDLRAKRQHLQSFLLRHGRIYPGLRSWTLVHARWLSSLTFEHSAQYLVLREYRQAIEDAEARLERLTQQVADVVSTWSMAPVVEAYQAMRGVAFLTAVTFVAEIGDVRRFETPRQLMAYLGLVPSERSTGEQVRRGSITKAGNPRARRVLIEGAWTYRYPARLSRPLQVRQESLPKIVRAIAWKAQVRLCARYRRLMATGKRQSLVTTAIAREMAAFLWAIGHEVEPRRAVA

SEQ ID NO: 250446 - protein, 347 aa, unidentified
MKRYYLGVDWDWGDEMHAVWVSDKAGKKVAEMEVKQTLEGMSGFGRWLYERKGEGIDLWAAIERPEGRIVDFLLDHEVVVYPINPKALDRVRDRFRMSQSKSDPFDAWVLAEFLRTDHAHLMALLPNSEKAQELKMMTRDHHRLGRHQTRLLNQLTATLKEYYPRPLEVFGNLSSQVALDFLQGYPTPRALCELKQKRWRNFARLHRLREARTGELWEELKSPQLPIPEHVVRAKAWLVRVLVEQLGVAVRAVEEYREEVERFFASMPAAELTKKLPGGKSGTTLPALWAELGDAQGRWESFKHLQAQAGTVPVTKRSGKSQIVCYRFACNKHMRYAVYWLAFVALR

SEQ ID NO: 250447 - protein, 338 aa, unidentified
MKKYSGIDLHSNNCVVAVIDEADQVLYRKRLPNELSVIVAALGVYRGELHSVVVESTYNWYWLVDGLMEAGFEVRLANTAAIKQYEGLKHTDDGDDAVWLAHLMRLGLLPQGHIYPKAERAVRDLLRKRSQRVRQRTANVLAIENLVARNSGRLINGNQVKRLSPADLPAIEPEAERRLAIAANLAVMGTLNEQIKQLEGAVKARTKAHEALPPLKTVAGIGETLALTIVLETGGIERFAKVGNFASYCRAVDSRRLSNGKQKGEGNAKCGNRYLAWAFVEAANFAVRYCAQAKRFYQRKRAQTNNAVAIKAVAHKLARACYYVMRDRVPFDPARCFS

SEQ ID NO: 250448 - protein, 408 aa, unidentified
MKTLHKRCAGLDVHKAEVVACLRVITNRKVGREVRRFPTTTQGLLALAEWLENAGCTHVAMEATGVYWKPVWHILEGHFVLILANAAHVKNVPGRKSDVNDATWLGDLLAHGLIRSSFVPPPEIQELRDLTRTRRQLTREIVQHVQRIQAVLEEANIKLCSVITDIMGASGRRMLKAMIAGETDAEKLAALGHERLGCTRAELVEVLTGCVREHHRFLLGQHLRTIEQLEDSVAAFDARIEAALSPFHDIVERLKEVPGLGATATETVIAEIGTDMSPFPTVGHLLSWAGFVPRLDESAGKRRSTRIRKGAPWLKPVLVQAAWGAARKKNSYFQAQFLRLKARHGAKKAAIAVAASILTTVYHMLRDGTCYQDLGPEYFTRRNPAQAAARLANRIRNLGYHVEIRAAA

SEQ ID NO: 250449 - protein, 349 aa, unidentified
MRYFQPPADTRFYAGVDLHARSLFLVVLDQTGQTRLARNLPAAPAPFQKAIAPFRDGLVVGCECMHCWYWLADTCRADSIAFVLGHAWGMKAVHGSKSKCDRKDAEALAHLLKGGNFPLAYAYPKERRGLRDLLRARLRLVRQRAELYGHIHTARRQLNLPPVSNDVKYKSKRASALADIDDDCVRRRVEADLSLLEPLDTTIRHLEKDIEVAARQHYSTEMAALQSTPGVGIVIALTILLEIDTIARFDSRQQFCSYARLCGARQESGGKTVGTGNAKQGNAWLKWAFSEAAVLSAQKDERIGKYLDKLASRLGKAKALSALAHKLGRAFYHMLRKKEVFNIDQFLRH

SEQ ID NO: 250450 - protein, 388 aa, unidentified
MPQQRKPNDLSRSVIALDMDTTLIAVVELSLSSWLVAGIVPGVERQPLKKLKTDENALLALLNRWRDEAVRSGHKISRIAVAFEAGRDGFWLARWLKARGIEAHVIHASSVAVSREHRRAKTDRLDTELLKRAFVGWLRGERDHCKTAGIPSLREEDAKRPSRERESLVGEQSRLVNRMKATLIRLGIRGFNPKLRHAEQRLEALRTPEGEPIPPNTLTELKRDMQRRRFICDQIRSIEQERLERLERTPDTEPHAMVRLLARVTGIGIETADLLVHELLLRNMRDRRAVARYGGLTGSPDRSGGTNREKGMARSGNARVRRGMIQLAWRFLLFQKNSALAQWYRRRTEHAPKARKTMIVALARKLLIALWRLVREGVVPEGVAMRPA

SEQ ID NO: 250451 - protein, 401 aa, unidentified
MVSIGIDVSKGKSMVCILSVEKMLASPYEMQHTEAELQALIERIRSYPEECRVILESTGIYHMPVLLSLHEAGIFVCVVNPMLMKKYISSCSIRKAKTDRADAIRIAQYGLDHWFHLENYILTESIYEQLRLLDRQYEHYSNMKVASKQALDTLLSQTMPGLKPLLCSKKTSRPEQDKLSDFVERYWHYDLILKQSEKQFVSSYCTWAQKKGYRPSIAKAQEIYAAAQNGIPTLSSKTASTKMLVLEAVRVLKEINRTLSRILTQMQELATTLPEYSVVREMNGVGDVLAVRFIAEIGDIRRFHSGSSLVAYAGIDSPPYQSGAFSATRCKISKRGSPILRKIGFDAMKVLKSVKPTQDDAVYRYILKKETEGKPPKVAKIAGLNKFLRIYYARVSAVYAN

SEQ ID NO: 250452 - protein, 337 aa, unidentified
MTQVHILAIDLAKRSFQVCGTDRGGAVLFNRLLSRARLQQLLSEQSPCIVAMEACATSHFWGRFAQGCGHNVRLIPPIYVKPFVKRQKNDAADAAAIAEAAQRPNMHYVEVKSAEHQARAVAFRTHQCFVRQRTQLINALRGHLGEFGIVVAQGPANLTAVVGILADETNDLPAAVREIGALYLDQIKLLTEKIDGLMLKLRDATKANEDMRRLCTVPGVGPVTAGAILAFAPDLRAFKSGRNFAAWLGLVPRQHSTGGKTRLGGVSKMGQTDIRKLLIVGAMSLIRWIVRKGVLPDNWLGAILGRKPRMVAAVALANKMARIIWAMMTREQNYRMA

SEQ ID NO: 250453 - protein, 345 aa, unidentified
MKKVMAGIDLHSNNLVIGIMDMDGKRVAHQKLECRLSEVVKFLMPYKKRLEQVGVESTYNWYWLVDGLQSLKYPVVLANPAGMEQYSGIKHADDTNDAFFIAELMRLKILPTGHIYDEQLRPVRDLLRRRMSLVQQRTSLMLSFKSLYTRTTGQELALSRLKELEIKEAQELYDHPANQLIAGMQIRHIEQLSESVEKIEKGVLVSARELPYYSKLTTLPGVGRILGMTITMEVGQIKRFAGPGQFASYCRTVQAQCISNRKKKGENNSKCGNRYLAWAFVEAANFARRYDEQCRKWYDRKAAKTSAVIATKALACKLAKAAWYLMAQGTDYDPKRMFGQPAKIK

SEQ ID NO: 250454 - protein, 381 aa, unidentified
MTTPATCNVPESTTAGTLFVAFELSEKTWKLGFTTGHGQKPRERTVTARHQERVLEEIAHAKRRLGLPDTAPVVSCYEAGREGFWLHRFLQGHGITNHVVDSSSIEVNRRRRRAKSDGLDVRKLLSMLMRYAQGERQVWQVVKVPSVEAEDQRHLHRDLETLKQERASTTTRIQGLLSSQGIRVTSLSNVPEQLEALRLWDGSPIPPGLRRRVLRVYAHHTFLSAQIAAVEAERRAQLQASTDANIEKVRQLMQLKGIGINGAWLLVMEFFGWRAFKNRREVGGLAGFTPTPYQSGESAREQGITKSGNRHVRWMTTELAWSWLRFQPDSALSVWFRERFGGGGKRLRRIGIVAVARKLLIALWRFLETGVLPEGAVLKEG

SEQ ID NO: 250455 - protein, 415 aa, unidentified
MDVLYPRCAGLDVHKDTVVAAVRIAADGPVKTEVRSFDTMTPGLLALSAWLAECGCTHVAMEATGVYWKPVWHILSDGDVTLVLANASHVKNVPGRKTDVADAVWLADLLAHGLIRASFVPEAATQEMRALLRTRKQLVREQASHVQRIQKTLEDANLKLGSVLTQIMGVSGRAILEALIDGECDPDKLRALVQRGVKAPPEKLRAALQGRITDRHRFLLRLHLRQVDALGAAIAEIDAEVDRDLDPFRQAVRQLRTIPGISDLTAQVIVSEIGVDMSRFPTAGHLISWAGLCPRNDESAGKRRSTRLRKGAPWLKTTLVQCAWAGVRKTASYLQAQFQRLRHRRGPKKAICAVAASILTATYHMLRDGTFYQDLGANHFHCSSPEDQANRLARKIASLGFTCVLNPATASTVSV

SEQ ID NO: 250456 - protein, 326 aa, unidentified
MATIGIDVSKKKLDLCWLRDAQAGKVKTRVFPNAHDHYPALLSWLLKQIDASPGELQVYLEATGIYHEPLAYWLHQSGVTVYVLNPARVRYYARSLGDQGKSDKKDSKRIAHFALANPELTPWQPEPEEVRTLRQLAKRLETVQKDIQREQNRLEKAQFNRDTQAEHSITHVLALLRREAKRLVKEVDDHIDRHDALKRERRLLESIPGIGEVLSVHLLVTLRSRRFKSGRQVAAFMGLVPVEWTSGSSVRHAPRLSKNGDPALRQKLYMGAVVAMRHNPSIRRQYQRLCAAGKRKMSALGAAMRKLVHIAYGVLAHQKEYEPQPT

SEQ ID NO: 250457 - protein, 339 aa, unidentified
MLYVGIDIAKNKHDVTALNVPGKTVLKPLTFSNNKAGFELLDLSLRQLNQDCLIALENTGHYAFNLLNFLHEQGYKVYTYTPLLIKEFAKSLSLRKTKTNKKDAHGIALKLLSDPNREQFQHDNRQVELKILARHIHRLKKKQSDWKVQYTRCLDIIFPELDKIVEKHSEYTYQLLTCYPNPQKRLEAGFDKLIEIKRLTASKIQDILSVAPRSIGTTSPAREFEIIKHYKRLIDKAETCVNDLMAEFNSIITTVTGIGNRLGAVILAEIQNIHAFDNPAQLQAFAGLDSSIYQSGQIDLAGRMIKRGSPHLRWALIQAAKACPRFSPAFKAYLKTKLE

SEQ ID NO: 250458 - protein, 345 aa, unidentified
MKIVGCDLHTRYQQMAMLDEETGELVERRLEHESGEAGAFYAGLSGPVRVGIEATGHTRWFERMLAEMGHELWIGDAARIRASMVRKQKTDARDAAHLLELLRSGRFPRLWRPTAAERDLRQLVWHREKLVWMRTAIGNQLHALAMGEGVCRKKKLFTQKGRIELESLKLDRWASRRRQELLRLLDQLDASLREFDQAVAQQAEQNSAAVLLMTHPGVGPITSLAFVLTLGPVERFARSKQVVSYLGLNPREHSSGGRQRLGSISKQGNPMMRSLLVEAGHTAARLDPELRQDYQRLKLRRGGGVAKIAIARKLAVRMYWMLRSQASYAQLVRTQGSPRATLVEE

SEQ ID NO: 250459 - protein, 375 aa, unidentified
MNYNTVYVGMDVHKKSFSLCCYTNEKEQAEYPQKTAPHYSKVLNYLEAMRFHYGDDVLFICGYEAGCLGYTLYHELMDHNVKCILLAPTTIPQPTGRKKFKTDKRDAALIARCLAHHDYSPVHIPSEKDEQVKEYIRMRNDHKIALKKVKQQISAFCLRHGYRYDATVNQWTQAHLKWLRALKPEGLYLDILMEYLSTYDQLTDKIERMDRRIEELAGEPQYREGVKKLSCFLGIKIQTALSTMVEVGDFKRFSSAQRFAAYLGLVPGERSSSESQNRLGITKAGNSHIRTLLVEAAQSYTRGRVGFKSKALKERQYGNPADVIAYADKANERFRRKYYTMVLTKGKKVNVVKTAIARELACFIWGMMVGNLTER

SEQ ID NO: 250460 - protein, 391 aa, unidentified
MSMYFIGIDISKYKHDCCIISAADQQIISKFTITNDKDGFEQLLTALNSLSNPEDIKIGFESTAHYALNLELFLENAHHSFMEVNPVLIKEYKKSTTLRRTKTDSVDCESIARWLITVEYKPHSKGFYHAYSLKSLTRLRDRLIRQRSFYLVKITNVLDHTFPEFKPFFNERLSKTALYLLENYGSAEKMARMNSASYDKLRCISRGKFSIQQFLRLKELAANTVGVNNSIFDLELNTLLTLYKSLSDEINTLETEIIKLIEEVHPHYMSIPGIGPISSAVIYAEYGDISNFSNPGQMLAFAGIEPGINDSGTESHGGRMVKHGSSQLRYVLLNACLPLIRFDLTFATYYEKKRAEGKKHRVAITHVAKKLIRVIYALERQDVDFNAQKLR

SEQ ID NO: 250461 - protein, 345 aa, unidentified
MKYYAGLDVSVKETSICIVDQTGKICREVKVTSHPDDLIVVLKDPAWNMERIGLEAGPLSQWLFEGLARAGLPVICIETRHTKAFLKAQPNKSDRNDARGIAQMMRVHLYRAVHVKALTSQKRRALLTARKLLQDKAIAIENDLRGLLRNFGLKVGVVGSAKFEARIRELVARTLDLVEIVEPLLDARRKLREHFATLHRKLLMIARDDEVCRLLMTIPGVGPVVAVAYTATIDIPQRFKNSKAVGPILGLTPVLNQSGESHRVGRVSLCGDGMMRNLLYDAAQVLLNRVAKWSWLKAWAMSVAKRRGLQKAMVALARRLAVIMHRMWSDGTEFCWSREKLPAGA

SEQ ID NO: 250462 - protein, 340 aa, unidentified
MEVSTIGLDLAKNVFQAHGATAAGAVAFRRRLRRDQVLAFFADQPRCLVAMEACASSHYWGREIGKLGHEVRLIPPAYVKPFVKRQKNDMADAEAICEAAQRPTMRFVAVKSEAKQASAVIFRTRDILVGQRTQIINALRGHMGEYGLIAPQGRFHVEKLVVQIRDADSDIPDDARQCLLLLVASLEELHEKIVALDREISTRAKRDSVAQRLMTIPGVGPMIATAIEALAPPVETFRSGRDFSAWIGLTPVQRSTGGKERLGRTSRMGERTLRRLLIIACSGVVRWAKRKGLPADSWLARMLARKPAMLVIVALANKTARIAWALMAKGGIYRAPVAAA

SEQ ID NO: 250463 - protein, 432 aa, unidentified
MRRTRRHTVAACVRTRGPSGERVQEIHTFGTTTVELLALRDWLTAHRVSLVGMESTGIYWRCVYYVLEDALQCWLLNARHLRNVPGRKTDVKDAEWICQLVEHGLVRPSFVPPKPIRELRNLTRYRKAQIEERTREAQRLEKILEDAGVKLSSVATDILGVSGRAMLTALVQGTRDPDVVSDLARGQLRTKIPQLKHALAGRFGAHHALLVGMILSHLEFLDEAIEHLSTEIEEVIAPFEAEVELLTTIPGVARRTAESIVAEIGVDMSRFGSSARLASWAGMCPGNNESAGKHRSGKTRKGSKWVRTALIESARAASRSKGTYLSAQYHRLRGRRGSSRATVAVGHSILVAAFHILDRVQPYSDLGADYFVHRHDPQRHANKLVRQLRALGYGRHPPTREGGVAGRGHFHQRCTLQVSCWTGGHGSSAGKP

SEQ ID NO: 250464 - protein, 430 aa, unidentified
MKSNTQNAKIEAITEKTLVLGIDVGSETHYARAFDYRGIEYSKKPFKFSNTEAGFVTLKEWILDLKERHEKDKVVPGMEPTGHYWFNLGKFLQDNEMKPVLVNPHHVKKSKELDDNNPTKNDRKDPKVIAGLVREGRYMIPYLPDGVYADLRTASNIRFQLQAELTRIQNRISRWFNIYFPEYKTVYGKPDAKSGILILKEAPLPEDILTLGIDGVNQIWRDAKLRAVGKARAKTLIEAAEHSVGSKEGAVSARMEIRMLLEDYESRNIRLQEVMGLIEGLVNQIPMAEKLLEIKGVGIKTVSGFLAEVGDIRRFNDPKELQKLAGLALVENSSGKHKGKTTISRRGRKRLRYLLFEVAMSLVAKNPEFRELHNYYTTRRLNPLKKMQSLMAIAAKLLRVFYAILTKGVGYDPKKMVNDIRRPAAYAQAA

SEQ ID NO: 250465 - protein, 343 aa, unidentified
MDHFAGLDVSVKETSVCIVDDTGKIVREVKVASEPDALLAVLANPTYRLRRIGLEAGPLSQWLFSALANAGLPVICVETRHIRAALKAQINKTDRNDARGIAQMMRAGLYRAVHVKTLRSQKLRMLLTHRKLLQSKAIAIENDLRGTLRNFGLKVGMVGTVRFEERIKELVENLPDLAVLVEPLLIVRQTLREQFGILHRRLLAIVRDDEVCRRLMTVPGVGPVVALTYRATVDVPARFRKSKAVGAVFGLTPSKYQSGEINRTGGISRCGDEMMRMMLYEAAQVMLLRSAKWSWLKAWAMKIARNRGMKKAIVALARRLAVIMHRIWVDGTEFRWTREFAAA

SEQ ID NO: 250466 - protein, 382 aa, unidentified
MRCGGGWKRTYGSASEALPQETGSKQIGRACGAPRQSSTLPSISIAVRDASGKLVIESLIETKAATILEFLQGLKGTLWVTFEEGTSAAWLYDLLKPHVVKVIVCDPRKNALLKTGNKNDRVDAQKLSHLLHAGLLTPVYHGESGVRTLRELARSYLTLTKDLTRVMNRLKALYRSWAIPCVGEKVYSPRHRSAWLEQLSEAGVRRRAEQLYQQLDILLQIRRDARQELLRESRKHPAHELLRQIPQLGPIRVALLIALVQTPHRFRTKRQLWAYCGLALQTRSSGEYRFTVGQLQHSNKQPALRGLNSNHNHDLKNVFKSAATHVSTSPDAWGDFYRSLLAKGMKPAMARLTLARKMAAIVLTVWKKGERFDPGELKRQAA

SEQ ID NO: 250467 - protein, 353 aa, unidentified
MSSIADVYEVVVSVDTHTDTHTAAVLDRLGAVRATATAGTDPAGLAELLAFADAHTPAGARRLWVIDGTRAHGQGLTRLLTAAGNTVAEAPKPAAGHRRRGGKSDLLDAVAAGRAVLAQPVEGLATPRADGPREALRMLLACRRHHSDTRTATINLLKSLILTADQPLREALRGRPTTAQVRHLLHLPTETGLPVDQHTRRQLLTNLAQQIHTLNQLLTDNHRQLRTLVGHLCPPLLTQPGVGPVTAAIALTTWSHPGRVRSEAAYAALAGANPIPVASGRTDRHRLNRGGDRTLNAALHTIALTRRRTDPTTRAYLQRRQAQGRTTKEITRCLKRYIARQLYRTMTTHHHTP

SEQ ID NO: 250468 - protein, 365 aa, unidentified
MGQNSMVCAGIDTGKYKLDVAIDGRVEQLQVPNDPAGHRTLVAWLRHRQVERVGIEASGGYEQAVVLLLRASGFIVIVFQPAQVRAYAKFLLQHAKNDKIDAALIARCTGAAEKVHEPADARLAPLAKHLTFVEQLTDDIALFKTRRESCHDARIREHWTQEIKRFKLLQTRELKQLITAIRQYGDLAKRFDLIASVDGVGPRTAVAILVRMPEIGRVSREQVAALAGLAPFDDDSASRQGVRHIKGGRDRLRRSLYAAALPAAFNWNPQLKAIYQRLIAAGKPHKLALVACARKLLIFVNTVVQRGTPWTSHAGDPNSQAVSAFDCEAVSSSRPAPAVTPRAAAVKAGRRSPGRPARRLCQATA

SEQ ID NO: 250469 - protein, 350 aa, unidentified
MMIIGCDYHPGFQQIAFVDTETGELQERRLEHREEAEKFYRDLGAQGVQVRVGMEASGHARWFERLLSELHFELWTGDAAAINAKRVRKQKTDRQDAQLILRLMLKDDFPQIWVPSWENRDLRQLLWHRHRMVQARTRLMNQLQAVALNEGLRCKKRLWRDAGREQLEKFRLAPWASRRRRDLLELLDRLTPTIAELTAAIEHEMERCPAAQRLQTHPGVGALTALAFVLIIGRAERFECGKQVACYLGLVPLEKSSGNQRRLGHITKQGNSLLRFLLVEAAQVTVRSLPEWRSKYCHMALRRGRKIAKVAMARKLAVRLYWMMRKEWDYEQLRKFGSYAGKPGHRDGVK

SEQ ID NO: 250470 - protein, 341 aa, unidentified
MKNLFIGVDFSKEKVDVAIIFADGLTETATRVFNEFKTTVSGYKQLAKWVEQNSYGIDPSLWLFCGENTGDYSKGLCSFLYGKGYDMWLENAKSIKNASGLRRLKSDRADASMIAEYAMRNYDKAIMYEPLSKSLAQLRELFLYRQMVVRHRCSFQVRRGEKKLAMEKSPIKTMISQSGRHIVSELNKEVEKIDKRIAELIKSDEELTEVFTIVTSVPGIGTQNAICLMAYTDNFRRFNYDSRKIACYYGIAPFGKDSGTSVHSDPHVHYMANRQIKAMLTQAALAAVKFNPVMARYYMRLVERGKKKQVALNNVKNKLVHLVTAMVRNRKTFTPEYKISA

SEQ ID NO: 250471 - protein, 344 aa, unidentified
MTYFTGIDVSLRSVSICIVDERGEVCHEAKTAAQPAAIAQCLRGFDADVNSVGLEAGTLTQYLTYGLQAAGFEVVCMESRQVKNTLAAMRNKTDRNDARGIAQILRTGWYSRVHVKSMHSHRVRALLASRKAILKKCVDLENELRGLLRVFGVCLASRVGHGSFDGEVRQTFAGDEMLACALNPLLDARTMLYKTYLKLDNAIKALVKADPVCKLLMSVPGVGPVTALSFKAGVDDPSRFKSSRTVAAHFGLTPRRFQSGESDNPGHISRAGDADVRSALYVAAHSLLTRNEQWSSLKAWGMRLAKTRGHRRAVIAVARKLAIILHRMWSDGTEFRWGAKEVAA

SEQ ID NO: 250472 - protein, 343 aa, unidentified
MKRARKELQAGDRVFVGIDLHKKKWHVTARTAELELFSVSIPGHWKALQRILDRYKGHQIETVYEAGYFGFWLHDHLVEYGAECIVTPPSLIPQQYGNKVKTDRRDSRKLVHFLAKGMLKRVWVPTEKERYHRQVTRRRRQLVGDRIRTQSRIKAELRLYGIDLPEPDGKWTKIYLGNLGRIRFNNRWMQESFKCLLEQYDFLDGQIVKQTKLLCELSKTELYRERVELLMTIPGIGMIAAMELLLELQDVRRFQRADQLAAYVGLTPSQYTSADKVRMGRITCVGKNSLRATLIQASWALIRKDGVMQEKYDRLKSRSGGETGYCCRCPNVTDQDEKNVAGQ

SEQ ID NO: 250473 - protein, 362 aa, unidentified
MMRHIFVGIDLGDKNSVVRIAVDREKSERVGFVNNRAGRTRLIREVKRRSEEAGGAEIVMAYEASSCGFVLSDEAEGLGMKCWVLAPTKMEKSVEQRKHKNDDRDADDVLEKLRGHVLAGNRLPSVWIPDLQTRDDRELIRTRLELGEKQTQIKAQIRMLVKRHGVEKPSGLGAGWTVGYRRWLTGLAESEGWLGWGTRQALSSLLGQLDFLEAELERIQKPLEQLADEPRHKPIVEELTQEAGVGLLTAIVYRTEIGQAGRFRRSRQVGKFVGLTPTSHESGQQNDRKGHISRQGPPRLRKVLCQASWVHIVHDADAGRLYQQLVLRNPKKKKIAVVAVMRRLAVRLWHRMRKVELQMAKA

SEQ ID NO: 250474 - protein, 391 aa, unidentified
MIYIGIDVAKDKHDCFITNSEGEVLFNAFTIPNNADGFHDLFQKISSLTNDFSNVKVGLEATGHYNYNLLGFLIDKGLPTFVINPLHTNLFRKSLSLRQTKTDKVDAHTIALMMMSGVNLQSYSNTSYHNEELKSLTRYRFDKVQERAKLKTSISRLVNILFPELEKLVPSLHMVSIYALLAEFPSSAQIASCHLTRLTNLLANASKGHYNKEKAIEIRNAAKHSIGSNMPAKSLELKHTIRLIQELTSEIDEIECSIKSIMDEIRSPILSIPGINYRMGAMIIAEIGDFNRFSSPDKILAYAGLSPSTYQSGQLDGCYSHMEKRGSRYLRYALYNAAKYVCHWDKSFGAYLEKKRSEGKHYNVALSHATKKLVRLIFAMEKSGKAYLPTA

SEQ ID NO: 250475 - protein, 345 aa, unidentified
MKYYAGLDVSVKETSICIVDQTGKICREVKVTSHPDDLIVVLKDPAWNMERIGLEAGPLSQWLFEGLARAGLPVICIETRHTKAFLKAQPNKSDRNDARGIAQMMRVHLYRAVHVKTLTSQKRRALLTARKLLQDKAIAIENDLRGLLRNFGLKVGVVGSAKFEARIRELVEGTLDLVEIVEPLLDARRKLREHFATLHRKLLMIARDDEVCRLLMTIPGVGPVVAVAYTATIDIPQRFKNSKAVGPILGLTPVLNQSGESHRVGRVSLCGDGMMRTLLYDAAQVLLNRVAKWSWLKAWAMSVAKRRGLQKAMVALARRLAVIMHRMWSDGTEFCWSREKLPASA

SEQ ID NO: 250476 - protein, 339 aa, unidentified
MNISTVGLDLAKNVFHVVCFNDRDKEVKKRMLRRNQVLGFFTQLSPCCVAMEACASAHYWGRQFSDMGHEVKLISPRHVKPSVRGNKDDYNDARAIAEAANRPNMPLVGIKTVEEQDMQALHRIRSQCLRDRTALSNSTRGLLGEYGIVFAKGIPTLRKKIPEILEDAENGLSLDFRNLLARRYEQLVEMDEHIAFYTKRLESISQEDDACVRLQTAPGFGSIVSSAFRGAIGDGRAYARGRDAAASIGLVPRQYSSGGKKVLLGISKRGDKYLRKQLIHGARAVVLQAANKEDPLSLWINRIREERGWNKAVVAMANKMARIGWAILRDNTSYQPASR

SEQ ID NO: 250477 - protein, 386 aa, unidentified
MGMNESVARIGMDVHRTFSKVTARDAQQRIVWRQRLEHRERADLRRRLARWPTSTPVVLEGSFGWSWLADELSRAELDPHLASSRKVAQWRDLHGLAKSNRTDADLLSLLGCEPPRLWEVWLPPPAVRQQREWLRYRMTLVQLQTGLKNRVHAILHRHGLFPEVVKLFGGRGRRWLQQLAGRRDEALPASACEALKGYLQLLDHLRLQIARVTRTFRRQVQADPSALRLCTLPGVKWILGYTLWAEIGRIERFPSARHLVSYSLLAPRAHDSGEDDDGPPQGRHVGHYGRRTLKWAYIEAAHGAVYKSPALRAWFDAYTHGGRQNRNRGYIGVARRLCQCSYVIWKKELDYQEEPSPRPGRRRRGRRRTRPVKGQPADAMVAAARG

SEQ ID NO: 250478 - protein, 362 aa, unidentified
MVYLGVDLHRKISHVVALDEAGSTILSRRFEHSPDAFRRVFGELGPEPITVAFEATYGWGWFADLLADAGIEAHMAHPLATKAIGAGRVKNDAVDAATLAHLLRTNLLPEAWIAPPEVRELRRLVRMRASLVRIRTRLKCQVHALCADAGVSVPVSDLFGRKGRATLETLALPPRSASRLAANLRLIDDLVREIVAADREIVAAFKGDDRVRRLLPIPGIGILTAATIVAEVWDVGRFPSADHLASWAGLTPTERSSADHVRRGHISKQGSRWLRWAMVEAAAKIGSSRSAKLHRFADPIAERRGTKIARVALARRILVLAFYALRDERGCRDYPALPRPSRRPVTARSLPVMASPDGRLSD

SEQ ID NO: 250479 - protein, 356 aa, unidentified
MAIVAHTRPFVIGVDTHARNHSFAVLTAATGEQIAAKQFPTTSAGLKRAVAWVSRLIGADLTALWVIEGAATYGARLARVVTDAGYEVAEAARMDARTHHRIGKSDPLDAYRIGGSVLPLEDDRLRHPRADAGLRPALRVLTSARENMSSERTASVNALAALLRTADLGLDARKPLTNGQITEVASWRTRVEDLELAAARAEAHRLAKRVRALDIELADNRSQLEELLRQSKAAPLLDVIGVGPVTVAVAYSAWSHRGRLRDEAAFAALAGVSPIPASSGNTTRHRLNRGGDRRLNRALHMATVTRMVHDPETRAYVDRRRAEGRTTKEIRRCLKRYLARRIYRTLEALHAAPTTA

SEQ ID NO: 250480 - protein, 421 aa, unidentified
MKFKAQDKQNQLIENITVHHLVIGIDIAQEVHVARAVSFRGIALGTPLEFGNHREGFDLFARWIQDLLKSYKLSSVIVGMEPTGHYWFSLARWLLDQGIEPVLVNPHLVKKNKENRDNTPSKSDHKDALVIADMVKNGYYSPVRFHPEDYEELRILMANRETITKRLNAAVNQIHRWVDIVFPELRQVFKILTCTSAIATLRLFPLPKEISRLDTEQVLAGWKQYVKRHAGVKRAELLISLAKTSVGTTQALHAYKLHLGQLIEEYDLTQRQLEQIERELRIILERIPYAQKLLEIKGIYVTNLAGILGEAGDLSGYAHGNALLRHAGLNLAEASSGKWRGKMVLSKRGRPRLRHFLYLMTMSMVMTNTEIRASHRYNVEEKNLKKMKSIMKLMGKVARILIALSKNSTSYEPNKVFSQAA

SEQ ID NO: 250481 - protein, 345 aa, unidentified
MNIIRVGVDIAKSVFHVHGVDRHSQTRWQGKYARSKWLDTLSKKVPVGAEIGMEACASSHYWARELQKRGYCVRLIAAQFVKPYVKSNKNDQVDAEAICEAMSRPNMRYVAPKTVAQQDVQAAHRIREELVGQRTAKANQIRGLVGEYGVVAPVGIQQLRHALPEWLEDAENGLSESFRVLLHGLADDLRYLDDRITALDERITESVKQDPVARRLMTLRGVGPLTASALSGALGDGKAFRKGRDFAASLGLTPRQHSTGGRDRLLGISKRGDSYLRKLLVHGARAVLRHIGGKDDGLSHWLQALVSRKHVNVATVALANKTARIAWALVHNETAYDDKLAAVGT

SEQ ID NO: 250482 - protein, 420 aa, unidentified
MKAYNINDFAALIGIDWADTKHDICEHPSHTEKYHYCIIKNKPEALHDWAMSLKQRYPNQQIAVACELKKGPLIYALAKYSHLTLFTINPSSVANYRKAFTPSNAKDDPSDALIQVEILTLHMDKLTVIEPESASMRSLTQLVEYRRNLVQDSVNLSNKLTATLKNYYPQALEWFKEKDTFIFCDFISKWPSLAHAKRARKQTLLNFFNSHNSHYAHVNDARILSIKHAIPLTEDKGVIEPNELLVGVLIVQFKVLLKGIESLDKVIKQAYKVQQDKPIFDSLPGAGPQLAPRLLVAFGSNRERYNDASDLQKYAGIAPVIERSGKKMWTHWRYSCPTFLRQTFVEWAGFSIRYSFWAKAYYEQQKSKGKPHNSIIRSLAFKWIRIVFRCWKTNTPYDESKYLEALKQRGSPLLKFAVNS

SEQ ID NO: 250483 - protein, 403 aa, unidentified
MNSVGIDISKGRSTIAVMRPFGEVVISPFEVRHTGSELSKLAKQLKSLDGETRVVMEATGNYHASVAKLLHNAGLYVSVINAKLVHGYGNNELRRVKTDRKDAVKLANYGLDRWLTLPRYIPEEDTRLLLKNCYRQYRQYSKVQTVLENNLISLLDTVFPNANRLFSSPIRGDGSEKWVDFVAEFWHCRCASEKSERAFTSKYLRWCRKHGYNFREAKAHTIYAEASGHIGVMPKSETTKLLVKQAVSQLRATSTALAALKQEMQSLASVLPEYPVVMDLFDVGPTLGPQLIAEIGDVRRFYSKKALVAYAGLDAPPNDSGDVTGRHKSMSKIGASSLRRTLFLVMSVYLQTAPLDEPVCQFMDRKRAEGKLYRVYMMASANKFLRIYYATVKAYLESLEHTA

SEQ ID NO: 250484 - protein, 348 aa, unidentified
MRFYTELHQYYCGIDLHARNMYVCILDEDGEKAVHRQIPCDGDRFLQLVEPYCDDLIVGVECLFCWYWVADLCADEDIPFVLGHAYYMKAIHGGKSKNDRIDSYKIAALLRGGNFPIAYVYPRHMRSTRDLLRRRLFFTRKRAELLGHIQNTNTQYNLEPFEKRIDQARNRGELLEHFCDDENVQMSIAADMAVMDTLEETITELKIFLTQQVKVHNASAFYLLKTIPGIGRILALTLIYEICTIDRFPRVQDFLSYARLVKGHRSSDGKPKAGGGSKMGNKHLKWAFSEAAALFLRDNPEGKGLRLRLERKHGNAKAMGILAAKLGRAVYHMLRRHQPFDFNRFVNA

SEQ ID NO: 250485 - protein, 425 aa, unidentified
MKSTQNEKISQIKFETLVVGIDIGKETHYARAFDYRGIELARLLKFSNTDQGFQRFDQWMRDICKQQEKTEIIAGFEPTGHYWFVLGDHLKRQGYKLAIVNPFHVKRTKELDDNSPTKNDRKDPKTIAMLVKDGRYREVYIPDDIYQELREAVSERERLQEQLTSIYNRVVRWLDIRFPEFTTVFKDWRRNAALITLRSFSTPEKVMEMGVDKIVETWRKQMKRVSLKRAERLVKAANRSVGRTSGKVASEASLQNLLAEYDLYCQQYDKQEQLMQDLLMQVPNADKLLDIKGVGLITAATFVGEVGDISRFQDPRQIQKLAGLNLVENSSGKHKGKTTISRRGRRRLRHSLFFSMIAMLGKNQEFRLLHQRNLRRENNPLNKMQSIIALCGKLVRVFFAILTKGVDYSPEKMLGDMNQSIRVAA

SEQ ID NO: 250486 - protein, 352 aa, unidentified
MEKNNKLDFGGQHIYVGMDVHKKSWSVSIHTEQFEHKTFTQPPEVEKLTYYLERTFPGATYHTVYEAGFSGFWLHDKLRAKGIDCMVVNPADVPTKDKERAGKRDRVDCRKLARGLRNGEINGIYVPPRVKVEDRTLVRTRQSMVRKQTRCKNQITSILFFYGIVIPEEGRWSRRFINWIESIRMERASGDFALKAHLEELKHLRQIIANLNKAILSLSRDEEYRADVLLLKSVPGISTLTAMILLTELADLSRFSSLDKLASYAGLVPDIRSSGETEYAAGITFRRNAALRALLIESSWIAVRKDPALIMVFNKLSARMKKTKAIVHVARKLLNRIRFVLKNRQEYVPAVV

SEQ ID NO: 250487 - protein, 370 aa, unidentified
MKKDISTSKSPLRKQTTKIRKSDRMTIGMDLGDKASRYCVLNAAGEVILEGSCVTTKKGMAQMFGAMPHCRIAIEVGTHSRWVSQLLKSLGHEVIVANARQLKLISQSSRKNDKLDAQMLARLARTDLALLRPIRHRSEEAQRDLMTIRIRSALVESRTGLVNAARGLTKATGERLASCDADQMDTAKLEELPADLRETLKPLLEEVKSLTEKIKECDRKIEQIARDRYPETKLLRQVSGVGPLIALTYILTIEDKGRFQKSRDVGCYVGLRPKQSESGERQPELRITKEGDVYLRKLLVQGAHCIMAKRAPDTDLKRWGTKLAGRGGKNARKRAIVAVARKLAILLHHLWATGEVYEPLRNSLAMAKAA

SEQ ID NO: 250488 - protein, 355 aa, unidentified
MQRTTKYVALDVHQASTVASVREENGRVIARSVLPTEEPAIVEFFRGLRGAIQVALEEGTQAQWLHDLLVPLVDRVVVCDRRGEPRSGNKADQVDADQLAEQLRRGSLRAVYHGSPHRVVLKELTRSYANLVEDTTRVMLRLKALFRARGIRAPGKRVYHPSGRGEWLGQLADRGARLRAEALYAELDVLRQLRPQAKAAMLAEARRDPAWGVLRTIPFYGPVRVAVLLATMQTPWRFRTKRNLWAYAGLAVVTKTSAEYELVGGRPVRRRRAPLTRGLNRNHNRVLKDVFKGAATAATARPGPLQDWYHGVLARRVREELARVTLARKLAALTLRVWKSGEPFDPTKLTTQQAR

SEQ ID NO: 250489 - protein, 382 aa, unidentified
MNPVVGLDVSKGESQVQAFLDKSQPFRKSFSVKHTVEGFEYLLGFLKEIERVADGEKPSVILESTGHYHSPVIQFLEEQQYVYIIVNPLISHRARSTNLRKVKTDAVDAYHLCELFYKEEVEPYKKRGLQLLNLRNLTRQQEIITGISTQTKVQLLTVLDQVFPEFRGVFGDLYSKVSLQTLSLFPTSEQVLKTTESVLTDKIASLCTRRSEKWAKEKAQKLIEAALRNPFQNNLYDSHIFNLKMLITIVLQYQEHLSQLEAEIDTLAKEIEEYKIIQSIPGIGEKIAATIISEIGEIDRFNHPKKLVAFAGIDPSVYSSGRFTATKNRITKRGSRRLRQALYMAVYCGIRDARKQKTSDTVIPRNKKLREFYDKKRDEGKP

SEQ ID NO: 250490 - protein, 355 aa, unidentified
MSSEKYIGLDVHQATISVAVLDSTGKLVMESILETKAATILEFFAGLRGTVSVTFEEGTWAAWLYDVLKPHVAKLVVCNPRKNALLKDGNKSDRIDAHKLAELLYLNKLSSVYHGETGVRMLRELARSYLTIVKDLTRVMCRLKAVYRSWAIPCAGRDVYYTRHRDEWLGKINEAGVRRRAERLYQQLDMLQYLRQQARRELLAESRKHAISVKLRQIPSLGPNRSALAVALIQTPHRFRTKRQLWAYSGLALETRTSAEYCYVKGGLRRSKKQISIRGLNKDHNHDLKGLFKGAATRASVLPGPFQDFYQRSLAKGIKPTMARLTLARKIAAITLTLWKKGENFDADKLKSQAA

SEQ ID NO: 250491 - protein, 456 aa, unidentified
MPKRKSNTVVEAKPVDVLSQINPNAAGLDIGSTEIYACVPADRDEHPVRAFGTFTRDLHELADWFATCDIKTVAMESTGVYWIPVYEILESRGFEVYLVNARHLKNVPGKKTDVLDCQWIQQLHTYGLLQASFRPPEEMCALRALVRHRATLIRYRAAHIQHMQKSLQQMNVQLTQAVSDITGVTGMSIIRAIVSGERDPKVLARMRNHQCAKSEDEIAAALQGNYRFEHLFVLKQSLEQYDFYDQQIQQCDTKIETIYASLPPVDQSDGDVPPPPKPNGQKPRKNQAHFDLATSLYQVVGVDLTVIDGIDALTAQVVIAEVGLDMSKWPTVKHFASWLGLAPHNKKTGGKVISSRTKRTQNRANTALRVAAQSLHRSHSALGGFYRRMKAKHGAAKATVATAHKLARIIYYMLKYRQSYVDPGEAHYEQQYRDRAIRNLRRKAAQLGFELAPAPA

SEQ ID NO: 250492 - protein, 311 aa, unidentified
MSAAEKELSHKSFDNTPEGIQSLLDWIAGYHLSLSKLLFCAENMGSYVTELSVSSVSMGFSLALVCPLTIKKSIGLQRGKNDRIDAKRIANYAVLHYRKLELYKLPDKDLVRLRGWIIIRDNLVKQKVSSIKLLETFSWMAKLADVTESISFLEEQLKSIKEKILEVEEDMEQLIAASTSLYTNYLLLRSIKGIGIINAIVLLCVTDNFQRFDNPRKFACYCGVAPFEHTSGISIRGKTQTSSLANKEVKVYLTRAAITAISWDPQMKAYYKRKIAEGKHKASVINAVRAKIIARSFAVIRRQTPFVTLAV

SEQ ID NO: 250493 - protein, 314 aa, unidentified
MMKITFIGGDVAKSQILFAQHGKDRVEQVANSKTDLRRFFKRLPTGSVLAMEATNTYHELAAQLAYDLGIDVYVLNPRDVSHYANSIGMRAKTDPCDARMIARYLAREHTDLHRWKPATQAQEALKALINRRSTLVSSRVAMQQSMGTESELKPVLNGLKKAFAKAVAAIDKAILRRLKEEPELARHADMLKDIPGIGPVVSAALATLLSRHPFASADAAVAFVGLDPRPRESGTWRGQRKLSKRGPTEIRRLLYVAAMTTARNVAMRGEIDRHKAKGLSATAIYNIIARKLLRTAWSMLKHQTPFAMDRFSAA

SEQ ID NO: 250494 - protein, 397 aa, unidentified
MYIVGIDIAKRKHEAAVIDGEGTVIIKPFSFTNNCSGYNRLLAMLAKAKLPLDEVSFAMEATGHYWLALFTRLQKEGFRVQVINPVQTNSIRSFYIRQAKTDPRDALLIAEVIRFGHFSESTLHPENIYELRELCRGRHAIVSMQADVKRKVVALLDQVFPEYETAFTNLFGDTSMAILQTCPTPKELSEMPLEELCHLIEVSSHKRFRMAKAQELQALARNSFGFAMAGDVFSTMIRLYAKHLDFLKQQVREMDRKIAEIMETLDTPITTITGIGPTLGAYILSEIGDISRFSSAAKLAAYAGIDPTMRQSGEYNGVRNRMSKRGSPYLRHAIWLAASSAVLHDPALKLYFQKKRDEGKPYMASVGHACRKMVSIIYAVMRDNKAYTPCIPNEISA

SEQ ID NO: 250495 - protein, 350 aa, unidentified
MLIIGCDYHPSFQQIALVDTDTGELQERRLEHREEAEKFYREVAVQGMKVRVGMEASGQARWFERLLAELKIELWIGDATEIARKRERKQKTDRQDAQHILHLLLKDDFPQIWVPSWENRDLRQLLWHRHRMVQARTRIMNQLQAVALNEGVRCKKRLWREKGREQLVSFRLAPWASRRRHDLLQWLDRLNPTIGALSQAIEQEVEKCPEAQRLRTHPGVGPLTALAFVLIIGKPDRFQCGKQIASYLGLVPLEDSSGNRRRLGHITKQGNSLLRFLLVEAAQVTARSLPEWRSKYVHLTMRRGRKIAKVALARKLAVRLYWMMRKGWDYEQLKKFGSHAGQPGNRDGVK

SEQ ID NO: 250496 - protein, 349 aa, unidentified
MRFYQPQEQYQYFCGIDLHTRTMHLCVLDQAGQVQLHKNIRSGPDAFLRAIAPFRNNLVVACECIFCWYWLADLCADEGIEFVLGHALYMKAIHGGKTKNDRLDSEKIAILLRGGMLPQAYAYPKEMRATRDLLRRRSRLVRIRSELLGHIQISKHQYNVPSFGKIAYRTARQGVAENFTGHVLRRNIDLDVAAIDHLEIAIKKEEKFLVSQTEIYDKQALFLLRSVPGIGAILAMTLFYEIEDIARFSRVQQFASYARLVKGQKTSAGKQLGSRGGKMGNAHLKWAFSEAAVLFLRESERAKKYVTRLESKYGKKKALSILTAKLGRAVYFVLLRRQVFEEERFFAAA

SEQ ID NO: 250497 - protein, 454 aa, unidentified
MSKKGQRNSQPKPDRLKGDWKALEIVHPRAAGIDIGGSEHWVAINPELDEEPVRCFGCFTADLEQMADWLVDRGVHSVAMQSTGVYWIPVFEILQQHGLEVFLVNARHTKNRPGRKSDIMECQWLLKLHTFGLLLNSFQPSDEVRTARTLWRHRGELVAQASSAIQRMQKALIEMNVQLTNVLSDLSGVSGMAIVQAILNGQRDPKELAALADPQVKASKEVIAKSLQGNWRPELMFVLRQHVEMYRTCQDKIADCDRQLQQHLQSMTPKVELEAHPLGPRPKGKRARGNAPKFDLRTELYRISGVDWTQVDGIDVQVAQSVIAEVGVDMNAFASEKSFANWLGLCPTNETSGGKVLNRRTPKVVNRAKVAFRQAASTLIRSQSYLGAQYRRLRTRLGAPKAITAMARKLACLFYRLLKHGKQYVDKGMEYYEQRYPTSKSDSSPDAPKNLDYR

SEQ ID NO: 250498 - protein, 402 aa, unidentified
MNAVGIDVSKGKSMVAIMRPFGEIVSAPFEIKHTASGINSLVELINSVEGESRIVMEHTGRYYEVLAHQLSEANLFVSAINPKLIKDFDNDSLRKVKSDKADAVKIARYALDKWQNLKQYNVMDELRNQLKTMNRQFGFYIKHKTAMKNNLIGILDQTYPGVNTYFDSPARSDGSQKWVDFASTYWHVDCIRKMSLNAFIDHYQNWCKRKKYNFSQSKAEEIYGKAKELVPVLPKDAITKLIIKQAVDQLNSASTTVESLRTLMNETASKLPEYPVVMAMKGVGTSLGPQLIAEIGDVSRFTHKSAITAFAGVDPGVNESGSYEQKSVPTSKRGSSDLRKTLFQVMDVLIKTHPQDDPVYQFIDKKRAQGKPYYVYMTAGANKFLRIYYGRVKEYLSSLPES

SEQ ID NO: 250499 - protein, 392 aa, unidentified
MEVQDETGRRLAKARLPEGIAGIARLHGLVGRFLPEDVDPAEVKIGIETDRGPWVAALIASGYQVYAVNPLQSARARQGQDVSGAKSDAGDAHVLADLVRTHSHQLRTVAGDSKQAGAVKVLTRMHQSLIWDRTRLVLRLRSSLREFFPAALEAYDDLDSPDVLELLTKAPEPSRAARLTRAQISAALKRAHRHDRDTKTTAIMAALRTEHLTQPPIIAAAYGATVRALAALITTSNEQITALEGPVEACFGQHPDAEIYLSQPGLGPILGARVLAEFGDDPTRYDGARARKNYAGTSPITRASGKKKVVLARYVRNKRLTNALHQQAFSALSGSPGARAYYDALRDRDISYNAALRQLGNRLVGILHGCLKTRTRYDEATAWNQHTQRVAA

SEQ ID NO: 250500 - protein, 401 aa, unidentified
MNAVGIDVSKGKSMVCVMRSFGEVVLEPFEVLHTAQNLNNLAGKLKALDGETRVVLEATGNYHKPVAFVLHNAGLFVSVVNPVLIHDYDNNSLRRVKTDKKDAVKIANYTLDKWTRLRQYLPEDEARLALKNCYRQYQQAVAIRTMLKNNLISSLDLTFPDANNLFSSPAKSNGCEKWVDFIGEFWHSGCVSSLSADAFAKKYLKWCQKHRYNFTRSKSDEIYSCAVNATSLPKSPTSKLLIQQQVAQLKAVSKSVAAFQQEMLRLSQQLPEFDTVMEMYGVGPSLGPQLMAEIGDVRRFSSKKSLIAFAGIEPQPNDSGKIMGNDKGISKVGSAVLRRTLFLIMTVILQTQPQDEPVFQFMNKKRSEGKPYKVYMMASANKFLRIYYARVKAVMDSECSQ

SEQ ID NO: 250501 - protein, 317 aa, unidentified
MEQIYMGIDVAKDSFVVATRLEGKVTTSMYNNDKKGIQGFLKTLPSDSWCIMEATGVYSLQLAIALFEKGIKVSVVNPLQIKRFAQTKLKRTKTDQVDAVLIAEYGERMQPKLYEPPAPFMRQLQQQRMSLKLLVKTKRSFLNQLHALDQLAEPDKVVRKACKTILKSVEKQIKELEDQMQQQAEEHCQDLFTLLQTIPGISKKSAIELIVVSGGFKNFTSAKQFSAFIGICPCINESGTSIRGYRGMSRIGDKNIRATLYMCSLAAKVYNKGCRELYERMLAAGKAKKVALVAVMNKLLKQVFGIVNSGEVYCVNS

SEQ ID NO: 250502 - protein, 388 aa, unidentified
MQTVADRPEAPNAIRNDLGAIFISLELSRSTWLITSLSPDGGEKMSKHSLPAGDIYALLARFSEFKQKAFARTGKSFPIIVIQEAGLDGFWIHRVLQNEGIESHVVDPASIATSRRRRRAKTDRIDGEALLRTLLAYKRGEPRVCAMVKAPTPEEEDRRRLCRERKILIAERVKHVNRIKGLLFCQGVSGYKPLGRDRRQRLDELRTGDGRLLPKHLKAQIGRELARLEQLLEQIMAVEAERDALFAAAPAPGPPAMLLNIKGIGPEFAAILWSEGLFRHFDNRRQVASYAGLAPTPWQSGSVDREQGVSKAGNPRLRTTLIQLAWLWLRNQPQSALALWFEERVRRNGGRLKKTTIVALARKLLVALWKYVTAGVVIEGAVMKAARR

SEQ ID NO: 250503 - protein, 320 aa, unidentified
MSTSSPVFVGIDVSKARLDVHVLPSQEAFSFANDADGCARLVERLTPMGISLVVAEATGRYQRRVAADLLLAQIPVAVVNPRQARDFARSLGKLAKTDAIDAEVLARFASVGHLRVCEKQPENAAILDDRLTRRRQVIGMLNAEGNRLAGMIDPVSIRMIKKVIRLLEQQREELDRQIAELIESNDDWRGKRDLLQSVPGVRQVTASNLIAEMPELGKLSREQIAALAGLAPMNHDSGMMRGKRAIRGGRATVRSTLYMAAFNAMRYNPVIALFTQRLSDTGKPFKVVVTAAMRKLLVILNAIVKTNTPWRTNLCVTQNA

SEQ ID NO: 250504 - protein, 312 aa, unidentified
MTSFTYGVDISKAYLDVCRLPDGIHRRFAYDKTGLKALAKWLTSEPLERVVYEATGRYHRQFERYLAQKGVPLSKVNPCRARRFAESTGTLAKTDRVDALMLARFGMALTPDLYIPISQELEDMRELLVARRALIKDQTAANNRSEGLQIALVKRQNATRQKQIETDIAAIDAELLARVAADEAMKQRFDILVSIPGIGAIAALNLLIDMPELGTLDSKQVAALIGVAPMANESGKRSSRASIKGGRRDLRNSLYMPTLVATRFNPDLKSKYNQLIEAGKPAKVAITAIMRKLVILANALLKKGKEWQQITA

SEQ ID NO: 250505 - protein, 392 aa, unidentified
MFYVGIDIAKRKHEAVVTDDKGDIVVKAFSFTNDLTGYNYLLGKIKLVTISREQIVIGMESTSHYWLTLYTRLIKDGYNVHIFNPIQSDALRGMYIRQSKTDARDSFIIAEVIRFGKYSESNVPQEKLFALRELTRNRYFMVDSVSDLKRKTTALIDQVFPEYEKLFSNNFGVSSMALLLKYPTPEKLKNVSLQSLAKLLSKASNGYFGLGKAKEVKETAKSTFGVIDNCGIYATLISTYIKQILFIQDQVKGIDSQIAEIMSELDSKITTINGIGQALGAVIISEIGDISRFQNSDKLAAYAGVDPTVKQSGDYCAVRNHMSKRGSPYLRRAIWQASVIAVGCDPMFKAYYDKKASEGKRYMNIIGHCTRKMISVIFAVLRDDKEYIPMAA

SEQ ID NO: 250506 - protein, 468 aa, unidentified
MSEVRLGIDVACRADHRASLADERGEFIWSSWRFRTTTTDLERLWAKIPAGASVTVILEPTRNAWVPLSAWLQARGATVILVPPEQSADLRDYYNKHTKTDRLDSRVLARLPLLHPEGLRGIDNLGPAQSLRRAVRHRSSLVKRRSAASLRLDALVELLGPGWADSLGSATASKTALVILEKYADPRALKRLGRARLAALLIRSSAGLWRQDKADELLAMANETLALWSGGGIDFAELAHDIASEVRVLRRLDDEIAAADKRIAVLYDEADPEGIVASAPGLGPVLSAAILGNAGDFNRFANLAGVRSFTGFVPKIDQSGLVAGRKGITKAGDAGLRQALYMAADHARHIDPTLAQRYYRLVMVEGKHHNSALCSVSAVLITRIAACWRKGELYQLRDEDGEAITEAEGKAVCTDRFKIDPKVRAARRRNTPAKLLKNRVAGRGRKESARKVAPATDPPKEEVSENVA

SEQ ID NO: 250507 - protein, 422 aa, unidentified
MLEQAQDKHEIIERVAALDIGKATLVCCTRIPGQGGRGRAQEVTEHSTMTRSLQLMADRLLELGVTRVVMEATSDYWKPPFYLLEAHGFEVWLVNAKDVKHLPGRPKTDRLDAVWLCKVAERQMIRPSFVPPLPIRRLRDLTRYRVALIADRTREKNRVEKLLEDAQIKLSVVASDIFGVSGRAMMDQLIAGERDPRVLAQSARGSMRGKIASLEQAFVGSFGDHHAFLLRQMLGRIDALSADIATLEDRIETQIAPFAHAVNQLDEIPGVGVTAAQAIIAEIGLDMSRFPTPAHLASWAKFAPGVKESAGRNKGNGSTGHGDPYLARVLGEAAVGASRTDTFLGERYRRIARRRGKKKAIVAVGRSILVIVWHLLSDPDVHFHDLGSDFYDKRRGPERIKQTHIRQLEALGYKVTLEPTAA

SEQ ID NO: 250508 - protein, 362 aa, unidentified
MTAMSIVAHTHPFVVGVDTHARNHVYAILAANTGALLESRDFPATGAGINRAIDWVARRTDGSADTLWVIEGAASYGAILAGTVATHGFPVAEAPRMDARKRRGVGKTDAPDAHQIAISTLPLPVDKLRRPRLHDGIRQGVRILITARGSMSKDRTRSINALNALVRGNDLGIDGRNKLTSTQITEVSKWRSREEELSLSIARTEAVRLARHILLLDEQLTANENQLDELVKVSEAAPLLEETGFAAISAAKCLAAWSHEGRVRNEAAFASLAGVSPIPASSGNTVRHRLNRGGDRSLNSALHMVAVTKMTHDTKTREYAEKRRAQGRTNKEIRRCIKRYLARHIYRTLNASATQTPLAMAA

SEQ ID NO: 250509 - protein, 348 aa, unidentified
MRGAVHMQITTIGLDIAKNVFQVHGIDATEKVVVRKQLRRSQVLAFFKAVPPCLVGMEACATAHYWARELTKLGHRVRLMPAKDVKAYVKRNKNDAADAEAICEAVRRPTMRFVQVKSAEQQGQLMLHRTRDLLMRQRTQVINALRAHMAELGIVAAQGREGIKELLKIIASEQDARLSVDAHTSLVVLAAGLQALQTMIRSIEKRIVVQHRSSEASQRLESIPGIGVIGATAIAATVSDPTVFRSGRDLAAWIGLVPREGSTGGKQKLGPISKQGDRYLRRILVVGAHAVLKRVRQQPEKYPWLTQLLARKPFRVVAVALANKMARIAWALLAKGGTYRAPALTAAA

SEQ ID NO: 250510 - protein, 344 aa, unidentified
MEPMYYIGLDVHKRKISYCVKDSSGKVFAEGSLPATRLDLDLWMKTLPQPWSAAMEATMFTGWIYDHLKPHAAALKVAHPLMLRAIAAAKKKNDRLDASKICDCLRCDFLPECYMAPTEIRERRRTLRYRNLLVRQMVQMKNKISGLLMEAGVSYNKQRLHRAGYFRELLATNSDIDEGLCSLLRLCRETVVRLQKTESAMVLSLERDSLLMDRVERLMTIPAVGPITALTWALEVGDAQRFSSIKKAISYCGLCGAEKSSGNTVQRTPLSKQRNKHLQSTLIEAAKMAPRYSPNLAMLYDKEKQKGNANRATLAVARKLVAYLMAIDRGQRNFQAVETNCIAA

SEQ ID NO: 250511 - protein, 344 aa, unidentified
MKVTQCGLDIAKQVFQVHGIDERGKPQVRRRLARAKVLEFFAQLPSCLIGIEACSSSHYWGRELTKLGHTVRLMAAQFVVPYRKRGKNDANDAEAICEAVGRPNMHFVAIKSEEQQAVLMVHRARTLVVANRTAQVNQIRGLLGEFGLVVPKGVARLRRDLPGILEDAENGLPALAREVLAGLLEQFHAFDARVTVYDRQIRAIAEASEPARRLMQVEAIGPQTATALIASMGDPRVFSSGRSYAASLGITPRQQSSGGKDRLGRITRHGDGYLRTLLVHGARAYLRVVDKRTDAKSEWAQRLKERRHVNVAAVAIAAKHARIAWAILAHGAEYRRAVAEVVAA

SEQ ID NO: 250512 - protein, 322 aa, unidentified
MSQPNPLCVGIDVSKATLDIAASSDVAQFTVSNDSDGFNAIITGLRRHSVALVLMEATGGLEVAVACSLQAEGFEVAVVNPRQARDFARAMGYLAKTDRIDARVLTQMAEVINRHPERKRFIRALPDAERQALAAMVVRRRQLIAMLVAERNRLHPFHPQNKKSINTIIKALEDELVRLEKEMDSHIRNHFKEIAERLSSIKGVGTITVSAMLAEIPELGTLSRREISALIGVAPVNRDSGTMRGRRTIFGGRAGVRSALYMAALVATRFNPVIKTFYVRLLAAGKAKKVALVACMRKLLTILNAMLRKNEEWDESYHHVVP

SEQ ID NO: 250513 - protein, 411 aa, unidentified
MKKATFFLLDILANKRGIIINRGPRTSAPHRKKGSLMKKIRDYMLKDQRIYVGLEDSKQSWKVCVRSGKIVVQRISMEAEYEVLRNYFRNKFPECKITVMYEAGFRGFELHDQVVADGWECVVTPPHTVTQEKCSKKKNDSIDADRLAKNLENGDYKRCHVPDRVMREDRQVSRLYGQLQKDITRTCSRIRRAIEYHGLERCFPAGDWSRGEYRKAEENVEKLIIGESLRFSLKMLFMVLRQSRQWQKEVLGKLRELGRSERYKKTVDLLHTAPGIGMLTAIRLALEWGDISRFKRKEEFAAFLGLIPSDYSTADNEHLGHITKQGNRQVRAWLIECAWVAIRYDPVLLEKYNRVAKDAQGKMKFKKMAIVAVARKLAMRLRGILLSGEPYQLGLDECTRPERQLKNDIAG

SEQ ID NO: 250514 - protein, 343 aa, unidentified
MNKNSVISIDLAKNVFQVCLINEHNKVVFNRKIRRNNLVQTVLKLDCKHIVMEACYSSNYWGRAFQQLGYSVNLIPPHQVKPFVVGNKNDHNDAIAIAEASKRPKASFVAVKTLEQQDIQSLDRIRDRLVKSRTAVANQLRGLLAEYGVILEKKMAALRKEIPMILEDPDNQLTVNSREFINGLYQELIRHDERIQENETKAGQLLSQNDDYKRLQTIPGIGPIVGRGIISAVSDPKMFKNGRQMAAWIGVTPKQHASGDQSRMGAISKRGNHNLRRQLIHGARAVVRWCEGKEDALSLWLQNLLQKKPKSKVVVALANKLARIAWAVLSKGEDYNPLVIAKT

SEQ ID NO: 250515 - protein, 341 aa, unidentified
MSKGLERSQATVFTGIDVSAATLAVAVQQAGRDGFRQKEFANSACGHKRLIAWLLECGGRVRVSLEATGTYSLDVALALDAAEGIEVAVLNPKTANQFAQTLRRSKTDAADAVALAEYSRRMEFVPWQRPSRGGLELRTLSRHIATLTEDHTRWGNRLHAVEASKTTPRCVLDDLKRARAAIAKRILKLRKEAVAMVGRDAQLMRKFEQLKSIKGIAETRAVQLLGELAGLDPEITVRQWVAYSGLDPVHQVSGSSVHKPSRISRHGNSHLRRALYIPALAGVRHDPHMRVFYELLQSRHKTKLQALVAVARKLLHAIFGIFKTGTDYNGAKLFPYLIPTS

SEQ ID NO: 250516 - protein, 359 aa, unidentified
MRTQSNKLDFTGQNIFAGFDVHLKSWRVTIMTEHLTHKTFSQPPSPEILHQYLIKNFPGGTYHSAYEAGFCGYWIHNKLKLLGVNSIVVNPADIPTTDKERDQKDDTRDSIKIARSLRNNELAPIYVPSLKTLEDRTLVRTRSMLVKDITRYKNRIKSFLYFHGIKIPDSFENNSSSWSKCFINWLENIEMTEKSGKDSLNLHITTVKNLRASLLQITKQIKELSTTKFYKDNIGFLRSVPGIGFITSITLLTELENINRFNNIDNLCGFIGLLPSKHSTGEKENTGDLTKRGHSVLRSALIESAWVAARLDPALIKSYNVYCKRMEPNKAIIRIARKLLSRISYVLKNKQPYVYAIVK

SEQ ID NO: 250517 - protein, 393 aa, unidentified
MSMLADQIDWVIGVDTHRDRHALAVVDPTGGLRHERAIDACAQGYEEALGVAEQLAPGRRAWAIEGAGSYGAGLTRHLMQAGERVVEIERPVRQRRPGGAKSDPLDAVQAAREALARGQLAVPRQGTGREALRLLLATRALAVTGRTAAISQVKAFIVSAPDDLRAELRVLTTRAQLRRLAALRPHHGQAVDRRAIGIALRSGARRALALDDEARALEAEICAIVERVAPELLAVHGVGAIVAAQLLVSYSHPGRFRSEAAFASLAGVAPIPASSGQVVRHRLNRGGDRQLNRAIRVVVLTRTRHCEKTRAYMARRRAEGRSTREAMRCLMRHVARGLFRLLTRIMSGQRSRSVTSTRAVPPATQSRSQMQPAAAIVARLVSGLHLEEAPSPA

SEQ ID NO: 250518 - protein, 384 aa, unidentified
MDVVVTSNPKPEGKHMKTEKYVGLDVHKDTMVVAVADGGRQGEVRLHGTISSDLRALERALKKIGGEEVRLHVVYEAGPTGYGVYRRLRQLGIDCIVVAPSRIPQANGTRQKNDRRDATMLARLHRAGELTAIHIPEDVDEAIRDLTRARADAVHDLTRAKQRLKSFLLRQGLKYPGNASWSEEHQRYLRALKFPIPSLRSVLEEYLFAFDQIVQRVQRLEELLAVHVPQWRMYPAVQALMCMRGFRLTAAAMLVAELGDIRRFSHPRHVMAFLGLVPKQNSTGQTVRMGAITKAGNPHARWILVEVVQHALMTPKVSRHLSLRQEGQPAIYRELSWKAQVRLHKRGWHLLRRGVMKAKVNIAMAREMVGFIWDLLCHVPERAV

SEQ ID NO: 250519 - protein, 419 aa, unidentified
MSFKILKNNCCGLDVHKTWIFACIGITDSNKRTVYKQARFSSFTKGLQELCHWLAKYDCTDVCMESTGKYWIPVFNILEKNNIWVTLSHPKYTKPQKGNKTDRKDAKWICDLYMCGMVKPSFIPPADIRELRDLVRYRFKLTCMITGEKNRAHNCLTVSNLKLDDVFSDIFGRSSRSITEQILQHPGETFDVAPFVHGRCKTPIEEIQAAVDGAVSKEQAVKLRQCLNHIDELEMHKSEIEREILRLSDKYEDILTLIRTVPGFDKNPMTAIQVLSEIGGDMSVFPTAKNLVSWAGCCPHNDQSNHKIKSTRISRAGSYFKPVLVQVANALIKSKKHPEFSTRYRRIKARRGHKKAIIAICRMILTAIWHILSDLKPYTPEGFLESRPVKEEKVLSISQALNLLKQRGYIIKDEPLSVS

SEQ ID NO: 250520 - protein, 346 aa, unidentified
MNQIIRVGMDTSKHFFQLHGVDAAERPVLRRKLRRKEMMAFFVRLPPTVVGMEACGASHYWARELGQLGHEVRLIAPQHVKPYIKRNKNDGRDAEGLCEAMSRPTMQFVPVKTAEQQAALMLAGMRERLVARRTQLSNAIRGYAAEFGLIAAKGLDKIEPLLADIAADGALPVLARELFAMHGREYAQLQAELKNIEARLMAWHRANADSQRLAQIPGIGPIGATALVMKAPDPRLFPSGRHFAAWIGLTPKDHSTAGKTRLGKITRAGDEMLRSVLVAGATAVIQQVRRGRGRASPWLLALLKHKRPKLAAVALANKIARIAWKLMTTGESYDGARMSGASAFAA

SEQ ID NO: 250521 - protein, 342 aa, unidentified
MSRWIGLDLHKRVLEVCIVNDAGSVESRHRVTVTREQLKTFAQEHLHPDDRVAVEATTNTWPVVELLRPFVAEIVVSNPMRTAAIAEAKVKTDKVDAATLAQLLRAQYLPGVWQPDAATAQLRQLTGRRSALVGDATAIKNRIHSVLHQRLIPNPSCKLFCQQGKEWLQKILLELESDDRAAIQRDLHLLDEVEAGIAEIEQRIFTSGGPDRRLKLLITLPGVDVLCAQTLLAALGDVSRFPDGDHAASYLGLVPSTKQSAAHIYHGPITKAGRGHARWMLVEAAQHVASHPGPLGVFFRRIASKKRAQRGGRRHRSQVGGTRIRTPASPGTVPLRFTATNS

SEQ ID NO: 250522 - protein, 361 aa, unidentified
MASKIKSALEVIKENLGVDASKLELVVCLYQQLFEDGRIRTRVKSSTKFTNNLAGFKKLVKWLSKKAALSQVHITIEPTGVYHENFLYYLNDHTDHLIHLIVASQTKRYAESLGTQTKTDKVDAKTLGLMGLERELKAWKPFSPNMRYIKQLSRERVHYLEQKTALSNRLHALNHGYGANKEEVKRLKKQLNQVQKLLVEVESSMYDFLQADPYLKERIDKVTIIKGLAWLTVLCVVAELNGFINFTSRGQVVSYCGYDVIERQSGSSIKGKTRISKRGNKYVRRALHFPALSAKQHEPKLKNLFERVHDRTGIKMKGAVAVQRKLLILIYTLFTKNEAFDREFEAKQAAEKQENLVLVAN

SEQ ID NO: 250523 - protein, 425 aa, unidentified
MSEQKVVPTRPSTSSGQRFIGLDVHKYYAIACGVDAQLNEVLGPVRVPLAQLDHWAQKHLSSQDAVVLEMTTNAFQLYDDLCPYAGSVTLVHPPHVNLITRARVMTDKIAARILARLHAAGLLPPVWVPPPEVRDLRALLAQRTKMVRLSVQAKNRLHAVLHRHHLPPPQGDPFAPAQRTWWLDLPVTALERVRIQGDLDTLAFAQHQIASLEDTLAQLAAQDERVPLLIQLPGISLVSAMTILAALGDVARFPDPRHLVGYAGLGVCVHDSGQTHRAGRITKAGRRDLRFVLVEAAQTAANTHPHWQAELARLEPRLGRNKAIVAIARKLLVAVWHVLTEGCADRYAEPEHVARKLLHYTYTLGKENRPQDQSAAAFVRAQLDRLGLGADLPTVPRGKRPLPLPPSKLVVKLPLKLDVPEPATV

SEQ ID NO: 250524 - protein, 369 aa, unidentified
MADRITYVGLDVHKDSIVVAVAAGGLRGEVREYGRIANTSAALDRLLRKLGGDGMTLRFCYEAGPCGYGIQRRLSARGHECVVVAPSLIPKRAGDRVKTDRRDAASLAKLHRAGELTAVWVPDARHEAMRDLVRARLDAVHSLRRARQQLSGFLLRHGCHYGRAAWTRLHRRWLAGLKFEQAVHHIVLEDYIAAVEAAEARRNRLTAQIEAMLPDWTLAPVVAALQTMRGMALVNAASLIAELGDLSRFANPRQLMAYLGLVPSEHSSGSSVKRGGITKAGNAAARRLLIEAAWSYRFPARLSRELLLRQESQPRLIRDIAWKGQVRLCARYRRLARTGKPANIVTTAIARELSGFVWAIARQVTVTTD

SEQ ID NO: 250525 - protein, 387 aa, unidentified
MPNSYDTRKSPVALDQDSTLIAVIEMSQSSWLVAGIIPGIERQPLKKLAPDADAVIRLLERWRDEGVKAGRRITRLAVAFESGRDGFWLARHMQEHGIEAHVIHAASVAVSRIHRRAKTDRLDTNMLKRAFVGWLRGEPDHCTMAPIPTLAAEDARRPSREREKLIGERTRLVNRMKAALARHGVRNFNPKLKKAPERLADVRMPDGEPLPSNTVAELKRAMTRARLLGNQIKEIEADRLDRLQQAPEAGSHPMVLLLARVKSIGVETADMLVHEVLSRDLRDRRAVARYGGLTGAPDESGKRRREKGLARAGNARARRGMIQLAWRFLRFQGDSALAQWYQARCEGATRGRRKALIVALARKSLIALWRLVTTGETPQGVVLRPAS

SEQ ID NO: 250526 - protein, 340 aa, unidentified
MHATIIGLDLAKNVFQLHAEDRSGTVLWKRRLRREELEAFLRKQPPALIGMEACGSAHHWARVFTAMGHEVRLMHAKYVKAYVKRGKSDVRDAEAICEAVQRSSMRFVPIKSVEQQIDRSLERARDLLVKQRTQLMNATRALLAELGIVARAGLRGFTTLADKIAAGDAVIPRPSLTALKPLVEQWRALQASIDQLEARLVARAHSDERMRRLMKIPGVGPLTAHAVVTAIGDPKRFSTGRDFAAWAGLTPLTDSSAEKTRIGHISRQGDHSLRRLMVLGAVNMARHARAKPCEANAWLNGVIARRPVKVAMVAQAAKTARIAWALLCSGENYRGRTAAA

SEQ ID NO: 250527 - protein, 356 aa, unidentified
MLNKIKNSVDFSGHNVYVGLDVHAKSWAVTLIVDEIEHRTYTQPPDPVALHDYLTSNFPGANYFSAYECGFCGYHHHRKLLELGIQNIVINAADLPITNKEKMNKKDPVDSRRLSNALKNNQIKGIYVFNPEHEQIRSLFRMRWRAAKELRRIKNRIRSFLHYYGIIPPVELKPDYWPLTFTRWLNHLTLPSEAGTLSLKYLLSAYQNTREQVLEVTRQLRRQVRIHYATTYKCLLTIPGIGPITAMCLIAEIGDISRFKSCKHLASYVGLIPRSHQSGDKDPSGSLTYRSNKYIRSSMVEAAWVAMRNDPALLKYYKDRISRDKPQVVIIKIAHKLLNRVRQVWMTQNIYQPGIT

SEQ ID NO: 250528 - protein, 460 aa, unidentified
MILRMGIDIAVRAPHQASLADEKGELLWSGHRFRTTAHDLEDLWARLPAGFTATELTVVMEPTRNAWVPLAAWFRRLGAHVVLVSAERSADLRAYYAKHTKSDRLDSVLLARLPLLHPEGLHRERGLGPGDPLRRATKMHSTLVKRRTTSLARLDALLEILGPDWHAAFSADLSNKTPLQFLAAGYADPHTVRRLGRARLARFLYRHSRGAFGEAHADRILAAASASLELWGDDISFPDLAEDIAVEARLALALTAEIKELDERIAVLVHDRDPHGIITSAPGVGAITGAVILGRLGDASRFQSLAAVRAFSGLVPSLDSSGVYGRHGGPTKRGDHLLREALFMSANQARRLDPTLAAKYHRLMVDNGKHHNSALCHIATTLLTRVVACWRAQTTYEIRDLDGRPVDNQEARAIISERYTIPATIRRSRTTTGTGRRSKESHSAPSTDPSETHAKRPGAA

SEQ ID NO: 250529 - protein, 342 aa, unidentified
MTAIKYFVGVDIASVTFTACVGTTPWQVLVKAHTFENTENGYQTFLEWLANQQIGVKESVVCMEATGVYSEGLAYFLFATGYPVAVQAPLEVKRTFKPYGPKTDAVDSLQIAEYACRHIDKLSFWQPRNEILDLVKALLPTREQFVSQNVAHKNALQAIQRKPVRTLFAEQAHAQMIEQFKKQIQAIDHEIRRLIESDPTFKEMLLLLLSVPGVGLLLASHMILLTQLSLDHKELASYLGIAPNEHSSGSSVFKHATSRHFGPAAVRKLLYLASCSVRMHQAQFASYFARKTRQGKPAKLVLNNIANKLIKIICAVLLTKTAFIKNYHSVQPLVFQNTLTAS

SEQ ID NO: 250530 - protein, 391 aa, unidentified
MPQLNDLSRSLVALDQNSTIIAVIEMSQSSWLVAGMLPGIERQPHKKLEPSPERLLGLLHRWQDEAVRAGRTITRIAVAFEAGRDGFWLARWLAARGVEAHVIHPSSVAVSREHRRAKTDRLDTELLKRGFLGWLRGERGHCSMARVPTIAEEDAKRPNRERECLVGERTRIVNRIKSTLARLGIRSFKPTLRKAAERLATVHTPEGMLPPNVLAELQRDMARLGFVVSQIREIEEARQRRLEQQAETGPHAMVRLLARIVGVGVETADMLVHEVLSRPMRDRRAVARYAGLTGAPNESGAQRRGQGLARAGNARVRRGMIQLAWRFLMFQKESALALWYRARTADSRIGTRKTMIPAFARTALARKLVIALWRFVTTGELLEGVVLRPAS

SEQ ID NO: 250531 - protein, 414 aa, unidentified
MNTPVSNVSMSGTLIALDISKKHHDAKIRYPDGRTSYLRIENILEGFNRLLALTASPHDSIIAAFEPTSVYHRNIAWWLHQQGVKCHLVSSVRCARACEMLFKTWDKNDRKDASVIMYLLEQGLSSPFYDPLANGVIDIQEISKTYHQVTLARTRCLNSLVNHYLTLYFPEAEQFLHMSRAEWFCQFLLQFPTPSCITSLNRDLFVKQAWDVVGRKQYKQQFLEHLYDISANSIALPLSDGSLAVTTFKLQLHRYVELSAQRLQLEKQAENYLQERSDYQHLRTIPGIGAVIALMIIAESGDLTRFAHYRQYLSFCGFNLSASQSGQKHSGYRLSKRGNARLRYAFWLAATVAVRTRENSFRYKYERYIRENGDKPDQKRKAMTAVATKVARVAHAIVKQAIDYKGYYEISHGT

SEQ ID NO: 250532 - protein, 353 aa, unidentified
MTGTKYIGMDVHKESISIAVRNDAGKLVMECVIETKANVILDFIHGLRGELQVTFEEGTWATWLYDLLKPHVTKLVVCDPRKNSRQGNKNDRIDARELSDRLYMNKLSAVYHGGAGVRTLKELARSYLTISKDLGRVMSRVKAIYRSWGIPCAGKQVYAPRHRAEWLAKITEVGVLRRAEFYYQQLDALRVLRQAVRCDLLAESRKHKATKLLRQIPSIGPIRAALLIALIQTPHRFRTKRPFWKYSGFAIEMHSSADYRSVKGELQKSKKQISVRGLNRDCNHDLKNLFKSAATIASVKPGPFQEFYAALVAKGMRPEMARLTLARKIATIVLIVWKKGVSFDAQYLKSQTA

SEQ ID NO: 250533 - protein, 450 aa, unidentified
MQQPQEVEDREGERTVARVAAVDVAKASGVVCTRVPREGEPGRFTTKVWPVAATTNAILELADHLAAAQIEKVVLESTSDYWRPFFYLLEAAGLTVELVNARDVKNAPGRPKTDKLDAVWLAKLAGWGMLRPSFVPPAEIRQLRDYTRLRTDLTRERTRHWQRLEKLLEDALIKVTTVASRIGTMPVRDMIEAMIAGQRDPHKLADLARGRMKAKRAALIEALTGRFDDHHAELAAILLAQIDSLTRQVEALTARIEQLIPAIPAAQGVDPDGTTGPLAGRGPDAPVLPAIDRLEQIPGISRHAAQVIIAEVGLDMTRFPTAAHLVSWAHLCPRTIQSGASIRPGKTAKGNPYLKGVLGDAAAAAGKTSTFPGERYRRLAKRRGKLKALVAIARTLLVIIWHLLADRAARYDDLGDNYYITTINTDRKLRSHIRQIQALGYDVAITPAAA

SEQ ID NO: 250534 - protein, 363 aa, unidentified
MSKLLYVGMDVDKEKIVAARLASAAKQSEECVIANTPQAVRRYFAALTREAEVVAAYEAGCFGFGLYHQLTDLGVSAVVAAPGLIPRKPSDRLKTDRRDARTLAFTLRAGQLTAVHVPTKQDESVRDYLRMCEDMRDDVRKCKQRILHLLLRRGIRYEQGGPWTVKHTDWLATLDLGSPLDRQTLDSYLARLQELQSACSQLTAEVESIAQEERYRESVRTLSAFKGIKTLIALSFITEIGDFRRFPSAAQFMAFLGLVPSEHSSGTKHRQGSITKAGNSHLRRLLVEAAWHYRSYHPTSRVLVQRRRGVDPRIISYVNRAGRRLNRKYLHMLMRGKRSQLAITAVSRELAGFIWGAMVGQVA

SEQ ID NO: 250535 - protein, 366 aa, unidentified
MKGTTFVGLDAHARTLQVAVLGSHLAKAVELSSLTDLTSVRRLAQQLKKHAAGGELRCCYEAGPTGFALQRQLEAAGVPCIVVAPSLIPRAAGDRIKTDRRDARKLAELLRADMVTPVRPPTLEEEAVRDLCRAREDAVQARTRCRHQLGKFLLRRGVRWVDGKCSWTRAHHAWLAKLRFELDVEQSVLDEYLHALEQADLRVDRLDAKLEAVAEGEVYRARVGWLRCLRGVKTVTAMTILSELHGFERFQSPRQLMAYLGLVPSEHSSGERRSRGGITKAGNSHVRRILIETAWQYRHRIVTGSDLRRRRLAQPARVIAIAEKAQARLGARYRKLTARGKHHNKVVTAIARELTGFVWAILSPAA

SEQ ID NO: 250536 - protein, 367 aa, unidentified
MPLRSERPWVSEGRRVDFHKQPEQMRGPRARILRKAGHTKIRIPSRKEPVTPTADTFVGIDVSKATLDVHVLPAKRAWSTPNQDNAVHALCKELAALNATLIVLEATGGLERRLLAALLAANLPAVVVNPRRVRDFAKANGCLAKTDALDAAIIALFAERIRPPVRPPVDAETQELAALLARRRQVVDMITAEKNRLSADPPSKRVQRAIRKTISYLEKQLDEVDNDIDTAITNSSVWKAKDDIIQSVPGAGPVLSRTILSHAPETGTLNRKQIAALIGVAPLNKDSGTLRGRRIIWGGRTEVRNVLYMATLAAIRFNPVIARFHARLIAAGKLKKVAIVACMRKLLTILNAMLRSNSQWQTTEVLP

SEQ ID NO: 250537 - protein, 440 aa, unidentified
MAMRKRDDEVFPNAAGIDVGGSSHWVAVPRQVSDEPVREFGAMTDDLNAMADWLLACGVDTVALESTGVYWIPVFEVLEQRGLKVYLVDARQMKYVPGRKSDVQDCQWLQKLMSLGFLRAAFRPTDEVCVVRAVARQRDVLLAEQASWIQRMQKALVQMNIQLTEVLTDVMGLTGQAIIRAIVAGERDPKALARHRHSRVKASEAEIAKALTGNWRDEHLFVLGQALAMYDNIAHHQRECDAKLQGLLSRLGTAQVDLGKTPRAGSKTRADFDTRQILANWAGVDLTRINGLGLGAVMKILSEVGPDLSRFANVKHFCSWLGLCPGTKISGGKVLSAKTKQSANRVRQALKMAAMSLSHSDSALGAFYRRLSGRMDKPRANTATAHKLARMVYFMLTRGEDFVDQGQQHYEEQQRERSIAALKRRAAALGFAVMPTAMPT

SEQ ID NO: 250538 - protein, 334 aa, unidentified
MKINRVGADHRGKAVWKRRLSRGKWLKVLCDTVEPGTEIGMEACAGAHHWARQLIPRGYPVKIIAPQFVKPFVKSNKNDANDAQAICEAMGRPNLHPVRVKTVEQQDLQAIHRIRDEIKSHRIAKANQIRGLVTEYGLVAPQQLPALRRAVPDWLEDADNGLTFLFRQLLQGLWTDLCVLDQRMAELDKQIAVIAQEDPTARRLLQLRGVGPLIATALVATIGDGQQYRKGRDMAAALGLTPRQHSSGGKEKLLGISKRGDAYLRCLLVHGARSAVCTAKDKEDRLSRWIVNLQSGRHSNVVAVAMANKMARMAWVMMTRDVDYDPDLAAASVS

SEQ ID NO: 250539 - protein, 405 aa, unidentified
MVKPGRHKKKRVNAVHVIQANAAGIDVGSTEIYIAVPDDRDSRSVRKFETFTEDLHKAAKWLKSCGIESIAMESTGVYWIPVYQILDSYGFDIVLVNARHVKNVPGRKTDVKDCQWLQYLHSVGLLSGSFRPAQEICAVRSLLRHRDNLVKMSAAHIQHMQKALTQMNVQLHHVISDITGLTGMAIVDAILAGERNPQNLASLKDRRIKADKSIIEKSLEGDFRPEHLFTLKQALQAYRNYRELISGCDHEIESYLNALDSRVDPEENPTPPPTSKRKKPQGNEPDFDLRSQLYRILGTDLTQVDGINVITAHVFLAEVGPDMSRFPTADNFCSWLCLCPNNKVTGGKVLSSHTRKSVNRLAQTLRMAAEGLWNSHSTLVNILDECAPGWVRRRRLQPRHTSWPV

SEQ ID NO: 250540 - protein, 409 aa, unidentified
MLFVGDDWAEDHHDVEFVDEAGRRLAKARLGEGVQGITRLHELVAAHVPEDAEPGQVVVGIETDRGPWVQALLASGYQVYAINPMQAARYRERHSTSGAKSDAGDAHALAELVRLDRAAHRPIAGDSDLAEAIKLVARAHQTLIWDRHRHLLRLRGALREFFPAALDAFDDLTAPDALELLGAAPDPATAASLSHARIRGALHRARRRNPAGRAVQVQAALRAEQLGQPPVVTGAYAAIVRSLTAVITALNTQIKAMEVQVVTHFGRHPDAERYRSQPGLGDVLAARVLAEFGDDPTRYAAARSRKNYAGTSPITKASGKKKVVLARYARNDRLADALHQQAFCALTASPGARAYYDTLRARGIGHHAALRQLANRLVGILHGCLKTGTRYNEDTAWAHHSHQAQRAAA

SEQ ID NO: 250541 - protein, 391 aa, unidentified
MIYVGIDVAKDKHDCFITNSDGEVLFKSFTIPNNREGFETLFQKVQSVSDDLTKVKVGLEATGHYSYNLLGFLLDKGLPTYVINPLHTNLYRKSLSLRKTKTDKVDAHTIASMIMSDVNLKSYSDTSYHNEELKSLTRYRFDKVKERAKLKSSVSRLVCILFPELEKLVPQLHMASVYALLSEFPSAHAIASAHLTRLTHLLSESSHGRYGKDTAVMFREAARSSIGSIMPAKSLELKHTIKLIQELTSEIDEIETEIKSIMDEINSPILTIPGISYNMGAMIIAEIGDFSRFDSADKILAYAGMSPSTYQSGQLDNCYSHMEKRGSRYLRYALYNATKYACIWDKSFGAYLAKKRAEGKHYNVALSHATKKLVRLIFAMEKSRQAYRIAS

SEQ ID NO: 250542 - protein, 317 aa, unidentified
MNNTEIQTPVNVGVDVGKANLDIALHPSGQFYTIPNTEAHIRRFVRILKNYEIERIVVEASGRHEHALVQACDKTDLPIIVVNPISVRRYAQAIGVLAKTDRIDAQVIAQYAATLKPEFKPIPDKTSQKIKDLLIRRSQLLEMSTMEKNRLQILPKSLHRSIKSLLRMLQSQIETVTRQIEHEVAKVDQWRTKMEIMTSVPGVGKVLAYTFLSELPELGSLNRKEIAALVGVAPINRDSGKLNGKRRIRGGRHRVRTVMFMAMLSSIQCNPVFKRFYERLKAQGKSPKVALIACMRKMIVVLNTMIKNQESWRGEMA

SEQ ID NO: 250543 - protein, 410 aa, unidentified
MLLVGDDWAEDHHDVEVQDETGRRLGKARLPEGVSGIAQLHGLIGALVPQGAAPDQVVIGIETDRGPWVAALVAAGYRVLAINPLQVARYRERQTTSGAKSDAGDAHVLADMVRTDRHQLRPIAGDSSLVEAVKVVARTHQTLIWDRSRQVLRLRAALREFFPAALQAFDDLTAADALELLAVAPEPVSAACLSTAQIIAALKGARRHHVADKAATLQAALRGEQLAQPSVMVTAYAVTVRATVAVITTLNTQIKQLEAQVEAHFGKHPDAEVYRSQPGLGEVLAARVLGEFGDDADRYPGVRSRKNYAGTSPITRASGKKKLVLARYARNDRLADALHQQAFCALRASAGARAYYDALRARGVGHHAALRQLANRLVGILHGCLKTHTRYDEATAWPRHSEQDAEAAAA

SEQ ID NO: 250544 - protein, 355 aa, unidentified
MNDAKYIGMDVHTATISAAVRDSSGNLVMEATLETKAETILGFVHGLRGSLHVSFEEGTCAAWLHDLLKPHVTEVLVCDSRKNALLRVGNKNDREDARKLSELLFLNKLHPVYHGETGIRTLKELARSYLTITRDLTRVMNRLKAIYRGWGIACAGQQVYAPRYRAEWLAKITEAGVRRRAEIYYQQFDALAALRQEVRRELLAESRKHPAMRLLRQIPSIGPIRAALLIALMQTPHRFRTKRQLWAYCGLALRTYDSGEYRFVGGQLKRSKKAVTIRGLNKNHNHDLKNIFKGAATRAAAAAGPFQNFYEARIANGMKPPMARLTLARKIAAITLLVWKKGVRFDAEQLKQQAA

SEQ ID NO: 250545 - protein, 369 aa, unidentified
MINVGIDIHKKRCQACLKDEKGRMIGEVSFPRDHDGIASFRRLLQNHGEAKIVLESTGNLWVPIYDQLTGDHANRVILANPRKTRIIAEAKIKNDRMDARVLADLVRADLVAESYVPNKQVREQRALLRERRSLVEDTVAIKNRIHSLLDRHNLQPQYSDLFGKHGREWLCSIELPSTEKTILDVELKQLESLEAGIRTLTEKIAVEAAEEPRVKLLMGFTGIDYYSAMLLLAEIGDIKRFSSPKKLVAYAGLAPGMRSSAGKTVRGHITKEGNKYLRWILIEAAQHASRFDPKLQGFYQRVSARRGRQRAIVGVARKLLVSIYHVLNRNETYHGQRTELLERKIRNLQRIVDSSLQEERDNQTQNPES

SEQ ID NO: 250546 - protein, 460 aa, unidentified
MTTRTIGIDLAIRGDQVAQIFDDGRPTGKPVRFRFEAAQLDAFVAEATGGLPPGSTVQALMEPTGMSWFPVAHRLADAGVAVVRVKGQRVRALRKYLSEHAKTDLADAHLLAAMPTFGGPGFDPVHIPTPKSHALQRLTKQRSRLQDLVAAGKRRLLDLLRWAAPSLETVLPDLRTRLALALLRAWFDPDAVLAARRSTLVRFVARHARGNHPHGGPVVDALVDGLKASARETRALHRRHVDFAELQAEVAIEVDLITRHLDAMAELERRIAALYAELHPSDVLRTVPGVGGHLAPVLLGVLHTPERFRSERHLRGFCGLFPNRAASGGADKPGQKITQAGNDRIKRALVLAADIARRTDPELAAVYHRLMTDRGHHHKQALCAVANRLVNRIFRVLRTGTPYVLRDVDGRGIDLAEGRRIVAERYTVPHALRAARRVQRSATPTRAARTIPPAAGAPAP

SEQ ID NO: 250547 - protein, 439 aa, unidentified
MHFSGEVEEREERLNKQKVVAWVGIDWADEGHEVWEYTVQTDSATCYAIKHTAESLQEWVNQLRIRHGGKPVAVVLEQARGGLIYALMNTGFMEIYPVNPESLAKFRKALYPSGAKSDPTDAELLGQMVRQNPGRFRAWVPGDEQTRSLQLLAEGRRKLVEDMTALTNQLTSVLKTYYPQALNWAGDLSSEQACSFLEKWPTLADLQKSRPFRIRNFYEKYGRPPREVLDERVTQMEKAQPLTADPAVVMAGKMMVNAVVAQIRPLRAAIEKYDVEIEQIFRQHPDRAVFESFPGAGKVLAPRLLAAFGADRDRFEAALEVQQFSGIAPVTERSGKTIWVHRRLACPKFVLQTFHEFANQSRRFCVWSKLYYQQQRARGKQHNAAVRALAYKWIRILFRCWKDRRLYDDSRYEKSLIKRGASLAPLLNVLDCGNGVQAL

SEQ ID NO: 250548 - protein, 312 aa, unidentified
MPAKLPPTYVGLDISSNQLDYSRSENDEGRCAYTAEGIAELIKKLQVLLHARVICEASGGYEKRIVAELLQAGIEVCVVQPGRVRAFAYAEGLMAKTDRLDARLLRRFGEKIEVRLAVPTDPALTTLRELLEHRRQLTRQLIEVIGRLSLAGATLRKLLEKQRLFLEKQIAAVEGMIKDHIDQNPDLKQKSARLQEINGVGPVLSATILAYVPELGKIESNQLSALIGVAPHPDDSGLRNGPRHVRGGRAQVRRVLYMAAVCAARTNPILRAFYERLRANGKPAKVCLVAVMRKLVHLMNKLIFNPDFSLVR

SEQ ID NO: 250549 - protein, 463 aa, unidentified
MAAGKSLWGNRKERKEWARRLQSEDPGLEVVHPRAAGIDVGNSAHYAAVRPDRDMEPVRRFECFTADLYRLADWLRSCGVRTVAMQSTGVYWIPLYEILEERGFEVYLVNARHTKNLPGRKSDVQESQWLLKLHTYGLLSNSFQPSAEIRMLRTYWRQRATHVEGAATCIQRMQKALTQMNMQLANVISDISGLTGQAIIRFIIAGERDPHKLAALCHPRIHASQEEVAKSLEGNWRPELLFILQQEVEMYDTYQRRVAECDERLQKHLASFADTLSVRATMDKPKRKKAAKNAPHFDLSSELQRITGVDLTRIDGINVMVSQTILSEVGLDMSRWKTEGHFASWLGLCPDNRISGDKVLGKGTRRVVNRAATALRQAANTLIRSRSYLGAQYRRLRTKLGAPKAITAMAHRLARLVYRMLKYGQAYVDKGTEYYEERLRQQQIQLLRKRAAKLGLHVMEPQA

SEQ ID NO: 250550 - protein, 353 aa, unidentified
MNLYQTRHPFYCGIDLHAKEMYACVVDHDGNKQLHRNFKTRQSDKFFNEIARFGTDLVIGCESTFNWYWLADACQERQIPFVLGHALYLKAIHGGKVKNDKLDSEKLALLLRGGNFTTAYAYPKKLRATRDLLRRRTRLTRLKAELLTHLQIVNHQHNLPPFEKKITYKSNRTGLVDQFPGQSTQVSVALDLEQLDQYEDQLRRLELYLERSAKIDDPQAFFRLQTIPGVGRIIALTMLYEIHDINRFPTVGQFLSYCRLVKGSHSSAGKSYGSPGKKIGNAYLKWAFGETVPLLKRCCPEAKTFLDRIEKKHGKARAFSYLSVKLGRAVYYMLKRQEAFDLQRLLRSSEIQR

SEQ ID NO: 250551 - protein, 338 aa, unidentified
MFYVGLDVHAKQITVCVLDADGRQHRTCQVRRLDELMRMLKSLPGPFRVCYEASTGYGGFFELLSPVADHVAVAHPGMLKVIFHSKQKNDRNDAAQLAKLLYLDAVPLVHVPPAKVRAWRELISFRHRLVEKRSRAKNGVRGLLRSLRIEVPSRPGLWTRKGLAWLQNLAFSQPLHAVKRDLLVEEIQSLSAQLRRVEKELARFAADHPEVERLRSIPGVGLRTAEALVAFLDDPRRFARSKQVGSYFGLTPSQDQSGGRNRLGHITRQGSATVRHLLTEAVWQAIRRSATVRAYFQRVQRDDPSRRKIAIVATAHYLARVAWSLMKKQTLWKESVTA

SEQ ID NO: 250552 - protein, 342 aa, unidentified
MKDTMIGVDLAKSVFQLHGASLAGHLKFRKKVTRVQLRHFMAKHEPAVVVMEACGSASYWAREMVKLGHEVRLIAPQYVRPFVKRQKNDAADAEAIVVAAQRPEMRFVEPKSEDQQACAVLFRARERLLHQRTELVNALRSVLYEYGHVFPKGIAHLRRIEAVLTDPASDLPALVRDECQDLLEQISEQTARIEAKTAKTRGLAGTNDTARRLQTMPGVGPQTALAISGFAPPMDSFKRGRDFAAWLGLVPRQYSSGGRERLGRISKAGQTDIRYLLIIGAMSRLTVLARKSIQEGSWLARMLHRKPLMLVAIALANKMARAIWAMMTKKEHYRDPARAVST

SEQ ID NO: 250553 - protein, 414 aa, unidentified
METCLFVGVDTHKDSHTAAVLDGYFDVLTTITFTNDKAGFVRLEAHLKKISQGRDIFFGLEDSQGLGSFLATYLVGKGYTALEINPVTTDRGRKHTVSRDKSDEADAIVIAKTLIRERKNLYPVRIERNSVALREMVGYRQMLVGEATRIKNRLHITLFNQFKGVLGCFASPFGKCALAFFLRYPDPVFLKDVDPDFLSIFLKTHSKGRFSEKKARAILKSIDTSIADSLTDTRAHIIASHIERLLKIQEELVEIKKVLTSLVKASSYYCLVSIPGIDIVTAAKIIASVGDISRFSSASKLARFAGIAPTEKSTGRKKRYKKSKYGNKYLYSTIYYIALAHISRTRNDRDKNPVSRAYFLKKISEGKTKKEAITCLARRLVDIIFAVMRDRSIYNFSKSASTKKHETELDSVAA

SEQ ID NO: 250554 - protein, 467 aa, unidentified
MKSFYLGIDVSKGYADFVIINLQKQPVVKSFQLDDTFDGHSRLHEIVSRFLTDHPQAVMYAAVESTGGYENNWYNTLIRLQASLNIKTARLNPLGVMHNSKADLQKNKTDKISAQNVAEYLIAHPEKVVYQQQDQLASLRKQWGFVQMLTKQCTQLLNQLHSLLYTANPELLSYCRDGMPAWILKLLLKYPTATTLKKARDKTVAKIPYVSLTRAKQLIAGAKHSVASATDPVTAQLITATAGQILQLKKTIAAQTDLMAAQCDVPEAKLLKTFTGIGDISAIGLILEIQSVARFKTVKKLASFWGLHPVYKISGDGSGAFKMSKQGRVNPRKILYTVTLSAIEHNPVIKPIYQYHLQQGKHKMDAIGICMHKILRIIYGMLKNNTAFDPKIDAANRHRSLPDITAYPKKTKDRRFQSYDSKAPVSRRQRKKRLERERSHSVITDTKSGISAPVPIGDIISDMLSNI

SEQ ID NO: 250555 - protein, 379 aa, unidentified
MAYYVGLDVSVKETSICIMDDKGVVAARTDISTDPDLITNFISKHAPDVERVVHESGILAIWLTRELEKRGVPIICIDARLAHKALSGRINKSDQGDAEGLAQLARTGWFTQVHIRSEASERVRVLIGARERLIRMRKDLEGHVRGVLKVFGVCMTSVGTGKLRRDFRDQLAAAADTDPAIALLSETFIPLHKTLCIARDALDDQVRMMARESELARRLMTVPGVGPIVALAYIATLDDEKRFRKSVDVGAFLGLTPKRHQSGEVDWSGKISKCGDCDMRRLLYSAASTLISCTRKPSRLKEWATKLAERKGHKKAAVAASRQIAVLLHCLWRNETVFEPGMGGGLVALTFRSLNSFWQPGGAVRQKLTSFIFPETSIR

SEQ ID NO: 250556 - protein, 354 aa, unidentified
MSPWSSLVVVRSLVQTRTVAWVTPRSSKAGIYKMANFSPVVGIDLSGSWWDAAISSGTSEQGEAARFANSPEGRQACLAWVTARCHPGAVVACEASGGLERDAVALFHGAGFTARVLDPAQVQHFGRAQGRKAKTDAIDAAMIARYAATFPGRPAVPDPARKALTDMIGARDLLVAQVTASRNQATHFTDRSVRRSVELCIATMLRQIAALDLLITRLIDATPAFAERNRIIRSMPGVGPATAARLLASLPELGTASAKRMACLVGVAPIANDSGNRRGARHISGGRHDVRKVVYMAALVATKHNPALRAFYERLCGAGKPKKLALIAVIRKLIGILNVMLQRNQMWHPTTLKA

SEQ ID NO: 250557 - protein, 340 aa, unidentified
MTAHVCGIDIGKTVFHLVGLSKEGQIVAKRRFTRKQLIIHTVNMPACLIGMEACPGAHYLARVLTAQGHEVKLMPAEYVRPFVKSNKNDYIDAEAIAEAVQRPTMRFVPIKSEAQLDLQALHRVRDRWMGRRTAVINQIRGFLLEHGITVAVGPAHLKRQIPSILEDADNLLSPRMRALLAELRDEWEKLETQIEEIDREFSQAVKREENCRRLLTIPGIGPLTATALTAAIGNAMAFRKSRDLAAWLGLVPRQHSTGGKSRLLGISKRGNPYLRRLFIHGGRAVVARAKRENHTFGNWLNQLEARAPRNAVVVAMANKLARIAWAVLTRGQVYRATVCP

SEQ ID NO: 250558 - protein, 349 aa, unidentified
MVIVGIDAHKRTHTAVAIDEAGRKLGEKRTTSTTTEANLELLRWAEAFGKERRFAVEDCRHLSRRLEADMLAAGEELVRVPPKLMAHARDAARTYGKSDPIDALAVARAAWREPSLPRACLDGPSRDLRLLVDHREDLVRERTSQVNRLRWHLHELDPSWDPAPRSLVRFKHLDALGARLDGLGGTVAWVARDLVARIRELTVAANELERRIVEQVSRLAPALLGLVGVGGLTAAKIVAEVADVRRFHSKDAFARHNGTAPLPVWSGNLVRHRLSRTGNRQLNAAIHRIAVTQMRIHDGAKLYLGRRIAMGNTKTEAIRALKRQLSDVVYRTLMTDAVSTQVARFGEAA

SEQ ID NO: 250559 - protein, 386 aa, unidentified
MSQPTNILLRAINYDHTLVLAIELSNKSWVLAAQVPGLPQTKAQRTIEPNKNALLAAIDGYRARAAAVGYAVDRVITTYEAGWSGFWLARWLVAQGMEVHVVQPSSVPVDRRLRRAKSDGIDAELLLRTLLAWLRGEPRVCSMVPIPDEADEDARRSVRERTELLSDRVGLTNRIGAVLATLGAGDYNPLLQSRRRRLTELRTGLGDPIPPNALAKIERLLARLELVLAQIAELERERDEVAAADAPDRAGKMIQQLASLRGIGVQSATVLVREAFVRHFSNGKALGSYAGLTSTPYSSGGIDREQGIGKAGNRRLRTVMIELAWLWQRYQPGAAQVAWFRDRVGSTGRRVRKVMVVALARKLLIALWRFVIDGVVPEGAVMKPSI

SEQ ID NO: 250560 - protein, 350 aa, unidentified
MREIMTYVGLDVHDETITAAWKRPQGDLRWMKVSHDEEGLERLQRELWKGSVWAAYETSGVGFVPYDRLTEMGWKVSVLATTRMPKSVKGKKRKTDLEDAKQILDVLMAHGECGTELPDVWIPPVGTREDREVERHRLHLGQVVGRIKTRIKSLLKVHGVKCPWVEKTPWTRKYRAWVKGLSTPEGGLARSVGAVLASEWRMLEAAESEVKEMDREMGRLCEQPNYGPAVKAMTEIKGVGALTALVFLLELGDVKRFASRQQVGCYMGLTPTSHESGQAENRKGHITRMGPSRVRLVLNQAAWAFLRSDPYQRAWYEPLKKRAGGKKALVALMRRLGILMWHRACDAIVA

SEQ ID NO: 250561 - protein, 371 aa, unidentified
MEFIGIDLHTSRFTCCYLSEEGSRRMKTYELSTTDIGFFLQTVHADTSCVLLAAAVNTFAFVKLIAGHVRQVLVANTFELKSISFTNKKTDKVDAYKLARILKAQIMSGEEQVHEVVVSPQHIQDLRALFTTYRLIRKQIGAVKNRIHSLLKQNLMPFTKEYIFGNKRRREIRGLCKGKEVLDFQINFLFDQLEQLEEKTDEIKEKIIEQGSWYMKEIDIITSMKGISVFTAIAVIADIITVTRFSNSKKFSNYLRSTPKVESSNEKTIIKSTNKCSRKVAITLLSQALNHYRDTSPYARTWYERLRQYKKPGVVRMGLCRKMICELYQMLKKEEYHYFRDPLNHRAKREDYFKLLEERHIQIPTSLMKSA

SEQ ID NO: 250562 - protein, 345 aa, unidentified
MEITTVGLDLAKNVYQVHGIDSVGDVVVRKTLRRAHMLRFFERLDPCLVGIEACGTSHYWAREIGKFGHEVRLMPPAYVKPYVKRGKTDASDAEAICEAVSRPTMRYVAIKSSEQQAALSVHRTRDLFVKQRTQLVNMIRSLMAEFGIEIRRGITHALNLAERIAAGGTPGIPALAAKMITSLAGQILDLEARLRVIERELLAWHRSSDIARRLATIPGVGTICATAFAASVTDPHQFRSGRQFAAWLGLTPLQHSSGGKERLGRISKMGDKYLRRLLVVGMTSLVRRAKYKPDTVDRWLAALLSRKPARVVTVALANKAARVIWAIMARGGIYRAPQSTAAVVS

SEQ ID NO: 250563 - protein, 347 aa, unidentified
MQIAVLGIDLGKNSCSVAGLDTSGRVVLRRRLHRNSVVKLAARLPACVMAMEACCGAHHLARLLQAYGHEIRLMSPEYVQPYVKAQKNDERDAEAIAEAATRPTMRFVELKTEQQLDMQSLHRARSRLVGERTALINQLRAVLLERGIAVAQGRYRLQRYLALALDGDGDPLPLNPRIRRLIDDMRAQWSELDRRIAAFDAEFVAAARSDADARRLSTIPGIGAINATALVAAVGNAQSFARARDLAAWLGLVPRQATTGGRPKLLGITKRGNKYMRTLLIHAARAALPSLINTEGSLGNWLRALSTRAHRNTVIVALASKLARIAWAVLRSTATYSATIGGRPATV

SEQ ID NO: 250564 - protein, 354 aa, unidentified
MKSVGIDLHKQTISVCVKNQERKVLKRQSLNCAEPGKIVAFFRELDEFQAVVEATASYEWLWQLLEPLAQRLVLAHPKKLRVIAESKNKSDRLDAEVLADFLVLDMIPEAYRPTLRQRQHRVLIRQRCFVQKNLTRVRNEIRRLLSNYNADRRDLFTLAGLQYLREAKKQLSEADRFVLNQLLAQWDYHRKQFQAVGRRVKTFAQKASAKEKEIRAVLGSMPSVGPTTIEVVLSEIGDIERFRSQKKVVAYAGLAPGHRESAGHKKDLGITKEGSGLLRWVLIQTAWRMVRCTLRWRWVYENLKKRRGSKRAIVAVARRLLTVMAALWRTGQRYRLDSGGFEPGPTAPVFAGAK

SEQ ID NO: 250565 - protein, 305 aa, unidentified
MFSRFIGVDVSKTKIDVFLSETGEVLQVKNNTANIEKFVQKIDCRSNTLAVIDLTGGYEAACVDVFYRAGFAIHRAEGRKVKAFMRAVGQLAKTDSIDARALADYGQRLQDKLTLFQPIENEIKPYVFRLTELKQILKSERNRLNAPSTVPRIRLEINKHTEFLQAEIDELSKELQTVVKQNPVLLKKQQALTSQIGIGETSANVLLACLPELGILSRRKIAALAGLAPYAQDSGTIQKVRHVVGGRCDVKRTLFICSLVAIQKDPIMRTFYEKLIQKGKRKMVAIVAVMRKMIIILNAKCKNID

SEQ ID NO: 250566 - protein, 462 aa, unidentified
MRLYLGGDVSKGYADWVILSEKKQAVIENFQLDDTYAGHCKLYSMLEAYFDAHPGLEMYAALESTGGYENNWFNTLKSYQKVFNFKVARINPAGVNLNRRASMRRNVTDAISALSIAEYMINHPDNIAFDQDDKWKTLCRHWNFVEMQKAQRTQTINQLETILYCANPILMRYKKDNLPNWLLELIIKCPTADKLAKAKPEKLAKIPYLTLARAKTLVAEAKQNIASATDKNAEILVSQIASQIKVFDQTIKSQMQLIEKELICPEIEILKSFNGIDTISAIGLLLEIEAIERFPTVKGFSCYFGLHPKFKQSGDKIIGVRMSKQGSKNMRKILFNIAKGAITYNPLIRAVYEKKLSQGMSKMAAIGVCMHKILRIIYGMLKNKQVFNPLIDKQNYEKSKSKQQEKQLQESASIEKSRRYQIFDAAAPVSRKQSKKRKEHDLSQCELASQSTGSACSSTTKL

SEQ ID NO: 250567 - protein, 412 aa, unidentified
MDVVYARCAGLDVHKATVVGCVRKPGQQRGERQGETQTFATTTRGLLALADWLTAHGVTHVAMESTGVYWRPVYAVLEGSTELLLVNARHVKMVPGRKTDVRDCEWLAQLLECGLLRASFVPPPAVRDLRDLTRYRKVLIRERSDHVNRVAKTLELANIKLGCVVTDLMGKTGRAILEALIAGGDDPDTLAALAQGSLRKKRAELREAVVGRMTPHYAFLLQQQLALIDALAAHISQFDARIEAAMQPFAEAYALVQTMPGIAERAAQAILAETGVEMSRFPTADQFASWARLCPGNNESAGKRRPTTTGKGAPWLRATLQEAAWAAVKTKKSYYAALYYRLKARRGAKKAIVAVQHAMLVALWHMLTHRVPHRDLGRDYFDRRNQARIRRHHVRRLQQLGYQVLLVKEAAA

SEQ ID NO: 250568 - protein, 418 aa, unidentified
MLANVRKMEAAVITAVGIDVSKSKSTVAVRRPGGEIVLRPFEVHHTNSDLKKLASTLKKLGGDIRIVMEHTSTYWRPIALTLKEAGFFVSVVNAMLIHDFSDNTIRKLKTDRADALKIANYALTFWDTLPPFNNEEETRLLLKMQSRANERITATATALRNGLIALADQTFPGVNIAFDPNTKNANGHEKWVDFFLRYWHKDCVCQYSMEAFTESYRGWCKRKNYKFRTDTAHKIYLLAQEGVATLPKCESTKMLITQACKSLNAVCEAKQSTQLEMQRLAAMLPEYEVVMQMEGAGPITGPALMAEIGDVRRFKNKKALVAFAGIDAPPFQSGAFESKSRHVSKRGSPHLRRTIFIVSNIILTRSNPENAVYCFMDKKRSKGKHYYVYTVAGSAKFLRVYYARVTEFLRSQPSPDAC

SEQ ID NO: 250569 - protein, 336 aa, unidentified
MNYCGIDLASKASALCVMDETGAILWEEEIATDTDGLRTRLGGAERLKCVVEASPLAEWTAQTLEELGHEAVIIDARRAKALVCTKKKTDRINARDLANMARTGWYTAVHRKSAMARELRTYLTARAGLVETSTALNAQIRGLLRAHGIKLGKVAERDFEGKVQRLIQERVPALAGALSPLLALWRQAIDAAKTLNKAIAIRAKQDAVGRRLMSVPGIGPLTAAAYQATIDDPSRFRRSAQVGAYLGLVPSVYQSGDIDYRGRITKEGDRLLRWLLVEAAHNLLSHTQRDCALKRWGERLEAQKGTGKARVAVARKLAVILHRLWLTGETFDWQRA

SEQ ID NO: 250570 - protein, 367 aa, unidentified
MEKSSKVFVGMDVHKESIDITLAEQGGEVRRLGAIGGDRGSLLKMVRKQQSKGGERVFVYEAGPCGFWIYRELAALGERCMVVSPALVPKRAGDHVKTDRRDSERLASLARAGELEAIHVPDIRDEAIRDLVRGRDDAVIAQRRVRQQLKALLLRNDIRYVGKTSWTGAHRRWLSELKLPEPAQQIVFEEYVDAIVVATGRIERLTRAIQTEVITWRFAPVVAALQAMRGIQFVHAVTLVAELGDLTRFGSARQLMGYLGLVPREDSSGEHRHQGSITKAGNSYARRALIEAAWAYRHPARVTRIIATRQTGLPKAACDIAWRAQLRLSAKYRRLNARHLHHNKIVVALARELSGFVWAIGQSVKPQ

SEQ ID NO: 250571 - protein, 341 aa, unidentified
MNKVSTIGLDLAKEVFQVHGADAAGAVVFRKRLRRGNVVQFFATQAPCRVAMEACASSHYWGRELSRLGHEVRLIPPSYVKPFVKRQKNDAADAEAICEASQRPTMRFVQIKSEAAQAAAVVFRARDLLVRQRTQIITALRGHLAEFGLVVAKGPAHVGRLVAQAEDYARSLPQTVRPIFGVLIEALHSLDDKIVVLDAEISRRAEEDEDARRLKTIPGIGPVTAAAISALAPPAQTFARGRDFAAWLGLTPLQRSTGGKQRLGETSKRGERTLRRLLIIGASAVVRWAARKGALAGSWLERMLTRKPRMLVAVALANKMARIIWALLAKGGIYRASIVAE

SEQ ID NO: 250572 - protein, 354 aa, unidentified
MKRTTKYVGLDVHQSATVASVRQEDGRVIARTVLPTEEEALLEFVRGMRGAIQLTFEEGTQAQWLHDLLLPRVDRLVVCDRRKKDRLSNKGDQVDADELSELLRRGSLRSVYHGNPHQATLRELTRTYDNVVEDATRVMLRLKALFRARAIKAPGKRVYSPAYREEWLAKLSTRGVRFRAETLYAQLDVLREMRPKVKAAMIAEARRDPAWRLLQTIPFFGPVRVSFLLATMRTPWRFRTKRNLWSYCGLAVVTHSSSDYVIDNGRVLRRRRGPMTRGLNRHHNRVLKNVFKGAATAATGHPSALQDFYLAMVERGMREELARVTLARKLAALTLRIWKTGEPYDPTKLTLQVR

SEQ ID NO: 250573 - protein, 412 aa, unidentified
MTVTNQFAAHVGLDWADKKHDVCVQFKNGERVFDVIEHTAEALDAWLTELHQKVKGRIAIALELKKGPVVYALQKYPFITVFPVHALSLARYRQAFSPSGAKDDPQDAELALELMLRYPQKIKAIEPDNADIPLLQQLVEQRRQLVEDKRRFVNRIINTLKQYYPQPLEWFSHRGSLLLCELIIRWPSLQQLKRARRDTIRNFLNAKGGRAMALTEQRVASIDNAIPLTTDPSVIEANALMAAALATQIKVVSEIIKTYDERIETLFDTLPDAGLFKSLPGMGPCMGPRMLAALGDNRDRFNSAEEIQNYAGIAPVTERSGQKSWVHWRWQCAKFVRQTFVEWAAKTVNSSYWAKLYYQGLREKGKSHQSAIRALAFKWIRIIYRCWKARTCYDEAKYLLALEARHSPLLKP

SEQ ID NO: 250574 - protein, 325 aa, unidentified
MQGRAGEKEGTLDRTKVFVGIDVSKERLDVATYPAKEKWAFANDGPGIASLVERLEGLRPAAVVLEATGGLQITVVVALGIAGLPVAVVNPRQVRDFAKATGKLAKTDAVDAQVLAHFAQAIRPSLRPLPDEATQELSALLARRRQVVEMLTAEKNRLGRALPPVRLRLQTHISWLERELADLDEVLGLTLRQSPLWREKESLLRSVPGVGPVLTLTLLAELPELGIGGHKQISALVGVAPLNRDSGTLRGKRTVWGGRAPVRAVLYMATLVATRFNPVIRTFYQRLLAAGKAKKVALTACMRKLLTILNAMLKHRTSWVAPSCP

SEQ ID NO: 250575 - protein, 341 aa, unidentified
MDRQSGELRMRRLPGATSEIVAFCASLPGPTRVAYEAGPTGFALARALAAVDVQCVVAAPGKIERPSSDRVKTDERDAQRLLRLLMIDGLHAVRVPSTQEEALRDLVRAREDIRGDLMRARHRMSKLLLRHDVRFDGTAAAWTTHHRAWLGKVDLGERGAQITLIDYLGAIDALVIRRDTLEHSIGELVPGSPWAHSVARLRCLRGIDTLTAVGLCAEIGDWARFPRPAHLMSYLVLVPSEHSTGQTRRQGSITKTGSGHGRRLLVEAAWHYRRAPAKGQALKRRQAGQPAHVIAISWQAQQRLHRTWRRLDAERGKRRTIVAVAVARELAGFCWATANAD

SEQ ID NO: 250576 - protein, 373 aa, unidentified
MDSNATTYVGLDAHKRTVAVAMLLPGRSEPIEWQEAHDATVARRLARRLVREAPGPVECCYEAGPTGYVLQRRLRAEQVMCRVIAPSLIPVRPGSHIKTDRRDARKLAGLLRAGLLTEVHPPSEEQEALRDLCRCREDVQRDLLRARHRLSKFLLRRHCIYTQTKHHWGTRHLAWLSTLRFEDPVSQATFDSYFLAIQQLDERREQLEAQIAEFGTQEPYREPVGWLRCFRGIDTVTAVSLVAELHDFRRFSSPRQLMSYLGLVPREQSSGERERRGPITKAGTGHVRRLLVEAAWHNRSRPALGLPLRQRRQGQPARVIAIADRAQERLHRRFVRMTFKGKPSQKVVVAMARELVGYLWSVLYWQPEALSAS

SEQ ID NO: 250577 - protein, 389 aa, unidentified
MYLVGIDISKYKHDCFILKETGEVVSNPFSISNNQDGFQSLLTVLNSLDPHEEIRIGFEATSHYSLNLKLFLEKAHHSFMEFNPLLLAKFNKSQTLRRTKTDAIDSISIARWLMTVDYKPYPVGFYHIYSLKSLTRLRDSLVKQRSFYIVKLTNVLDHTFPEFKPFFGNRFSKTALYLLETYGSAQNMAQMNPSSYESLRKISRGKFSMQKFIKLKELATNSVGANNDIFSLQLQSLLALYNQCAKEVERLEEQIISLISDIQPKSMTIPGIGPLSAAVIYAEYGNIQKFNSPSAMLSFAGLEPGYYQSGTSEHTGRMVKHGSSHLRFTLMNLCIPLIQYNIAFAEFYAKKRSEGKPHRVACSHVIKKLIRIIYHLEKENMDFDSSKLR

SEQ ID NO: 250578 - protein, 519 aa, unidentified
MSRARSASRRSRKTVLVQKPNGVLSGRVQAVGPQCFGIVGIDVAKQRMKMMLCDFFGKCLIPPTEFDQTNGGLRTAIDAVRRAQQQAGLKDLVIAIERTGEYHRPVQRAFRQAGFEVRLVHPLATKQFRQIADPGDKTDDTDLAGIHRAAVNGFGLIEPELPPDYLQLQMLIRHRRDLVRKNSALCCQLREHLHAAMPGYTACFDDIWLSQTAWVVAHATGCANAVCTAGIAGLQRFVDQAGVRCKQNTLHKILAWADTAPPCHPQIESLRRIIRDLDDDRTAKTRQILALERSSAHLLVRTPYIRLLVIPGINVVSTADLAGEMGPIAHYASANAITGRAGLVPSRYQSDLVDHANGSLIRSGNRRLRTALLQIADNLVMCNHYFHAKADLWRVRGKDPRWMRVKVAKSFSRIAYAIVAGNGPFAHRCLQDRHYVLHKLQAFHREHDTPMATLLADLQAAIGQLPKVEYVNEAKPLQEELDSLPRRRGPQPLSEIIPIVLARLGMGTVQSTPEGQDLS

SEQ ID NO: 250579 - protein, 354 aa, unidentified
MEKIAIGIDFSKETFDMTVLDTQKANGKLDADALAKAPHEQFKNQRSGFRKSLSWIRKVTGRKLDKDNAIFCGEATGKYSIRMSEYLREQGLFIWIDSGLRIKNSMGIVRGKSDKADSCRIAEYAFRHWDKAELYEPLEKDVSALRELFLYRDHLVAIRKATEQRNSLIKEFSDVVGESSFIKRSGDRIVKELKEEIKRCEEEMRKLVESNEEMEKAYDCITSIKGISLINGVAFIVYTNNFKWFGNNPRKIATYWGVAVFGKESGTSVKGRTKTSKCASRKLKRLISEAATCAIRWEPRIKAYYEKLMAKGKHHGVAMNNVKNKLIHIITALAVNKTMYSDTYEEDRKLKKVG

SEQ ID NO: 250580 - protein, 328 aa, unidentified
MTQSNLIAIDLAKNIFQVAQLKGNKLKFNKPMKREPMLELLAKAEGSKVVMEACGSAQHIARKALSLGHDVMLLPPKFVKAFRQGQKTDANDVLAIASASQAYNVKPCKIMTVEEQTLQSLSQARALIDKQKTQLSNQIRGLLLEFGIVINQGDAALTQVVPDILEDAENALPIALKQALAVSYDLYKTQCDAKAQLHKQVEAITKQNDSCQRLMALEGVGPITAIELLSFLGNTSQFSDARGAAACAGVTPTQHSSGGKAKIGHIPKRRGNTLRKNLFLGARTVVSMLWFNKPGHYFRWYHYHSTRGAQWQENVEHLVKNSNLKQLV

SEQ ID NO: 250581 - protein, 359 aa, unidentified
MDVRDPAKRHVVGGVDTHKDLHVAAVVDERDRVLGSRSFTTTRQGYRQMLAWMGSFGEVQRIGIESTGSYGAGLLRFVQTVGIEVLEVTTPDRHDRRRRGKNDDLDAQNAAHAAFAGQRTVTPRSRDGMVESLRVLSACRKTAVAARLVALQLIQNTIVCAPDGLRDVLRSMTRMQLIRTLAAWRPDLTAYRDVEAAYRITFKSLARRYLELHDEIADLDIMIGAIVDELAPDLVARNSIGHVGAAQLLLAAGDNPDRLRSEASFAALCGTSPVPASSGKTIRHRLNRGGDRHANSALHIIAIGRLRTDPKTKTYVAKRVAEGHSKLEAIRALKRYIAREVFTLIMRRHKTINQTQIAA

SEQ ID NO: 250582 - protein, 449 aa, unidentified
MSRPQVIDDEQHEQVHERVAAIDVAKDSGMVCTRTPHPSRPGARRSTVWTVKARTGAVRALGRQLHKDGIEIVTLESTSDYWRIWFFILEACGLAVQLVNAAQAKNLPGRPKTDKLDAQWLARLTEMGLLRASFVPPKAIRDLRDYTRARTRLIQERTRCWQRLEKLLEGALVKVSSVASKLTTVSAQDMIKAMIAGERDPHVLAGLARTRMQAKHDDLVQALDGMFDDHHGELAGMLLDQIAFLDGRIARLSARAAELTAAMPEAWGINADGTTGPDAGATPDAPVLPAVARLAEIPGISEDLARAIIAETGLDMSRFPTAAHLVSWAGLCPSARQSGPRTRAGKKGQGNGYLRGSLGQAATGAARTATFPGERYHRIARRRGKAKAQVAVARSILVIIWHLLADPAARYTDLGASYYQTRTDTDRKLRNHIRQIQALGFEITLTKAP

SEQ ID NO: 250583 - protein, 345 aa, unidentified
MTIVETTRSVTGGVDTHLDVHVAAAVDASGGTLGVESFPTTPVGFVQLHEWLSSFGLVAGVGVEGTGAYGAGLARYLRGQALEVIEVDRPNRQLRRRAGKSDTIDAIEAARAALSGRASGIAKSADGNAEAIRALLIAKRSARDTRIMCLNQIRHLGFTAPDELRERLRGVSRRRVAHVAAGLRPSGSDPVASATKLALPTLGRRVLDLDTSTERLDAQLAMFVRAAAPALVALEGVGIDTAAILIVAAGDNPQRLRSEAAFAHLCGVAPIAASSGKTVRRRLNRGGDRQANHALWRIVFTRMSSDERTRKYVARRLAEGRSKPEIIRVLKRYVAREVYKNLQRG

SEQ ID NO: 250584 - protein, 412 aa, unidentified
MKEKVEFEQVIERGCGLDVHKETVTATIKGEGIKQETREFSTYTRSLISLRDWLLKNGITHVAMESTGVYWKPVFNILGEHFQIILVNARHVKNVPGRKTDQLDSQWLAKLLMAGLLKASFIPIKKIRELKDLVRYKTKLTRQVSSEKNRFVKILEDANIKLSSVLTDIFCVTGMKMIREIIECDYDPDKLLYHVHGSVKKSRSEIKEAITGYVTDHHRFMMQTILESIEKTEDTITKIDSQIAEQTKEYGLEIELLETIPGVGHDGAIGIISEIGADMSVFPDEKHIAKWAGMCPGNNETAGKKKSSRASYGNAYIRALLVQLAWSASRTKKTYLSSKYKSLVRRMGKKKAIVAVGHKILIASYFIIKDKVAYNELGEEYLSNFRKDKLVAYYKKMLQELEPNLEFETKVA

SEQ ID NO: 250585 - protein, 338 aa, unidentified
MKLYGAIDLHSNNNVTVLIDEQDQVVYQKRLANDLSLIGEQLSPYASSLEGIVVESTYNWYWLVDGLMGKGHRVHLANTAAIQQYNGLKYTDDDSDARWLAHMLRLGVLPQGYIYPQQERAVRDLLRKRSQLVRQKTANLLSIQNLYTRNTGLSLSANRIKKLRSEEVDDLFTLGDVALAVKANLSVMRCLEAEIKTLEQVVKERVKLKPAFRYLLSVSGIGQTLALTIMLETGDIRRFPSVGNFASYCRCVGSEKLSNGKRKGKGNTKNGNKYLSWAFVEAANFAIRFEPLIGRFYQRKKAKTHGVVAIKAVAHKLSRACYYVMRDQVPFNVARAFS

SEQ ID NO: 250586 - protein, 379 aa, unidentified
MNGPIYEQSVIVGVDAHKYSHTAAAMDAWGQEKGRLNFTNDSLPDCLAWLKTLGRREDVIVAVEDANSYGCHLVSALAEQQFAVRSVPAVLTERDRQHSTQRDKSDFRDAKRVAKVILAKYEETLPVIASLATSAELAAATELNLLLNERRDVVKQGTAIKNQMHSLLHQYYGDHYADGFSKAFNKQAMIFYQANLVQAISADSPNANQAGKALIAESILRRIRRLKLLQEQSAAILKQITKIGETSAPVAALHENIHGCGLLTAGAIMAELVTIRRFGGRDKLAKYAGIAPTIKSSGSHHRLYTNPFGNRLLNKALHTIALSQIAIKGDDRGKRYYRKKLKEGKTKLWALRCLKRRLINLVFRVLKQTEMGSAETAIS

SEQ ID NO: 250587 - protein, 411 aa, unidentified
MQVLYERCCGVDVHQATVVACVRSPSAGGRRHSEIRTFGTTTAELLAFAEWLTVCGVTHLAMESTGVFWRPVFNILESQCTVILVNAEHIKAVPGRKTDVRDCEWIAQLLEHGLLRASFIPPPPIRDLRDLTRHRTTLVQQRAHEVNRVRKLLESANLKLGLVACDVLGASGRAMLRALVAGERDGTVLAELAKGTLRQKRSQLAAALTGRFTAHHAALLKELLDHIEYLEAAISRFSHRIGEAIRPYADHVAHLQEIPGVDRAGAEVIIAEVGADMTRFPTAGHLASWVGICPGNHESAGKRLSGKTRKGNRWLKPLLLEMGWGAGRTKRTYLGAQYGRLCRRRGKKKAAMAAGHSILVAAYHLLRDGVGYRDLGADHFDKLATERLTRHYVHRLEQLGHHVTLAADTVV

SEQ ID NO: 250588 - protein, 370 aa, unidentified
MNVTHAVAGIDPHKHTATVAVVDVLGVLVVSLSFAVTESGIAELLSLLRSTSLSIDRVGVEGSGGLGRPVMLALAAAGYDVREVQANRTADRRKRRRRAKTDVEDAEAIARETLADPQLPPAGKDATPSPASNELDVLQDWRESLVLQRVRLLTEAEPVLVSLPLRLREQLPSTSRVLASLNRLTELENFDAGLSAGDRLKLDRLAASRADIVTISARIKDLDAQIPALLKTLGCTLTDIHGVGVVTAMTLLTEIGDPHRFKTEARFARWCGVAPVAMSSGEGNGPPRNHRLDLGGNRRVNSVLHIVHVTQARCHPEAQAYMTRRAAENKSKQAARRAHKRQLANVIIRRMWNDADNLARANSTPSSAVA

SEQ ID NO: 250589 - protein, 354 aa, unidentified
MKVIVKQVAGIDVAQKELVVTLGRMYDDWQLELYAHKTFANNVKGFESFIAWTKKQSDELVPVRFVMEATGVYHESLAYYLNEKRLELSVVLPNKISNYSRTLDIKTITDKTASEAIVRFGLERKLDQWKSPNPFYKKLKQLCRERNQLVAERTMVKNELHAEISEAEPNKKSVVRINKRIDFLNKQEKEVREEIAIMIKENKEIKKAVTLVCTLPGVGVITAASVLAETNGFELIRNKKQLVSYAGLDVKEKQSGTSVNGKSRISKQGNKQLRKAMHLPALSAIGHDERFKAVFARLVQKHGIKMKAVVAVQRKLLELIFIIYKSGKPYDKEYLKRNENQLEQVGIKLESGHN

SEQ ID NO: 250590 - protein, 430 aa, unidentified
MENVTYVGLDVHKAFHQVAMLIPGCEAPVEWRAETDTRGLRRLIRRLERDADGVIHVAYEAGPCGYGLQRELETHGIACMVVAPSLIPRKPGDRIKTDRRDARKLAELLRANALTPVMPPTPEEEAARDRFRAREDARQDLLRARHRLGKWLLRQGIAYTRGKKAWTREYHAWLRTLRLDDPTAQTVFDAYRVRVEQQERACRGLDEALATLAAQPAYTEAVGFLRCFRGIDTLTAIGIVVELFDFGRLTTPRGLMSYLGLVPSEHSSGGHARRGAITKTGNRPVRRLTVEAAWHARHPIHVSRALEARRQGQPTWVIAIADQAMTRLHRRYWRMVGRGKPTNQAAVAVARELAGFLEGGALPPCRGGHPHDGRERVSPNVADAEPSLHENPCVSSPPPAATTARAAWARTGGCAAALCDRDACVLDSRP

SEQ ID NO: 250591 - protein, 345 aa, unidentified
MEKYVGIDVSLKESAVCIVDQSGKVLRELKALSDPDALGRILRAEGCSEARIGLEAGALSGWLHDGLKAEGFDVVLLETRHVQAAISAMAVKTDRNDARGIAQMLRLGWFKSVHAKSADSQEIRALLTARKLLTRKRVDLDIGMRGILRSFGLKVGQVGRARFDARLRELITGNTMLEKVIGAMLEARAVLARELAELHRMVLRLTRESEVCKRLMTVPGVGPIASLTFVAAVDDPHRFRSSKAIGAHFGLTPRKYQSGEVDVTGHITKAGDASVRTVLYEAANAIITLRVKPSALKAWALRLVKRRGAKRAKVALARKLAVLMHRMWVDRTEFEFGAGDAQPAT

SEQ ID NO: 250592 - protein, 367 aa, unidentified
MKKISTVAAKQNRNFSQPKLTIGLDLGDRSSWYCLLDEVGEVLQERKLSTTPKAIKEVFGAMPRCRIALETGMHSPWVSRVLSELGHEVIVAHARNVRLIGESREKDDRLDAQTLARLVRIDPQLLSPVKHRSAKAQADLTVIRARAGLVRARTALVNTARGLAKSYGERLRGCNVRNMNPEKAEGLSPELQRALEPLLAAIESLSERIGEYNEGIEQLAQQSYPQVARLKQVKGVGTLIALTFLLTLEDAHRFRKSRDVGCYLGLQPGRRNSGQSEPQMHISKEGDPYLRTLLVQGAHHILGPFGVDSDLRRWGLKLAERGGRNGKKRAVIATARKLAVLLHRLWVSGEVYEPLHNRNPRALPAAA

SEQ ID NO: 250593 - protein, 454 aa, unidentified
MAKKREKRECRAVVLEPDAAGIDIGAEEIYVAVPPDRDEESVRMFSSFTCDLHALADWLQQCRIRTVAMESTGVYWIPLFQILEARGLEVYLVNAHYLKSVPGRKSDVSDCQWIQYLHSVGLLRASFRPAMDICAVRSLWRHRGSLLQMASEHILHMQKSLSQMNLQIHHVLSDLTGASGQAILDAILAGERNPVLLAQLCNCRVKSPREKVAKALEGDYRPEHVFTLKQSLDGYRYYQKLIAELDREIQRLMQTLPSAVETGQEIPRRTKHSAFQRQGNDPDFDLRAQLYRIAGVDLTDIPGVSAVTAQVVLTEVGPDLHRFRHASAFASWLGLCPENRVSGGKILSCKTRRVKSRAALALRLGANSLCRAKGYFGEFFRRVRAKLGTAQAITATAHKIARVLYHVLRTKQPYTETVFHRSDEHARRRAEMRLRKQAALLGFQIVPAPSDSAT

SEQ ID NO: 250594 - protein, 344 aa, unidentified
MKKVVAGIDLHSNNVVIGIMDMDGKRVANQKVSCELKEVAKVLAPYEKRLEQIAVESTYNWYWLVDGLRALKYPVVLANPAGMQQYNGIKHADDTNDAFFLAELLRLNILPTGHIYDPELRPVRDLLRRRLMLVHHRTALMLSFKSLYTRTTGQELALGKLKDLEVQEAQELYEHPANQLIAGMQVKHIEQLTESIEKIEKAVLSCARELPCYSKLTTLPGVGRILGMTITMEVGEVKRFAGQGNFASYCRTVEAKRTSNRKKKGENNSKCGNKYLAWAFVEAANFARRYDEQCRRWHDRKAAKTSKVMATKALACKLAKAAWYLMAGEVGYDAKRMFGPATTK

SEQ ID NO: 250595 - protein, 312 aa, unidentified
MENTIGIDVSKAKLDVHVLKDKKDIQFDNSAEGIKGCIELCRAVKPELIAMEATGGYEYFVAAKLCAEGFAVAVVNPRMVRDFARALGKTAKTDKIDAMVIARFAANCQPLPQNRVSDNSRKLKALTARRQQLLDIRISESNRMEHAIDREIRRSIEKVIKIIESEIESVDRQIREHIDNMPQLKGKTEKLRSVPGIGDTTAAMLVSELPELGTFNRREIAALVGVAPMNRDSGTFRGKRMTGGGRRDVRNRLFMPTLVAIRHNPVLKKYYQRLVNKECKTKMVAIIAAMRKLLCIMNAMLKNNQQWEPKIV

SEQ ID NO: 250596 - protein, 370 aa, unidentified
MPRMPQAPEPSHAHVDPTGVDPDEVVLGVDTHKDVHVAAVINVLGVLQGTRSFPTTAAGYQQMLRWAIGFGTLRRAGVECTGSYGAALARHLVGEQIEVIEVNQPDKATRRRRGKTDTVDAEAAAHAVLSGRASASAKAGNGPVEMVRIFKLAKASAIKSRTQAINQLKAVLVGADPQLRDSLSGLSNPTLIRRCAQLDAGTPRDATTAAAYTLALLARRILELTTEIDDLNRQITDTLSTHAPQLLERNGVGPDTAAALLITAGDNPERLHNEASFAALCGVSPVEVSSGKTQRRRLNRGGDRRANSALHTIVLSRLRWDPNTRAYLARRIANGKTRREAVRCLKRYVAREIYQLIAQPTEPTQCARAA

SEQ ID NO: 250597 - protein, 421 aa, unidentified
MQEEVSGFAAFIGIDWADRKHDVCLQVPGTDAVEASVVEHRPKAIEEWAHKLRERFAGQRIAVCLELSHGPIVSALLEHDIFVIYPVNPSTLAKYRRAFTPSRAKDDPTDAAIALELLRRHPEKLKPLRHESPHMRALRRLVEARRDLVQDRVRITNRLTFTLKDYFPQVLDWFRDKETEVFAAFLERWPSLPDAQRARRETIVAFFHAHSVRRASVIDRRVDAIKSERPLTSDAAVIEPARLLVEALLPQLRAVSAGIVRLDDEIARRCGQLPDYFLFADLPGAGRVYSSRLLAAFGEQRDRFSDASAFQKYTGIAPVTERSGNKHWVHWRWACPTFLRQTFVEWVASSVPHSFWARAFYESHRAKGASHNATIRALAFKWIRILFRCWVDRTPYNESRYLAALQKRQSPLLKFAAQNPS

SEQ ID NO: 250598 - protein, 372 aa, unidentified
MNYNTVYVGMDVHKESFTLCAFTIEADKASHFQRVEADYRKILKYLEFLRTIYGDDARFICGYEAGCLGYTLYHQLTSSNVNCVILAPTTILEQRSKKRIKTDKRDAEMIGRCLAQHNYSPVHIPSHKDEETKEFLRMRADHKLALKKIKQQILAFCLRHNYRYEGKSNWTATHIKWLKALTPEALYKEILDEYLLTFTTLSDKLERLDKRIEELAKQDEYRDSVKKLSCFIGIKTHTALSVIVEVGDFKRFATAKKFSSYLGLVPGEDSSGDEKFRLGITKAGNRHVRVLLTEASQCYGRGKIGYKSKVLKSRQAGNTPATIAYADKANERLRRRYYKMVLGKNKKANVAKTAVARELACFIWGMMTDDIS

SEQ ID NO: 250599 - protein, 395 aa, unidentified
MSFKILKNNCCGLDVHKTWIYACIGITDSFKRTEYKQARFSSFTKGLQELCLWLAKYNCIDVCMESTGKYWIPVFNVLEKNNIFVTLSHPKYTKPQKGNKTDRKDAKWICDLYMCGMVKPSFIPPADIRQLRDLVRYRFKLTCMITGEKNRAHNCLTVSNLKLDDVFSDIFGKSSRSITEQILQHPGEFFDVAPFVDSRCKTPIEEIQAAVDGAISHEQAVKLRQCLKHIDELEMHKAEIEREIFRLSQKYESVLDLIRTIPGFDKNPLTAIQVLSEIGADMSVFPTAKNLVSWAGCCPRNDQSSRKIKSTRISRAGSYFKPVLVQIANALIKSKKHPEFTTRYRRIKARRGHKKAIIAICHMILTAVWHILTDLKPYTPEGFLIAHHNQALFTS

SEQ ID NO: 250600 - protein, 387 aa, unidentified
MTNENLVTTYSNPKRFSTFTGDLRRLAEWLSQNNCRDVCMESTGKYWIPVWNILEPTCNLVLAHPKYTKAIKGKKTDKRDAKWIADVFKHDIVNGSFIPPADIRQLRDLVRYHFKLTGYTTGEKNRAQNCLTVSNIKLDDVFSNVFGKSASAITERLLESNEPFDVEPYVSKKCKTPISEIQAAVDGTMCANQAEKLRIIRSHMDSLERCKANLESEILSLAEKFLPQIDLVSTVPGIGAFSAVAIIGEISTDMSVFETSRHLCSWAGLTPQNDNSAGKKKTTRISRAGVYIKPLLVQCALAATKSNKHPEVRTRYNAIKKRRGHKKAIIAIARMLLTAIFNILKKNEPYNAELYRQADKLPVQREVSIEQAIFILQRQGYLVSAST

SEQ ID NO: 250601 - protein, 338 aa, unidentified
MNKFSGIDLHSNNSVVVVSDEADRIVYQRRLPNDPVQIQAALAPHREDLVGVVIEATFNWYWLVDDLMKEGYVVHLANPAAIRQYDGLKYSGDFADAAYLAQLLRLGLLPEGYIYPPQGRQVRDLSRKRMQLVQCRTAQILAIENLFSRQTGGQMQGERVKRLDEAQVSGFGFAPDVTLAMQANLAVMQTLQEEIEIIEKRLMERVKLHPDYALLNSVPGIGPVLATTIMLETGTISRFAEVGNFSSYCRCVDSRRESNRRKKGEGNTKNGNKYLAWAFVEAANFAIRSCPEARRFYERKKRARNRIVAIKALAHKLARACYHMLREHKPFEIARCFG

SEQ ID NO: 250602 - protein, 455 aa, unidentified
MAHKGKKTKPTPEDLPLVHPHAAGIDVGAEEHWVCVPADRDVQPIQKFSAFTCDLYRLTDWLTTCRITTVVMESTGVYWIPLFQILEARGFAVALVNARHVKNVPGRPKTDRFDCRWLQKLHSYGLLAPSFRPPEHICQLRSLLRHRDNLLQMMVKHIQHMQKALDQMNLHLHHVISDVTGVTGMRILRAIVAGERDPHTLAQYRDYRIKSSLETIAKALEGDYRSEHLFTLTQSLALYDFTQQQIADCDQEIERVLNTFEALVDPATHPLPPPTTTHRQPQRNEPAFDLRTHLYRITGVDLTQVPGLQAPTIHVILAEVGLNRHKWPTEKHFASWLGLCPDNQISGGKVLATGSRRVQNRASRALRMAAQSLRTSPSYLGAFFRRMRSKLGPAKATTATAHKLAKIIYHMLKEHTPYRERSAKDYLHKDQERKIQQLRKQAKALGFTLVPQTSP

SEQ ID NO: 250603 - protein, 356 aa, unidentified
MSRPKHAVMPYQKDIVLTVDYHKKNLEIRQLHRATGEERTFRRPTTRQDIEAVVREARAEAEACGGSVVWIMESTTGWARVKDLIGGGAQFLLCNVLQMPRTPKAHRKKTDRIDTARIQREYLNGEMPLAYQPPVELRQLRRLTAQREDLVARRTHLRNQVSQYLSHETWESTSGLWSSKGLARLGKLAAAEGTDGFVLRLKLQELEQIQEQLKEVKERITEAYAASSMAQKVDQIKGVAPVAAVSILARIGPVERFRNAEALVANAGLCPGVHQSDDTRRNGRIGGAGTDKALRHYIIEATVWARQIPRYRQAYERTLRRRGTKVARLVVGRMLLRSIYKMLKHGVPFDPSARAA

SEQ ID NO: 250604 - protein, 319 aa, unidentified
MNMISQNQIIGIDVSRDWLDIHCLPDGHRLRIANAAQGHEQLAEIARDRRALVCFEATGGQEWQLWATLDAAGIASRQLPPAQIKAFAMSRGTRAKTDQIDAELIARFMLFRPDAGRSLPAQKLRHLRALTGKRGQLVEMRKRLLVQIKARLKQGLDEPLEDMDDALRILLTAQIAELESQIERLIAADKTLAETARILRSVPGIGPVASTMLIAEMPELGQISGEQAAALTGLAPIAHDSGALRGRRAIGGGRRLLRHVLFQAALVASYHNPVLRPFADRLRAAGKPHKLVVTAVARKLVTIANALCKSRQNWAPPAT

SEQ ID NO: 250605 - protein, 345 aa, unidentified
METMYYIGLDVHKKTIDYCVKDGSGRIYAAGSIRATRLELDMWMKTLPRPWTAAMEATIFTAWIYDHLQPHAAAVKVAHPLMLRAIAVAKKKNDRIDAKKIADCLRCDFLPECYMASTEIRERRRTLRYRNLLVRQAVQMKNKIAVLLMEAGVSYNKQKLHKVGYFRELLATNQDIDEGLKPLLRLCRETVVRLGKTESALVRSLQRDSLLVERVERLMTIPAVGPITALTWALEVGDVQRFSSIKKAISYCGLCGAERSSANIHQRTPLSKQRNKHLQTVLIEAAKMAPRNSPELAMVYEQEKQKGNANRATLAVARKMVAYLVAVDRRQNGFLVVENKNRTAA

SEQ ID NO: 250606 - protein, 358 aa, unidentified
MRMVVYVGIDVHKKYCQAALMNDNGKLERELRFDNTTEGAKSLVNLAKSIDPEIKAVLEPSANFWIRIYDQLEDESVEVKLSNPLRTKAIAEARIKTDRIDAKTLATLLRGDLVAESYVPNHKNRERRAIIRHKASLMHMRVEIKNRIHALLDKHELTHSYSDLFGKEGLEWLRNIQLPTIDHQILQSNIQILETITTEIDNADIQIAKDAVNENQAKLLMSMPGVDYYAAMILLSEIGDVKRFPTPDKLASWVGLTPQVHQSGETNWTGHITRKGSKRARWILGQCAQSARQHDPRMRNFYERIERKHGSSKAIVAVAHKMVTIMHVMLTRNEPYRGQNIQLTEKKHKRLNNIANSA

SEQ ID NO: 250607 - protein, 420 aa, unidentified
MGRLKIVYPVCCGMDVHRDFLIACIAATNAQGVTEYQSRRFSTYTGSLRELRDWLLANDCKDVCMESTGKYWFPVHNILEESCHVVVSHPKFVKAIKGKKTDKKDAQWIADLFKHDLVRGSFIPPKDIRQLRDLCRYWVKLSSYMTGEKNRAQNCLTVCNFKLDDVFSNVFGKSASAITTQLLEHPGEQFDVAPFVDGRCKTPIAQIQEAVDGIFTYEQAEKLKIIRGHMDSLERHKAELESLILEIAQNYLPQIELLLTVPGIHDAFTAIRILAEIGADMTVFDTSKHLCSWAGLTPQNAESAGKKKTTRIGKSGAYLKPLLIQVALAASRGEKHPEIYGKKQALQKRRGKKKAIVAIARRLLTAIYHILSKNEPYNPAAYIQEDKNPMARQISQEKAFEMLARMGFIVSNPSPLSSSG

SEQ ID NO: 250608 - protein, 347 aa, unidentified
MQTIATIGLDIAKSVFQVHGVDAAGQAIIRRQLKRRYVLAFFQKLPPCLVGIEACASSHHWSRELKALGHTVRLMPPAYVKPYVKRQKNDAADAEAICEAVTRVNMRFVPTKTAEQQSCLMLHRTRQLFIRQQTSVINAIRAHLAEFGIVAPVGRNGVDELLDVVADPSDKRVPEVARMCLAALGAQLHRIKEQILAFDRMITAWHRSNEVSRRLDAVPGVGPMLATALVASIADPKAFRSGRNFSAWIGLVPKQHSSGGKDRLGSISKQGDRYLRSLFTAGALAVIRYAKINGAKHRPWLTALLARRPTKVAAIALANKIARMVWAMMARGERYKEPVALAAQLAA

SEQ ID NO: 250609 - protein, 416 aa, unidentified
MDLSLKKYEVKEMEEIYVGIDASKDTFEVSIKDWRKNLLVKPRSYGQSKEDMEKFLELVETTRRTMGAQTLIGMEATGIYHLPLYNELARIGYRVRIFNALELVKYHKGRIRKTKTDKIDSGVIADALILEGYKPPKEDISENITTLREYCRVRERLVYKLSVCKVQATRDLDTILRGYDKLFDDTFCKTSKLILKKCFRHGRIKMPVEREVTVLLNRYMNKSRAEEKARKICLTFQNALRVDHLIAPSIHELDLLIAQMEMLEKQIKNTEDEIEKIFSTTKSKITTIPGIGTITGAIILSEIGNIRNFESAKQLVAYAGLDPIVKESGKSKASSTNISKRGSPALREALYLAAFGSLQHNPVSKAIYERMKSKDKHFKVALCAVARKLLHIIFSVLKNDRDFYVPSYISSPTYTT

SEQ ID NO: 250610 - protein, 418 aa, unidentified
MTSIKTKKVTKINDKTVIATLDIGKNIQYGYFRAPNGNDVKPFAFYNSKKSYNEFWQKLCQFKDNERLEQIVIGFESTGPYAEPLFHFLRKKPVTLVQVNPVHTKRVKELTGNSPNKTDNKDPRVIADVISLGHALTLVVPEGPAAELRRLTQARERAITDRTAIINQLQHLIFVIFPEFLKVLKIATKTARYFIKHFTTPEKIFTLGLDSVGQIVKKVSRGKLGLDRAKQLHEAAGNSIGISEGKQSIVFEIEHLMGRIEAEDQFIDRLEKQMRVYLQQIPYSQNILSIKGLGEVTVAGLIGEVADFNKFDTISEVMKLAGLDLYEISSGNHRGQRRISKRGRPLMRKLLFFAAINAVKSKGIMHQKYHQMLDRGQLKMKALVAISRKLLGLIFAIVRDNTKYVENYSDNYHYKLAA

SEQ ID NO: 250611 - protein, 372 aa, unidentified
MAQTTAAPIARVGVDLAKNVIQVHAVDAAGRRVVARSIRREQFLNWCVQQLPQGCLVAMEACSGAHAWARRLRAAGLDARLIAANFVSPYRMEGRSGKNDMTDAAAVCEAASRPTMRFVPVKTAEQQGVMSLHRVREGMKEERTACINRIRGVLAEYALVFGKSPKVLRAVLADVIEDASNELTATARRVVQLAFEHWRELDEHLQWCDRQIGAHVRSSPAARRAAKVTGIGEVGASALTAGVADFTQFSSAHQFGAWLGLVPRQNSSGGKASLGRITKRGDDYLRTLLIQGAKSAVMSAAKRDDPTSRWLQQLVARVGWQKACVAMANKNARILWAVMTREQDFDARHVSVKPPGRCSQPATAHQRETCVA

SEQ ID NO: 250612 - protein, 328 aa, unidentified
MFYLGMDVAKAKLDCCLLLDEASAKRKTKVVNNTKSGIADLLAWIAKQQVSSQQLHVVMEATGVYHEQAALALADAGITVSIVNPAQVKDFGRGLAVRTKTDGVDSFVLARYGALLKPAAWTPPAPEARVLQALLARREAVAQDLQRERNRQEKANATDTPERIRQSLADSIEFLVKQLAGLQQDIDLHIDRHPNLKDDMALLQSIPAVGPQVGGNLLSVMHSHDFGSAEQLAAYLGLVPVERQSGSSVLGRARLSKAGPARIRAVLYMAAIVATRYNPHVKAVYERLIARGKSKMSALGAAMRKLVHLCFGVLKTRKPYQHNYAKIA

SEQ ID NO: 250613 - protein, 379 aa, unidentified
MLPITVLSARSKPLGSHHREGSDMHDINPAEVIIGVDTHKNIHAAVVINELGARLGMMTIPASRKGYQQLEAWARSFGPVRAFGIEGTGSYGAGLSRSLEARGHTVIEVNRPNRQLRHQHGKSDPLDAEGAARAVLGGQAVARPKAGTSTVEMIRLLKIARDTAVKSRTQAMVTLKNVIVSAPAALREQLDGIIGKMALIRHLAALRPGALTSTTASAKTALRSIAQRWLALDAEIKVHDRHLNTLTSACAPDLMDAHGISTGTVAEMLILIGDNPERIRSEAAFAKLCGVCPIPASSGKTTRHRLNRGGNRQANAALYRVAIVRMRSHQPTLDYVRKRTADGKTKREIIRCLKRFIAREIFGHLCGTKNHAMAPSPAV

SEQ ID NO: 250614 - protein, 421 aa, unidentified
MTPPNEVVWAGIDTHTDTHTIALLDERGRPLGAETFTADPDGYDRLIGMLPEPRVVAAVGMEGTNSFGAALARRLTAAGYEVREVLRPRRSVRRRDGRSDPIDAVAAARSVMAGDGTSLPKISDGWVEALRHLNAQRARLVSAMTAISNSTNGLLVTAPESVRERYRGLRGETRMNRLAECRPAGGLVEHSVLAALKSAAKAWKALKRQAGLLEERMRLILEEHARPLLDMYCAGTVIAATLAIVAGDNPERIRSEAAFAKLCGVCPIPASSGRTNRHRLNKGGNRQGNMALHRIAIVRLRYHKPTRDYMAKKTREGKGKLEIIRCVKRFIAREAYRALISIRNGEAGRGTPAERGAKLRELRVSRNITQQQIGEALCVPSSRISEIERGARDLPELEQRAIQWIHSTTNPKQHTQTLDNV

SEQ ID NO: 250615 - protein, 316 aa, unidentified
MICGVDVSSKSLDARIGQDGPTASFSNDPKGITALAEFCQDHKVHLVAMEATGGYEKKPFALLWARGIQVAILNPRAVRHFAQAMGILEKTDRIDAGVIAWFAETKGCVAVSPASAEQQQLKAMVTRLRQLTALHAQQRNQRLLVTDKVVLKSFRPLLALLKSQMRDLELAIAQLIAADALWHELDQSFRSIKGVADRTVARLMAEMPEIGTVSNKKISKLAGLAPLAADSGKSQGKRSIRGGRHTIREILFVVASGVSRHNPDFLAFQKRLAAAGKAKKVIRIALAHKLLVRLNAKARETRRKLTEAPPAPVLVS

SEQ ID NO: 250616 - protein, 443 aa, unidentified
MSAYVLPQEPEFAALVGLDWGDRHHHWALHSVDARPPTETGRLENTPEAIQLWAAQLSHRFGGRPIAVALEQQRGAIVYMLSRHAHLVLFAVPPGMSAAYRQVFRPSGAKNDPGDTALLLELLTCHRDRLYRYDPDTPDTRLLQLLVQQRRQTIDDKTAVVLRLTDCLKQYFPHVLRWFASVDSPLVADLLERWLTLDQLQHANPAKLRRFLQQHNCRQPERIQQQIDDIYAAIPASVDEVILEACSRRALGLVKRLRALWPTIQELEARIHELTVRHPDAPIFASLPGAGAATVPRLIAAFGTRRDRFQSAYQVQCFAGIAPVQKASGKTCVIAFRSACPKFLRQTFHEFAGQSIRFSAWAKAFYEQRRARGVPHHSAVRALAAKWIRIVFRCWQDGQPYDEQRYLNSLRRRGSLLGPAFGQPTQAKWTLVAGFQKPSIDFS

SEQ ID NO: 250617 - protein, 319 aa, unidentified
MSINHFTNSNEPTFIGIDVAKDSLVVFVSSWQEPVSFGNNSSAFAEIIAICRQFQTERICLEATGGYQTPLLLALAKAGLPVALVNPKQVRHFAKGVGRLAKTDALDAQVLALFAAQVKPRLTMIPTDEQLALSALVRRREQILDMLQAEQNRMETAHHSIHLSLAKNIAWFDKQLQEIDADLDQTLKSSTLWEKAQLLETIPGLARVSSLALLAELPELGTISNKEIAALVGVAPFSQSSGNWRGRERIQQGREFVRRKLYMTAFNAIRYNARLKTFYERLRLDGKPFKVALVAVMRKLLCLCNSMLRYQKSWQPDLT

SEQ ID NO: 250618 - protein, 353 aa, unidentified
MRCQDGKPLTIIQTLITGVKVMIFVGIDVGCKELVFVIRHQGKSSKAEIVTNTFKGHQAIIKKLKKLSDSVRICVEATGVYHLDLVLALSRAHLDVMVINPKASHNFAKVLMKRTKTDNVDAEILAQYAERMDFTPWQCPSNKALEIRACSRHLEELSYQCTRLRNQIHAMKSNGTTPVYLLKDNQQALASLEKRIVSIRNKAVQVIGQDELIKMRYELLLSIKGIAQKSAVQILGELLILPKDMSARQWVAHTGLDPRQFSSGSSVNKKPHLSKAGNQHLRRALFMPALSGVHWEGNVKAYYMHLVNDNGLKKIQAVCAVMRKLLHAIYGMFKVGKPFDGTRFYKFPSGKAA

SEQ ID NO: 250619 - protein, 354 aa, unidentified
MTLVYDPRKFDIFIGIDAHKTSFYFAIFDKNDIVCSKKIPSDPENLMNYLRKNFPKQKAICAYEAGPTGFSLHDALTSNRIPCLVVPPTSIAQKPNEKTKNDRLDATKLAKMLKNGELHSVHVPVGPYRQLRSIIKSYELYSHSRVDTKRRIKSLLLSAGLPVPDDTVKPNWTNPYLQYLKTVPCQPYIRERLDLLLKDMTYARQQILATIQQINQCLDGHPLLSRQVQHLRSIRGIGLITAACLLGRMGDPKELQNCRKLGAFTGIVPSEHSSGQKISQGSITRIGDPFLRSLLVEASWKAIKNNVPLRKFFDRIAAKHHRNFAKRKAIVAVARKLTLYIYAVLKQDRPFMAY

SEQ ID NO: 250620 - protein, 326 aa, unidentified
MTVRPSTDNVFIGIDVGKTTLDVQWHRGDSAQYANRPDAIAELVRRLLAGPKVTRIAIEPTGGYEKPLVEALRQAKLPVELVHTSRFKAYRTMVGVKAKSDTSDARLLAAYAAAPDDVRGRKADRVELPQDALREELRELASRRDQLKHMIHAESCRLGITRHATLRQSILAHLETLRSEDKQVLQMMHALVRQRLDLRRDQKLLQTVKGLGVVSALTLIAAVPELGHLDNKQAAALIGVAPFVHKSGTLTAPARIHGGRAAVRRILYMAAVTASRYNPVLKSFYERLIAKGKPAKLALVALMRRLVVFANAVLRSGQPWKGAIPT

SEQ ID NO: 250621 - protein, 424 aa, unidentified
MKVTYQTCCGVDVHKSFLVATIVKTTGGIEPSYQKKRFSTFNSSILEFKQWLLDNDCHDVCMEFTGKYWVPVFNLLEDEINVVIANPKWVKAVKGNKDDTKDSKWIGDLFRLGLVKGSYIPCKIVRILREYTRYRYKLVSCRSSEKNRYQNTLTVCNVALDSVVSDIFGKSSMSIIDYLLEQSGTSINHEEIASKLLRSLKSKEDSVIESIEGYQMTDSQKYRMHLVRAHMDYITAAINDVDSEIESLIASDPDYENAIQFLSTIPGVKRDSAITIISEISIDMSQFSSSKRLCCWAGLTPGSNESAGKKKSVRITRAGVYLKPALIQCAHAAVKSDKSPYRKKKYESLAKRRDKKRAIIAIARMILTAIYQMLSTGEVWNPSDLYKIDMPIPLVEKQKAKAIKQAKPCLPICNTVNHKWKILL

SEQ ID NO: 250622 - protein, 408 aa, unidentified
MKTLQKRCAGLDVHKKEVVACLRLVIRGKATYEVRRFPTTTRGLLELADWLEQAGCTHVAMEATGVYWKPVWHMLEGRFQQILANAAHIKGVPGRKSDMNDATWISDLLAHGLIRASFVPPQPIQELRDLTRTRKQLTREIVQHTQRIQAVLEEANVKLSSVITDILGLSGRRILKAIVAGETDPVRLSELGGTRLAATRSELADALHGRVHSHHCFLIGQHLKTIEQLEETITAFDARIEAALDLFRDAVERLKDVPGLSETSAQILIAEIGMDMKQFPTAGHLLSWAGLVPRLDESAGKRRSTRVRKGAPWLKPVLVQCAHAAARKKNSYFEAQYLRLKARRGPKKAVVAVAASILTTAYHMLADGTCYQDLGADHFARRNPRRVVAKLASRIRSLGYEVVIKAAA

SEQ ID NO: 250623 - protein, 402 aa, unidentified
MHYLGIDVSKASHQCIVLDAQGEALGKSFTIQSSKDDFANLVKKLSDLNIPKTDITAGLEATGNLWENIYIYLKEQGFNIILLNPYQTNKFHQAMLKKAKTDSIDALVIAGLLRSGCAASSYIPDEEIQSLRDLIRLKDGYLKDTKNYKRKAYSLLNLVFPEFLNLVKDPFNISCTEILSKYQTASDFKNIRPKDLLKIARGHQGNNYDEAWAGKVIQAAKDSIYSGKASKARGIVLKSLVLNIKNLKEQISELDNEIQNILKTDDDSSNNDIDNLLTIPGVGPKTIAVFIAEVGDITRFASCKDFIGFVGLYPKIEQSGSSLNRAKLTTKGSRILKHALYMASVASLIHNPYLKSVYNNKLSQGKCAKQALIVVARKIACIMYSMLKNNAAYNPGRVAIAV

SEQ ID NO: 250624 - protein, 343 aa, unidentified
MNSTTIAVDVAKSVFEVAVSEQPGEVRERQRLSRERFRRFLAERPPATVLMEACGSAHHWARQAQAHGHRAVLVPPHVVRPYVLRNKTDRTDTKGLLEAFRNEDVRPVPVKSETQQALAALHRLRSMWLAARTVRINTVRGLLREFGLIMPIGAHHVVPHVATLLEDADSAVPGLLRPALAAAATDIREIEARLRAIEHHLESVASENVVVGQLRTIPGIGLLTATALVATVGDVARFPSGRHFASYLGLTPREASTALRRRLGAISKRGDTYLRMLLIHGARSVLCHAKTKTAPPPDRLRAWALQLERLRGHNKAAVALANKLARIVWAVWRHGQDYRMPVG

SEQ ID NO: 250625 - protein, 344 aa, unidentified
MDHFAGLDVSVKETSVCIVDDTGKIVREVKVASEPEALLQILGNPAYRFKRIGLEAGPLSQWLFSGLAEAGLSVICVETRHMRAVLKAQINKTDRNDARGMAQMMRAGIYRPVHVKTLRSQKLRMLLTHRKLLQSKAIAIENDLRGTLRNFGLKVGMAGAVKFEARIRELVENLPDLATLVEPLLIVRRTLREQFCILHRRLLAIVRDDEVCRRLMTTPGVGPVVSLTYRATVDVPARFRRSKSVGAVFGLTCAKYQSGEVDWSGRISRCGDEMMRVMLYEAAQAMMRSKKWSWLKAWAMQIARRRGMKKAIVALARRLAVIMHRIWVDGTEFRWTREQAATAA

SEQ ID NO: 250626 - protein, 410 aa, unidentified
MTVKRYYMGVDWGDRLHQVYVGDQEGKKVKEIKVPETVEGLTEFGRWLDEKRAEGFELWAAIEKPAGRIVDFLLDHGVEVYPVNPKAVDRVRDRYRMSGSKSDAFDAYVLAEFLRTDQAHLRVLRPSSEKAQELKMLCRDQRRVGRHKTRLLHQLTTTLKEYYVRPLETFEDIETEVALDFLTRYPTPAHLQALKPKEFKRFATKQHHLSQQRCEELWEKLSQPQLKVPEHVVRAKAQLLEVLIDQLRAAIKAVNTYNHKVESFFASSPAAQIAKTLPGGKSGTLVAAIWAELGDAQGRWESFRHLQAEAGAVPVTKASGKSRVVQFRFACNKHLRYAMYWFSFVSLNHSEWAKLYYRQQRAQGHTHPEALRALGAKWLKIIFVMWRDHKPYDENYHLANIARQRMRQAA

SEQ ID NO: 250627 - protein, 348 aa, unidentified
MRFYNQPHAYYCGVDLHARSMFTHVLDHAGNTVFAKDLAADPHIFLDAVAPFRQGLVVGCECMFAWYWLADLCEDESIPFTLGHALYMKAIHGGKAKNDRIDAAKIAGLLRGGMFPMAYVYPRDKRETRDLLRRRCFFVSQRSQLITHVVNTNSQYNLRALTVKLCYPRNRTEDFAERFKHPATQRSIQADLKLIDAFEAEIDDIERVVLKTAKVDNPVTLQLLRTIPGIGKILSLVMLYEIDKAERFPEVGNFLSYSRLVRCKHESAGKTKGSGGKKIGNAHLKWAFSEAACLMLRAMPEAKKWMQRQEKKRGKKKALSVLEAKIGRTVYHLWRKQQPFDPKRFFCQ

SEQ ID NO: 250628 - protein, 334 aa, unidentified
MALYCGIDLHARSSYVAIVDEQRKRIFKRNLQNDPKLILSFLAPYTQELVGIVVESTFNWYWLVDALMDDGYTVHLANPCAIKQYAGLKYVDDKHDAFWLADLLSLGILEEGYIYPKEQRPVRDLLRKRGLLVRLRTSLLLSLQNTVVNTFGIKIPAHRIKGKEDHVTTYDFGNESLALMGQVSKTSIDMLSRQIEAIESHVYQHSRLAAAYNPLLSLPGVGRILGTTILLETGAVGRFPAVGNYVSYCRKAETVWTSSDRVKGKGNRKNGNRYLSWAFSEAAEHAHRFDTASRNFYNRKLHERNSPVAHNALANKLARAAYYIMRPRVRDVVD

SEQ ID NO: 250629 - protein, 495 aa, unidentified
MGHARARKIPAQLVEDEEYQLRHERVAGIDIAKAKADVCTRLPPQRDGGRRASRVEEVPATAKAILALAVRLIADGAELVVMESTSDYWRMWYYLLEGAGLSVQLVNPAHARQLAGRPKTDRLDAQWLARLAEMGLLRPSFVPPPEIRALRDLTRTRLQLVRDRSREWQRLEKLLEGALVKLSSVVHSLAKVQSARAILEAIAAGERDPKALAALAHPNVKGGRAAVEEALGGMALGDHHPMLIRVHLDHITLLDRSVAAVEDEIEAALDAIPAAWGTDPGGETGPDAGRGPDPAVLPAAERLAEIPGVSPALARAIIAETGLDMTRFQTADHLVSWAGLAPVARQSGPRSRKPKKGQGDAYLRGYCTQAANGAARTDTFPGERLRRLSRRLDGNRARCAVARSILVIVWHLLASPDDRFADLGPGWHQRKTDTDRRTRSLMNQLRALHPDADVNEPAPRPPPRRRRQHHHRPGNCRLKPKPPLTRPAAQSASGR

SEQ ID NO: 250630 - protein, 407 aa, unidentified
MSRDYMGVDWADTEHAIWVEDERGAKVAALTIPHTAGGLSEFGRWLYERRAQGIEVWAAIERPEGRIVDFLLDHGVVVYPVNPKALDRARDRFRMSGAKSDPFDARVLAAFLRTDHAHLRPLLPNSEAAQELKLLTRDYQRLVRQQTRLVNQLTATLKEYYPRPLEVLDLTTPLAQAFLQAYPAPAALAALTPKTWHRWARAQRLSEAHSQEMWATLSQPQLPVPSHVVRAKARLVEALVAQLATTVRLVQEYREAVEGFFASLPAAHWARTLPAGKSGTTVPTLWGELGDAPGRWASFRHLQGQAGAVPVTERSGKLEVVKFRFACNTHLRYAIHQVAWLSLQRSEWARAYYTQYRKRGHGHHAALRALGAKWLKIIFVMWSRQVPYDEQHHLATMARQQLRRAAA

SEQ ID NO: 250631 - protein, 415 aa, unidentified
MEPMHQRVAGIDVHRMKPVVTILIGQEDGAVSSETREFGGFKRDMRALVAWLQTHRIQQVVMESTGIYWKSVFAHLEAAGIAALVVNAFHVKNVPGRKTDVGDSEWLAQLARFGLLRGSFIPPKDLRELRIVSRYRRKLTGMLAGEKNRLHKLLDDAGIKLGGVVADIDGVCASKMVEGLIAGGKPDELAALGRGKVRATTDILEAAMDGELSARHRLVLDMASDHLRYLEGKLAALDRYLLAAMQPYAWAWRLLQTIPGIDAISAAMILIEIGDDPHRFGSPARLASWSALCPGNNESAGKRKSGKTRHGNPIVRYLLCEAANAARRTKTVFRAKYESLVIRRGHKKTIIALAHKLVRTIFCVLVRRKPYRDSTVDYEAASVAKNAPRWIRALKKYGYWPQVAAPSAPIVATAS

SEQ ID NO: 250632 - protein, 309 aa, unidentified
MEIVVGIDVSKERLDVAILPQEEVFAVGNDHAGIDELVERLKGIGVDAIALEATGGFEMLAVAGLSAAGLTVLVVNPAQVRAYAHAIGRRAKTDPIDAAVIAAFVLATKPEIRPLRDAETQALSELVARRRQIVQMVVAEENRLRMALAKQAQKSIKRLLTALRRELESLDADLDSHIRKSPVWRVREALLTSVPGVGPTTARTLLAELPELGSLDRRQIASLAGLAPWTRQSGKWKGKSFIGGGRSKVRAVLFMAALVASRYNPDVKAFRDRLVAAGKPKIVATVATMRKLLTILNAIIRDGRPWQNA

SEQ ID NO: 250633 - protein, 377 aa, unidentified
MYRILKIGMDVHSTNYTLCAMEPVIGEEDRVFATIKVTPDYKNILMFIENLKMKLGLDNKYDIQCGYEAGCLGYSLYNQLTAAGVKCVILAPTTMLTQQGVRIKTDARDAHMIAQCLSYGGYHAVYIPTEEDDSVKEYLRMRNDHKLSLKKIKQQINAFCLRHGFQYPGTKWTQAHLKWIKKLEVKNMYRETLDEYIASYEEQESKIERFDTRIEEIAGQEKYREKVKRLGCFLGIKTHTALSLIVETGDFERFAKGNTYAAYLGLAPGENSSSDNINRTGITKAGNSHLRQLLIESAGGICKGAVGHKSKDLRARQNGNSAEVIAYADKANTRLRSRYYKFIRHGKKRNVAVAAIARELACFVWGMMTDHIEMKSA

SEQ ID NO: 250634 - protein, 411 aa, unidentified
METIVRRCAGLDVHKESVVACARVIDDNGELQLSTQTFGTTMSDLLVLGDWLASHGVTLVGMESTGVFWKPVYMLLETEFECWLLNAQHLRNVPGRKTDVADAAWIAQLVAYGLVRPSFVPPKEIRELREVTRYRKALIEERTREAQRLHKIIEGSGIKLANVATDILGVSGRAMLNALIGGTHDPEILAELARGRLRKKLPMLRKALSGWFSPTHRLLVGELLAHLEYIDESIERLSNDVATMIAPFARAIDLLDTIPGVNLRSAEVIISEIGVEMGRFGSAGRLASWAGMCPGNNESAGKHFSGKTRKGSKWLRIALIESAKAASRTKDSYFAAQYARIKGRHGHKKATVAVAHSILVVAYHLLERGEPYNELGGDYFIERQQKDAYQRRLVKQLERMGYEVALTKHAA

SEQ ID NO: 250635 - protein, 326 aa, unidentified
MPLRAQLPAGQGPCIGVDVGSKELAAAPADAVTLDTPVTRMANTEAAITRWLRTLPPGCRIGMEATGRYHQRLAELAWRAGHVVYVFNPAKVAKYLGALRSRAKTDVLDARGIARYVLNESAGCHPYVPPSPFHAQLARLIQRRHQIIKHRDSLRMSLVDLPGCQAATKALKDAFKRLLAAVDAQIEATFRSDALLQARRRRLRSILGFGPLVSAAVTARLSRTPYANSDAVVAAFGMDLRVRDSGQFRGQRKLSKQGNAEERRLIYMAAVSACNNPLFRALRDKLLAKGRTAIQAHCTIARKLLRIAFAVWTSDRPFNPSLVGTG

SEQ ID NO: 250636 - protein, 410 aa, unidentified
MLKIVYPVCCGIDVHKTFVVACIASTNAKGVTTYQSKRFSTYTKNLRELAEWLNANNCKDVCMESTGKYWHPVWNVLELSCRPVLAHPKYLKAIRGKKTDKKDAKWIAEVFKHDLVSGSFIPPVEIRELRDLLRYRAKLTNYMTSEKNRAQNCLTTSNIQLDHAFSDVFGKSATAILNHLLEHPDEKNFDVEPFVDRRCKTPIEEIQLAIDGNMSHEQAEKLKIIRSHMDSLELCKSNLESAILTLAEPFLPQVNLVSSVPGIRDFSAVSVIAEIGTDMSVFLSAKHLCSWAGLAPQCNESGGKKKSSRVSRAGAYIKPLLIQCANAAVKSSKHPEIKNRYQSIKKRRGHKKAIVAIARMLLNAIFHILKKSEPYNSELYRKSDITPIDREAQAIQLLEKSGYSVTIVPA

SEQ ID NO: 250637 - protein, 314 aa, unidentified
METAPTYAGVDVAKDRLDVVLRPSGEYLRAANDERGIRGLVRRLSGEGIALAVVEATGGLERPLVASLGAAGLPVAVVNPRQVRDFAKAVGRLAKTDRIDASVLARLAEAVRPEPRPLSDERAAELSALVGRRRQLLAMVTAEGNRLTRAPKALRRGLKAHLKWLRKEVERTETDLDRVVREDAALREKDELLRSVPGVGPALSTTLLAELPELEYLDRKRLAALVGVASMNRDSGTLRGLRTVWGGRSSVRATLYMAALVATRFNPAIRAFYERLSDRGKPKKVALTACMRKLLTVMAAVLRNRTPWRGEAPA

SEQ ID NO: 250638 - protein, 358 aa, unidentified
MNNVKSSRLDFTGQPIYIGLDVHKKSWSVSIFSEQIEHKTFTQPPEVDKLVNYLRRTFPGALYHSVYEAGYSGFWIHDRLKEKGIDCTVVNPADVPTKDKERVTKRDRIDCRKLARGLRSGEIEGIYVPSRTKLEDRSLVRTRQSMVRKQTRCKNQIKSMLLFYGIHLSEELTLSHWSRRFLGWIENIRMERASGDMALRVHLEELKHLRQLIASLNRAILLLARMEEYRVPVALLKTIPGISTLTAMTLLTELYEITRFPSLDELSSYVGLIPETRGSGEKEYTGEITGRRHSQLRCLLIEASWVAVRKDPALLMAFHQYCKRMRKTKAIVKIARKLLNRIRYVLKNRMEYVPAVVQ

SEQ ID NO: 250639 - protein, 425 aa, unidentified
MNYKQNEKINQVKESTLVVGIDIGSTKQYARAFDWRGIELGKVFTFSNSREGFEAFKAWMQHLQDKYRKSDVIVGIEPTGHYWFDLGAYLEDEGILLVMVNPYAVKQTKELDDNSQSKNDRKDPKVIAKLVTEGRYSAPYTPDGVYADLRIMVANRKRLIREMTQIKNRFARWFAIYFPEYTDVFGDYEAQSSMLLLKKVCTPEAIVELGAEKINKIWRDAKLRAVGMKRATTLCETAKRSIGLKKGSSAARYEMKLLLEDYEYKKAQLDAVMEEIEKLCRKIPESEQMLAIKGIGVITVAGFLAEVGDVRRFESPRQIQKLAGLSLRENSSGKHKGQTTISKRGRSKLRAVLFNAAIPLIAKNPEFKSLHEYYTTRANNPLKKKQSVIVISCKLIRVFYAILANGVTYDPQKMLSDIHRQPQAA

SEQ ID NO: 250640 - protein, 413 aa, unidentified
MAAVLYCGVDVALRMNRARFIDSEGEECRKRLSFPNDANGATTFLRELLQTLDRGDFNEVRIGMEATNFLAWHLAMLLTQYQGLAASHLKVFMFNPKVVKAFKDNYPDRRKDDWFDARVIADRVRFGHPLPRPFDPDDRYLPLQRLTRHRFHLVKQLVREKNYFLSYLFLKCSTLAQGGPLSSPFCVSATDLVTEFHSPEEIAQTPLEELAHFLAERSRNKIAKPDEVAREYQKAARHAYRLPEKLKDPVNRIMASTLRTIRHLQKEVKMADKEITHEMGGLNTPLITISGVGPVFAAGILGEVGDIRNFASDSKVAKFAGLTWKRSQSGDFEGDDSNLSRTGNPYLRYYLTEAANRVRMHDSEYKAYYKRKYDEAKIHKHKRALVLTARKLVRLVFALLRENRPYTKPEKRS

SEQ ID NO: 250641 - protein, 361 aa, unidentified
MIVIGTDTHKATHTGGAVDAATGRALAELTARARTGGFEELLMWARTLAPERVWAIEDCRQVSGAFERFLVKRGERTVRIAPKHMAGARKSARERGKSDSIDAFAIARAALREGIETLPTAHLDERALEIRLLCDHREDLVSDRSDDQQRLRWHLHDLWPELEIPAGALDRDKWLAKVSARLARAEQGARVRIARELVRQIKERTRKVRALERELEQLVCAYAPQLLAERGCGPLTAAKLVGEIAGAERFGSDAKLARAGGVAPIPASSGATNRHRLDRGGNRQLNAALHRLAVNKGNHCPESAAYLARKQAEGKSRKEALRCFKRFLARRAWKLLRAPSSTDPDPLSTKVEQPISVVALT

SEQ ID NO: 250642 - protein, 338 aa, unidentified
MAIVTVGIDLAKNVFAVHGVDVAGKPALVRPSVARGKLLELIATLPPCLVGMEACSGAHYWARLFTAHGHTVRLIAPKFVVPYRLSGKRGKNDAADAAAICEAVTRPNMRFVPGKSVQQQCELLVHRARQGFVQQRTATLNRIRGLLSELGIVLPLKAATVRREALLQLEDLPGWANTVVGDLLSEVTRLDERIAQYDRHIEQIARHSTPARQLMQLPGVGATTATALVAMIGRGQEFKCGRQLSAWLGLVPGQYSSGGKQRLGRITKAGDPYLRMLLILGARSVLQSAGTKTDPVSRWAVQLAARVGYWKAIVAIAAKNARMCWAVLARAESFKLPA

SEQ ID NO: 250643 - protein, 464 aa, unidentified
MTDKKPWRNRKERKEWGRRLQSEDPGLEVVHPHAAGIDVGNGMHYVAVRPDRDPQPVRRFECFTADLHCLAEWLQRCEVKTVAMQSTGVYWIPIYEILEERGIQVYLVNARHTKNLPGRKSDVQESQWLLKLHTYGLLNNSFQPPSEIRVLRTYWRQRGEHVRGAATCVQRMQKSLTQMNVQLANVISDVSGLTGQTIVRSIVAGEHDPRKLAELSDPRIHASREEVAKSLEGNWRPELIFVLQQEVVMYDTYQQRIAECDQHLQKHLASFADTIPLRPTAEEPKRKKTKPAKNAPRFELRSELQRVTGVDLTRIDGIDVMVAQTLISEVGLDMSRWKTEAHFSSWLGLCPDNRTSGDKVLARGTRRVINRAATALRMAAVTLMRSRTYLGAQYRRLRTKLGAPKAITAMAHRLARLVYRMLKYGQRYIDKGAEYYEHRYRRQQIEFLTKKAAKLGFQITLAQP

SEQ ID NO: 250644 - protein, 424 aa, unidentified
MKVTYQTCCGVDVHKSFLVATIIKTSSSIEPSYQKRRFSTFNNSILEFKKWLLENECLYVCMESTGKYWIPVFNLLEDEINVTIANPKWVKAVKGNKDDTKDSKWIGDLFRLGLVRGSYIPCKKIRILREFTRYRYKLVSCRSSEKNRYQNALTVCNVALDSVVSDIFGKSSTSIIDYLLEQSGTSIDHEVIASKLLKRLKAKEDAVIESIEGYQMTDSQKYRMHLVRAHMDYITAAINDVDSEIESLIASDPDYENAVELLCTIPGVKYDSAITIISEIGIDMSQFCSSKRLCCWAGLTPGSNESAGKKKSVRITRAGVYLKPALVQCAHAAVKSDKSPYYKKKYESLVKRRGKKRAIIAIARMILTAIFQMLTTGETWNPCDLYKIDMPEALLEKQKQKAIKQAQKLLIREGLLPPTEPIAS

SEQ ID NO: 250645 - protein, 366 aa, unidentified
MKKISTVAIEGIQIFKDNQLTIGLDLGDRTSHYCILNEAGEVILEQELPTTTKGIEPVFSKIPRSRIALETGTHSPWISRQLAQLGHEVIVAHSRNVRLISESSRKDDRLDARTLARLARIDPTLLSPVRHRSAKAQIHLTVIRARAALVSARTALVNAARGLTKSYGARLRKCGTEQMTRELTKELKPELREALDPLLTEIESLHERIAEYDRRIEQIAKEVYPEVARLKQIKGVGPLIALTYVLTLDNPYRFRRSRDVGCFVGLRPGRRNSGMSEPQLHISKEGDRYLRTLLVQGAHYILGPFGQDSDLRRWGLKLSERGGRNAKKRAVVAVARKLAVLLHKLWVSKEVYEPLRNNRKQIAAVA

SEQ ID NO: 250646 - protein, 361 aa, unidentified
MSGTMTWVGLDVHARSTHGAAIDVMTGELTRARFGPGIDAPIAWLASLPGPVRACYEAGPTGFGLYRAATAQGVAMQVIAPGKTPRGPSDRVKTDRKDAELLARLLLAGSLTRVVVPPPEVEAARELTRAHDACRRDLMTARHRVSKMLLRHGRVYPKQSTWTAEHRRWLSLQRFDQAASDLVFGDLLAAVDGLSGRKAAIALQLSQLATDPAWWPTVARLRAFRGIDTLTALSIHLELGGDWQRFERASQLAAWLGLAPSLSQSGESSRQGAITKTGSMLARRLLVESAWHYSRQPRLGATLANRQQGQPAHVLAIANRAQQRLFKVNRQMKARGKPHNVVVVACARQLAGFLWAAATAD

SEQ ID NO: 250647 - protein, 341 aa, unidentified
MEQATTIGLDIAKHVFQLHGADAAGHVLFRKRITRVKLLGFLAAQTRCVVAMEACAGAHYWAREIAKLGHHVRLIAPAYVKPFIKRQKNDAADAEAICEAAQRPSMRFVPVKTEEQQANGIVFRARDLLVRQRTQCVNALRGHLMEYGYVFPKGITHVETLIALVEDLQSSLPDSVRVILKLLIDTFTALEAQIAVLDAEINQRSKSDPTARRLMTIPGVGPIASTAITALVPAAEGFPAGRDFAAWLGLTPLQKSTGGKQKLGAVSKRGERTIRRLLIIGASAVVRQASRRGAPKGSWLAQMLARKPKMLVTVALANKTARIIWALLVKGGTYRTPAAAA

SEQ ID NO: 250648 - protein, 363 aa, unidentified
MNSINYTELSSHEGTRSEFNPGKKVIKLGIDVHQGFYVVVLQEGGSNPKPAQRFRKEAFLSLAAKLKQKNGAEIHAVYEACGFGFGLQRQLAALGIACHVVCPQKLDERNKRVKTDGLDAKALCLKLDRYVEGNREALALVRVPSEEEEQLRAIHRQREQLVKTRKRLEAQGRSLMVNHGIEPVQSWWKRRTFAALAVPEWMKELLNNSQPLLLGLEEKIRALTVQLQAAASPDQPRGLGMMTSVVIDREIGNWHRFVNRRQVGSYTGLCSGEYSSGQTRLQTCVTKHGNPRLRAALVELAWRLVRFQPNYKPVVKWRLVLQKGALATGAARKKAIVAVARQLAVDLWRIRTGRINPKQIGLI

SEQ ID NO: 250649 - protein, 415 aa, unidentified
MTKIIRIGMDTSKSVFVLHGVDAAEQPILRRKLRRKQVLEFFAKLEPTKVGLEACGAAHYWARELRALGHEVVVVPPQYVKPYVKRNKNDAADAEAICEAMSRPTMRFVPVKTAEQQAALMLAGSRDGLIRRRTQLSNTIRGYAAEFGLTAAKGLDKIEPLLARIAAAALPELAKEMFATYAREYARLKVEITKIEAKLMAWHKDNELSRRLEEVPGVGPIGASLAAMKVPDPHAFGCGRDFSAWLGMTPQDHSTAGKTRLGVITRAGDEALRRVLVVGATAVIQKVKQGKGQPSPWLVALLKRKPPKLAAIALANKNARIIWKLMVSGERYNPARAAAARGEGVEVPSCTSGTPCSPPSRTLRAAAGDGPRGPSLTAAALGVTGPRQVGTEKRPSGRTKKLTLKKLENVAPAAV

SEQ ID NO: 250650 - protein, 356 aa, unidentified
MRKTDPAEIIIGIDTHKEAHAAVAINGLGARLGAMTLPVTSRGYHEMESWAQSLGPVRAFGIEGTGSYGAGLARFLQERGHNVIEVNRPNRQIRHQHGKNDPLDAENAARAVLSGQARAAPKSGTSSVEMIRHLKVARDTAVKSRTQAMVTLKTIIVNAPAALRESLDGLTGKMTLIRHLAALRPGAMTSPTASAKATLRALARRWLMLDAEIKSHDADLDALTSACAPTLKEAHGMSTGTAAEMLILVGDNPERIRSEAAFAKLCGACPIPASSGKTSRHRLNRGGHRQANAALYRVVIIRMRSHPPTLDYVRRRTAEGKGKMEIIRCLKRFVAREIFGYLCRARRDPTTVPSTS

SEQ ID NO: 250651 - protein, 364 aa, unidentified
MLYHSQQHGWFQKSATNNPRLFQKSDKIKVGLEATGHYSYNILGFLLDNDLPVYVMNPLHTNLYRKSLSLRKTKTDRVDAKTIATMLLSDVDLKSYTDTAYHNEELKSLTRYRFDKVQERAKLKQSVSRLVTILFPELEQLVSSIHGTSIYALLSEYPGAKQISEAHLTRLANILVKTSRGHYRKDKATHIRDAARTSIGSVMPAKSLELKHTIKLIQELTSEINEIEDAIRKIMDELKPPILSIPGMGFHSAAMILAEVGDFSNFNSPDKVLAYAGCSPSTYQSGKLTNCYAHMEKRGSRYLRYALYTATKYVCYWNPVFTEYLTKKQAEGKHYNVALSHATKKLVRLIYALQKSGKAYLAVT

SEQ ID NO: 250652 - protein, 329 aa, unidentified
MQNFIFIGTDVSKLTLDHGIHQGMVHQKTANNNAGFKSWLKWALGFGRKEQLWVVMEHTGYYSYQFELFLHQHQVPYTKVAALEIKRSVGLVRGKSDKVDALLISRYAWMNHDRLEPQQLSAAVMTELKDLVNLRDKLVRDRSGYKARMKEQAATRKYAKSHIQNKIQLRMIKELTTDIQEVEAAIKGLIKEDDALFNNYKLLLSIKAVGFVTAVYMLAYTDNFRKFLNSRKFACYAGLAPFEHTSGTALRGKNRVSPYANKKAKCLLNLAASVAIQHNQELKIYYRQRVSEGKSKMGTLNIISHKLVDRMFAVIKRGTPYMETLSTAA

SEQ ID NO: 250653 - protein, 349 aa, unidentified
MTIVGINPDAVIGGVDTHAEMHVAAVVNHVGGVLGIESFRTTKIGYRQLVSWLQSHGELSLVGVEGTGSYGVGLARYLARAGISVVEVDRPNRQTRHRKGKSDPVDAVAAARAALSGAASGLPKRRDGNVEAIRVLMIARRSAVDTRIETLNQLRHVVFTATPEIRSKFTGLTAISVANKASALKPRHNDPDPVRHMTLVTIKILGQRIQYLRAELKRLNRLIRPLIRQTAPGLLEVYGVGFNTAAKLLVAAGDNPQRIRSEAAWAHLCGVAPIPASSGKTTRHRLNRGGNRQANSALYHIVLTRMKHDQRTREYVARRLAEGKTMGEIARVLKRYAAREVFKHLPRPA

SEQ ID NO: 250654 - protein, 338 aa, unidentified
MVVIGIDPHKGSHTAVAIDDDERKLDEMRVRADRRQLERLTTWAAAFPERSWAIESANGLGALLSQQLVGAGEEVFDVPPTLSARVRVLASGKSQKNDPNDAFSVAVAALRSPRLRLVVTEDHVAVLRLLWNRHKNLTSLHTQAVCRLHALLAGIIPGGTRRRLSADKAAAVLSGYRPKTEVEKARKDQAHILVGDVRRLDAQLKASNRTIVEAVAHVPTGLQELSGVGPVSTCIILAHTGDIRRFGSEDNYASYNGTAPIEASSGPKKRHRLNPRGNRQLNHAIHIIAFSQLSHAGLGRDYYERKMAEGKTKKEAVRALKRRISDVVYRQLVLDAQR

SEQ ID NO: 250655 - protein, 343 aa, unidentified
MLIIGCDYHPSFQQIAWLEDSTGECGQRRLEHNNGEAQQYYRSRKGQTVLVGVEATGSMRWFERLLAECGHELWWGHPGKIRAAAVGRQKYDKRDADLILQLLLEKRFPRLWVPSVQQRDERQLVLHRHRLVQMRTRVKNQLQALAMNEGVQRKHSLWSAKGQTELQTLSLDPWARIRRTDLLELHQALDDKIAVLNQGLEQEVEQHPEVRRLMTHPGVGPVVATAFVLTIGDPGRFANSKQVAAYLGLVPLEESSGGRQRLGHITKAGNSMLRGLLVEAVHVTVRHEPEWRRKYMRLAMKKNRSIAAVALARRLAARLWWMWKLGLDYGAMKESRSHAESLA

SEQ ID NO: 250656 - protein, 319 aa, unidentified
MERQIERGCGLDVHRDTVAACVRVPGVKGQREQHVRTFGTTAAELLALRDWLEAHHVTHVAMESTGVYWKPVFYVLEEGFTCLLVNAAHIKQVPGRKTDVLDCIWIAQLLEHGLLRGSFVPPAPIRELRDLTRHRKVLIQERQRAANRLHKLLQDAGIKLASVATDILGVSGRAMLEALVQGTTDPEVLADLARGKLRKKLPALRQALAGRFRPHHAFLVSQVLAHVDYLDEAITTVSTEVAARLVPFASELTQLDTIHGIATRTAEVILAEIGVDMSRFPSDRHLASWAGLCPGNHESAGKHTSRGRRGKATAGCAWR

SEQ ID NO: 250657 - protein, 432 aa, unidentified
MNPFSVSPEPSPVAAWVGLDWADQQHVICLYEVATGQSTLTRLEQKPEALQDWLSQLRQRFGGAPVAIVLEQARGAVIYALLSADFVRLYPVNPQSLASYRKAYAPSGAKGDSADAVLLMEMVRKSPERFRVWKPDDADTRSLQLLTQNRRQLVNQKTALTNQLTSLLKTYYPLALELAGALDSLQACDFLKQWPTLEALQQARAGQIRQLYREHGHPSPEQLDRRLEQIRQARPLTADPAALLSGAMMVEALVQQLRPLLGAIERFDRQIAVLFRKHPDRPLFDSLPGAGAVLAPRLVAAFGTDRDRFHSAQQAQELFGIAPVTEQSGKQRWVHWRWACPKFLRQTFHEFAGHSRHWCGWAKALYQQLRRRGKGHHAALRVLAFKWIRILFHCWKTRTGYDEQIYLKALQKRNPTLWAEIQLLPPRKKKVA

SEQ ID NO: 250658 - protein, 337 aa, unidentified
MEYFAGLDVSMAETQICVMGRNGAVIHKAKVPSTPADIAAELAQLPTCRRIVFETGRMAPMLYHGLRQLGLPVICVESRQAYQALKLLATHKTDHNDARGLAHLARTGFFKPVHVKSLPAHAVRSLIIARKKLVGQRVTLENQIRGLAVVFGVRLPRALSSTFIRQALQASEGIPGLSAAMQGLVAARTAVLAAIVAIDGDIRRMVRASDACRRLMSIPGVGQLTALAFTAAVDDPKRFRRSRDIGAYLGLVPRRHQSGEIDYSGSISKCGDRRLRTLLYEAANVMLTRYKGALKLKEWAFAVAKRSTMRKARIALARRLAIIMHAMLRHGTEFKAA

SEQ ID NO: 250659 - protein, 401 aa, unidentified
MNAVGIDVSKGKSMVCVMRPFGEVVLEPFEVLHTAQSLNDLAGKLKALDGETRVVMEATGNYHKPVAFVLHDAGLFVSVVNPVLIHDYDNNSLRRVKTDRKDAVKIANYTLDKWTRLRQYLPEDDTRLALKNCYRQYQQAVAVRTMLKNNLISSLDLTFPDANKLFASPPKSNGCEKWVDFIGDFWHSECVSSLSEEVFAKKYLKWCQKHGYIFTRSKSDEIYACALNSASLPKSPTSKLLIQQQVAQLKAVSQSVAAFQQEMLRLSQQLPEFDTVMEMYGVGPSLGPQLMAEIGDVRRFSSKKSLIAFAGIEPLPNDSGKVVGNDKGISKVGSAVLRRTLFLIMSVILQTQPQDEPVFQFMNKKRSEGKPYKVYMMASANKFLRIYYARVKAVMDSERSQ

SEQ ID NO: 250660 - protein, 400 aa, unidentified
MDERERFGWFLGIDVSKETFDACCITRHGERLFNLSASMDRKGFEELIKQLSTLSTPKESVLVGMESTACYHINLYSFLVSLGYTVMVINPLLISNFVKLQLRKTKTDKKDAWVIAQFLLLNRDSLSQTILSSDISDLRDLSRQRESLVDQMSSTKSEIKRLLTITFPELEHISGIFTKSMLRLLCQYPSAASIKQAKRSKIAKILIPGSYGKQTDVSVDRIVKAAQVSVGTSSATKEIILRQKASLLTQLEEHLQELTDILIELCQGKIQGDMDILTSMKGIGEKTAVNFLIEIGGDIKQFENHKKVIAMAGLDPAVYQSGKIDRKGRISKRGNRHLRRVIWLMTTKVIQFNERFKQYYLKRIKDGLPYKKAVLATAHKLIRVMFAMLRNKTLFDARMN

SEQ ID NO: 250661 - protein, 351 aa, unidentified
MSLTEDAELIIGAGTHMDTHTAAICDARGRAVSQLQVPATTAGYVQLLTWVRAAAGDRQVIWAVEGTRHYGLGLARHLASHGQQVSETGCSRHIGKRRAGKSDPIDAVRAAREPLARPWPAQMRADGDREALRLLMIDRDNAVQSAKTARTALAAVLVTAPAPLREQLRPLPRERRAKECAALTCPAGADRQTRVLHQALIRLGQRIAALAGEAAGLEAQITQIAGDMAPGLVAAEPGLGALSAAQILLSWSHAGRIHSEAAFGMLSGTAPVPVSSGRTDRHRPSRLGDRQLNRAIHVIAVTRMRCHPATIAYVQRRRAEGKTDKEIRRCIKRYLARHLYRTLSNGIPSNA

SEQ ID NO: 250662 - protein, 317 aa, unidentified
MSNIMEEIWVGIDVSKAHLDIALGASGEFWRTGNNAMGIAQTAERLVQLKPQRVVVESTGGLERAIVSRLWMEGVSVALVNPQRVREFARSTGLLAKTDKLDARLLARFGQAVQPDPTTLPSEEEQRLSALVARRHQLIDMRTAETNRLGSAHADTLPDIEEHLVWLEKRITELEQQIALLIQNHPDFKIKNDILRSVPGIGPVASAILIADLPELGLVDRKVVAALVGVAPFNNDSGFRNGKRRVKGGRSAVRTVLYMATISATRFNPVIKSFYERLLKVGKLKKVAIVACMHKLLIILNAMLRDKMPWRPSPASC

SEQ ID NO: 250663 - protein, 357 aa, unidentified
MKEYISFDSHKHFTLAEREDRSTGRCRQFRIEHEPGAIRRFLKHCEPGTPVAVEAMGYWYWIIQEIEAEGFVPLLVHPRKAKLMMGMINKTDKLDVHGLNRLQRNETLPTVWVPPGELRDQRELTRGRMVLSHHRTRLKNRIHAALTKYGRVVKEASDLFGKKGRRLLSEQLAYLPDHTQWTTELMLKQLDQTDHHIAELEKRLDAVLRATAEMELLRSLPGIGPILAAVIMLELGHIERFGAADHYASYAGTTPRVKASADKCHYGKLRPDVNRYLKWAYVEAGNSVALNCERFPGRHVSQLYRHLQQSRGHSKAIGAVARHLAEATFHVLTRKEPYRDPALHRGRAKQELSASPS

SEQ ID NO: 250664 - protein, 349 aa, unidentified
MAETQKRAVAVVGIDIGKNWFHIVGLDGRGAIVLRQRWSRGQVEVRFANMPPCLIGMEACVGAHHLSRRLRALGHDARLMPAKYVRPYSKGQKNDFRDAEAIAEAVQRPTMKFVATKSVDQLDLQALHRVRERLVSQRTGIVNQIRAFLLERGIAVRQGPRFLRIELPRLLACEVLSPRMARIIEGLASDWRRLDERIEGLSGEIEAMARQDAGCERLMSVPGIGPIIASATVAAIGTGDTFAKGRDFAAWLGLVPKQISTGDRTILGSISKRGNRYLRVLFVQAAWVVLIRPKSWERYGLKGWLEAARKRLHRNVLAIALANKLARIAWSVLARGRGFEASRFAQVIA

SEQ ID NO: 250665 - protein, 422 aa, unidentified
MSAAGSLSAVSCRAVSSSAVSSSAVSSSAVSSSAVSSSAVSSSAVLGSGVDLGLVVDVVVGVDTHADTHTAAFCDGRGAVLQVATVGTDVDGMSALLEVLEGVVAAVDCPRVVFAVEGSGSYGAGLAELVRRWGFTVIEVRKAGRPAGVAKNDANDAVQIARAALRQLSSPDLAERIAVPREGHIRAGLRALCVARDKHVAHKTAHRNQFRAVILTGPTPVRQRLRGLTERERLAAVARMRPRPVLPQPGKDLAAAAEAAQAYAVAQTYAVLAAVAATITHLDETIKKFDLAIDAVTARYAAPLRDQVGVGPITAADLLIGYSHDRFRSEAAFASLAGVAPLEASSGRTTRHRLNRGGDRHLNAALHRIVLTRRCRGHQPTLAYIARRAEHDRMNDKEINRCLKRAVARNMYRILHTLPELP

SEQ ID NO: 250666 - protein, 370 aa, unidentified
MLNTTTFVGLDVHARSIKAVALDAMTGEVRSATFGYDAAEVAGWVSSVDPSAKCVYESGVTGFDLQKRLSSMGIDCVVGAVSKMIKPSADRRRKNDRNDAEFLARMLSVGNVVEVWVPDDECEAARDLTRALDDAREDLKRCKQRLSKFLLRHGLVFSETNAKGQRKKNWTAAHWAWIRSISSPDKADDEVLAYYIDAARQAMEDKARLERLVEAEASKPRWKKRVDSVRCLKGIDVTSAADLVFEAGEFSRFKNARSFAAWIGLTPSEHSSGESVRQGGITKAGNKHLRRVLVESAWHYLGCSPHSKDLAKGQAPDPGARRHAAKGVRRLVGRRAAMLERGVHKNKANVATARELACWCWAIGRMVENG

SEQ ID NO: 250667 - protein, 324 aa, unidentified
MTAVVGIDIAKQTFDIATLQSNGKYRTKAKLPNDLKGFETLQQWLLKHAEPQAWIVMEATGIYHEALAEWLFKQGYRVCVLNPAQPAFYARSQLQRVKTDKVDAKLLTDYGSRHLAELRSWKPEAPEIRRLRALVHRLKDIQELEQIERNRLESTQESKVRDSIQSVLDHLKKQTDETLKAIKQLFDDNDDLRGKRDLLTSIDGIADRTAALLLAELGDIQRFNSSKAVTAFSGLNPRLQESGKHKGHVRISRMGPARLRAGLYMPAVSSLTHNQAIREMGERMKAKGKAGKQIACAAMRKLLCIAYGVLKSGRPFDPALAIAR

SEQ ID NO: 250668 - protein, 373 aa, unidentified
MNKVRFVGLDVHAETIAVAVAEPGGEVRSLGTLANREEAVRRLIHKLGPVEHLRACYEAGPTGYVLYWQLTALGVHCDVVAPSLVPVKSGDRVKTDRRDAEKLARCHRAGDLTPVWVPDAAHEALRDLVRAREAAKRDQLRARHRLGKFLLRHGWQRPSSMKSAWSNKHLEWIKQQVHFEQPALDITLSDYVHEVEHAAARIQKLDQALEEVARSLPARMRALVQALQALRGIAQTAAVTIVAELGQISRFSKPTQLMAYSGLVPSEYSSGVRKLQGSLTKTGNAHLRRVIIEAAWAYQFRPWCGGYLLKRQHGLSPDIKEIAWKAQWRLHSRYKKFAARGKNKPQIVAAIGRELLGFIWAIAVQTEAEPVSA

SEQ ID NO: 250669 - protein, 349 aa, unidentified
MREITAIGLDIAKNVFQVHGVDADGQVVLRKPLRRSQMQMFFERLSPCRIGMEACATAHHWARTLMDAGHDVRLIPPSYIKPYLRRQKNDAADAAAICEAVTRPSMRFVPVKSQERQATLMLHSARELLISQRTALINALRGHFAELGIVAPQGARNVRQLIAILEDEQHSPQSVRVALMPLAAALTEMEEQIAKLDKAILAAHRNDDVSIRLATVPGIGPIIATCLSASVTDPKLFEGGREFAAWLGLVPRQHSTGGKPRLGAISKMGNRHLRKLLVVGAHAALYRMRKASSDTPLANWARSLLSKKPFKLVAVALANKNARIVWAMLCGNTLYEPALSVQAHRFTAA

SEQ ID NO: 250670 - protein, 351 aa, unidentified
MKDYTGKKIYLGIDVHKKTYAVAALCEKIVIKKATLPASPEGLVTFCKKFFPGTVIESAYEAGFSGFHLHRVLEKSGIKNLVVHAAGIEVATGDRVKTDKRDSLKIATQLEANRLKGIHVPSEEREEKRALTRLRDTIVEHRTTTANQIKALLHQHGLISPTAKKKICPKWIESLKTLPMRAGIRYALDHLVDVWQQLTVRIKEINVEMAKQAAEDHALEMVYRSTPGIGPVGARILANEVQDMSHFDNERQLFSYTGLTPSEHSSGGHIRKGHISRQGKTVIRRVLVLASWKAIQQDAQLRAIYDRISIRAGGKKAIVAVARRLIGHIRACFRKKCFYRTEAKTVVVAAA

SEQ ID NO: 250671 - protein, 372 aa, unidentified
MNNTTVYVGMDVHKESFTLCAYTLEEEKGSYTRRTPVDYKEVLKYLEFLRTVYGNDTIFVCGYEAGCLGYTLYHQLTDCHVDCVILAPTTMLEQRGKKRIKTDKRDAEIIGKCLAQHNYSPVHVPTASDEEVKEFLRMRDDHKLALKKVKQQILAFCLRHNYRYNGNSHWTAAHINWLKSLTPEALYKEILDEYLLTYTTLSDKLERLDERIEDLAAKAEYKEAVRKLCCFIGVKTHTALSVIVEVGDFKRFASAEKFASYIGLVPGEDSSGDGQTRLGITKAGNRHVRMLLTEASQCYSRGQIGYKSKALKARQDGNTPQVIAYADKANERLRRRYYKMVLSKCKKHNVAKTAIARELACFMWGMMTDNIA

SEQ ID NO: 250672 - protein, 336 aa, unidentified
MSHYCGIDLHSNNHLVVVIDDEDKRVFERRLSNDLSLTLKALSPYRKTLQSIAVESTFNWYWLVDGLAEQGYDLQLVNTAAVKQYDGLKYSGDRHDAFHLAHLMRLGILPTGYIYPKEQRAIRDLLRRRLSLVRAASAQLISAQSQIWRSTGIRIKSGDLRKLKFAPPAMDTYTLQAVHAGLAVYQAIQREIDGLEKSAHQVVKLTDAFKILQTITGIGKILGLTIMLETGDIHRFAGPGNFASYCRCVDSTRMSNGKKKGTGNAKAGNKYLSWAFSEAAHFAVRFEPLAQRFYERKKAKTNGIIAIRAVARKLARATWMMIKHQVPYDARLMFPG

SEQ ID NO: 250673 - protein, 418 aa, unidentified
MSPLPEHSFTAYVGIDWADTKHDICLQAAGDTRREFCCIRHQAAAIDEWANTLYRRFGGPLAVALELWKGPIVAALQKYEFLVLFPINPTTLAKYREAFQPSGAKNDPKDAELALDLLLHHPERFGPLKPQSVAMRTLVSLVERRRQLVGDQTQLTNRLCDTLKQYYPQALEWFDDRGTVLFSDFLERWPTLRSVRQARTATLEAFFHAHHCRSASRISARIRSIRGAAPLTDDVAIIAPCRLYALALVSQLRAVLAAIAQFEHEIAAVAPTLPDYTLFRNLPGAGPQLAPRLLAAFGEQRERFRNADELQKYVGIAPVTERSGKKSWVHWRLQCPKFLRQTFVEWAAQTISRSFWAGAYYRQQRAKGSSHHIAVRALAFKWIRILYRCWQTRTPYNETVYLNVLRKRGSRLLGTLDA

SEQ ID NO: 250674 - protein, 421 aa, unidentified
MTTDEKRAYAAQFPVHVGVDTGKTFHKLVARGPDGHRSTAYKVLVSRAGFEAAHAHLRGLFPGVTPQQMLVGLEFAGHHGFTFAHFLAQRGYAVVNVLAAHTKASKEIEDNNPRKDDAKDAAQICRLVGDGIFVRFPFLDHPYLELRLLTVHRHRLTVEATRFKNRLQGLLDLAWPEFLGHFSALHKATPRAILERWPLPQDLLDAPRRTVGKTIRTASRGHVSAEHVDALLAATRATIALRQAAPERRLEIQSLLARWALVRRQLAELEDRITALVEECPEARILTTIPEVSAVCAATIVAELGTPRDYAHYRQVLKLAGMNLASRSSGQSQGRKWQSKRGRPMLRRQLFLLAGRWCLKRGLYHEDYRALKARNGGSGTKAICTLARKLVPLLLKVMQTGEPFDHARWLANRRRREVPVS

SEQ ID NO: 250675 - protein, 425 aa, unidentified
MRKIGLDVHRDFCEVAIAEGGRVRLAGRVATDPAALTLFAESLVASDEVVLEATANAVAIARLIEPHVGRVVLANPKAVKAATGLRAKTDKIDARTLAQLVAGGFLARVWTPNEPTVVRRRLVARRAQLVRHRVREKNQVHAILQRNLVPRPPMTDLFGVKGRRWLAEQLECLPEAERTMASACLRQIDFLGREIDLVDRDIARQALDSPEIRRLMTLPGVSAVTATALMAAVGDISRFPTPRELVGYLGLDPRVRQSGTEPARHGRISKQGPGNSRGLLVEAAWHAARTTGPLRAFHQRIAARRGANVATVAVARKLALIAWHMLSRDEDYAFARPSLVREKLRRLELMLGASRQQGKKLTGAGRSFATVEGRRLEKELATQQEAAYLRLVSDWKANRPKAGAGATPRRASQKPSKGKAARQTD

SEQ ID NO: 250676 - protein, 333 aa, unidentified
MLPPNCGTATPYILRNTVGLDISKLTFDATAIVGNAEYSAKFDNDSKGLNQFSDRLKSLGCQNLHICMEATGNYYEEVADYFAQYYSVYVVNPLKISKYAESRFKRTKTGKQDAKLIAQYCRSAQESELVKRQKPTDEQYRLSRMIAAYAQIKSECAAMKNRHHAAKDEEAAKAYAEIIKAMNEQLEVLKEKIKEQTEKPNCKEGVKRLETIPAIGRMTAAVLFHHLTSSKFETSNKFAAFAGLSPQQKESGTSVRGKGKLTKFGNRKLRAVLFMPAMVAYRIRAFPDFIKRLEEKKKPKKVIIAALMRKLAVIAYHVHKKGGDYDPSRYKSA

SEQ ID NO: 250677 - protein, 345 aa, unidentified
MKEGITIGMDLGDKKHQVCILDKAGKIITEEAIDSKRATTAEFFKRYRGAVVAMETGTHSRWVSQVAAAAGLEVLVGNARKLRMIWQSRQKSDTRDAVMLARIARMDPALLCPIHHRGEQVQMDLEIIRARDLLVRERTRMVSHVRSVVKNMGERLAPSSAASFGQRAKIPEALNEALKPMLEMIRELTKKIRAYDLMIKEAAANKYPETEQLRQVGGVGPLTALAYVLTLEEPERFAKSRMAGAYLGLVPRLDQSGQIDKQLRITKHGDGYLRRLLVGSAHYILGPFGPDCDLRTFGLRLMQRGGKNAKKRAVVAVARKLAVLLHALWRSGQQYEPKRIQPLAA

SEQ ID NO: 250678 - protein, 388 aa, unidentified
MHVYVGVDIAKELHYAAIMDSDGVVSKPFSFENNDKGFNLLLSHLAPYNKEAILIGYESTAHYQENLAFFLKSLGYRTAEINPLQTAALRKANIRNTKTDSVDARLICLALMNHNIQGDQRDSARLDDLYQLCKMRMDILKKRTTCKIQLVATMDRIFPELAPFFDNNLHTNTIYRLIESYPLPSQIKKTRIDILTKLLHKASKGHFKKEKAQKLKNLADISVGIPSDIFAFQAQQLVHQIEFYTDQIQTIEERINTNPDVMSSPLMTIPGIGTFCVACILSAIKNINDFDAPCKILAYAGLDPVIRQSGKFNASHTRMSKRGNSLLRYALVWSAGNVVKNNNTFAEYYRHKTEDQGKSHYQALGHCAKKLVKSIYHMLKYNESFNLD

SEQ ID NO: 250679 - protein, 311 aa, unidentified
MDSQEKFVGIDVSKDRLDVHVHPAGEAFACARDAEGLDQLLAWLGPVRPTLVAIEATGGFETVAAAHLAAAGLPVAVVNPAQVRAFATALGKRAKTDPIDALVIARFAATVRPQPKPAPDETLQALADLVTRRRQIVAMIGAEKQREKRAPARLRKSIARLLKALQKELSEVEADIDDTMRGSPLWREKEELLTSVPSIGQTIARALLADLPELGELDRRQIAALAGLAPHTRQSGQWKGQSFISGGRSEPRSSLFIAAMVAIRHNPPLKTFYLRLIGAGKAKKLALIAVARKLLTILNAILRDKKPWQPA

SEQ ID NO: 250680 - protein, 338 aa, unidentified
MKVQTLGIDLAKNVFQLHGIDRRGHTVLARRLRRDQLLKVLSELEPCLIGIEASTGAFFWQRQFEKLGHTVRIMAPQYVKPFVRRQKNDTNDAEAICTAVQQRNMRFVPKKTLEQQDIQALHRARQRLVNHRTALISQMRGLLLDRGIAIAVSATRARQLIPKILAAPSDELTGLMREIVSSLYAFMLQIDDRIRAFDRKIAAIFKASDVCQRIAKIRGIGPKTATAMIAAIGDGSDFKNGRHLAAWLGLVPRQHSSGDRRVLMGISKRGSQHLRTLLVHGARAVVRTAVRKTDSRSIWVNELRQRRGYNRATVAVANKNARVIWAVLTSGEPYRAAA

SEQ ID NO: 250681 - protein, 319 aa, unidentified
MQTDPLITGVDVAKDELVIGCLGEQAVHKLANEAAAVKSWLRTLPKGSIVAMEATGIYHRLLAGLAHAAGMHVYVLNAQAVYFYAKAVGMRAKTDRLDCGVITRYVAEHHKKLHEWKPSAALHTEIDELIRRRAVVVTKRNAVRQALDGCKGVATALKDLERAFDKFLKTIDKKLQTLVKADPDLASAQRRIATVIGFGPLGSALLATLLARVPLGTADALVAFSGIDPKPVDSGQKRGTRRISKHGAAYLRRQWYLAGFTAAHTKALKPMYQALMARGLATTEAILILGRKLLRAAYAVWKTGQAFELEKFIGTAKSA

SEQ ID NO: 250682 - protein, 366 aa, unidentified
MFHKLNSAATLIQRTTTEAPRDHMYYIGLDVHKRTISYCVKDAAGHVHQEGKIGSTRCELDAWIKTVPQPRMMAMEATIFTGWIYDHLLPHAEKIKVAHPLMLRAIAAAKKKNDKIDAAKIADCLRCDFLPECHMASTAIRDRRRTLRYRSLLVKQMVQMKNRVSGLLLETGVSYNKSRLHNVGYFADLMSTNEEVNESIRPLLKISREHIVRVQRLDYALVSWLERDPLLQERLRRLRTVPGVGPITALTWALEIGDFTRFRSIKQAISYCGLCGDERSSADKVMRMPLSKQRNKHIQRVLIEAAKLAPRECHELAMVRERELQKGNPNRATLAVARKMVSYMLAVERRKQDFVPAENFKCTAAA

SEQ ID NO: 250683 - protein, 392 aa, unidentified
MEVQDETGRRLAKARLPEGISGIARLHGLVGRFLPEDSDPAEVKIGIETDRGPWVAALVASGYQVYAINPLQSARARQGGGVSGAKSDAGDAHVLADLVRTQSHQLRAVAGDSKQAGAVKVLTRMHQTLIWDRTRQVLRLRSSLREFFPAALQAYEDLDSPDVLELLTKAPEPSSAARLTRAQISAALKRARRRDRDSKTTAIMAALRTEHLTQPPVIAAAYGATVRALAALITTCNEQITALEGPVEACFGQHPDAEIYLSQPGLGPILGARVLAEFGDDPTRYDGARARKNYAGTSPITRASGKKKVVLARYVRNKRLADALHQQAFCALSGSPGARAYYDALRDRDIGYNAALRQLGNRLVGILHGCLKTRTRYDEAVAWNQHTQPVAA

SEQ ID NO: 250684 - protein, 354 aa, unidentified
MYDLKHQKEKRSMDHFAGLDVSVKETSVCIVDETGKIVREVKVESEPEALLSVLKNPAYRFKRIGLEAGPLSQWLFSALAEAELPVVCVETRHMQAVLKAQINKTDRNDARGIAQMMRVGLYRPVHVKTLRSQKLRMLLTHRKLLQSKAIAIENDLRGTLRNFGLKVGMVGTAKFEARIKELVENLPDLAVLIEPLLVVRRALREQFVILHRRLLALVRDDEVCRRLMTTPGVGPVVALTYRATVDVPARFRKSKAVGAVFGLTCSKYQSGEIERSGRISRCGDEMMRVMLYEAAQSMLRSKQWSWLKAWAMQIARRRGMKKAIVALARRLAVILHRIWVDGTKFRWTRETAVA

SEQ ID NO: 250685 - protein, 410 aa, unidentified
MDLLSSELPARTLVVAIDPGKISNRVVLANGEQGLIGEPVSLPVQREGIDRLCGLIESAGTDERVIAIEATGSLHIPWATELERRFPGSLRLFAPSETTAARTQLGSRRFKDDDRDCAALISLARQGRGRPSRTGIAEALLDAVRHRRRLIAQRKVTRQHLHHQLNALCPGLSAPAGHGRKLGLDTPTGRAVLACAVAFAGRAPTTRSLIARAPGRLSKPTAEFWAKRWRECLAPPLDAELRAERLGRDLARWRALDLDIEAVETQIAALLTESAGQVLTTLPGVAATRAAAFAVHALPVERFETAERLYSSTGLAPARYESATVRKARAISRQAPGERRDALMSIAWGLSQHCEAFRVRDRELRARGMRPIEARVALARHACRLCHRMLETQHPFDEKRYARARHRRGR

SEQ ID NO: 250686 - protein, 447 aa, unidentified
MQKKEVKMQVINPNAAGIDIGSRSHFVAVGQGAEDVKEFGVYNEDLKAIANWLKENKVDTVAMESTGTYWQSLFAVLQSEGFQVILCNGKFTKNIKGKKSDVQDCQWIQKLHTLGLLSGSFLPDVTTEQLRTYCRHRSNLLEQAADTVRKMQKYLRLLNLRLDVVVKDIVGLTGLKIIESICKGEINPEKLASLRNGNCKKSEEEIAKALQTNGRKDYLFALKHEYEMYLNLQSKITECDMEIERILNEQIEDDDEKRQHYIDKKVHKRVNKNTPKNIDINLLSYQYFEGVDLLAIEGVSYSTVLTLMSEVGTGIHKFETAKQFASWLRLSPNNKISGGRVLSSKIPRGSNRLKIALRNAANAIGNLKDTALSNFFARISHRKGRVSAISATARKLAIVIWNMIVKKAPYIPQTEYQYLDQKRKKITAMKRLISKFDISTNDLNLQL

SEQ ID NO: 250687 - protein, 396 aa, unidentified
MDVGKQHHWVAAVDGEGRVLLSRKVANDQTAITGVLGELKAMAAGLVWTVDLTTVEATLLLAVLWEGGQRVQYLSGRAVNIAAASYRGEGKTDARDARVIADQARMRHDLPELRPGQELVVELRLLTGRRADLVADRTRTINRLRQQLTALCPALERAACLAGQRGWLVLLARWQRPSVIRRAGVARLRTRLVHAGIRTETAERIAQAAVAAAASQTVRLPGEELTAGLVAALAEEVISLQARIDQVDQALKERFRRHRLAPVIASMPGFGFRLGAELLAAIGDLQLVSSADQLAAYAGLAPVPNDSGKRTGRRHRPVRYNRLLRRAMYLSALTASRYDPAAKAYYQRKLAEGKRPVQALTCLARRRTNVLWALLRDNRTWQPQPPDKTNNEAKAA

SEQ ID NO: 250688 - protein, 347 aa, unidentified
MPYHAQEEVQVFAGIDVSARELNVAWRRPEKDKETTATFTNTRSGHKALLAFLLRGNQRVRVCLEVTGNYSLDLALALQAHGQFEINVVNPRRARRFAESLGERSKTDPVDAHVLCEYALRMPWVPWQPPSSTALHLRAVMRAVEDLTSILTQEKNREHALAASHALPSLVLTELKRHQRYLQNRLTRLRREALQLVARDPQLSRRFQLMQTTPGIGENSALQILGELAVLPDTLDARQWVAFSGLDPRRFKSGTSVEQRPRISRAGSRHLRRALYMPALVALRHDPHLGSFYQHLLKHGKARLQAVVAVMRKLLHAFFAMFRSDQPYDGSRLCPFELANKPVDSFG

SEQ ID NO: 250689 - protein, 414 aa, unidentified
MDVLHERCAGVDISKKDAKVCVRTPSTKRRGSFTAETTTWGSTTNAILDLREHLLAARVTLVVIEATSDYWKPFYYVLAEGLNVILVNARQVKNLPGRKTDVSDAAWLAQLGAHGLVRPSFVPPEPVRELRDLTRARTTATRERGRVVQRLEKLLEDTGIKLSAVASDIMGVSGRAMLEALIHGEADPQVLADLAKRRLRNKIPELTEALTGRFREHHAFLARLHLDQYDQLTAMIDQLTGRIEEAMAPFRGALDLLDTIPGINQATAEVIIAETGGDMTRFASAKHLASWAGVCPGHHESAGRTKNTKVRPGNPYLKGALGLAAFGAVRTKDTYLQARYKRLTARRGPLKALVAVEHSIITAIWHMLSDNVGYQELGGSYFTQRDPERATRRAVNQLNQLGYTVTLNPRETAA

SEQ ID NO: 250690 - protein, 391 aa, unidentified
MIYIGIDVAKDKHDCFITNSDSEVLFKAFTIFNNLDGFNDLYQKIESVMDDVTKVKVGLEATGHYSYNLLGYLIDKGLPTYVINPLHTNLYRKSLSLRQTKTDKVDARTIASMLMSDMNLKSYSDTSYHNEELKSLTRYRFDKVKERAKLKTSVSRLVCILFPELEKLVPTLHMASVYALLSEFPSAKHVATAHLTRLTNLLSESSKGRYGKDTAITFRDSARASIGSNMPAKSLELKHTIKLIQELDSEIDEIENEIKIIMDEINSPILSIPGINYRMGAMIIAEIGDFNRFDSPDKILAYAGFSPSTYQSGQLDGAYAHMEKRGSRYLRYALYNATKYVCHWNPTFAAYLAKKRAEGKHYNVAISHAVKKLVRVIYHLEKTKQQYIKAA

SEQ ID NO: 250691 - protein, 434 aa, unidentified
MSGREAVQPEVKFVAFVGIDWADQKHAWCLQAAGSTQRESGELEHRPETVEAWVGELCRRFGPGPIAVAVEQVQGALVCMLRKYEYLHLFPVPSTMSAAMRKALYPSGAKDDPRDADLLLDLLLQHRDRLRHLQPDNEGTRRVQNLVEERRKLVDEKTAQLNRLIGYLKIYFPQMLEWFGRLDTKLVCEFLERWPSLEELKKVSTAELRKFFRQRQGRHHELTEDRIHGIAQAMPAIQDRAVIEAKGAVVQVIVQLLRSLLEGIANLDRKIAEAAEAHPDFFIFQSLPGAGAALAPRLLAALGSQRDRYDSADEVQKHSGIAPVTETSGKKKWVHFRWACATFLRQSFHEWAGHSIAQSVWARAYYQQQRERGNDHHAAVRALAFKWIRIVFCCWQDRVAYDENKYLAALARRGSPLSSVLATIATPLCNPCGS

SEQ ID NO: 250692 - protein, 333 aa, unidentified
MQLPSPSNLLWIGVDVSKATFDAALWGHQDFQRMATAAFPRTEEGVQAFRTWVLAHGGDAVGVVMEATGCYSQELGRWLQQDLPGSRVAIVNPSLVKAFGRSLALRNKTDRLDACMLARYGQERTPEAWVPMTPERAELRDLIRTRTKLIRLQVTLRLRLDDAIGRTGNSAGKAQQKVLKVLQGQVDALDKAIERQLRQVAELGHAVELLTSIPGVGKVTAATMLGEAGDLRAFRRGRQLTAFVGVSPRRYDSGSSVRGRTRMCRIGGVHARTVLYMAAVSASRTATPLGDFYRHLVEQGKPKKSALGALMRKLVLVMRAVLIQDKPYSPQPA

SEQ ID NO: 250693 - protein, 321 aa, unidentified
MNETPVFVGIDVAKATLEVAVRPSGAQWASANEEAGIQTLLGQLRALTPALVVLEATGGYEHAVAATLATAGVPIVIANPRQIRAFARATGQLAKTDAIDAQILALFAERVRPTPRPLPDDATQALEALLTRRRQLLEMVVAEKNRLGVARASLRRDIGQRIRWLERRVTDLDRELHAGVRASPVWRAQDDLLQSVPGVGPVLSYTVLAALPELGTLGRKQIAALVGVAPLARDSGTHRGRRTSWGGRAPVRTVLYMATLTATQWNPVLRQCYRRLRAAGKPHKVALTACMRRLLLVLNAIVRTKPRGARRRPPREPPLDT

SEQ ID NO: 250694 - protein, 308 aa, unidentified
MLADEVDFVVGVDPHRDSHALAVVEVVSGAVVFETTVVANSDGYAHALALVEEHAAGRRVLAIEGTGSFGAGLTRFLTRRGERVLEVGRLRRERRSGGKTDALDAVRAARSVLAQRRPATPRAGGERQALQALVAAREGAVNAKRAGLCQLRDLLIALRSIARRVLQLTAEERELAREIETITRKLAPQLLDQPGVGPLAAAQLVLSWSHPGRIGAEAAFARLAGAAPIPASSGQTVRYRLDRSGDRKLNRALHMILVTRKRSHPATIAYIDRRIQEGKSRREATRCLKRYLARSLYRLLEHGPPLET

SEQ ID NO: 250695 - protein, 412 aa, unidentified
MELLHRRCCGLDVHKETVVACLRLVSDGKVTTEVRTFQTTTADLLRLSEWLAANECTHVAMEATGVYWKPVWHILDDGEFALVLANAAHVKNVPGRKTDVNDAMWLAELLAHGLIRASFVPDAQTQEMRNLLRTRKQLVREQSSHVLRVQKTLEDANIKLDSVLTDLMGKSGRAIIEALIAGETNPVKLAGLADRRVKASPEKFREALRGRVTKHHRFLLRLHLNQIDALDAAMATLDAQVGANLGPFRIAVELIGSIPGIKNLGAHVIVSEIGIDMSRFPSAAHLISWACICPRNDESAGKRRSNRVRKGGTWLKTTLVQCAWAAVKKKDSYLQAQFYRIKARRGPKKAIMAVVASILTTIYHMLKDGTMYKDLGRNHFERRSSDQQKNRLVKRLADLGYAVEIKPLAATA

SEQ ID NO: 250696 - protein, 342 aa, unidentified
MNHYAGIDVSLECSSVCVVDASGKILREARVASEPEALIAWFRQSGFEFERIGLEAGPLSQWLFAGMKAAGLAVELLETRHVRKAFEAMPVKSDRNDARGIAQLMRLGWFRPVHCKSISAQETRSLLTARKLVQSKLLDVENSLRGILRGFGLKVGKTTGQTFAGRIEELVHGHPHLQMIAKALLAVRAVLRTEFAAFEKQTRKLARSDTRTRLLMSTPAVGPIVALTYASAIDDPGRFKSSKQAGAHFGLTPKKHQSGETDYTGRISKIGDASVRTALYEAANVMLTKPLKGCSQLKSWAMRIKKRAGMSKAKVALARRLAVIMHRMLADGTPFNAAAAAA

SEQ ID NO: 250697 - protein, 346 aa, unidentified
MDIYIGLDVSLASTAVCVLSSHGKVVKEITALSEPDDLERVLRSLLGTAVAVGLEAGPLSQWLYRHLTEAGFDTVLMETRQVKGALKAMPIKTDRRDAEGIARLLHMGWFRPVHCKSISAQEMRALLSSRKAILQAIVALELSIRGVLRNFGLKMGRIAKGGLEDRVLELADGNVMLQAAARPVLSARAALRLELAGLEKRVRDHAKSDPVCRQFMTMPGVGPIVALTVKSAIDDPERFRSSKDVGPWVGLTPRREQSGERDIMGSISRAGDTGLRTALYQAAMVMLHKGRPNWLTAWAWNVAKRRGKKRATVALARRVGVVLHRMWLDGSTFRFTQAEAAAVSGA

SEQ ID NO: 250698 - protein, 408 aa, unidentified
MDLLHTRCAGLDVHKDTVVACARVVGDGGVQQHVKTFGTTTKELLALSEWLTGHGCTHVAMEATGVYWKPVWHVLEGSFELVLANAMHVKNLPGRKTDVNDAMWISDLLAHGLIRGSFVPEQAVQEMRALTRTRKQFVREKASHVQRIHKTLEDANVKFGSIVADIMGVGGRAILEALIAGETDPEKLVGVIHTKFKATRSEFVEALRGRVTRSHRFLLKLHLDHIRSLEATLASLDAEIGDILDPFRALVALLITIPGVSDTVAHVILSEIGQDMSRFPTVGHLISWAGLCPRSDESAGKRRSTRLRKGAPWLKTALVQSAWAASRAKRSYLRAQFLRLKSRRGPRKAIMAVAASILTAVYFMVRDRVEYRDLGPDHFDRLDGGKLLRRMVRKLEDLGYEVQLNKAA

SEQ ID NO: 250699 - protein, 407 aa, unidentified
MTTPTPAVYIGLDVGKTDHHAVALTSNGETVYDKALPNDETRLRGILDDLVTAHGPVLLVVDQPATIGALPVAVAQSCDDVVVAYLPGLAMRRIADLHPGSAKTDARDAAIIAEAARTMPHTLRAIRVDDEQIAELAMLAGADDDLTTQITASSNRLRGLLTQIHPALERVLGPRITHPAVADLLGRYPTPGKLKTAGPGHVRARLRKHAPRLASSLTEEIFEALAQQTVVVAGTEAAATVVPILAEQLAGLIQQRARLAIQVEAVVEAHPLHPVLISMPGVGVRTAARILTEVVGKDFADAGHLASYAGIAPVTRRSGSSIRGEHAPRGGNKRLKRALFLSAFASLHHGPSRAYYDRKRAQGKRHNQALIALARRRTDVLYAMLRDGTLYEDPTTPSAPSSVALAA

SEQ ID NO: 250700 - protein, 343 aa, unidentified
MTGIDLHGNNLVIGIIDQDGQRLKCQKLACDLKLVAAFLAPYKAQLKSLAVESTYNWYWLVDGLQALGYPVKLANPAAIDQYSGIKHADDQNDAYFLADLQRLNILPTGYVYDAQLRPVRDLLRRRMSLVHQRTALLLSFKSLYTRTTGQAMPLGRLKAMTVAEAQTLYEHPANTLIATLQKEHLDQLDQSIEQIEKTVLASARELPCHAPLLTLPGVGRILGMTITMEIGELKRFPSPGDFASYSRTVDSKRMSNGKKKGDNNQKCGNKYLAWAFVEAANFAKRYDAPCRKWFDRKAAKTSTVLATKALACKLAKAAWHVIHDHSVYDPQRMFPGGEPKQTP

SEQ ID NO: 250701 - protein, 319 aa, unidentified
MASFLGIDVSSLSLDALVRPQDIRISVRNDPAGFEELVKSLRGLSIKRILLEATGGYELDVMRFLQNASYKVIRVNPKRARSFADSLGIKAKTDAIDAAVLAHFAEVIPDQPTLKTSPERALLRELLQQRDRLVQQRDDDRRRLKQAQSAMVANFLKTNLQHFASQIKLVEQAIKRQAIVLNDERIAKLNEVKGIGMVTATKLVALLPELGHVESREIASLVGVAPFNHDSGKSVGKRFISGGRFEVRRALYMACLVAVKHNPTLKARYEALRGRGKLAKVALVACIRIFIVRLNAMLRTGTPWRDDLPQPENMAQITA

SEQ ID NO: 250702 - protein, 343 aa, unidentified
MQAITTIGLDISKSVFQVHGVDAEGQVVIRRQLKRRYVLAFFQKLPPCLVGIEACASSHHWSRELQALGHTVKLMPPAYVKPYVKRHKNDAADAEAICEAVTRANMRFVATKTPEQQSCLTLHRTRHLLMRQQTSVINAIRAHLAEFGIVAPVGRQGVEQLLAVVADANDKRLPEVARACVAALGAQLRVLKAQILEFDRMIRAWHRSSEASKRLDQVPGVGPVLATALVASVADPRTFRSGRDFSAWIGLVPKQNSSGGKERLGNISKRGDRYLRSLFTTGALAVIRYAKIHGTKHRPWLTALLARRPTKVAAIALANKLARMAWAIMAKGERYKEPAALAA

SEQ ID NO: 250703 - protein, 340 aa, unidentified
MEEITIIGLDIAKQVFHAHGADASGATRFSRRITRAKLIQFFASQPKCTVAMEACAGAHHWGRELQRLGHQVRLIPPLYVKPFVKRQKNDAADAEAICEAAQRPTMRFVPVKGEEQQASAAVFRARDLLVRQRTQLLNALRGLLGEHGWVAPKGLFHASAMMAKIEDPSCALPQSARDVFLVMIASVKALDERIRLLDREITKRAREDETARRLMTIPGIGPITATALIALAPPPETFRKGRDFAAWIGLTPLQRSTGGKAKLGAITRMGERTLRRLLILGSAAVVLHASRRGAPRGSWLEQMMARKPRMLVTVALANKTARIVWAVLARGENYRAPAVA

SEQ ID NO: 250704 - protein, 381 aa, unidentified
MIHHVGVDLHSDNAVVVMIDDSERWKLKRKFKLDIPTILSALEPYKESIKEIGVEATYNWYRFVDEFEQAGYKMRLAHPPLIEGKSGKKRTNDFHDAANLAHLLRVNNFPDAYIYPKEDRPLRDLLRKRSLLVKTSTQYKVSLINFFNRNLCINISGNEVKKLSDEDVEKMLEHEYLVLSGQANISVIKHLKAEIKKLEKVILKEARLKPEFKRLLTLPGIGDIIALTICLEMGTLTRFKDVGNYVSYCRCVDSEQLTNDKKKGEKNRKSGNRYLCWAYVEAANFAKRWCPYAKVYYKHKLKESGKTVLATKALASKLARATYYVLKNDVDYDPEKVFERFKAEAQALALIQKKGSGSKPRKGTGPGSDLGPKPRNQKPTA

SEQ ID NO: 250705 - protein, 414 aa, unidentified
MALVRWVGRAIGLDVHRDFCVVAICEEGKVRSGGRVPSTPEGLQDLAGSLLGTDRVALEVTGSCWEVARILDRFVDRVVVVSPDDTGISIARAKTDKLDARTLAGLLWKGELDAVWMPDERCGVLRRRLARREQLMRARTRSKNEIAAVLQRRLVPKPGFADLFGVSGRRWLDGLELPVEERESIDAGMRHIAFMDQEIAAVDRLVAQQALAWPEIRRLMTVPGVNLICAASFLAAIGESSRFFTSRKLVAYLGLDPKVRQSGETPARSGRISKRGSASARWALVEAAWSVVKQPGPLRAFYERIRAMRGHGKAIVATARKLTVLFWCMLTRSEDYAHQRPALTKKKLRQLELTAGAPARTKQAAGIWSTNRAILHAERALTEQAEISYKRMVTDQQAGKPSKKVGASATPERA

SEQ ID NO: 250706 - protein, 409 aa, unidentified
MGASGGRGLGILLVCCSSRRDPNMRPTGNPTLSTAALDYDSTMIGALELSSKKWVFAVQCPGVKKHSRHVVEPNGSALAELFERLKGRCAVAGRPIARVIITHEAGRDGFWLARFLERRGVEVHVMQSSSLPVDRRARRAKTDLIDVEMLLRTLMAWLRGEPRVCSMVPVPSEADEEARRAHREREDLVGARRSLLNKIGGILATLGIEGYQALRRDRRARLADLRQPDGAALPAAALARIERLLDRLELVMTQIKGVEKARDAVVAKPAAENDNERMIRDLAGVRGVGAESATLLVREAFCREFANRRSLGAYAGLAGTPFASGGMQREQGIGKDGNRRLRALIVELAWFWLRFQPDSALAQWFRERVGQARGRVAKIMIVALARKLLIALWRFAKDGVIPEGATMKA

SEQ ID NO: 250707 - protein, 316 aa, unidentified
MTSKISILAIDLAKGSFQVCAVGPDGVVVFDRAVSRTRLATLLADQPACIVAMEACATSLHWGRIAQSHGHEARLVPAAYVKPFVKRQKNDRADAEAIAEAAMRPTMRFVAVKNVATQGRAVAFRTYQCMVRQRTQLINALRGHLAEFGLVAPKGPASLKLLENALAEESTDLPEPVRHMGSIYVEQIARLTEVIDRLSDELETSSKTDEQLRRLCTIPGIGPVTAGAVAAFAPDLDTSDSGRNFAAWLGLVPRQRSTRGKARLGSVSKIGQTDIRRLLIVGAMSVIRRVVRKGGSANRWLAALVALKPKRLLPLP

SEQ ID NO: 250708 - protein, 483 aa, unidentified
MLAQAERHRCPGQVEGKDTLKVCRSKVGMPQNRVWYPGEKEVIPMGKSTYRSVEIQKVTAAQILAAVLTPLVIFALDVAKKRVLSAIADDTGKHALIVHFALPTELGRLIALAEQLVAAGRRVQIAMEPTGSYSSPILEAAHGASLETFLISPKRAHDAAEVYDGVPSKHDPKDATILARLHAQGISTRWAPMSQERRELRALMDERELYAAPLEEHFGRVEARLAHWWPALLQSTDVRQRISVLRWLTTYADPATVRAQPQQATDALRALSRGTMAPKVIEAIVASAGQPSATPMNAAERKMLTRLFEEVVRLHDKCAEVDARIEEVTRAKASWEPMRRMLGATTLAALVALVGDPSQYASASALEKACGLNLKESSSGERQGRGVHITKRGPAVVRRYLYMLALRMVGRQELVRAWYQRRRSFLAEDKLSAVVAVMRKLVRALWHVARGAPFDATKLFDVRRLGVVTALPATRPEEVSAMA

SEQ ID NO: 250709 - protein, 400 aa, unidentified
MRVVFGINVSKVSSEVAILVNGEKVHGYTMSNDAIGFSRLLGDLKTVHKPEIIFEATGVYSRRLQAFLDEHSYAYTRLNPLEAKKQLDSLRVRKTDQIDAEKLAQSQFALNRKPTYVQEEVYQDLRDLSRFYQNLTEDIVRAKNRLHKALQVTFLELENILSTPTGEQYWNLVIAFPCKDFVLELSKDKLSESIRQSTSKRISDKRVAYLAEKLIALANQSYCAVKKTSPMLEEVRYYTKELLRLSEQRQAVLDEMVELAQPLPEYDILLSIPGIAETTATSIIGELGDIRRFQSANQINAFIGIDLRHYESGNFIAKEHITKRGNPYARKILFKCIHNIASASHTNPCHIADFYKKRKRQSQTTSTKPHTIASIHRLIRTMYYLIMHNKLYDYASTQNR

SEQ ID NO: 250710 - protein, 345 aa, unidentified
MELHTIGIDLGKTVFHLVGLNLRGEVVVRKKFSRKQLLHFTANLQVELIGMEACGGAHFLGRALREQGHEVRLMPAQYVKPYVKTNKSDYIDAEAIAEAVGRPKMRFVPIKSDDQLDLQSLHRVRERWVMRRTAVINQIRGLLLERGITLRKGRCHVDEALPGILEDASAKLSGALRVLLAQLKLELDHLQMRIDEADAVIKKTAGENEACRRLVAIPGIGPITATAIIAAIGNGAAFKKGREFAAWLGIVPGEYTTGGKQKLLGISKRGNSYLRRLFVHGARAVLQQSAKQSSGLSSWLAQLTTRTHRNVAAVALANKLARMAWAVLAKNEPYRPPMLADAATA

SEQ ID NO: 250711 - protein, 443 aa, unidentified
MSFDRLKRPFDRLLGHKLKPSALLPFIQNSKPHLSMKISYFLGIDAAKHKIRVALCDLTERILFEKDLPVDSGALVQLLAQLRALVPDPVQLLVLIEATGVLHLNWSTALTKAGYTVVVINPLIARRLFHRGNALRDNKTDPIDARGLCSIGLLHGEKLLELYRFGLRPEQLRLQRLQTVRKALRRSLTNLKKTYKSLLDLSFPELEHLLQVDGVGIRQLLLQAPTPAAIANLRRSTIEKNWMLRPKAAALKTLAAQSIADPEMAQAGAPALLNILGLIESLEERLASLDQQIAQFTAQTFDPHTNALVQSIPGFGPATAAKILAFLPGDILFSANNRTAAARLQAFMGNDPRLRQSGQWQGHTKMSKRGVETLRTAFFQCAFNAAQHDPELRAFYQRKRSEGKHHEVALSHLMRILTRRLVAVLRSGLPYQSNYNLTLKNAA

SEQ ID NO: 250712 - protein, 397 aa, unidentified
MGKPEHIRLEEFRQFRKEIRGSKEYLIVGIDVAKEKHHAFFGTATGRTLWKRWLFDNSQEGFEKLLLQTEALQVRHGLPQVVFGLEPTANYHKPLGEYLIRSEHQVVFVSGVAVKRNRELLDGRWDKHDTKDAANVADLISQGKCLYYEHPDPRIRDLRLLLSLKKRLKRQEQGIRVRIRNGLVAQYCPELDPSFSRLIVPGKEGGLLFAMQQTSSIGCAVHPEVAFAAQVMMEELERIRKVLKAVQERIQTLCSQFPEYPYLLSIPGFGPQVSSQVLAAIGDPSRFQNGKQVLKMAGLDLSSDRSGKRSPAATPVLSKRGKADLRYALYQATLIASTRNMAFLAYYTQKLRGRAKEPGIRTKMRVKLAAKLLLIAWTLMKRKEAFNPQRLIPSALL

SEQ ID NO: 250713 - protein, 315 aa, unidentified
MTESMPQTLGVDISKKSLDVRLYPDGKAHRFANDRKGFSALIKWLSGYAIARVVYEPTGAYHCGFERRFLEAGFPLAKVNPRHARRFAEAVGTQAKTDAVDAGLLARFGALIEPRLLTASSAALPIMKDLLVARRALVKDRTAARNRSLQRCLALLKAQAAERLDQIERQIQAIDAALREQLESDAALKARFNILMSIPGLGEATAFTLLIDMPELGAIENKCAASLAGLAPMARDSGQWRGKRFIRGGRAEVRHALFMPALVAVRFNPDLRRVFQALTAAGKSPKVAIVAVMRKLVVLANALLRRSSPWMPKTA

SEQ ID NO: 250714 - protein, 326 aa, unidentified
MSNILGIDVSKDKLDLVLLSEEGKFHKVISNDLAGFKTLDQWLISRHIDRVHVCLEATGQYGDEVSEYLYEQGHDVSVVNPTRIKRYGESKLHRNKTDKADADLIAEFCLKEKPALWEPLNPDLKHLRALVRRLSDLQANYRQEESRLTSGEKDGWVIRDLTVHLEYLKASIEATEAEIQNFTKGTPDLKAEQELLVSIPGVGNKSSARLLGEIGDISRFENAPQLAAYAGLNPKGSSSGSSVHKKAHISKQGRSELRACLYMPAIVAMTHNPVVRALKERLQEKQLPTMAIIAACMRKLLHIVYGVLKSQKPFDPEYDRQFNFSA

SEQ ID NO: 250715 - protein, 408 aa, unidentified
MERYYLGVDWADKFHQVWVSDTQGEKVFEKRVMETVEGLSEFGRWLDENRAKGIELWAAIEKPQGRIVDFLLDHGVVVYPVNPKALDRARDRFRMSQSKSDSFDAYVLAAFVRTDHGHLRALAPNSEQAEELKLLSRDQYRLVRQKTRLLNQLNRTLKEYYVRPLEVFSDLESNLALDFLQHYPTPESVTRLSRKQWNRFAQGEHRLGEDRCKELWEKLNQPQLEVPEHVVRAKARLVAVLVVQFRTLRDAVQSYNERIKSFFASMPAAELVQGLPGAKTGTIVATLWAELGDAKSRWETFRHLQAEAGVVPVTQASGKSRVVQFRFCCNKILRHAAYWMAFISLNRSEWANHYYREQRSKGHSHPQALRALGAKWLKIIFVMWRDHKPYDENYHLANITRQRIRQAA

SEQ ID NO: 250716 - protein, 448 aa, unidentified
MSNGSGVSRGDRNRNARLTKLREAVPITHAIVGIDLADKKQMVVVTDHDSRVLARRTFRCKAWELGAALDWAGQHATGHGFMGVTVACEPTGHRWRIVGQLATDRGMSFVCVQPTLSSWARKSEDLTFDKTDDKDAVLIARLTGQLRCYLPEPVDETWGRLRHLGTRREQLLEVHVACVQQLRDLLECVWPAVLDSAAQPFKSTTWVAALTVVLRRDGGDLDRTGRLGLARFERLVRAEVVRRGKTRPCLRIVRKVFAALSDPAGVIDHRPGAFERAEWVLGDWDTARAQQVDIQARMVTVLDELALTDLVTTIPGLSAVGAAAILAQTGDLSRFTSARAVVKHAGLAPRERMSGTFTGKARLSGAGRPALRTAAWRAVWGCLQTNKVYAARYRHLTTRDNKLKPTQAQTIIAAAILRQLHAVVVHRQAWDPVVAAGGTKHKGLVVAA

SEQ ID NO: 250717 - protein, 358 aa, unidentified
MSTYYIGADVHNNSTELAIEKRNKIVARYSVPTTIPAISNVLDSLQGKKYLAVEEGPMVGWLYRNLNKKVDKFIASDPRRNKLISSDGDSDDRIDATKLASLLRGNYLRAVYHSEDNQRSELKHWVALYHDRVRDAVRHINKIRARCRMYGVRIPRLVLRDPSRRSRWLSEIKHPDLAKQLNMLWLGYDATAKQTRVAKQQLVGLSKKYRIIYLWEELPGIGLIRATTLFAFMDTPWRFKRKNKLWKYCGVGLQRSASGTDKKGRPKPARLQLPWAVNRTLKNAVLGAALSAINQKTNVFKDYYERMVKDGVITSNARHAVARKLLTVMWGMCKTNSRFDENLLCIESSRTTASALSR

SEQ ID NO: 250718 - protein, 408 aa, unidentified
MFAGIDWAAAEHAVCIIDQAGRVIDRFTINHTADGFERLVGRLAKHGDPADLAVAIERPDGRLVDRLLDAGHPVVPVKTTAIKAWREAEVGSGAKSDPGDAQVIADYLRLRRLDLRELRPFSDETRALRAVVRTRGDVVDARVAASNQLSALLAAFWPGAGELFADVWSEIALAFLERYPTPVSAAHLGEGRMAAFLRKHGYSGRRSPTELLDRLRSAPVGLADGPESEARRDAVLAMVRVVRALNRSIKDLDRSVVAHLDEHPDAVVFRSLPRAGQVSAAQMLAEWGDCRAAYDGPEAVAALSGMAPVTRRSGKHLAVAFRWACNTRFRNAMATFADNSRHASPWAASVYQAALDRGADHPHAVRILARAWIRVIFRCWQDGVAYDLARHGAARRLAEAVSLVVVAA

SEQ ID NO: 250719 - protein, 377 aa, unidentified
MKRIKFVGLDVHAETISVAVAEQDGEIRPLGMIANREESIRKLVKKLGPVEELWFCYEAGPTGYVLYWQLTRMGAKCEVVAPTLVPVKAGDRVKTDRRDALKLARNYRAGELTAVWVPDAAHEALRDLVRAREAAKQDELRARHRLSKFLLRHGRRAPMGVKAWTMKYLEWVKREVHFEQMAQEATLLDYLHEVEHGAARIARLDNAITEAVKSAPPQMRAVIEALQALRGIAHVSAVTVVAEVGELSRFARATQLMAYGGIVPSEDSSGERTRRGNITKTGNAHLRRVVVEAAWAYRHRPSVGATLRKRQEHVSEEVKEIAWKAQQRLHERYRKLLAKGKNKGVVVTAVGRELLGFIWAIGIQVETAQKESLQRAA

SEQ ID NO: 250720 - protein, 366 aa, unidentified
MLQKAGLSEEADPENYLGGSSETMYYIGLDVHKKTISYCVKDAAGCVLSEGKINASRRDLDVWVRTLPQPRMMAMEATIFTGWIYDHLLPHAEKVKVAHPLMLRAIAAAKRKNDRIDAAKIADCLRCDFLPECHMASTGIRDRRRILRYRNLVVKQSVQMKNRISGLLMETGVTYNKRRLHKVGYFADLMATNAEIHDCIRPLLRLSREHIERAQKLDYALVTSLERDPLLKERLRRLRTVPGVGPITALTWALEIGDYTRFHSIKEAISYCGLCGDEKSSADKVTRMPLSKQRNKHIQRVLVEAAKLAPRECHELAVVRERELERGNPNRATLAVARKIVCYLLAVERGQRDFVPAEEFSRTAAA

SEQ ID NO: 250721 - protein, 417 aa, unidentified
MRIVRPICCGADIHKDLIVATIATTNQDGITEYIQSSFSSQNFDLNRLKAWLKEHHCFEFAMESTGKYWIPVFNVLEDEIKVFVVHPKYTKAIKGKKTDKKDSKWIADLFKHDLLKFSFIPPKEIRELRELSRYRIKLIAMRSSERNRYQNSMTISNIGLASILSDPFGKSSRAVMKEVIRSSSVTEERISKLLERNAKKKVKEVLQSLEGSHIESDQRLKMNIASLHMDQIDSHVKRLETEMAIRCIPYATLINLLLDIPGISYLSAMTIIAEIGTDMSVFETGKQLSCWAGLAPANNESANKKKSVRISKAGSYLKPLLVQCALAAINSKSNPYYRIKYNRIKKRRGHKKAIIAIARMILVNIYHILSTGEAYNPCDMEEIINPKPVKKAMTIQNAIEFLQSQGFDTSKLILSSS

SEQ ID NO: 250722 - protein, 377 aa, unidentified
MKRIKFVGLDVHAETIAVAVAEQEGEIRSLGVIPNREESVRKLVKKLGPVEELRFCYEAGPTGYALYWQLTRMGAKCEVVAPTLVPVKAGDRVKTDRRDALKLARNYRAGELTAVWVPDAEHEALRDLVRAREAAKKDQLRARHRLSKFLLRHGRRPPVGATPWTVKYLEWVKRDVHFAVKAQEATLLDYLHEVEHMAARIVRLDSAIEEAVKVAPAKMRAVIAGLQALRGIAQISAVTIVAELGEVTRFSKARELMGYGGIVASENSSGERQRRGGITKTGNAHLRRVVVEAAWAYRHRPAIGFTLRKRQENLSEEVKEMAWKAQHRLHARYGKLMAKGKNKGVVVTAVGRELLGFIWAIGVQVEAQQKDSLRQAA

SEQ ID NO: 250723 - protein, 353 aa, unidentified
METPIKQAAGIDCGIQELVVSFGLLAGNGNFICKLTKAFTNTTKGFKQLLEWIAKISSIDVPVLFVMEATGVYHEKLAYYLIANNCRVSIVLPNKVNAFAKTCTSKKQDDQQASRVIAEFGCVKHVDEWQPPHPVFANLKQLTREKQQLQEELTVIKNQLHAEQIKAITASASIKRMKARSRLIEKQIVEVEKEITDLANQDAAIKERINKVCTIPGVGLQTVVTAVAETNGFNLVRNRKQLVSYAGFDIIQKESGTSVRGRVHISKQGNPYLRRCLYFPSLSAVRYNKPMQNLYNRIAEKQAIKMKGYVAVQRKLLMLIYTLWKKNETYNPSIKFLEQPVKAALTELDYIRS

SEQ ID NO: 250724 - protein, 430 aa, unidentified
MTTVHPTVSTDEPAWFVGFDWGSEKHRVALFDRTGKLIGRRDVAHSASAYAELGDWLLRTTQARPAEIAVAIETTHGPVVDALIDRGFRVYAINPKQLDPFRDRYSVAGAKDDTRDADTLGRSLRTDPEAFRVLSPDNPLIVQLREASRTAAELTRDLGRLTNQLRDLLWRYYPQMLALDDNLAAPWLLELWQHAPTPAKGARLHKETVARILKTHRIRRLDADQVRTVLREPPLPSAPGVTEAATGHIRLLLPRIRLLNSQIKVVHAEIDALCQQLAGPQTIEPGESVPGQSIEQRDVAILHSVPGVGRIVGATLLAEASEPLRRRDYHAIRTLAGQAPVTKRSGKSCFVQRRLACNKRLANAMYHWARVAVVCDPRSKQRYAALRARGCSHGRTLRSVADRLLKLLCTLLQRQVSFDPNHNAKQAAAG

SEQ ID NO: 250725 - protein, 347 aa, unidentified
MSRARIYKEGRETVQPNSNARELAAEACGPTSWVGIDVSQDWVDVVVLVAERKAEQFRCDRAAAALGELARRLLTYEPRGVVLEATGGLEGAVITALVAAGLKVMRMNPKRVRDFARAHGLLAKTDALDAHILALFGARMQPALRPWPEAERQQLAAWVARVQQVTAERAAERTRLRQASEPQLRQSMERVIAFLGKELARLEQQLAAWVEASETWKAQEALLRTAPGVGPKTAVRLLAQLPELGRLNRREIAALAGLAPFACDSGQWRGRRRIRGGRGAVRAALYLASWSAVRVPGRFKEAYQRMVAAGKPRQVALIAIARRLLLALNEMMRSNTPWRTQENAIFT

SEQ ID NO: 250726 - protein, 392 aa, unidentified
MFYIGIDIAKRSRQAAVTDISGNIIVKPFNFKNTAAGFTQFLSVLETNSVSKDNCVIGLESTGHYWYPLYFFLVEQKFSVKVFNPIQTAAFREITIRKVKNDNLDSIMIADFTRFGRYSETYIPSENMLALKNLSRFRLSVCDICGSLEKRTIVLLDLVFPEYASVFCDMFGTTSKQLLEKYSTPDEFSEISTTKLANFILKASRGRNGREKAELIKTAAQNSIGISYAIDTFSFEIKQLIEQIEFMENQLSEIDAEMAKLLAESEYSVITTISGVGPTLGSIIVSEIGDIERFETSSKLVAYAGLDASVKQSGEFNSSQNKISKRGSPYLRRALWMAAFMSLQCDPALYDYYSRLRARGKSHRLATTAVARKLCIIVWAIMKSKKPYSPHI

SEQ ID NO: 250727 - protein, 383 aa, unidentified
MATKSVEGFDRSKAKIQRESSRRPGPGVRSTLGVTKPTRRRQKETPVEQQTQYVGIDLHRRRSVIVRRNQAGETLDTVRIDNDPVTLAAELAKAGEHPEVILEATYGWYWAADVIQECGGTVHLAHPLGNNWGHRRVKNDERDATDLVDLLRMGRLAEAWVAPPPLRELRELIRYRGKLVHLRTSLKSQVHSVLAKEGVSVPMSDLFGVGGQALLDKVHLAEAYRVRVESLRDLIDSVNREITKLEEQTAPYFAGDLGYHAVQAIPGVGPVLGAIFVAEIGDISRFTSARHLCSWAGLTPTHHESDEKVRRGHITKQGSRLVRWAAVEAVARQRSDTPIRRHHHNVGDRRGTQIGRVAAARKLLILVYYGLRDGEIRCLAETG

SEQ ID NO: 250728 - protein, 344 aa, unidentified
MPTEAVKSLYAGLDLHKRNVFCALIDQEGRPIWRRRLPAELPTILHVLEPYRAQLKAVAVESTFNWYWLVDGLQAAEYPVRLANPAGMQQYSGLKQTNDETDALWLAELLRLGILPEGYIYPSAERPVRDMLRRRMLIVRQATQTVLSLQSMVTRHTGQSVSATKLQAWTLQEVRATFADSYSQQTATALLELLGDQRRIQHSLEKQVLAAAKPTMPFQRLVSLPGIGQILGLTIALETGPITRFAGAGDYASYCRTVNSRCESAGKKKGQNNRKNGNQYLAWAYVEAAHFAQRYSPRAQAWFASKTARVGRVVAVKALACKLAKAAFYVLRDGVNFDEHKLFG

SEQ ID NO: 250729 - protein, 315 aa, unidentified
MVEQVVVGIDVSKAKLDVALLPGGEQFTVSNDRHGIGELLRRVRPLAPSRVVLEATGKLEQLAVSELAAAGLPVVVINPAQVRHYAKARGKWAKTDPIDARLIAEFARDLEPELRPLPDAETQALAALCQRRNQLLEMEQMEKSRLQRAPRANQKSIKAMLRFVRRQVEQVEKQIEHSIRHSPLWQAKRELLESMPAIGKVNSSTLLARLPELGQFTRQKICALVGVAPYNDDSGQWHGRRHIAGGRAGVRQVLYMATLSAVRCNPALRDYYQRLLGRGVEPKAALIAVLRKMLTILNAMVRDNTPWRPPCPTPA

SEQ ID NO: 250730 - protein, 339 aa, unidentified
MFIIGIDPHKRSHTAVAVDCSETVLDTIRVEADHHQRSRLLEWVTRFEPRTWAVEGATGMGSMLAQQLVGAGEHVVDVPAKLSARVRLLERGRIDKTDPNDARAAAIVAWRTPALNVVTANDEHRVVLRLLADRDHQITAQRTRSICRLHALLCVLIEGGTAKSLTATKTEELLASVHIDGPITFERLTTARQLVDEVRALDAARAEVRRRHVAALEASKTTVTEVFGIGPLTAAIIVGRVGDVRRFQTAGHFARHNGTAPIEASSGPKTRHRLNPRGDRQLNHAIHMAAVTQVRNDTPGRGYYLRKQAEGKSRKEAMRALKRRISDAVYQRLIADARR

SEQ ID NO: 250731 - protein, 343 aa, unidentified
MRHYAGLDVSVKETSVCIIDESGKVCRETKVPSHPEDLARALHDRAWCLERVGLEAGPLSQWLFSGLAATGLPVVCIETRHTKAFLQAQVNKSDRNDARGIAQMMRVNLFRPVHVKTLTSQKRRALLTARKLLQEKALAVDNDIRGLLRNFGLKVGPIGASKFETRIRELVEGMPELAEIIDPLLEARRKLRELFAVLHRKLLVIVRDDTVCRRLMTVPGVGPVVSMAFTATIDVPARFKSSKAVGAALGLTPVLNQSGESKRIGRVSLCGDGMTRTLLYEAAQVMLTRTTKWSWLKAWAMKVAARRGLQKAIVALARRLAVILHRIWVSGTDFRWTRDAQST

SEQ ID NO: 250732 - protein, 341 aa, unidentified
MERTVIAIDIAKKVFQLHWVDTDTGCIERLQLKRAKLLEWFANRTASHVVMEACGGAHDWARSLSGLGHEVRLISPRKVRPFVQRNKTDAADAQAIWTASRQPGMRFVPVKTEAQQVVLSLHRLRAQLMKTRIMQTNELRGLLYEFGIVLPEGHCALLKALPDAMHDAKSRLPGMLMDSLDEQLRRIQQLQADIGGIERRLSQQMRDMPACKAVAEIPGIGLLTATAVVASMGTPTAFKDAREFAAWIGLVPRQTGTGGRVRQLGISKRGDAYLRTLLMHGARAVVIRAKDGPTWPWLAALLQRRPYSVAVAAVANKLARTIWAVLARGQAWRPQAWQAAH

SEQ ID NO: 250733 - protein, 355 aa, unidentified
MWSLGIDQHARQITISLRDENGDVLLARQVSTQPEKIQAFFQQLTQDRLQKGEEFVAILEVCGFNDWLIRMLQDYRCYKVILIQPDERKKCKTDRRDAAALSELLWVNRARLLAGKPVRGVRQVDIASSTDQENRRLTTLRKEARQARTRVINKIKHIVRRHNLQWHLPTKTFPTKPAIAWLKALVLPATDRLEMNYLLADLEHLEQRYLDLEKVIAERCVASEDAMIVSSMPGVGNFTATALACRVGRVERFPRSHSLPNYWGLTPRCRDSGEKTQRLGSITKNGSSMARWLLAQVAYQVLRKDRRLREWYKNIKRRRGSNIARVAVMRKLATIIWHMLKHRKTYAECRAFMTT

SEQ ID NO: 250734 - protein, 370 aa, unidentified
MRFYQGQHPFYCGIDLHARTMHVCILDQAGQTVFDKGIPCRPEALLRAIQPYRDHLVIGAECMFAWYWVADLCVEENIAFVLGHALYRKAIHGGKAKNDRSDAGKIARLLRGGTFPLAYAYPKGMRETRDLMRRRTYLVRKRAELLTHLQILNAQYNLAPFPKKLACAANRTEMNVAERFADPSVQKSAAINLALIDRLDELIGDLELYLVRTAKVDDIQTFYRLRSIPGVGKVLALILLYETHDIGRFDTAGQFLSYARLVRCAHESGGKKLGTGGKKIGNAHLRWANACAACLFLRSSERAKKWKQKQAAQRGEGKALAILAARLGRAVYHMLRKGEAFDEDRFWSGARRTRTGSSSLSRKEARDAGH

SEQ ID NO: 250735 - protein, 309 aa, unidentified
MSEFIGIDVSKVTLDVAAHSSGERLQAENNEAGLKQLGEQLLALGPELVVMEASGGYERLCAAALAQAGLPVAVVNARQVRAFALATGVLAKTDAVDARVLAHFAAAVHPAVRPLPDEQRQTLDEILGRRRQLVGMLVMEKNRLAQARTPGVRRDIKSLIAVLEKRIGGCDGELQRLIQASPVWRAQEDLLRSFNGIGPVNARVLLVELPELGTLNRKRIAALVGVAPISRDSGQHRGRRSIAGGRGQIRAALYMATVAAMRANAVIRAFYQRLRQAGKPAKVALVACMRKILTILNAMVRNQTRWQSA

SEQ ID NO: 250736 - protein, 339 aa, unidentified
MNEFTKKKHFIGIDISKDKLDLALVNEKSPGVFEDKIVDNSFKGFDNIQNWLLKQKIKLEDCLFCMEHTGTYGLLLFAWLGKMEIDYCVEPGLQIKRSLGMSRGKNDKVDARRIADYAFTNRAKLALFSLPSTLLLQIKQLLTYRDQQTRIKVSLKNSLKSHDQYQRVSGLHSISDDIKGQIGECESRIKGIEEQIKDLIKSDETMKKNFDLATSVKGVGLVIAAFMLVTTNNFTGFENGRKYACYAGIAPFDNTSGKYKGKTKVSHLANKRMKAILSNGANSACKWDPELRVYYDRKIQEGKEHNLVINSIKCKLVNRVFAVVKRQTPYVHIYQQNFG

SEQ ID NO: 250737 - protein, 412 aa, unidentified
MEVLHPHCAGLDVHKDSVVACVRHMVDGDVKREVRSFTTTTKGLMALSEWLSVEGCTHIVMEATGVYWKPVWHILSDGEFELVLANAAHVKNVPGRKTDVSDATWLAELLAHGLVRGSFVPDQQTQEMRDLLRSRKQFVRERTSHVQRLQKTLEDANIKLDSVISDIVGLSGRRMIEALIAGETDPDALAALAHRRIKASPAELEAALRGRVTDHHRFMLRLLLQHIDAIDAAITQIDQEVDAQVEPFRTAVQLLTTIPGISELSACVILAEIGRDMSRFPTAGHLISWAGLCPKNDESAGKRRSTRMRKGAPWLKTTLVQCAWAAARKKASYLQAQFHRLRARRGAKKAIGAVAASILTAAYHMLKNGTLYQDLGPDHFDKWAQAKQVHRLIDRLRNLGFAVQITPVEAAA

SEQ ID NO: 250738 - protein, 312 aa, unidentified
MVNVGIDVSKARLDVAIRPSAERFSVANDEEGHKELRKRLAKNKPDRIVLEPTGGYESQVVQVLVAAKLPVIVVNARQVRNFAQALGRLAKTDRIDADVLAHFGEAIRPEVRAFPDEALRELEALVNRRRQLVDMRAGEIKRKQTAPPLVHPKLDELIAFLTEQIDDIDKDLHGLIRKTPAWREADDLLQSVPGVGPVLASTLTALVPELGKLNRKEIASLVGVAPFNNDSGQGERRRMTWGGRAPVRAVLYMATAAACRFNPAIRCLYDRLIEKGKPAQVALVACMRKLLTILNAISRDRRGWNPQIAVAS

SEQ ID NO: 250739 - protein, 405 aa, unidentified
MNAVGIDVSKGKSTVAAVNLTKEVTLTQHEFEHTEVGLERLIYNHLLTLDGEVRVVMEATGRYHEPVAAALHEAGIYVSVVNPILTHDYGNNSLRRIHTDKHDALKIARYAVDNWNELREYTPLDSMRQQLKLMSRQYNFYMKHVVQLQNNLIAILDKTFPGANGLFKSPLTKEGNEKWVDFVATFWHCDCIARTGQSAFTERYKKWCKRKGYNFSGEKAFDAYVSSLGHWTTLPKNAFTKMLVTTACNQLIAANKGLAIIKAELLRISALMPEYDQVKALYGVGGITAAQLMAEIGDVRRYDNRNSLIAFAGVDPSPFQSGKYEAKSGKASKRGSPHLRRTLFQIVSTHLKRSPKDEPVYQFLDRKRAEGKPYYVYMTAASNKFLRIYYARIKAFLLSLETAAN

SEQ ID NO: 250740 - protein, 311 aa, unidentified
MTYVGIDVSKKTLDCCVLDTDNELYLKVQNSQAGYDELMSLLALYDDVHVCLEATGSYWQSLVEFLTVNDVRLSVENPAKIHYFAKASMLRMKSDKRDALLIADYCKVMTPRLYSPVTEAVAELKLLVGMYQRLKKQKVSERVKLLEAPALVKPLISSNIEHFNNQLLETKEMLKAFFRSNADLAHKHEILQTIPGIGFSSGVVLLSILASGYTFESANQFVAYLGLNPRKMESGTALKGRERISKIGKPEYRAALYMPAVVAYSKKLYPDIVARLQSNGKTPKVIIVALMRKLAIYAYTVYKTNCAYVAK

SEQ ID NO: 250741 - protein, 340 aa, unidentified
MSMKKPKQHLIAEVPRRDSKVGKTIWIDLGDVWSHYCTLNEGGEVVDRGRFRTSPSGVETWFTDLPPVRIAMEAGTHSIWISEQLQELGHHVIVANMRELRAISHSDRKSDQVDAEKLARYARLDPKILRPIAHRTVAQQEALTLIRARNLIVRLRTAAVNAVRGLAKPCGTRLPASSTLCFAKRCAAVLPPGLALALVPMLEQIAEMTVIKRLTEAEYPETQALIKVYGVGQLTALTYVLTLGSKERFQRSRDVGCYLGLRPRRSQSGDRDPQLGITKAGNIYLRSLLVECANHVLGPHGKDSGLRQWGLHLASRGGKQTRNRAIVVVARKLAVLRNRI

SEQ ID NO: 250742 - protein, 361 aa, unidentified
MAKVRSWAGLDVHARSVLAVTLDAQSGELCSQRLPGETAKVVEFLERLPGPTRAAYEAGPTGYGLARALHAAGIGCVVAAPGKIERPAQDKIKTDLRDAERVLRLLMIDGLHPVRVPSIEEEALRDLVRAREDVRGDLMRARQRLSKLLLRHGIVYEDTSSTWTQKHRAWLRSQQLDGGTQATLLDHLGAIDTLELRRTSLETAIAELVPGSPWAQTIGRLRCLRGIDTLSAVGLAAEIGDFDRFDRPGKLMSYLGLVPSENSTGQTRRQGSITKTGSRHARRLLVEASWHYRKPPARGITLQRRQDGQPAHIVQISWQAQQRLHRVWQRLDTQRGKRRTIVAVAVARELTGFCWALARAD

SEQ ID NO: 250743 - protein, 467 aa, unidentified
MTPPKDFCLDPGPPAPTPTCPPSPVLSDALQICHPHAAGIDIGEAEHWVAVPPGCDPQPVRRFGTFTVDLDALADWLIDCGVTTVAMESTGVYWIPLFELLEARGVQVLLIDPRQAKRAPGRPKTDRLDCKWLQRLHAYGLLAGAFRPEDQVCVLRSYLRHRQMLLTSAAHHIQHMHKALQQMNLKLTQVVSDITGVTGMAILKAILAGERDPVILAKLRNPHCQHSEDEIAKALQGTWRTEHLFALQQAVALYDFYHQQLALCDRQIKAHLETFADKSAGQPLPPKARRHKKTNEPRFDARTPLYRLAGVDLTTIEGIEENTALIILSEIGTDMHRWPSVKHFWSWLGLCPQHQISGGKVLSRRVRPGAHRVTVALRLAARTLHHSQSALGAFFRRMKARLGTPKAITATAHKLARLVYSLLQHGSAYVQQGLDAYEAQYRERKVTTMAKQAKALGYTLVPLAAQG

SEQ ID NO: 250744 - protein, 336 aa, unidentified
MFFAGIDAHLKYVQVAVLDRLGKLTLKTRLSTREPQQLLEALAPFRPLDVVVETCPFWPWIHELLVPAGIRFHLAHAKELRAIAAAPQKNDAVDAELLARMLLSGLIPEAYPRPVHQREQLRLLRHRAALVRQRTRLASRIHSQLHQQRLSLPREKLLRQATREWLHTTAWPQLTDEQRALVTTHLELIDQLTPMIRALDRRIGAAAAEDSTATRLATIPGIGPYRSLLLAAELSPIQRFPRPEHLVSYAGLAPVTRSSGGHTRHGSIPRGANRWVRGALVSAIPSHVQHAPESTITATYEQLKARLGWRVARVATARKLARIIYHMLQRAENWRG

SEQ ID NO: 250745 - protein, 420 aa, unidentified
MSLKDCAAFVGIDWADQEHAICLIDAQTQRSEQHRIDQDPEAIDQWVATQQQRFPGRKIAVCLEQKRGALMYALMKFECLMLVPVNPKQLARFREALGSSGAKDDPSDARLLAELLIKHSEHLRSWQPDDERTRKIRLLAEDRRNLVNERTALTNRLKSRLKQYFPLALEVCGKSIYGALTCQLLLRYPSLQKLQAATDDQLTEFYREQHCYRSQIVAERLCLIRHATPLTTDPAIVDSSTLIVEVLVQQILTLNEAIERYDAQLTAMMEEHPDADIFRAFPGAGDAMAPRLLAALGSDRQRLSDAQQVQQISGIAPVTRQSGKSRIVQRRWAASRFLRQTFHEFAAHSIKQSPWAKAYYDMMRARGNKHQAAVRALAFKWIRIIYRCWKDRTLYDEMAYCAALIKRQSPLLKYLSTTTN

SEQ ID NO: 250746 - protein, 311 aa, unidentified
METVIGCDVSKDRIDVQVLGAAAHRRAQIANRESAIRRWVAQLPAGCRVGMEATGTLHQMLARALVEAGHTVYVLNPRWVYAYRRALGLRGKTDAGDAMAIARYIDAEAKNLHAYQPPSPEQAELRRLLLRRLELKKLRSATRQSLGAAARALLEQFDVLLRELERRIAALIAADPQWCALAERLRSIPGVGPIVAAHLLQVLTRIGFGSAQAFIAHTGTDPRPNDSGQKQGRRRLTHHGDVGLRHMLFLAAMAASKLPQWRALYEHHRAKGLASTAVFVVLARKLARIAFHLFKTGESYDPTRLGGAKPA

SEQ ID NO: 250747 - protein, 389 aa, unidentified
MKIFVGIDIAKLNHFAAAISSDGEILLEPFKFTNDADGFQLLVSKLESFDKNSIIIGLESTAHYGDNLVRYLVAEFYQVCVLNPIKTCQMRKNNVRKTKTDKVDTFVIAKTLMMQDDLRFITFFDLDMMDLKALGRFRQKTIKQRTRLKIQLTTYVDQVFPEIQYFFKSGLHQHAVYALLKEAPSPKEIASMHMTHLANLLKVNSHGHFTKEQAKELRVLAQKSVGANDSSISIQITQTIQQIELLDSQLEKIEAEMTDIMRFNDSVIMTIPGIGYINGGMILGEIGDIHRFSNPNKLLAFAGLDPSVYQSGNFQAKTTRMSKRGSRVLRYALVNAAWNVVRNNATFKAYYDAKRAEGRSHYNALGHCAGKLVRVIWKMLTDKVEFNLE

SEQ ID NO: 250748 - protein, 394 aa, unidentified
MKLVGIDVGKNSHHFCVMDKETGEFNFAPSSFSNNKEGFDFLINSLKPYSKKSILLGMEDTGHYHVALLKFLLSNGYTVALINPKTTDLTRKMEGAITKNDKLDTITICDVLDTPERKKQYRITKVDRFDLYEQRQLTRHHHNLKEELNIYCNRLQKSIDLVFPEFNTLFGSKYGVVYMNLLKTFGSAEAIASTDIRTIRKCFEIKGRGGRISLTAEKLKECAKNSIGISSEVETIQIKHLVSQIMLIKEQIAEIDKKIEEFSIKNNSPILSIPGISHFSGTSILAELGDIGNYSKPSRIIKFAGVAPYHYESSQYNAQHTAITKKGSKYLRKTLYQVILPVINNNPVFKKYYLLKISQGKGHRCAQGHCIRKLLRVIYHLLETGQSFDPALLR

SEQ ID NO: 250749 - protein, 407 aa, unidentified
MNPLYVGIDVSSTNNVVYFMKPDGTKIKNFSVPNSKDGSKKLVKDVLSALTSYSLTDVIFGLEATSVYGDNLVCFLREDGSLTPYNRKIHVLNPKQVSKFKESYNDLPKNDYVDSFIIADCLRFGRINKEVYLDDYRHKALQNLTRARYVTVQNLTKEKQRFMNVLFKKYSSFTQEKVFSDKFGATALAVYEEFDSADTLAYMDLHELTEFLQKKGKNHFSDPEAIAKAIQKAARSSYRLPKTVNDSVNQVLAISISSIKALESQIKEFDKAIANQMQLIPNTLTSIKGIGPVYSAGIIAEIGDINRFPSQEKLAKYAGLAWTQHQSGGFEAQNTRLIKTGNRFLKYYLGEAAMSLVRCDAEYSRFYHLKYNEVNKYQHKRALALTARKLVRLVFRLLKDNRLYVER

SEQ ID NO: 250750 - protein, 334 aa, unidentified
MKKFEFFLGIDISKNTLDYCLLDDQCKVLEKGKVNNEPVSLSQFFLKFENEYCCKTTLLIVFENTGIYSKPVARFLNENKWCYSEVSALEIKRSKGVSRGKSDRVDAHQIAQYGFRNLDKIMLCTEPELIHQQLKILNTEREKMLSAIGSFSRTGEAEEFLGKEVFKVVKTHNRQTLSALRKQLKQLDDKISALLRSNEDLKKKQELLKTIPGIAEVGSLYLLLATKGFTRFKNWRKFACYCGIAPFEYSSGSSIRGRNRVNPLADKKMKSLLHLLALTSIRHDPELKLYYERKKEEGKHSLLVLNNVKCKLVSRIFAVIKRETPYVKTHQFAN

SEQ ID NO: 250751 - protein, 342 aa, unidentified
MERENRQTGRAVQLRVSHQPGAIRYCLRNCEAGSEVAVEATGNWYWIVSEIEQAGLKPQLVHPRKAKLMMGLINKTDKLDVHGLNRLQRNGTLPTVWIPSAELRDQRELTRTRLVLVAQRTRLKNRLQSTLAKYGLVVQGCSDAFGTLARSQWSELLAQLPEQTRWVSQQLLEQLDGLEQQIKQCEKRLADLLRVTPEMQRLQSLPGVGLILGASIALEIGTVSRFGSAERLASYAGTTPRVHSSGDKLRFGRLRPDINRYLRWAFVEAANVVALHHLRRPERHVSELYRRLKQRKGHAKAIGAVARHLAEASFHILSRREEYVDPALGKGRSKAGVSASPS

SEQ ID NO: 250752 - protein, 385 aa, unidentified
MRRAKRRGPGPSHLLITPDHAGNVVGIDPHKRTVTATIADPRGGILASEHFRVSGNGHRGLEAWALAFGPVARWGVEGASSWGRHTAMFLCGRGYDVRDVCANRTPRHDRARQRGKSDVLDSERIARETLAHSLLPKAFKRAGEDQGPDEQHQLLALWHNRRRSILTSRQHLLNEAEHLLCELPLKLRDELPDSKAVRPRLSALAARNRRRRYDPPTRLRLQLLDRYAAQIAALDREEKTVVSELRALVRTSGSTLSELCGLETRSVAELLVEVGDPRRFTEGGFARFNGSAPLPASTAEGPGEPVRHRYNPGGNRRINAVLYRMAITQLRCEPRAQAIFATARAKGHTKKEARRILKRHLSDVIYRRMIRDLACSHPAQPLLAA

SEQ ID NO: 250753 - protein, 355 aa, unidentified
MTSTKYIGMDVHKESISSAVMNASGKIVMECVIETKASMILQFMNGLRGDLHVTFEEGTWAAWLYDLLKPHVTKLVVCDPRRNALLKDGNKNDRIDARKLAELLYLNKLNPVYHGEHGLRALKELVRSYLTITKDLVRVMTRVKAIYRSWGIPCTGKQVYAPRHRGEWLAKISELGVRRRAEFYYQQLDALRSLRQEVRRDLLAESKKHQAWKRLCQIPSLGPIRAAVLLGILQTPHRFRTKRPLWKYSGFAIETRSSADHRSVHGQLQRSKKQISVRGLNQNCNHDLKNLFKGAAIVASSKPGPFQEFYTALLAKGMRPEMARLTLARKIATIALIVWKKGVCFDAQYLKPQTA

SEQ ID NO: 250754 - protein, 312 aa, unidentified
MSAVVVGIDISKDRLDVWVVPTSDKWNVPNEVDGLAELACRISEVEPKLVVMEATGGFERPVRAVLEEAGFRCAVVNPRHVRDFAKSMGIKAKTDSLDAFVLATFGAKMEPEARPGKDRDTLELEAVLTRRRQLVGIAAAEKNRLKQAPSEQVRTDIRDHIAWIETRLKDLDTDIRTRIKDMPQSREKAKIIRSVPGIGRITTPTLLAMLPELGKLTRKEIASLAGLAPFNRDSGKFQGQRCIWGGRAAVRSVLYMSALSAIRWNSAIKAFYNRLIGAGKKKKVAITACMRKLLIILNSMVRNNTMWQPRAA

SEQ ID NO: 250755 - protein, 331 aa, unidentified
MDSKKYIGMDVHKEATTVAVMNAAGKLIMESVVETKAATIVQFLEGLRGDLYVTFEEGTWAAWLYDLLQPHVTKVVVCDPRKNALLKTGNKSDRIDARKLTELLRAGLLSAVYHGQTGLRTLKELCRSYLTINKDLTRTMNRLKALYRSWSIPCAGPSVYAPRHRAEWLSKITEAGVRRRAELFYQQLDALQGLRQEARHDLLAESRKHAATNLLRQIPYIGPIRAALLMALIQTPHRFRTKKQLWAYSGLALETHSSGEYHYVQGQLQRSKPVILKSGVKLAIFMQICPKNEHLRRRVMQQLIKFHKSSFSLPTVLAFELDARFSLLSWQ

SEQ ID NO: 250756 - protein, 346 aa, unidentified
MLIVGCDFHPSWQQIAWLDAETGQTGEQKLVHAAGEARQFYQQLAAPVLIGMEATGNSQWFIELVEDLGHEIWIGDAAQIRASYLRKQKTDKRDAVHILKLVVEGRFPRLWTPDREQRDLRQLVLHRHKLVEIRSRVKNELQHLSMNKGMQKKRTLWSQAGQKMLRELPLKPWASCRREDLLGLLVLLDEQIGKLDGAVQQAADEHPQAQLLMTQPGVGPNTALAFVLTLGDVSRFRRGKQVASYLGLIPREQSSGGRQKLGAITKQGNRLVRSLLVEAAQVAVRYDPGFRKQYLHRCHQKPKAVAKVAAARKLAVRLYWMLRTQVAYPEIVRIESSPRVALVGAS

SEQ ID NO: 250757 - protein, 398 aa, unidentified
MTESSDYESVQVFIGVDVGKDTHHAVAINRSGKRLFDKALPNDENKLRSLISDLKQHGQILLVVDQPATIGALPVAVARSEGVLVGYLPGLAMRRIADLHAGEAKTDARDAAIIAEAARTLPHALRTLKLADEQIAELSMLCGFDDDLAAQTTQASNRIRGLLTQIHPALERVLGPRLEHPAVLDLLQRYPSPEKLASLGEKKLAAQLCKLAPRLGKRLAADIAQALAEQTVVVPGTNAAAVVLPRLALQLITLRKQRDEVALEVEQRVLAHPLYPVLTSMPGVGVRTAARLLTEVACRAFASAAHLAAYACLAPVTRRSGSSIRGEHPSRRGNKALKRALFLSAFAALRDPLSRAYYTRKMSQGKRHNQALIALARRRCDVLFAMMRDGTFYTPQGS

SEQ ID NO: 250758 - protein, 340 aa, unidentified
MTIVMGLDQHRAQITTEWIDTVTGEIGRARVAPAHREGVRRFLGRFAGQELEVALEATTGWRFVVEELHRVGAAVHLAEPAQTSALRGNKKRAKSDRADAKHLRELLMIGRLPESWIPPDYLLDLRSTVRLRHTLVDQRGEWQQRIRAVLYHHGLPHRRELDLLTSEGRGWLDEVDVPDAAREQITVALAIIEALAAQITPLDKQLRSYARRQAGCKALMAHYGIGELTAVTILAELGDCRRFSSSRQAVRYAGMDITVYQSDGHRSPGHLSRQGPPALRWALYEAAQVARRPASPDRGYYDQAAERLGANRACLAIARKLLLRSYHTLRELGEEALQPA

SEQ ID NO: 250759 - protein, 354 aa, unidentified
MKYFAGLDVSLKETAICVVDEVGRMIKEARAASEPDALHVTLASFNLSFERVGLEACSLTAWLHGELRSAGWPAICIESRHAKAAMGAMPNKTDRNDAHAIAQIMRTGWFKAVHVKTPICRSWRSLLVARRAVLNEMRTIENVVRAILRETGLKLGTPARKDFIVRARELIAGEQTLASMIEPLLEILGTMLREFARLTKQVLTIVRDEPICRRLMSAPGVGPLTALAFRATIDRPERFRKSRDVGAHLGLTPRRYQSGETDIQGHVSRCGDELVRTALYEAAHSLLIRSKKWSSLRAWGMKIAKHRGMARARVAVARKLATILHRMWIDNAEFRFGQEHNIAPTVKAIAGAAA

SEQ ID NO: 250760 - protein, 430 aa, unidentified
MNGSNGIRLHEFCQFRKEIRGSIEYLVIGLDIAKERHNAFFGTATGKTLHKGMFFDNTYEGFQKLLIQADALKVQYGLRKVVFGMEPTANYHKPLGEYLIKGGHLVVLVSAAATVKNRDLMDGRWDKHDTKDAANVADLISQVKCLYYDCPGEDLRSLRGLQSLKKRLKKEEHGLRVRIRNQLLAQYFPEMDQHFGSLASLNVVQRCLDPTDISLMEYDEFCRTVSPGKVNLAQQKRLTQIWRAAKQSIGCSVGEAVSVEAEIMVAALHRVRETIETVDDRIEDICLKFPEYSFLLTIPGFGPDVSSKVLAAIGDPERFTSGKQVLKMAGFDLCASRSGKTSNSATPVISKHGKADLRFALYQAALISSLNNTEFIVYHTNKIRGREREKGIGTKMRVKLAAKLLIIAWTLMKKKEPFDPGHLNRPAKAA

SEQ ID NO: 250761 - protein, 320 aa, unidentified
MPSTTVSERVVIAVDPHKASWTAAAVGSALAPLATLRTPVSRQGYRQLRRFAARWPDAEWAIEGATGLGAPLATWLSGDGIEAVDVPAKLATRVRMLSTGHGRKNDDADAVSVGIAALTAPGLRSAAVEDAIITLRALVEHRDDTVRTRTQTINRLHVLLTGLLPGGAPRQLDADTAARLLRTVRPRATGPATLRRLAAELIGEVRHLDRRIATASTQISDAVTASGTTLTQLRGIGDLTAGKIIGRVGDITRFRSPAAFASYTGTAPIEVSAGDVVRHRLSRAGDRQSSSVCTSWRSSRSAATPWDEPTSSANALREES

SEQ ID NO: 250762 - protein, 414 aa, unidentified
MQVVHERCAGLDVHKKSITVCRLVPNGEGGWKRETRTFETKTPDLLELSDWLKQECVTHVAMESTGVYWKPVFNILESSFTVLVVNAKHIKHVPGRKTDVRDAEWIAELLQHGLLKASFIPDEPQRDMRELVRYRTHLIQERTREGNRVHKALEDANIKLSSVATDIMGVSGREMMQAIIAGKDDPAALAELAKGRMRNKIDELEKALTGHVRRSHRLLLRMHLEHIDELNERITELDGEIGNLMRPFDQEDLVERLDAITGVGKQTIEVVIAEIGTDMSRFPSHRHLASWAGLAPGKNESAGRNRSARTPKGNQYLRTALVEAALAAGRSKGTYLGEQYRRLARRRGKKRAAVAVAHSILVIMYHMIQDGTEYMERGSTYFDNLNPQRTQKWLVRRLEQLGFQVSLEPIAAAA

SEQ ID NO: 250763 - protein, 408 aa, unidentified
MEKFLKLCVGTDVSKDTLDICLSGLREDLSVKVVESKSFSNNAAGISQLMKWAKQNTDGNPYQVVMEATGVYHEKLAFTLSKNAVEAVVVLPKLTSNFFKSHNVRVLNDKISAEQIASFGLSRKLDIWKEPEPVYMALRALCRHRYQLDKMNTQCSNQIHAQKHSETSLQEMIDMSEEMVKLANKQIKEIDKKLQVIINENDWLKAKVKNICTVKGLGWLTVVKIIAETSGFHFFRNGRQLVAYAGYDVLSKESGTSVHTKSRMSKKGNKYIRAAMYMPALSAIRSDPKMAAFYSRLFHRHFIPRKSNVAVQKKLLVLIYTLWTKDCPYDPDYCHPASQCHDQENNPGNDPEFDHENGQPSKITETTINKNREAIRRSLHRLDQVRLQDFDDTNIEKNPQIEHCQRIE

SEQ ID NO: 250764 - protein, 389 aa, unidentified
MKIFVGIDIAKLNHFAAAISSDGEILLEPFKFTNDADGFQLLVSKLESFDKNSIIIGLESTAHYGDNLVRYLVAEFYQVCVLNPIKTCQMRKNNVRKTKTDKVDTFVIAKTLMMQDDLRFVSFYDLDMMDLKALGRFRQKTIKQRTRLKIQLTTYVDQVFPEIQYFFKSGLHQHAVYALLKEAPSPKEIASMHMTHLANLLKVNSHGHFTKEQAKELRVLAQKSVGANDSSISIQITQTIQQIELLDSQLEKIEAEMTDIMRFNDSVIMTIPGIGYINGGMILGEIGDIHRFSNPNKLLAFAGLDPSVYQSGNFQAKTTRMSKRGSRVLRYALVNAAWNVVRNNATFKAYYDAKRAEGRSHYNALGHCAGKLVRVIWKMLTDEVEFNLE

SEQ ID NO: 250765 - protein, 344 aa, unidentified
MEHFAGLDVSVKETSVCIVDETGRIVREVKVASEPDALLAVLKSGAYHFKRVGLEAGPLSQWLYSALGEANLPVICVETRHMRAVLKAQINKTDRNDARGIAQMMRAGLYRAVHVKTLRSQKLRTLLTHRKLLQSKAIAIENDLRGTLRNFGLKVGIVGTARFEARIRELVETLPDLTLLVEPLLVVRRALREQIAVLHRRVLAVVRDDEVCRRLMTVPGVGPVVALTFRTTVDVPARFRNSRAVGAVLGLTPCKYQSGESDYTGAISKCGDEMMRVMLYEAAQIMLTRTIKWSWLKVWAMRIARRRGMKKAIVALARRLAVIMHRIWVDGTEFRWTRQEAAAA

SEQ ID NO: 250766 - protein, 328 aa, unidentified
MTFSQTIDRENYVGIDVGKKSLDLAVYGSKKTTTFPNTEEGIEKLLLALQKINPSLIVVEATGGYERLLVVALISQGFPISVANPTRVRALAKASGKLAKTDAIDAHLIAEYACLMKPQPISSFDEAFLRLQALVKRREQVVEMRTAEKNRLDKSPLFVEEYIERHILQLEEEVALLEKEIRTLAASIPCCREGMELLSTIPGVGFITSVTVLALLPELGTLDNKAIASLAGLAPFNRDSGKKQGKRKIFGGRKRVRRVLYLSTLSAIRCNPVIREFHERLIERGKPSKVAITACMRKLLTIMNAMARDNTPWQEFSLPEVEILLPVS

SEQ ID NO: 250767 - protein, 457 aa, unidentified
MSSPTILPTVPPHAAGLAIGKTEIYAAGRPTADPQPIRVFGTFTPDLHALADWLVACGVTSVALESTGVYWIPVFELLAARGLQVCLVNASHIQRVPGRKSDYQDCEWLRQLHSLGLLAASFRPDAEIVTRRSYLRHRAELIQHRAPHILHMQKALRQMNLQLDSVLTDITGVTGQAILRAIVAGERDPVKLAQLRHPNCHSPAAMIAKALTGPWCEEHLLVLKQALALFDFYTTQLAECDAAVARCFSAIRPRFTPPPTAADTAETPPVAAPTAPAKKTSHSHSKNAPAGNVRADILRITSVDLCAVDGISASIAQIILSEIGTDMTRWPTVKHFCSWLRLAPRNDISGGKVLKSRTLPHHQRAAQAFRLAAQAVSRADCATGAYYRRMRARLGPQQALVATAHKIAGIVYFMLKEHRPYADRGAEAYNTRFREHEVKLLERKAAKLGFTVTPKTV

SEQ ID NO: 250768 - protein, 362 aa, unidentified
MNKYIGLDIDSNKTVCCIVQAGEKDKYRTISSTIPAMKAFITGQRADGSKVHLVFEISGQAGFIYDSLIDCADGITVANPSKMTWIYRTAKKNDRFDARKMAVLLSIGEIPSVYMPSRVVRQWRQMILHRKKIVQQVTQAKNRIRALLKSEGFGRPYDKGSWWKKSNRFWMGRLVRDGGDIGSFDLWRMQLGDLIEELCTLENQLRTVTEYLDKYLSQKAEADLLMSIPGVGPRTVEAVLAYTDNLKRFDNYKQYCGYFGLTPKLDESGSTRRLGHISKHGPSVVRWLLCESGWKVIRKSKVIREFYERVKGGQDGRKKIAIVAVCRKMLCIMRAMLRDNETFNEELVGKFCGRNKQVKDAA

SEQ ID NO: 250769 - protein, 349 aa, unidentified
MRFYNQQHRFYCGVDLHARTLSLCVLDAAGAIVLHQTLGAGPDAFLRAVAPFRDGLAVACECMFAWYWLADLCQEQEIPFVLGHALYMKAIHGGKAKTDKIDAHKIAVLLRGGMLPQAYVYPKGMRETRDLLRRRTFLVRRRAEALVHLTNTNSQYNLPPFAKKLAYAQNREELDIPQRFADPSVKKNVAVDLALIDAYDQQIGDLELYLARTAKVDDPQAFHRLRSVPGIGKVLALILLYEIHDIRRFPEVGQFLSYARLVRCAHESAGKKQGTGGNKIGNAHLKWAFSEAACLFLRESEQAKKWLARREKKHGKARALGALAARLGRTVYHLLRKREVFDAKRFFAS

SEQ ID NO: 250770 - protein, 416 aa, unidentified
MGVEICSEELAGKVVAGVDTHADTHWLCVLDEERRVALSREFPADAAGIAALADAIGDPARCAAVGVEGTCSYGAALAGELALRGFRVLEVLNKKKERRRGRGEGKDDALDAERAARDVLAADGTSVPKERSGWVDGARPLLVARERCVSARVEAHAAALSLARTAPEDERRRWEGMGQERMMRAMLEIEEEGAGALHRAMLSLARVWEACTAEAERLERMIADAVSEGCPALLAMYCCGPVSAAKLAVAAGANPGRIRSEAAFAMLCGAAPIPASSGKTERVRLNRGGDRRANSALHEIAVRRLRYDPATRDYVARRISEGHTKAEALRCVKRYIAREAYRALLRPHDVGERLDRSSLRRAREGAGLSQAQVARALGVAPSSISGVETGRNQCRRLAERYSQWVLDGMPMEGGGI

SEQ ID NO: 250771 - protein, 345 aa, unidentified
MNIHTIGIDLGKTSFHVVGMNERGEVVVRKHFSRAQLLRFTANVQVELIGMEACGGAHFLGRSLREQGHEVRLIPAQYVKPYVKTNKSDYIDAEAIAEAVTRPTMRFVPIKTDDQLDLQSLHRVRERWVMRRTAVINQIRGLLLERGMTLRKGRCHVDAALPGILEDAEAKLSGALRLLLSQLKIELDQLGMRIHEADEVIKRTAQQHDACRRLVAIPGIGPVTATAVIAAIGNGAAFHKGREFAAWIGLVPREHSTGGQQKLLGISKRGNSYLRRLFVQGARAVLQQRTKQSAGLGTWLAQLTLRTHQIVVAVALANKLARIAWAVLAKNETYRPPVLADVAAA

SEQ ID NO: 250772 - protein, 403 aa, unidentified
MNSFYVGLDWGNEKHAVCVMAPDGTIVGERMLLNDGAVVSVLAAMVGGPLAGLKVAVEARDLPVVDALVAAGCELFTVNPKQVDRFRDRYTSGGAKDDRRDARVLASALRTDPDAFRAVLVESETEMLIRLRGRALRDCTEAFGVVANQLRAQLARYFPAVLTLCPGANERWLWRLLRKASMPERAARLTERTLAALLQACRVRKLTAADLHASLRAERLSIAPGVELACAEQALRLVDQLELLAAQLSCAKKLRNEAVEQLAEQQRRERGVSDVDLVASMPGAGETVVATLFGEAAHLLRDRDSRNLRVLAGVAPITKASGKSHRVVMRRSRSQMLADALFHAARVASMNAPRFKELLARQRARGNNYARALRGVADRYIDVLCAVLRSGVPYDSSRYPKTA

SEQ ID NO: 250773 - protein, 282 aa, unidentified
MNSYIGIDVHQDKCHATIQDGDGMTVKQGEFANSPSGFKDFFNGIEKAKVVIEAGCAWQPVYDWLDENGFEVKLAHPKKARIISEVKIKTDCRNSEALADLVRADLVPEVYVPCDERRELRRTAKQRGKLVQERSKLKNRIKNQLRKEGIEYRERNLWTHSGKQWLKDLELDAVDDFLQVLDTLNERISKLESKIKETAGDMEDAQLLMTIPGVSYYSALTIIAEIATVERFPTSGHLCSYAGLVPSTKQSGSTETHGSIKGGRPLLRWILCQAVHNHRRWL

SEQ ID NO: 250774 - protein, 465 aa, unidentified
MAARKQKPQKKRMSARLVEDEDYQLRHEKVAGIDIAKASGMVCLRLPPAEGKDRRSSKVWETGATVPEIEALAAELKQAGVELVSMESTSDYWRIWFVTLEAAGLNVQLVNASQARNLPGRPKTDKDDSQWIARLTEMGLLRPSFVPPPEIRALRQYTRRLVHLGQDRTRSWQRLEKLLEDALCKLTSVISKLAGSVSGRAMIEAMIAGERDPHVLAEMAMTRMRPKIPDLVKAFTGMRFGDQHAFAAASLLREIDFVSAEITALEKQVAAHLATIPAAWGVDADGTTGPDAGLGPDAAVLPAAARLDEVTGISFLSAAGIIAEIGLDMSRFPTPDALVSWAGLAPVAVQSGPRKNHGKKGHGNTYIRRLCTLAADAAAGTDTFLGERHRRISSRGGGRKKANVAVGRSILVIVWHLLKDPAARYTDLGPDHYAKHADTSRKTRGHIRQLEALGYDVVVTPREAA

SEQ ID NO: 250775 - protein, 392 aa, unidentified
MVYVGIDVAKDKHDCFIVNSDGEVLYDVFTIQNNMDGFEDLLFKIKTVSKNPDKIRVGLEATGHYNCNLLGFLKNKGLTTIVINPLYTSLSRKSTSLRKTKTDKVDARTIAQMIMSDVSLKPYSDTLYHNEDLKSLSRYRFDKVSDRAKLKQSVSRLVCILFPELEKLVSTIHAKAVYELLSEFPGAYQVASANLKHLTALLETASKGHFGRDKANEIREAARQSISSYLPAKSMELKHTINLIRELSDEIDEIETEIKKIMDAIDSPILSVPGISYAIGSMIVSEIGDFSRFDSPDKILAYAGCSPTTYQSGQLYSSHAKMEKRGSKYLRWALINAARYVCNWEPTFAAYLEKKRSEGKHYYVALSHAAKKLVRLLYHLEITGEKYKPVSV

SEQ ID NO: 250776 - protein, 367 aa, unidentified
MGWMAPLRHLSAKVLVDRKPPANREPSMNEITTVGLDLAKHVFQVHAVDAEGDTVLRKQLRRAQVLAFFSRLPRCLVGMEACATAHYWARELRALGHEVRLMPAQYVKAYVKRNKNDAADAEAICEAVGRPTMRFVPVKTAEQQAAVLLHRGRERLVRQRTMLVNALRAHLAEFGVIAPQGLRNVGRLIAIIRDDDDARLPGLARQVLQVLAVQIEQLEAAIAALEKRLMGWHKSNPVSQRLATVPGIGPIIATAIAAMVAEPSGFRSGREFAAWLGLVPRQNSTGGKNRLGGISKRGNQYLRRLLINGASANLLRSKATNADPWVIGLRRRRPSLVVAVALANKTARIAWAVMHRQENYQRMATAA

SEQ ID NO: 250777 - protein, 344 aa, unidentified
MSVCVGIDVHRKRSQVAVIDADGEVLANRHVPNGVEPILKVIGGLPPGTPAALEAAFGTGWLVELLEDYGFDPHLVHPLRCKAIASARLKNDKVDAAILGQLLRADLLPEAWIAPPPVRQLRALLRHRVQLVRLRTLLRNRIHAVLADHGHDRPAGCWSGPGRAWMASLQLPAVSREVVDDDLALIDALETVIGRLDWEIHQRARSDPRVKVLTQLPGVGPFTALVILAEVGDVSRFGSARKLASWAGLTPTVRGSDRVAHYGHISKQGSVWLRWVLCEAAQTAKRSPQFAPGFQAIARRRGKKIATTAVARKLLTRAWHLLTDAEHAAATQPAAASAPQTGTR

SEQ ID NO: 250778 - protein, 407 aa, unidentified
MNTAVGIDVSKGKSVVAAMRPFGEVAMPPCEFLHTSEDLSVLMQSLRLIDGNTRVILEATGRYHEPVVAALRKAGIFVSVVNPKLIKDFGNNSLRKVKTDKADAVKIARYGLEYWEEMREYTETDAVRQQLKLFSRQYNLHMKTVVSLQNNLISLLDSAFPGINELFKSPVRNDGHQKWVDFVCTFYHRDCVCGVSAAAFSERYLKWCRRKGYQFSTTKAAELYAASREMVVTMPKNALTKALIASAAGQLVAATTMLATLKAEFIRLAATLPEYEIVHSMYGVGDITGAQLMAEIGDVRRFANRGALIAFAGVDPGVNESGKHSSQSVRTTKRGSPHLRKTLFQIVSTHLKQSPPDEPVYQFLDRKRAEGKPYLVYMTAAENKFLRIYHAKVREHLNALESATLDT

SEQ ID NO: 250779 - protein, 423 aa, unidentified
MKYALVRVLPEVPPGGVCAGIDWASADHAVCVVDLAGQVADRFAAAHDRAGIAGLIARLRGRGAAEVAIERGDGVLADALLAAGLTVVVIGSRQVKNLRSRYGSSGAKDDRSGAFVLADTLRTDRARLRPLVPDSPATLALRAAVRARRDLVAHRVSACNQLRAHLQVAFPGAVGLFSELDSPLSLAFLAAFPGQQAAARLDEQALAAWLATVPRRGNTAPAGVLAARLAAAPRGAAGADAAQAAVTTQLAAATAGLAGRVRALEAEIAAQLAAHPDQHIFTSLPRAGTLRAARLLAETGDCRARYPDPWSLAGLAGVAPVTRRSGTYISHEFRWNVNRQLRDAICDFADGSRHASPWAATVYAAARDRGKDHPHAVRITARAWVLIIWRCWQDGTSYDPAKHRALQDVLTRQAAAGTPQPHR

SEQ ID NO: 250780 - protein, 428 aa, unidentified
MSGKQTVQPEPKFVAFVGIDWADQKHVWSWQKADSTQREAGELEHRPEAVEAWVGELCRRFGYGPIAVAVEQVKGALVYMLRKYDCLHLYPVPSTMSAGMRQALYPSGAKDDPRDADVLLELLLLHRDKLRRLTPDNEATRRVQNLVEERRKLVEEKTAQLNRLTGNLKVYFPQMLKWFAKLDSKLVCDFLERWPSLEELQKVPSAELKKFFRHRRGRHGQLTEWRMAEIRQAMPAIGDRGVIEAKRTVVQVIAQLLRALLEGIATLDRKIAEAAEAHPDFFIFQSLPGAGDALAPRLLAALGSQRERFGSANEVQKYSGIAPVTESSGKKKWVHFRWACAKFLRQTFHEWAGHSIAQSVWARAYYYQQRERGKEHHAAVRALAFKWIRIVFRCWQDRVAYDENRYLMALAKRGSHLASAFAAATASM

SEQ ID NO: 250781 - protein, 379 aa, unidentified
MGEHTEAFVGIDAAKARNAIAVAEGGRGGEVRYLGEVDASEQGMRRLVARIAARYDRVHFCYEAGPTGYGLHRLITGLGHDCTVVAPSLVPRKPGDRVKTNRRDAVALARLPRAGELTPVRVPDEGHEAMRDLVRARAAAVEALRVHKQQVAAFLLKHGRHFPRETPRGARYMRWLQEQKFAHPAHQIVLQEAVEAVRLARGRVLRLEGLIEELLPTWSLAPVVNALQALRGVSLVVAVTFVAEIGDLRRFESPRRLMAYLGPVPSERSTGDAVRRGGITKSLPRTRSGAGNGRVRHLLVESAWTGSVRARASPEVVLSEARRRALTRLRGCLARPRSGEGGAVGGGRRGRAGRGGSGGGGSRGARRGRGRTGQLISGT

SEQ ID NO: 250782 - protein, 348 aa, unidentified
MLRITLTGQVQKRPVYAGLDYQQSFVQVCVMYASGAVLSNHRCANTAKAVREAVERCGVIVSAAIEACCGAADLAEELVAAGWQVSLAHATYVHKLKQSPDKTDWSDARLLADLLRVGYLPKVWLPPRELRQLRHVVRHRQQLAERRRATKLRVTALLRSERIEFTGSRWTKSWIHSVRHCADLGEQGLWVVTELLNEIVHLQHQLDRTAARLEELTKDDPFVKQLRGYHGIGLITAVTLKAELGTMSRFRSGKQLSRFCALSPRNASSGTKQADAGVIQAGNRELRRVLIETAHRLMRCDERWAQLGASLKARGKPGNVAAVAVANRWMRWLYHQLQPLAVSLTASV

SEQ ID NO: 250783 - protein, 329 aa, unidentified
MMIIGVDYHPSFQTIAFLIEETGECGEQELNHSDGQAEKFYRDLKQRGICVRVGMEATGYSRWFERLLAELGFEVWIGDPAEIKTKRVKKQKTDREDARLMRKLLLENRFPRIWVPDPENRDLRQLLWHRHRLVQMRTRIMNQLQALAMNEGYRLKKKLFSEQGRAQLEKLSLAPWASRRRQELLELLDRMNPTIEELTAAVEREARKRPAAQRLMTHPGVGPLTALAFVLIIGTWERFPRGKQIGNYVGMIPSEDSSAGKQRLGHISKQGNSLLRFLLVEAAQAAARCNPDWRRRYMHLAMRRHKSIAKVAMGRRLAVSVVLDVAEWM

SEQ ID NO: 250784 - protein, 423 aa, unidentified
MEEARKESTRESSYKVAGIDVHKAMLAVVIADAAEVGEFHFERRKFGAAPSDLKALAEWLTAQGVKEAVMESTAQYWKSVWQELEGKCELHLAQAHSNRAPRGRKRDFADAERLVRRHVAGELILSFVPDPQQRLWRMMTRTKHQLTRDRVRLHSQLEAFLEDARIKLSGCLSDLLGVSGRDMLKALAAGQKDAAAIARLAQPEVKATQAQLCDALSAAACLSDLRRQILQLFLQRLELIENQMETLTRAIAGELREHEDAVRRLAEVPGFGADSAQQVIAEVGPGAAAFPSPGQLSSWVGSCPGREESAEVSKNNRSPKGNRPMRRVLDQVANAAVKTKGSVFEALYRRLVPRLGHYKTIWAIANRLCRLTWKILHQGATYQERGFRPNPKAVRQRATKLMKALRNLGYNVQISPSHTGASA

SEQ ID NO: 250785 - protein, 411 aa, unidentified
MRLFVGDDWAEDHHDVELMDGAGKVLARKRLPEGVAGMAQLHGLIGTWLGEEAGDSEVLVGIETDRGPWVAALLAAGYRVYPVNPLLSSRYRDRHGVSGAKSDAGDAHMLAGLVRTDSHQLREAAGDSPEAEGIKVLARTHKTMIWERTREVQRLRHQLREYFPAALDAFDDLDAPDTLELLAKAPDPERARKLTRAQVSAALKRARRRNIPDKAGAILAALRGGQLSQPPALTAAYAATVRSLIAVITALNEQVKVLEAQVREHFGRHPDAEIILSQPGLGPVLGARVLAEFGDDPHRYRDGKARRNYAATSPITRASGKKKVVAARFVHNDRLVDALNAQAFAALNASPGARAFYDELRARGIEHNDALRRLANRLVGILHGCLKTRTLYDEATAWGHRGNLPQSSVAA

SEQ ID NO: 250786 - protein, 378 aa, unidentified
MPSENTVHIAIELSFSSWLVAARLTGAKKSRLHRIEGGDTGALLALIAELRSRALTQLGGAAEVACCFEAGRDGFWLHRLLTAHGILVYVLEPTSILVNRRSRRAKTDRLDAEGMLRVLAAWLGGDRQVCSMVRVPTPEEEDGKRPHRERERLVQEKLRIENRIEALLFTQGIRARPSLRSWERELTELRTGDGRTLPPLLRAELDRLRRRLVLILELIRELEAERAAALAAAPDEAMAQKITSLQRVRGIGANFSAVLVREVLYRSFANRRQLASYVGVAPMPFQSGGMDRDRSISRAGNPRARTTLIQLAWLWLRYQPGSALATWFRERVGTLQGRTRRIAIVALARKLLIALWRYVEAGVLPAGVEIRTGTVPAA

SEQ ID NO: 250787 - protein, 361 aa, unidentified
MKKASRELPKMEAGIAKPEMTVGLDLGDRYSHYCLLNSDGEVVEEGRVQSTEAALRRYFEGEDCLRIALECGTHSPWVSRLLNALGHQVIVANARQIPAITGSESKNDRNDAEKLARFAAFDPKLLSPLEHRSEERQVDLNLIHARSTLVRARTMIVNALRGLVKSAGGRLPVCSTESLPVRALAAIPPALSAVATPLVEQIGLLNAQVDGMDKQIAKLSAKYPEIVLLRTAPGVGPIVAAAYVLTLGQPDAASNRSAGAFLGLRPAQSQSGAADPQRRISKGGDSFLRSLLVQSAQYVLGRFGPDSELRRWGLKLAATGGKRGKKRAIVAVARKLAVVLHALWRSGHRFQPFPQQAAVAA

SEQ ID NO: 250788 - protein, 364 aa, unidentified
MKIVGCDLHARQQSIAMVDTETGEFTEKRLMHEGNAVRDFYASLEGPVVVGIEATGAMQWFLELLEELGIKCRVGHPAKIRAAETRKQKHDRRDAEVILDLLVMKDRFPDIWMPSTEQRDLRTLLRDRHQWVKMRTRLQHTLQAIALNHALREGRALWTAAGQGALQGLALPPYTDQRRDELLSLYTQLEKRIQQLDKQVETEAQQRPRARRLLTHPGVGPVTALATEVFLGDPTRFATANQVASYVGMIPCEHSSGKKQRLGKLTKEGNSLLRYLWVEATLHAVIKDAELKRFYRRKLIQKGMGKARVAAARKLGIRLWIMLRDEIDYEEFCRRGKLRQKGKAHAGMPDFNSGPARAVTGLTE

SEQ ID NO: 250789 - protein, 433 aa, unidentified
MDEVTDEPLYRDRVCGIDIGKAELYATIRVPSDKDPARRMSETRSFPATRRGVLALADWMRCWQVPALVMEATSDYWKGPFYRLEAEGFECVLADARQVKNLTGRPKRDPSDSSWLAQCFERGSVRPCFVADPEFRIIRLHTRYRRDLTEDRTREKNRAEKLLESAGIKLSSVVTDLHGVTGRDIMDHLIAGETNPGTLAQLARGRARRKISDLEQALDGAEFFTPEHAALLQSMLARIDQINAKISELDTVIEQLLAPWEEQLQQAESMPGWGRRSAQDVLAETGPDMTRFATGGHLASWGGRIPLDKQSGKRHGQARHKKGNKYIAAATGETAVAAGKTQTREGARYRKLARTRGKNKACVALGNTQLKVYHKLLSNPGMRYEDLGPDYYQNRAATRRKIDYHVREIEALGLEVTLCRKPGPTGPGEDQAA

SEQ ID NO: 250790 - protein, 346 aa, unidentified
MTIVEDCRAITGGVDTHADTHVAAALDPIGGLLGVQEFPATTAGYARLLGWLGGFGTVALVGIEGTGSYGAGLARHVTAAGIRVVEVDRSDRQDRRRQGKSDPLDAVSAARAAQSGRARGAPKGRDGAVEAIRALMVAKRSAAGERTRTVNQARALILTGPDDLRARFTGYTTAALASGLASLRPRPGSTVGYATRIALRELGRRAVFLDGQIERLDELIVPLVTARAPSLLALFGVGPDTAALLLIAAGDHPGRLRSEAAWAHLCAAAPIPASSGKVTRYRLNPGGDRQANHALWRIVFTRMGSHAATRAYVERRTAEGKSKAEIIRCLKRYVAREVYPHLRPAG

SEQ ID NO: 250791 - protein, 412 aa, unidentified
MRIVGLDVSRSVAEVAYLENGILKSGGRVGLRRDELERFAAQLRPDDHVVLEATGNTAAIVSVLQAHVGRVIVANPLQVRLIAEARVKTDKIDAAILAQLYASGFLPEVWIPDEATQAMRRQVSRRAQIVRQRTRLKNEIHAVLATHLIEKCPATDLFGKKGRVWLSNQPLPTDERMGVEQRLREHDRLGEDLREIERVLAQSVMEDGRLRRMLTITGINTAVAIGLLSAIGDIGRFRTPGKLVSYFGLNPCVYQSGSQPARHGHISKRGRSYARAMLVEAAWAAAQSAGPLRAFFLRIKDRRGQQIAAVATARKIAITVWYVLTRDEAFAWDRPALTAHKLRSLELQAGLSSQRGGRKGSAAAYNLKSVRDQERAVAEQAERTYQRLFSRWKQAGPKNSRSQLQRPPTQAR

SEQ ID NO: 250792 - protein, 412 aa, unidentified
MQVVYARCAGLDVHKTTVVACVLSTQADGSVREQVRKVSTMTADLAALSGWLREQEVECVALESTGVFWWPVFNLLEEQGHQVVLVNAQHMKAIPGHKTDIADSRWLADLLRHGLLRPSFIPPAAIRALREVVRYRATLVRQRAQEINRLQKVLEGANIKLAAVATDILGVSGRAMLEAIVQGEEDAEVLAELAHGRLRAKLPALRQALEGRVQPHQRVLIRAQLEHIAFLEAAIAGLDTEVAQALVPFQQAMTLLQSLPGVTHTAAAALIAEIGVDMSRFPSAKHLASWAGVCPGNKQSGGRRLSGATTHGDPWLRGLLAQIAWAAVRTKGTACAARFHRIARRQGRQKAVVAVMHHLLVVIYRLLRDAVPYQEPGPDYYHPDDPARQRRRLVQRLEHLGFAVTLTPLDVA

SEQ ID NO: 250793 - protein, 373 aa, unidentified
MKEFSKYVGLDTHKDTIAVAVAGACGGKPRYYGEIPNTAEAVSKLVRKLSPAGEVVSYCYEAGPCGYGIYRQITRLGHECAVVAPSLIPTRPGDRVKTDRRDGESLARLHRAGELTPVWVPDQEQEAIRDLTRAREDMKAMERHARQRLNAFLLRHGKIYESGKSKWTQAHFRWLERVKFEIPVQQIVFEEYVDTVKQAQLRVMGLEEEMRRALAGWQLALIVEALMALRGVKLITAMTVVAELGDISRFDSPRQLMAYLGLVPSEYSSGKRQRRGGITKTGNGHVRRVLTEAAWCYRFQARKTAHLQRRAEKTSASVQAIAWKAQKRLCGRYRHLLARGKLRVQVCTAIARELSGFIWAIACEVMGRPVMAR

SEQ ID NO: 250794 - protein, 413 aa, unidentified
MDVVHPRCAGIDISKRDAKVCVRIQGRGNTPTTSTVTTWGAMSNQILALREHLLTERVSCVVMEATGDYWKPYFYLLEDALTVMLVNAHDARNMPGRKTDVSDAAWLADLGAHGLLRGSLVPPQPIRELRDLTRARTALTRDRSRQVQRIEKVLEDAGIKLSSVATDIMGVSGRAMLAALIAGTATPAAIADLAQRRMRSKIPALTEALTGRFTPHHGYLIRMHLDLIDQYGQALADLDVRIGEAMAPLAAARELLISIPGVSRIVAEVLLAETGGDMSVFPSAAHLASWAGTAPGCNESAGRVKSTKTRRGNRYAKTALGTAALAASRTKETYLSAKYKRIAARRGPMKAVVALEHSILVATWNMLTNGEFYRDPGADYFARRIPAKTKARAIGQLEALGYRVSLQPLTDTA

SEQ ID NO: 250795 - protein, 411 aa, unidentified
MDVVHDRAVGIDISKRDAKVAVRIPAAKPGTFTTEVTVWDATTNEILALRAFLETKDVTVVVMESTSDYWKPFYYLLEETLPVMLVNAKNARNIPGRKTDVSDAQWLAQLAAHGLLRASFVPPEPIRELRDLTRARAIAVQDRTREIHRLEKFLESSGIKLTSVVSNLTGVSSRAMLDALLAGERDPRVLAELAHGKLRPKIPMLVEAMTGFFNEHHARMVRSHLKQIDGLGDRIDEFTTYIEEAMSPFRHVRDILTTIPGVSERIAEVIIAETGADMSVFPTPGHLASWAGVCPGSNESAGRVKSTHILPGNKHLKAALGMAAMVAIRQKTSYLSVKYRRIASHRGRMKAVVALEHTMLTAIWTMLTTGETYLDLGPNYYATLNPDRARNKAIQQLENLGYEVTITHAAA

SEQ ID NO: 250796 - protein, 417 aa, unidentified
MEVLYRTCCGLDVHKLTIIACLSSVLPDGQRRKELNIFATTTDGLVALVNWLREGNCTHVAMESTGIYWKPIYNALTLSGLFDAVMVVNAAHIKAVPGRKTDVNDAEWLADLLQHGLVKASFIPDQAQRELRDLTRTRTILTDERSAAVQRLQKVLEDANIKLASTKLVTDIMGVSGRLMLEAILEGHSSPQAIAELAKGKLRKKRAELEKALVGVVREHHKLLLAMHLEQIDLLDEQIARLSQEIAERLRPFEAELARLDTIPGVGRRTAEVIAAEVGLDLSHFPSAGHLASWAGMCPGNDESAGKRRTGKTRKGDKWLRRALIEAGVAAGRTNGCYLQAEYRRLRYRRGPKKAAVAVGHSILVIAYHLLTRNEDYRDLGPAYLDEKRRERAKRRALAQLDALGFAATLTPKQPAA

SEQ ID NO: 250797 - protein, 412 aa, unidentified
MLKIVYRVCCGMDVHKSFVVACIATTNDHGVTNYKSKRFSTFTGDLRRCADWLSENNCKDVCMESTGKYWIPIYNILEHTCNIVLAHPKYVKAIRGKKTDKRDAKWIADIFKHDLVSGSFIPPADIRQLRDLVRYHWKLTNFNVGEKNRAQNCLTVSNIKLDDVFSDVFGKAASAITTRLLESNEPFDVKPYLTKNIKKPIEQIQAAVDGEMCAEQAEKLRIIRSHMDSLELCKLNLESLILSTAEKYIPQLNLVMTAPGIQSFAAIGIISEIGVDMSVFPTSKHLCSWAGLTPQNNESAGKKKTTRISRAGAYIKPLLVQCALCAIRTKQFPEVRNRYLALKKRRGHKKAIIAIARMLLTAIYNILKWNEVYNSELYRKADRPPAHREVSVEEAVFILQRQGYLVTAPAVT

SEQ ID NO: 250798 - protein, 316 aa, unidentified
MTQLCAAGVDVGRDFFDVGLAPSGRVFRAPNAPSGIEAVVSRLKREGAGRVVLESIGGYAARLVRALADAGFEVGVIDPKRIRALRIAEGKRAKTDALDAKLIARFALMMNDAARPIPSAKTFEIRALSTRRRQVVEMIAMEKVRLKQTLDEAVADSIRFVINTLNQERDRVERALQEELLAQEQGKAHAELLQTIPGVGPAVSLTLLADLPELGRLDRKAVASLAGLAPHPDSSGTHIGKARISGGRPCVRAALYMAAVSAARTDKGFKREYMAMRSAGKPAKVALIAIARKIVVAANGIIRTRQPWQKLAASKG

SEQ ID NO: 250799 - protein, 345 aa, unidentified
MKKNLFFIGLDISEADFAASIYKTPGQPIVTKEAIPNDRKGFKMLLLWLNDYHIDKKNCRICMEATGVYSQAIAYYLLFQGFPVSVEPPLKVKRAFDPVGHKTDPVDSKQIAEYAYRFQDELTSWKPRDEILEKIRQLLSVREQFTKQKVALDNSIQAYSKQRVQVALIKKAQKETLDQLKKQIARIDKELEKLIKQDPEIFQRTNNLDSIPGCGMLLAAHLLVITENFTKIQNSKRLAAFIGIVPYQHQSGSSVSKRAKIRYFGPGPSRKLLRLAAQSVATHNVTFRRYYLRKLDQGKAKPLVLNNIANKLLKIACTIIRNNTRYIKDYRSINPMYLKNAVKNA

SEQ ID NO: 250800 - protein, 424 aa, unidentified
MNFKMQDKQNQLIERISDTHLIVGVDIAQQLHVARAVNFRGIVVGDPITFENNEEGFVKLLNWIQDLKRLKNLDAAIVDMEPTGHYWINLSKWLYNQNIEVVTVNPHLVKRNKENRDNTQSKSDKKDALVIADMVKNGYYSFIRPSSESFEKLRVLMSNRDVIVKRLVMSINQINRWVDVVFPELRQVFKDVSCKGAIATLRLFPTPDEISLMEPLDVMRGWKSLMKRQPGPKKAQLLINLAKSSIGTGQALDAYKFHLEQLLEEYDLAVKQLERVEQQVKEVLNQIPFAKKLLMIKGISEISLAGILGESGDLSGFSHGNSLLRHAGLHLAEASSGKWKGQIVISKRGRSRLRRFLYLATMSLVMNNPEFKALHSHNVKVKKIKKMKLIMKLVGKLARIFVGIARRNESYCPNKIQELIPLAA

SEQ ID NO: 250801 - protein, 407 aa, unidentified
MNENGKRYIGLDVHKHYLIALGVDGDLEVVMPARRVELSNLESWMKKNLTKQDEVVLEMTTNTWRLYDELVEHAGSVTVVHPPHVTLITRSQIMTDKIAASILARLLAKGLLVGIWVPPQEIRELRGLVAQRQKMTRLATQAKNRLHAVIQRHHLMPPEGNPFAKKNNGWWESLSLGRLEKMNLQSDLETLQFSEKQESRLQEEMTGIAAENEEIGRLLHIAGFGVITAVTVYAAIGDIHRFEDAKHLVGYAGMGTRVHDSGMTTRTGKITKAGRRDLRVALVEAAHVSANSHPHWKAELARLEPRLGRNKAIVAIARELLVTVWHVLARKVADRFAEPEKVSKKMLHIAYEVGKANRAGKSAAQFARERMDIVGLGSELTSIPWGTKKPIPLPPSKLKKESAVPNK

SEQ ID NO: 250802 - protein, 366 aa, unidentified
MKKHNTVKKSAGDWKGVQRKLTVGIDLGDRSSRYCILDEQGEVLAEGSVATTQKGFAQVFGSKLRSRIALEVGTHSPWVSRYLAELGHEVIVANPRRVRLITDSSRKDDRLDAKTLARLARIDPELLSPIRHRSEQAQADLMVIRARAALVEVRTMLVNSARGLAKSYGERLRSCGTGQVREELAESLSEPLQNALNPLLAEVESVSQRIREYDEKIENLGKSRYPEIELLRQVHGVGTLTALTYVLTVEDPHRFRRSRDAGAYFGLRPRRRESGNSRPQLRISKEGDAYVRKLLVQCAHHILGPFGPDSDLRRWGLELAKGGKNAKKRALVAVARKLAVLLHKLWVSGEVYEPLRAPKNRKTAAA

SEQ ID NO: 250803 - protein, 415 aa, unidentified
MKFEKDTRGIKRYIGFDIHKEYALMGGQNAQQEWVMTPRRIGMEKLREWAKANLGKGDAVVIETTTNVWDVYDIVEPLVSYVVVAHAGGVRQIAEARVKTDKKDIERLLRLLIADIVPEVWVPPVPVRELRGMISYRNRLVKTSTMIRNRLQSLVHRHNLILPKGKLRDKAWWEGQKMSALEKIQIRQELAMLNEMEKHKGEVDGELGRQSLGEVWGKQSMRLLQLSGFGVIVSMTVLSAIGDVTRFESAKKLVGYSGLGAGVHDSGKEHIEKRITKSGRKELRWAMVEAAWRAIRISPYWKEQYEKYLRRMRKPNQAIVVIARKLLVVVWHVLTKEETDERVSEEELAYKMLVLSWDLNEDVRMGLTYKQFAKYALMRLGVETDITRFVRKNVPRRLVSREEVLARMEELGIRQ

SEQ ID NO: 250804 - protein, 415 aa, unidentified
MNYSTVYVGMDVHKESFSLCCYTNEKEQAEYPQKINAHYSKVINYLEAMRFHYGDDVLFICGYEAGCLGFTLYHELTAHNVKCVILAPTSMPVPGGKKRVKTDKRDAAMIARCLAHHDYSPVHIPTQKDEQVKEFIRMRDDHRLALKKIKQQILSFCLRHGCHYNGTQNHWTQTHLSWLRTLRVEELHQEILEEYLLTYDYLTAKLGRIEQRIEELASEEEYRENVHKLTCFLGIKTQTALSVITETGDFRRFPDACHYAAFLGLTPGEDSSGGDQNRLGITKAGNRHVRMLLVEAAQSFARGKIGYKSSVLAARQEGNSPTVIEYADKANERLRRKYYRMTLKNGKKSNVAKTAVARELACFIWGMMTEFQDESYFKARPKETPSASPAPGAPAAIPAPATRPEGAPPAPASAP

SEQ ID NO: 250805 - protein, 380 aa, unidentified
MNYSTVYVGMDVHEESFSLCCYTNEKEQAEFPQRVAGHYSKVLNYIEAMRFHYGNDVLFICGYEAGCLGFTLQRQLASHGVKCDILAPTTMPQPKGKKIIKTDKRDAKNIARCLAHHDYSPVHVPTEQDEQTKEYIRMRDDHKLALKKIKQQILAFCLRHNYRFDGTSCHWTQAHLKWLYSLKPEGLYEDILKEYLLTYEQLTEKITRLDQRIEELASEEPYKEKVARLSCFIGVKTATALAVLTEVGDFKRFASAPQFASYIGLTPGEDSSGDKSRRLGITKAGNRHVRMLLVEAAQSIARGRIGFKSKALKSRQEGNPPEVILYADKANERLRRRYYRMVLRNNKKPNVAKTAIARELACFMWGMLTDKIGSSATVVV

SEQ ID NO: 250806 - protein, 328 aa, unidentified
MNANEEVNVLGIDISKAKFDVALLKGKNKIKTKVFSNHPEGFAELQVWLNSQGVTNLQACMEATSIYGNALARFLFAAGYKVSIVNPSRPKAFGRSELSRTKTDRADAKVIARFCAALCPEPWTPPALEIEQLQALVHRLDSLMAMKQQEQNRLETVDSILVEAITAHIDFLKEQIATTKKLIGDHFNKHPQLKAQRDLLVSIPGIAEATATVILAEIRDVSTFDSADQLAAFAGLTPQEFSSGSSVRGKPRLSKIGNARLRQALFMPAIVARRYNPFIQALCARLLVKGKSKMSIVGAAMHKLLRQVFGVLKSQKPFDPNFLLTLSK

SEQ ID NO: 250807 - protein, 411 aa, unidentified
MEAAVITAVGIDVSKSKSTVAVRRPGGEIVLRPFDVRHTNSDLKKLTSTLKKLGGDIRIVMEHTSTYWRPIALTLKEAGFFVSVVNAMLIHDFSDNTIRKLKTDRADALKIANYALTFWDTLPPFNNEEETRLLLKMQSRANERITATATALRNGLIALADQIFPGVNIAFDPNTKNANGHEKWVDFFLRYRHKDCVCQYSMEAFTESYRGWCKRKNYKFRTDTAHQIYLLAQEGVATLPKCESTKMLITQACKSLNAVCEAKQSTQLEMQRLAAMLPEYEVVMQMEGAGPITGPALMAEIGDVRRFKNKKALVAFAGIDAPPFQSGAFESKSRHVSKRGSPHLRRTIFIVSNIILTRSNPENAVYCFMDKKRSEGKHYYVYTVAGSAKFLRVYYARVTEFLRSQPSPGAC

SEQ ID NO: 250808 - protein, 349 aa, unidentified
MSQGLNCAVAVIGIDIGKNTFHVVGLDDRGAIVLRQKWSRGQIEARLANMPPCLIGMEACVGAHHLSRKLKALGHDARLMPAKYVRPYSKGQKNDFRDAEAIAEAVQRPTMKFVATKTADQLDLQALHRVRERLVSQRTGIINQIRAFLLERGVAVRQGLRFLRAELPRILATPPDVLSARMVQVISDLAEDWRRLDHRIDDLSNEITLLARQDAGCERLMSVPGIGPIISSAMVAAIGAGEAFSKGRDFAAWLGLVPKQISTGDRTILGKISKRGNRYLRVLFVQAAWVVLIKPMSWERHGLKHWIDAARKRLHRNVLAIALANKLARIAWGVLAGSRTFEASKLQTA

SEQ ID NO: 250809 - protein, 376 aa, unidentified
MREKLRFLGLDVHAETIAVAVAEPDGEMRSLGTIANREDSIRKLIRKLGPPEQLRACYEAGPTGFVLYWQLTQLGVECAVVAPSLVPKKPGDRVKTDRRDALKLARSHRSGDLTAVWVPDEDSEALRDLVRQREAAKQDQLRARHRLTKFLLRTGQRPPLGLKAWTERYLRWLAQVRYTQPAQEATRLDCMNEVEHMSARVKRLEEAILEVVKLAPQPMQELIRGLQALRGVAHISAVTIASELGNISSRFESARKLMGYCGVFPSEDSSGKRIRRGGITKAGNAHLRRIVVESAWCYRHLPRVGEKLRKRHQGVPAEITEIAWKAQHRLHKRYMTLMARGKEQRKTMTAIARELLGFIWAIGIKAEAACKQQLAA

SEQ ID NO: 250810 - protein, 326 aa, unidentified
MIKNTNYFGIDISKDVFDVMGVDGKHHQFKNDLSGFKKLFSLTNEFSHCVMESTGVYHLRLAYYLYEKGIAVTIENPLSIKRFIQMRLTKIKTDKRDSQMIYEYAVNTGDELRLWKGQSKTQIACSQIISLTNLYTKQTTALKNKLQTEESMGSPCSKVIRSLKRSLKHLKNEIDNLEESLLELVKQDNQDLLTRVESIPGIGRKSSMLLIVLTGGFERFNKASELCSFAGLTPMIRQSGSSIRSRSRISKMGNRRLRKTLFMCSLSAKKHNKACKEIFDRIVAKGKSKKIALIAVCNKLLKQAFALAKSGLKYDRNYRSVLVNIN

SEQ ID NO: 250811 - protein, 455 aa, unidentified
MEKNIKNRELGGFEMINPDAAGIDISSREHYVAVPKDRDKESVKKFGTFTEDLHTIAKWLQSCRIKTVAMESTGVYWVQLFLVLESYGFEVFLVNASHVKNVSGRKTDVKDCQWIQQLHSYGLLRNSFQPENQIRELRNYVRHRRKLIEDKSRYVQLQQKSLEQMNIKLHTVISDINGTTGSAIIRSILSGERRPEELAKYTHPRIKASRAVIIKSLQGNWRDDQIFMLKQAYESGEFVDKQIFDLDKQIETVVQSISEKPGKSDNQKNENKTKSSYKNRLKFDSKVYLNSLFGVDITKIEGIDEISALSLLSELGVDIKSKFKTEKQFLAWLNVVPNNKITGGKIKSSRIMKKKNKAGQIFRNAAYTLFNSKGYFGQYLRSRKAKDGTPQAIVATASKMARVFYKMVTEKIEFNSDILYLSNEKYLRKKLAKMKASIENIENVINTNTVNYTFS

SEQ ID NO: 250812 - protein, 352 aa, unidentified
MKQFIGCDVHKNYSVFVAVNEKGHAGEALRVAHERQLFREFLVQLPPQSTIAVEAGGHYGWVVDEMERSGHHPKLTNPVEAKRRMGLTNKTDKLDARGLAILLRNGTLPEVWIPPSGLRDQRELVRMRIFLVHLKTRVKNRIHGTLARHNVVVPGADLFGAEARLRLESRLPELPLYSREAIGRELATLDFLETQIESAEKQLRGIMKVSVEADLLKTLPCVGEILSMVLMLEIGRVDRFPTAAHLASYAGLVPRVHSSGGRTRMGQVCTNVNRNLKWAFVETGNLVVVNQRRLVGSHVVQLYQRIKRKKNHQKAVVAVGRHLAEAAWWILTKQEVYRDPRIARQALSSTHG

SEQ ID NO: 250813 - protein, 425 aa, unidentified
MRYFGVDVHLEFCEIAVCEDGRVSQIGRIASTPEAIREFAAGLGSEDEVVLDASGSVMAIARILRESNVGRVVVSDAAQTRAISHARVKSDRFDAAMLARLLSSGMLSEVWVPDEATLALRRRVARRAALIRARTRTKNQVHGVVMRCLLGRPPVSDLFGRKGRVWLAEQQLPEEETETVQGALRQIDFLNGEIAQLDQKIAEQALAWPGLCRLLTIPGVDIGTAAAVIAAVGDISRFPSAGQLVAYLGLDPKVRQSGSEPARYGHISKRGNAQARSMLVEAAWIAIRSPGPLRAFGERVRARRGAQVAAVAVARKLVVLCWQLLSKDEDYAFARPSLTRQKTRRLELTAGAARRPRRHDGLTVSPTTAQRAAEHELQSQAEQAYRRLVADWQAAAPKGGAGATPGRASSNRPSKGKAARQATSP

SEQ ID NO: 250814 - protein, 345 aa, unidentified
MSMLTDRIDLVIGIDTHKRTHTAAFVDRLGAVHEVFEVEANAAGYRRLLRVADAHAGQRVWAVEGTGSYGAGLTTALTAVGEHVVEVERPGRPKHRPSGKSDPIDAVRAAREILSRDHQIEPRQRGNREAIRVLLATRSGAVLARTKAVNHLHALIVTAPDELRARLSGTSTGELTRRCAALRVRGDMTDEYCATVMALRACARRAIACGQEADELEPELLRLVRAALPELLDQPGVGPITAAVIYLAWSHHGRIRNDAAFAAMAGVAPLEASSGQTVRHRLNRGGDRQLNRALHTIVLSRMMFDPETKAYVERRRAEGKTSREIRRCLKRHVARRVFKLLEHAP

SEQ ID NO: 250815 - protein, 412 aa, unidentified
MVLANCDREGQRMTVMIGVDPHKRSHTAVAIDGDDVELAAIEVRASARQVDELVGWAAGFADRTWAVEGAGSVGYLLAQQLVAAGERVLDVPATLAARVRVLGSGRSNKNDPNDGYSIAVAARHAPRLEQVARADHAAVLRLLSKRNRELGSARTRTVCRLHGLLVELVPGGISKEITANRAAALLATVTPANPVEATRHALASEHLEDLRRIDEQMRASKRRLAEVIRASNTTVTEVFGLGPVGAAIAIGQTRDVTRFADRDHFAAYNGTSPIEVSSGGRIVHRLSRRGNRQLNHAIHIAAITQIRHLHSPGRAYYDRKLAEGKTKKEAIRALKRRISDALYDRLVADAAAKAGPGGQPGTTEQASVTGIAPRKPALRKSHSRTHTERRTRRAVTASTRRRRASTRERNRT

SEQ ID NO: 250816 - protein, 314 aa, unidentified
MRNCIGIDVAKQYFDLHCLKTRQDRRMENSADGIRQCVAFCNETSVELIVMEATGGYELALASTLQAEGFAVAVVNPRRVRDFARAAGQIAKTDKLDARIIAQFAARLRPVPTAQIDENTQKLKALVARRKQLVGLRTAESNRLEHAVARDIQRSIAAVLKVIGTQLEAVDRQIEQHIRNTPQLQQRAETIDSAPGIGPVTAHMLVTELPELGRLNRRQIAALVGVAPIARDSGVFRGKRITGGGRKDVRSRLFMPTLVAVRYNPVLKAYYTRLLSRGKCKMVALVAAMRKLLCILNAMTKNNQKWNPNLIKIP

SEQ ID NO: 250817 - protein, 412 aa, unidentified
MQALIERCCGLDVHQETVVACLLIGTAGARARKQVRTFRTVRRELEALRDWLTAAGVTHVGMESTGVYWRPVYAVLEGHVELIVGNARHIRNVPGRKTDVKDAEWIADLVRHGLIAKSFVPPPPLRELRELLRYRRKLIEAQAAERNRLLRLLETANIKLASVMSDVFGVSGRAMLKALIAGSAAPEEIAALARGQLRRKRAGLIEALTGGLEEHHRFLLAMQLGRIEAIEADVATLDARIGERLLPYDAEMALLMTIPGVNWLVAAVVIAEIGTDMSVFLSVHHLAAWAGVCPGSYESAGKQKSGRARKGNVHLRTILVGAAISAARTKGSYLRDKFHRLKARRGALRAALAIAHKIVVAAYHMLAGGLAYRDLGDAYLDQIGERRTIANLKRRLERLGYQVTLEPKAEAA

SEQ ID NO: 250818 - protein, 342 aa, unidentified
MDHFAGLDVSVKETSVCIVDDSGKIVREAKVASEPKALLAVLKNPAYRFKRIGLEAGPLSQWLFSALAEAELPVVCVETRHMQAVLKAQINKTDRNDARGIAQMMRVGLYRPVHVKTLRSQKLRMLLTHRKLLQSKAIAIENDLRGTLRNFGLKVGMVGTVKFEARIRELVENLPDLAELVEPLLIVRRVLREQIVILHRRLLAIVRDDEVCRRLMTTPGVGPVVALTYRATVDVPARFRKSKAVGAVFGLTCSKYQSGEIERSGRISRCGDEMMRVMLYEAAQSMLRSKKWSWLKAWAMQIARRRGMKKAIVALARRLAVIMHRIWVDGTEFRWTREAVAA

SEQ ID NO: 250819 - protein, 441 aa, unidentified
MGVQAKGHEYYPKPPNFVLDKNKTKAAMDKGSIEFEQVVERGCGLDVHKENVVATIQGKSIKTMTKSYSTFTGSLEKLRAWLKKHGITHIAMESTGVYWRPIFNVLGDDFEILLVNARHVKNIPGHKTDKRDSRWLAKLLLCGLLKGSFIPPRSIRELRDLTRYRKKLIGQVTSDKNRFQKILEDANIKLSVVLTDIFGVTGMKMISAILDEGGYRPEALLQFVHGRVKASRSDILESLKGHVTSHHRFMLRTILSNMHRLETTIAEVTARIDELCAPYNLEIDRLSEMPGVDRNGAVGIIAEIGLDMEQFPSQRHLASWAGICPGTNESAGKNKSGRMAKGNKYLRSLLTELGWAGSRSKGTYFGTKYRSLAGRRGKKKAIIAIGHKILIASYFIIRDNKDFRELGPEHLDNFRKDKLIAYYKKQLQQLEPNMGFDGHAA

SEQ ID NO: 250820 - protein, 344 aa, unidentified
MEHFAGLDVSVNETSVCIVDDTGRIIREVKVASEPEALLVVLGNPACQFKRIGLESGPLSQWLYSALAEANLPVICVETRHMRAVLKAQINKTDRNDARGIAQMMRAGLYRPVHVKTLRSQKLRMLLTHRKLLQSKAIAIENDLRGTLRTFGLKVGVVGMVKFETRIRELVEKLPDLRTLVEPLLVVRRVLREQIAVLHRRVLAIVRNDEVCRRLMSIPGVGPVVALTYRATVDVPARFRNSRAVGAVLGLTPCKYQSGESDYTGGISKCGDAMLRVMLYEAAQILLVRSTRWSWLKAWAMRIARRRGMKKAIVALARRLAVIMHRIWVDGTEFCWTRQQAAAA

SEQ ID NO: 250821 - protein, 372 aa, unidentified
MNYNTVYVGMDVHKESFTFCAYTIDAEKGSHFQRTESDYKNVLKYLEFLRTVYGNDANFICGYEAGCLGYTLYHQLTEYHVNCVILAPTTMPEQCSKRRIKTDRRDAEIIAKCLAQHNYSPVHIPTATDEETKEFLRMRDDHKLALKKLKQQILAFCLRHNYRYDGNSHWTAAHIKWLKSLKPEALYKEILDEYLLTYTTLSDKLERLDKRIEELASKDEYRESVKKLCCFIGIKTHTALSVLVEVGDFQRFASAQKFASYLGLVPGEDSSGDEQTRLGITKAGNRHVRMLLTEASQCYARGQIGFKSKELKSRQAGNSPQVIAYADKANERLRRRYYKMVLGKSKKHNVAKTAIARELACFMWGMMTDHIA

SEQ ID NO: 250822 - protein, 381 aa, unidentified
MTTKATRNAQDTTSEGTLFVAFELSEKTWKLGFTTGHGQKPRERAVTARDQKRVLDEIAQTKRRFALPETAPVVSCYEAGREGFWLHRFLEAHGITNHVVDSSAIAVSRRQRRAKSDGLDVRKLLNMLIRYEQGERQVWQVVHVPSVEAEDQRHLHRDLETLKRERASTTARLKGLLSSQGIQVTSLTKLPEQLDAMRLWDGSPMPPGLRQRVLRVYAHHQFLSAQIAEVEAERCALLHDSTDASIDKIRQVMLLKGMGSNGSWLLVMEFFGWRECKNRREVGGLAGFTPTPYQSGESAREQGISKSGNRHVRWMTTELAWSWLRFQPESALSVWFRERFGSGGKRLRRMGIVAVARKLLIALWRFLETGVLPEGAVLKEG

SEQ ID NO: 250823 - protein, 312 aa, unidentified
MYYIGIDVSKKDLSVFDGKKDLKFINKEGLKSFKKYLKKKYHLSEIAIIFEPTGIYSLYLKEFCAENSIKAYIVNPKKSHNFTRALGRRSKTDKIDARILYQFHKHIELKDIKVPKIDHQAKTLASYLVSYEFALKQRISLSNHLESLRDKGLISLMKKDLKRAKMLEDKLFNDILEYVSKNQNLKEDYQRLLTISGVGEKTAIALLTLFKTYQGTNRAQITALAGLDPVRRESGTSVKDRDKISKNGKGIYRKIFYLPTICATVHNQKIRVFYQRLLAHHKTKKLAVIASMRKILLIAHAMYRDKTEYVAV

SEQ ID NO: 250824 - protein, 423 aa, unidentified
MKKWKEITHYAGFDWARDHHVVVVVDRQGQIVADFQFDHSVEGWKRFRQKTAALESVAVAIETSQGAVVDLLLQYQYTLYPVNPAAAASYRQRKAPSGTKTDHLDAWSLADALRVDGHGWKALAPMDELSAQLRLLCRDEVALIEQRTALVNQLQQALLEYYPVALEAFEDWTMPSTWDFIIQFSTPEALVKAGKRRWKKFLHTHRLWRAQTLEKRLALFAQADQFKAGAAITRAKSQLALSLCKLLRTLQEQLDQYRKQIEALFENHPDHHLFGSLPGAREKLAPRLLAAIGSDPKRYGSFQVLQSFAGTAPISFQSGQLRRAKVRWACDTFLRHTVHLWADCFRKASAWGQAYYRKKRQDGKSQACALRCLGQRLLKILFRMLTERKPYDAELHARNQQKHGSWVLALMPNPTPHISEQLP

SEQ ID NO: 250825 - protein, 344 aa, unidentified
MKITSIGIDLAKNVFQVHGVDERGKIVLKKQVKRDQMACFFANLPPCLIGMEACGSAHHWARKLQDLGHTVRLIAPQFVKPYVKTNKNDVADAEAICEAVTRPNMRFVPVKSLEQQAVLSLHRVRQGFVKARTAQANQIRGLLGEFGVIMPQGITSVRKRVPELLDNESSELSAGLRHLMARLVDHFRELDRQVGELEAQIKTWHRSSELSQKLEKIPGIGALGASALVASIADAKSFENGRQVAAWLGLVPRQNSSGGKATLLGISKRGDTYLRTLLIHGARSAIVAAQRNARVNPWLAGLLQRRNPNIAAVALANKNARTVWALLAHDREFRSDYSPSQAAG

SEQ ID NO: 250826 - protein, 407 aa, unidentified
MIFVGDDWAETHHDVCLMHDSGEIVGYWKLPEGVEGIGRFHELVADLVSDPSEVVVGIETDSGLWVDALVAGGYEVYGINPLAVARYRERHHLSGAKSDRADAKLLADVVRTDRQNHRQVAGDSDDAQAVKVLARSHQDLIWERQRHVNGLRSKLRDYYPAGMQLLKDLPMRDAVAVLGRAPTPAAGRRLTKPQITAALKKGGRQRNFDRRVVEIQQILRSRHLDRPTVVASAYGATTTAAVGIITTINRQIDELAETLADSFRKHPDAAIYLSLPGIGDVVGARMLGEFGDDPNRYADAKSRRNYAGTSPVTRQSGTVRTVSARWIRKRRLYDAIDHWAFTACNTSPGARVLYDRLRAKGDGHHQALRAVGNRLVGFLHGCLQHRTLYNEDIAWAHQHQTEHRKAA

SEQ ID NO: 250827 - protein, 364 aa, unidentified
MANSTSVVIGGVDTHKHTHYAAAIDDNGRLLGHREFPATARGYRDLLAWFRSHGHIVTIGVEGTGNFGAALTRHLSAEGQHVLEVNKPNRQARHMEGKSDRLDAEQIARAVLAETGIATPKSKSGPVEVIRTLRAARSSAIRARTQAFNLLFHTMVSGPSEVRDGLVDLTKRTLVNRCLELEPETEELLKLIDQPSRMVRASVKFTLRDLARRWKALDAEVKELSRQIKALVEHVAPELVELFGVSTELAGQFLVTVGDNPERIRNEAAFAKLCGVSPKPASSGRTNGRYRLNRGGDRAANSALYIVTIVRLRHHEATRDYVARRTAEGLSKREIIRCLKRYIAREVFAALPRSEVLKVLDRAA

SEQ ID NO: 250828 - protein, 337 aa, unidentified
MNNSVIGLDIAKNIFHMYSLIAENKVYRKKLKRAEMLAFFATYQTSLIGIEACGGAHYWARELAKLGHEVILLNARYVKSFVVGNKNDYNDAQAIFDAVTRPNKRVVAVKTVEQQDVQLIHKIRQGYVDKRTALVNQIRGLLSESGIVIHQGINQVRKELPFILEDAENKLTPISRELFAEQYEELTKLDEKIKQHDQRITHLCANNETAKRFLGVPGVGPMTASMVAADIGEGKGYISSRDYAASLGVVPKQHSSGDKQVYLGISKRGNRYIRTLLIHGARAVLKNCADKTDALSLWLQGLIERRGFNKAAVALANKNARILWSMAVTGKAYEVKA

SEQ ID NO: 250829 - protein, 319 aa, unidentified
METSQVAFEQVVSRGCGLDVHKKVVTATIDGEGIKKQTREYPTITSSLKELRDWLLENGITHVAMESTGVFWKPVYNVLEPAGLIVWIVNAAHIKYVPGHKTDKKDSAWICKLLLAGLLKPSFIPPKEQRELRDLTRYRTKLVQSNAANKNRIMRQLEDANIKLSSVLSSTNGVVATKLINKLCDGKEITMQDVDEAYHKKLGASKEEIFEACQGFITGHNIYMIGIHRREIANSEQTIESLNGRIKEILQPYDNVLELLKKVPGISTKSAEGLVAEIGLDMSVFPSEKNLASWAGMCPGNNESAGKKKAEGLPRETNR

SEQ ID NO: 250830 - protein, 362 aa, unidentified
MRIIGCDLHARQQTVAMLDTKTGEVVKMTLTHEGDNVREFYSSLPHPVRVGIEATGSMHWFVDLTEELGIECRVGHPAEIRAAEPRKQKHDRRDADLILKLLVENRFPAIWLPSKELLDLRALLRHRHQWVRMRTRIQNALQSIALANGLRRGPSLWSQAGQHAIASLSLRPHTAYRRSELQAMYAKFEAEIEKLNQRVEEQACERPGARLLMTHPGVGPVTALATEVFLGDPARFADSKALASYVGMIPREYSSGERQRLGGLSKQGNPLLRFLWGEAGAHAVRRDPELKRFYRRKVVQKGLGKASVAVARKLGIRLWIMLRDQIEYNEFCRRGQKQQKSSDAYAGMPETRYGAKSHRPVD

SEQ ID NO: 250831 - protein, 398 aa, unidentified
MIEQRFSIGIDISADDFYVSLMWFNGKRYVIKGSRKFSNNNKGFLSFLEWASKRTKGDETIFVMEATGVYYEELAYYLHSQGKSVAVILANKIKHYANSLNVKTKTDKVDAKTIAQFGFERRPDLWKPMSSELRDLRYLCRERLSLKKELTRIKNQLHALIYSHNANAMVLDLKQQHITFIDNAIEKIEKQITALIDSDKELKEGVRKLETIPSIRKLTIITVLCETNGFWGFNSIRQVISYAGLDVKHHQSGKYAGKSKISKQGNVYIRQCLYMPALSATKHNEPMKQLYERIIERNPNVKRKGIVACMRKMLALVFVLWKKGEEFDLNYRWNGNDQEKEEENNEINKSDKDITSGNDEKTSPLVLQLEELKKKEVGITPTSQDKHRFKESKLSSCL

SEQ ID NO: 250832 - protein, 343 aa, unidentified
MELHAIGIDLGKTVFHLVGLDSSGNVMVRKRCSRTQLLKYTANLRVQRIGMEACSGSHFLARALCEQGHDARLIPAQYVKPYVKTNKSDYIDAEAIAEAVQRPTMRFVPIKTEEQLDLQTVHRVRERWVMRRTAVVNQIRGLLLERGLTLPKGRSHVDRILPEILTDPALRLAGSFRVLLGQLQLELEQLSARIEQMDAVIQQKAKENEACQRLTAIPGIGPVTATALVAAIGNGAGFRRGKDLAAWVGMVPREYSTGGKQKLLGISKRGNSYLRRLFVQGARVVMQYRTKQAPGLSCWLSQLMARTHQNVAVVALANKLLRMAWAVLCKNETYRIPVLASAP

SEQ ID NO: 250833 - protein, 379 aa, unidentified
MTTMTRDVESTVGPLLLAFELGQRWWKLGFTTGVGQRPRTRRVTAGAMDVVLTEIARAKARFRLSGDAPVISCDEAGRDGFWLHRFLLPHGVTNHVVDSSSIEVNRRARRSKTDQLDLSGLLTWLARFHAGDRRCWRVVRVPSVPDEDARQLHRPREVLQGDRTRLINRLKATLATLGLRLGGTRAFLTRVAAAALPDGRPVPGGAYQRLARDWALLPAVEQQLAEVDLERAALRVDPTTRTGQAVERLHRLRAVGPAGAWVLATEIFGWREIRNGRQLGALVGLVPAVYQSGETSRDRGITRAGNQHVRRLMVQLAWGWLRWQPTSALSQWDARRFATGGARLRRIGIVALARKLLVAFWHDVDHGVVPEGAVLKAPV

SEQ ID NO: 250834 - protein, 337 aa, unidentified
MTIIRIGLDTAKHVFQVHGVDENEQTVVRRQIRRSEMGKFFKRLAPTRIGLEACGASHYWARLLRELGHEVVLLPPQYIKPYVKRGKNDANDAEAICEAMTRPGMRFVPIKSAESQAELMLPGVRDLLIKQRTAVINTIRGYAAEFGVIAPKGPAKVAELLQQAHSEEANVPALALDMLKLLGAQLDALDVKLKLLETRLMALHRENPLSQFLASQPGIGPLGAVSFALRVTDPKSFHSGRHFAAWLGLTPKDNSSGGRRRQGRISRQGNEALRKLVVLGATAVIRFAKPGHGSPWLLNLLARKPKKLAAIALANKMARTLWAMMVSGEVYRRPLPA

SEQ ID NO: 250835 - protein, 339 aa, unidentified
MDKWEVCGLEVSARELVVAEGTKPVQRYANTEAGHRKLVETLTREGKRVRVVLEATGIYGLDVAMALSQAEGIEVMVANPRSVRDFAKALMQRSKNDPLDAVVLREYGERMPFRAWRRPSENRLALWAITRRIQALTEMCRGEKNRRHAAQISQTTPACVRRDVERNLRSQQRALKQLRLQARKCIAVEAELEREYRLLVSVPGIAESSALQILGELAMLPEDRDIRQWVAYAGLDPTEYRSGESVRKRTRLSRTGNRHLRTALYMPALTAIRWEPHLRGFYEHLVQRGKRKKQALLAVARKLLHAIYGMFRTNSPYQGNLVFRLPQPETILDSSLKLS

SEQ ID NO: 250836 - protein, 330 aa, unidentified
MKFKNIIGIDTGKSSIDFSFLENGEKKKIGIVENSVKKLELFFNDLKIDVKETLFCMEHTGIYNFHLLSVLQNHRANIWLENPIQIKRSMGMTRGKNDKIDAFRISKYAYLHQERAKLWQPTRLVIQNLKLLMSQRSRLNKAKKLIEIPVVESKEFIAKDQYKLLKQNCKSTITGIKKDLALVTAQIKKIIESDDTLKELFKYVASVPNVGLITATAIIVSTNEFQKIDTARKFACHAGVAPFEYTSGSSVRGKTRISHLADKELKTVLHLATLSAISRPGELRDYFVRKVKEGKNKMLVINAIRNKLIHRVFACVRDQRKYFKKDLTFA

SEQ ID NO: 250837 - protein, 343 aa, unidentified
MEVYVGLDVSLKETAICVVDGSGKIVSEGKVLSEPLALAEFLRAKAGNAKRIGLETGPTTTWLWHELRALGLPVLCIDARHAKAALSLQINKSDRNDAVGLARIMQCGWYKEVQVKSLSCHEVRAVLISRAQLVKTKVDLENQIRGLLKNHGLVIGKAGGNIFRRRAEELVGKYRLLREAVRSLLAVHEVVRREIAGLTRKLLALARTNDQSRRLMTVPGIGAINALAFCAAIDEPSRFRRSRSVGAYFGLTPRRYASGEVDRTGRISKCGDVMVRTLLFEAAGVLLTRVQQWCKLKAWGHKLWKRIGFKKAKIAVARKLAVILHRMWRDGTDFVWSTKEAVV

SEQ ID NO: 250838 - protein, 386 aa, unidentified
MKTVAGLDVHKDSVYLCILRENGEKIERVYGVLTPQLDSMRDFMAENEVSEVAMESTSVYWIPIWRVLVDSFELKLVNPYFIKQLPGRKSDVKDAQWIAECVMKELIRGSFIPPPLIQQLRLYDRRIFELNAELVRKYSKIDAILQRCNIRLSNYVSNTDCKSYKNVVKRISEGVTSPQELLMLVHKRIINKHGEDTILAALTGVVSEAEIDMLAQYVAESALLEDNKNKCIEKMREICNREFEEQMKNLQTIPGVSERSALTVLAEIGPDVNAFPSAKHLVSWCGFNPRNDESNKKIKSNKITHGNRFIRIASVQCAWAASRTKDCYFSKFYAFHTQVRKKFKLKVVVAVARKILVCIWHILKFNVPYKDFEPQKSVAKDSTQLA

SEQ ID NO: 250839 - protein, 352 aa, unidentified
MIVLGADTHKRSHTIAAVSAVSGELLGEQTVVSGAKGAAGLLKWARGLSDDRVWAIEDCRHVSGSLERFLIERGERVLRVHSTLTASSRREARGRGKSDGIDALAVARAALREGLDTLPAAHLDGPELDLRLLVDHRERLVRARVAVNNTLQWHLHDLWPDLEIPGSSLFYGRWGPRIARRLARAQQTMRVRIARDELRRLRELTHSIKALEAEIADLVAQIAPHLLAEPGFGPLTAAKLVGEIAGADRFSSDAKLARAAGIAPIPVSSGNTRRHRLDRGGNRQINATIHRIAVTRLRCHPETQDYIARKRAEGKSTKDAIRCLKRHLTRRIWHLLQTPAPIPDQTLTHSIS

SEQ ID NO: 250840 - protein, 344 aa, unidentified
MLVNVTILKHDKIMEIKDTIGIDISKLTFDVRIHSNQMADVFENSGKGFKKLVEWAYGNSPFPKDRILFIFEHTGPYSQALALFLAERNIPFALVPGMEIKKSLGMARGKNDRVDAARIALYGYRLRDEIEPSELPQKDIADLGRLLSLRDRLVKQRAGYKTSLKEQGRVLPRKGNKVLFETQERMVVYLSKQIKSIEKEMADIIGKNKQLGQLYQLATSVKGVGPQTAMFMIVYTNGFTKFKNWRKFASYCGIAPFPNSSGTSIRGRTKISHLANKKIKSLLDLCAKVAIRHNTEMKRYYDRRISEGKNKRSTINIIRNKILSRIFAVVQRKTPYVDFMKYAA

SEQ ID NO: 250841 - protein, 319 aa, unidentified
MAQNDLVVAGIDVAKDKVDVCVRSLSLKRTFASTAEGRRELTSWLRRRKVGTAVMEASGGYERDWAKALRGAKIEVRIVDPKRVRSFAQSAGRLAKNDTIDAEMIAWFAETFDEARSQAYDATREQLHQMVNARQALKGMQAKLESQGEHVLPTAVQRMHARILKTITVELVKFEAAIAAMIQATPRFTELAEIIESVPGIGRTTSAALIAAMPELGQANNKIVAALLGVAPYDDDSGRRRGERHIKGGRRRTRNVFYMACLGAATQHNPVLKAFYDRLVAKGKEKKVALIACMRKLISILNIMIERRQKWDASRYAVS

SEQ ID NO: 250842 - protein, 381 aa, unidentified
MVNPTTLPDRTLEQACTMVLFMALELSDKKWKLALSDGTKRRIVTIAAGDLVALGEAVAKAKARFGMHGVVPIVSCDEAGRDGFWLHRYLLHCGVANVVVDASSIEVNRRARRAKTDRIDVEQLLRLLIRYHHREKRVWSVVHVPSVEEEDARRLHRDLERLKKERTGHRNRIQALLVSQGSRLQPRHDLLERLEAARLWDGSALPSDLQAEVRREEARLRLVDEPIRALEAEQARRLEAAATPCHQQIAHLMRLRALGLTSAWVFVMEYFGWRQFHNRKEVAALAGLTPMPYASGDSARDQGMSKAGNRRIRTLMIQIAWGWLRYQPHSALSIWFNTRFALGGKRMRRLGIVALARRLLIALWRYVQSGAIPEGASLKPL

SEQ ID NO: 250843 - protein, 345 aa, unidentified
MKDIKVLGIDLAKDVFQLHGTDAKGHGVLRKRLSRGKLIEYTANLTPCLIGIEACGGSHYWARVFGSQGHTVKIMAPQFVKPYVKSNKNDARDAEAIAEAVTRPTMRFVPIKGIEQQDVLMLHRVRELAMKERTAHGNQIRGLLAEYGIVVPKGLSHLDALPELLELHQGKLSLVSKEIFIQLHEQLKIYSEQVTHYDKKIKQHAATEPRCIAIQKIEGVGPITASAIVATISDPSVFKNGREVSAWLGLVPKQHSSGNRIILGGITKRGDRYIRKLLVHGARAVVKTCENKTDKRSEWVADKKQRCGYNKASVAVANKNARIIWAVLASGECYRGSSFNEAQSA

SEQ ID NO: 250844 - protein, 351 aa, unidentified
MDIIGCDLYTRYQVVAWIEKETGEIRTRRLEHESEAVRRFYAGWPRGAVVGVEATFPALWFERLLSECGHDLWVGDAAHIRASEVRQQKTDTRDAEHLLDLLRTDRFPRIWVPSLEERDLRQLLVHRMKLVRTRTTVKNQLHALAISQGVCRKRKLWSARGRAELDSLALLPWAARRRKELLEWLEQLDRAVEELDQAVEEAAAGRAEVACLRTHPGVGPVVALAMVLTLGPVERFANSRKLVSYLGLNPREHSSGGRQRLGAISKQGNTMMRWLLVQAAQTAARYDPELRRTYQRLKFRRVSGVAKVAIARRLAVRLYWMLRARVNYAQLVRMSGSPSSAVVPTESGSKV

SEQ ID NO: 250845 - protein, 366 aa, unidentified
MREQQNNRQERTIIGLDLGDRWHRVCVLGESGQVVEEGSVANNRVALSELSSRYPGALVVMEAGCHSPWVSRHLKQAGCEVIVSNPRKTRAIYQHERKSDRRDALMLARIARMEPALLYPVRHGSEEAQQDLLRIKLRDSLVRARVGLINSLRFTLKSLGYTIANPSTERFHKVIQSALPESVVQMIAPSMQAIEELSLRIKLLDWEIRTLAHTKYPETSWLEQIPGVGPITALYFVLKIGDPARFERVRDVGAFIGLCPRRNQSGENDPQLRISKRGDAYLRRLLVSSAHYILGPFAPPSALRQYGLALAAGATARAKKRAVVAVARKLAVLLLTVWKNKSPYQAFPQQREKMRIHDLERLRCIA

SEQ ID NO: 250846 - protein, 400 aa, unidentified
MEFSVGIDVGARTHHVAILDPDGQVKESFEIAHQQTGFDHLFSRLNHHRKRLGATPVVGMEGLGGYARPLDRQIQNAGFSLLNLNNLKVNRFRQLFGADAKNDHRDAVMIAQMVRLRTGLAGNGERILYAAPPVDVRHQHIKRLARRQQRLIEEKVRLLMRMQADLLAVCPSLLDLIQKIDTLWFLRLLVAYPDLIRLKRARAQTLLKIPGLGKSFLSRVQAWQVQAVLSDEADVVGPMLASDAARVLELLDQIKAYGGQLDALCSKSLMAQRLSSLPGFGPKCTARLVGEIGTIRRFDSESALAVYLGVACLDHQSGTTLKRGKPARHVNKVAQVAMLTATDRHRHFCPESQAYYKKKRVEGKSHNQALRALARHLTRVIYRMLTQDRDYTMKILVAKP

SEQ ID NO: 250847 - protein, 346 aa, unidentified
MNKHNVIAVDLAKNVFQICVLNKTNEVISNREMRASRFEHYLAKQKRSLVAFEACGRAQHWARKAQSYGHEAVLLPPKAVAAYRQGHKTDSNDALAIGIAAGQPTIKPAGIKTLEQQSLQTDLRVYKHLSDQLTATGNMLRGLLAEFGIEIPKSVRKLKAQIPLILEDAENGLPYCARESLFQGWRLWKYQSERIHALDNRLKERMRENEHCQQLTQLESVGVKNAIGLYVELGNGRHFKNGRNASACIGVSPKQHSSGGKVNIGTIGKYCGNQRLRSSLITGAHSVIQQLERREPRTEKERWLKALIARRGKGRAAVALANKTVRTAWSMLYYKEPYKAVLLPVS

SEQ ID NO: 250848 - protein, 347 aa, unidentified
MLADQLDYIVGVDPHRDVHAVAVVHVPSGAVVFEASVAASSDGYARALALVEEHSRGRRAFAIEGTGSFGAGLTRFLTGKGERVLEVGRLRRERRSGGKTDPLDAVRAARSVLAQERPATPRAGGERQALQALVAAREGAVNAKRAGLCQLRDLLITTPEPLRSELRPLTRARLLQRLAATRPEGRRDPELRGSMLALRSIARRVLQLTGEERELGREIETITRKLAPQLLEQPGVGPHSAAQVVLSWSHRGRIGSEAAFARLAGAAPIPASSGQTIRHRLDRSGDRKLNRALHMILVTRKRSHPATIAYIERRLQEGKTRREANRCLKRYLARNLYRLLEHPPIRT

SEQ ID NO: 250849 - protein, 355 aa, unidentified
MNSVKYVGLDVHTETISVAVLDAEGQLVMQSVLATRAGAILDFLHGLRGTIHLTFEEGTHSAWLYDLLARRAARVVVCDPRKNALLKAGNKSDTIDARKLAELLRAELLSPVYHGENSLRALQQLGRSYSALTEDATRVKGRLKAIYRGQAIASVGKKLYGERHRGEWLAQLAEPGLRRRAERLYQELDALRELRREARQELLVESHKQEAVKRLQTIPFLGPIRAALLLGKVQTPHRFRTKRQFWAYCGLALETRSSADYGFRGGQVVRKNKPAFIRGLNRNHNHELKNLFKSAATSASAREGPFQIFYEGLLGKGMAPAMARLTLARKIAAITLCIWKKGETFDAEHQKSQAA

SEQ ID NO: 250850 - protein, 449 aa, unidentified
MREPQEIEDEEHEQTWERVAAIDVAKASGMVCTRVAHPSRPGRRLTKVWEVPATTGAISELAGQLAGLGVQKVTVESTSDYWRPFVYLLQAGGLSVQPVNARDVKHVPGRPKTDRLDAVWLAKLTERGMLRPSFVPPAEIRRLRDYTRLRADLTQERARHYQRLEKLLEDALIKVSSVASKLDGLSVRDMLKALIAGERDPAVLAGLARGKLKAKHGALVEALAGRFDDHHAELARMLLDQIDALGSQIGTLTTRIEELLAAIPAAHGVDADGTTGPGAGSGPDAVVLPAVARLDEVSGIGPGTAQVIIAEIGLDMGVFRTPGHLVSWAKLSPRTLQSGATRRAGKTGKGNPYLKGVLGEAAAAAAKTDTFLGERYRRLVKRRGKLKALVAIARSILVIVWHLLADPTARYHDLGAGYYASRIDKDKKARNHIRQLQALGFAVTLTPAA

SEQ ID NO: 250851 - protein, 350 aa, unidentified
MVTIGSDPHKSSHTFVAVDGNGRKLAEKTVKAVSEGHLEALRWASQWPERVWALENSRHLVRRLERELLVAGEAAVRVPSKLMAESRKKGRQRGKSDPIDALAVARAALREPGLPVAQLEGVSREIRLLVDHREDLVGDRSQMQNRLRWHLHELEPGYRVPAGALSRVAALKRLEVLLAGHSGTVAELARELLGRIRELTLRIDQLEGQLGQLVAPLASSLLALQGCGVLTAAKIIGEVGNISRFRSKAAFARYNGSAPIPVWSGNDDHHRLNPGGNRQLNAALHRIAITQARSGGLGRAYLDHRLQERDTKKEAMRALKRRLSDEVYSRLLADERTRMSDKETPNAQAA

SEQ ID NO: 250852 - protein, 394 aa, unidentified
MILVGIDIGKNKHTFSIIDKNSGEILLSPSDFSNNLKGFLFLIQKLSSYTKSELLIGMEDTGHYHFALLKYLLDRRYTVALINPTTTDLTRKLQGGITKNDPLDSLTICDVISSNHRNKPYRVTTLNRFDLYEQKQLTRHHHNLKEELNTYKNRLQKCIDIVFPEFNSLFHSKYGIVYMNILKAFSSAKAIANADIRSIRKCFEFKGQGKRISLSAEQLKLTAKSSIGIPSVAEEIQIRHLVSQIELFEKQLSEIDKRIEEFSLKNNSPILTIPGISHFSGTSIISELGDICNYTKASQIIKFAGVAPYHYESSQFTAQHTAITKKGSKYLRKTLYQIILPVISNNEVFYAYYTKKLNEGKGHRCAQGHCIRKLLRVIYHLLSTRQQFNPKLLV

SEQ ID NO: 250853 - protein, 426 aa, unidentified
MSERDYSKQVARRQRIGNTTLVVGVDIGCASNAVGFMNKEGKVLGSDPNMPNSRGGFEQFVKMTEGLKAKHGLNDMLIGLEPTGHYWRKFAYFAKEKGWEVRFVRTTALKHHRELDESSSAKSDQRDALTLTNITREGKYIDTVIEDGRMRQLRTLVKVREKIQKRNGSAKNSLHAALDDYFPELKEIFWSMHARGLWALLERCPFPVDVVSLKVSVLRELIGRASRRRLEASRKAVAVYQAAKESIGLRQIGSADRYRLKMCLEEVKRTELMVKDIEREIKRMLKEIPDAQYLLSIPGIGPISTAVFLGELGNPSSFQRAREVVKYAGYDPQESDSGYRVSRKFISKKGRWLLRKHLFFMSMRVVVLSRYFQQYYQRKLQTKNRFGQLPRKKEILCAVAIKLIKVIFALLREKRTFEDTVTCSGE

SEQ ID NO: 250854 - protein, 345 aa, unidentified
MKKRIEGVTVYGIDIGKNSFHVVGLDSTGKPVLHTKFRRDRLLDHFANTPTALVGMESCPGSQWLARKLQASGHTVRIIPAQFVKPYIKSNKNDMVDAAAIAEAVTRPTMRFVQVRQPEQSARQALHRVRDRYMSQRTGLINQVRGFLLEFGIAVRQGTGVFRMDVPRVLGDEKNELPPSMRSLLTGLWNDFKLLEIRIEELSKQIQRSVQYSDTARRLMTVPGIGPLAASALEASAGNGHQFTNGRFFAAWLGLVPRQYSTGDKTTLLSISKRGNAYLRRLLIHGARSCVQTCDRQRHPLGGWITKLEQRMHRNKVIVALANKIARVAWKILIKPEEIYRWSEA

SEQ ID NO: 250855 - protein, 294 aa, unidentified
MIYQDQSDRLEAIPNTKASISKWLRTLAGTASIAVEATNTYHVLFADMAYEAGCTIYMIDGYQLSHYRKGVNVRAKTDALDARLLARYLKKEADELHPWVPPCPLYRQLLSLFRRRAALVQARTGLVQSWSNEPLLKTAFAAQINSMKRLEALVEKKIKDVLQRAELMGQVSRCMKVEGIGFLTAARLVTTFQRGEFSNANAFIAFLGLDLRVSKSGQSDGPRRLTKRGDPEARRLLHNAAMSGSRTAAWKPFYEEQRKRGFSTTQALVMLARKMARVVFALLKTQSEYQSKAA

SEQ ID NO: 250856 - protein, 338 aa, unidentified
MYSFIVGIDVSKLTLDAVMIINGNKETATHHHLSNTPEQIQKLFKGFSQLPNFSLDKCLICIEASGVYTYPILSFVTQNDANIWVELGTRIKKSGGIQRGKNDKVDALRIALYAAKNQDDVRLWHPSNPTIVKIKNLTGLRDRLMKSKFKLSVPVEEFRQMGDVQTANLLSKAMKSSLEALENDIIAIEKQIKKLLDEDSHLKELFALVTSVVGIGTQTAIALIVYTDGFTLFDDARKLACYAGVAPFAYSSGTSIKGKTRVSQMANMTLKTALHMASLTAVKLDIQLQKYYQKKVAEGKKKMSVLNAVKAKLLHRVISVVQRKEKYENSDKFSLFLS

SEQ ID NO: 250857 - protein, 332 aa, unidentified
MEKIAESTGIDVSKETIDAHIHFKNQHKVFPNNNKGFKELIQWMKKATGMELKQIIICFEHTGLYSLPLATFLSKQTIDFCMVPGLEIKKSMGVTRGKNDKVDALRIAEYAYLRREKLEMYTLPSENLLNLQNLLVLRERMVSQRSGYCANLNESKKMLEKKGNELHFKTQEQVIEQLSKHIEKLEEAIKDIIKNDEQMNKHFTLITSIKGIGLVLAVNLLLTTNCFSKFDDARQYACYAGIAPFGYQSGTSIHSKSKVSHFANKKMKSLLHLSALSAITCDSELKQYYHKRVDEGKSKMSTINIIRNKIIYRVFAVVKRGTPYVPLYKHAA

SEQ ID NO: 250858 - protein, 405 aa, unidentified
MDVIYERCCGLDIHKASITACVIVGKKKEICTFGTMTDDLFRLTAFLKERNVQMTAMESTGSFWKPIFNIMEVEGVPAILVNAAHIKAVPGRKTDVKDAEWIADCLKHGLLRPSFVKPRDQRELCELVRYRGSLIEERSREYNRMGKVLEGANIKLTSVASKMDTVSGTKMIRALSEGVFDPALLASMAKGRLRKKTDELKRAFNGLVQPLQQMILKAMLGHIDQLSVLIDKLDNEIETRMSQDVELVEALDEITGVGKVSAQTILAEIGTDMTRFPSANHLASWACICPGNNESAGKKKSGRTRKVNSTLKKTLVQCGRAAANSKDTYMNSLYNRISSRRGAKRATVAVGHAILVIYYHMIRNRSRYNDLGSDYFRKRNKDALVRQSVKRLEALGYNVSLEAAA

SEQ ID NO: 250859 - protein, 443 aa, unidentified
MSRKNKIHIRGERGQAFADKIRGLNLEQILCVSLDISKYFQVVMIHNALGEIVTPTFEIDIFKTGFEQLCQAIDEAIDHSQAKLVLVGLEPTGHYFENLARHLRQRPQPVTLINSYAVSQNRKQQMMRREKDDPIDVAAIGDLLRRGEGTAYQPLQGIYLELQQLDRVRQGKVKMRTMLKNQIIGHLDRIFPGLVIIGTAAKERYTPMFVTDFWECQTMQHLIRVCPDPRQLAAMSTTDLIAAFHAHNFKMGPKTAAKIINYAQKVLLPDPEVIAIRSELLHHDLILLDAVEKRVAVMEERLVDLVTQTPYQIWAKLKGLSDLQVARLAASIGDPEHYTHAKQVFRRSGLVSGRNDSGVHQNKGKGNKVLKTGDVHLRRALLDAVYSLILHQPVLFSYYAKLKLSKPDLVARVATARRANGILWATLRDQQSTSLVYKRGVQM

SEQ ID NO: 250860 - protein, 423 aa, unidentified
MKVTFLTCCGVDVHKSFLVATIIKTTGGIDPSYLKKRFSTFNNSILEFKQWLLDNDCHDVCMESTGKYWIPVFNLLEDEINVTIANPKWVKAVKGNKDDTRDSKWIGDLFRLGLVKGSYVPCKAIRILREYTRYRYKLVSCRSSEKNRYQNALTVCNVALDSVVSDIFGKSSTSIIDYLLEQPGTSVNHEEIASKLLKSLKSKEDAVIESIEGYQMTDSQKYRMRLIRTHMDYITAEINDIDSSIEKMISSNPDYENAVRLLCTIPGVKRDSAIAIISEIGTDMTQFCNSKRLCCWAGLTPGCNETGGKKKSVRIMRAGVYLKPALVQCAHAAVKSSKSPYYKKKYESLVKRRGKKRAIIAIARMILTAIYQMLSTGEEWNPCDPYKVDMPAPLIEKQKTKAIKQAKKLLLREGIISESQLVS

SEQ ID NO: 250861 - protein, 388 aa, unidentified
MIYVGIDVAKLNHFASLISSDGEILVGPFQFSNDGDGFQYLVSAFEPFDDEEIIIGLESTAHYADNLIRYLVAEGYNVCVLNPISTSSMRKNNIRKTKTDKIDTYIIAQTLMMQKSYRFVTFEDLDLMNLKELGRFRQKTIKQRTRLKIQLTSYLDQTFPELQYFFKSGLHQKSVYALLKEAPTAKAIASMHLTHLAALLTKTSHGHFKKEQAAELRVLARKSVGQSDQALSIQVTSVIAQIELLDEQIARVEAEMTEIMRFNDSVIMTIPGIGYLNGGMILGEIGDIHRFSTPKKLLAFAGLDPSVYQSGNFNARRTRMSKRGSRVLRYALMNAAHNVVKNNATFKAYYDKKMAEGRTHYNALGHCAGKLVRVIWKMLTDEVEFNLD

SEQ ID NO: 250862 - protein, 345 aa, unidentified
MKLTTVGIDLAKSVFQVHGVDERGKPVLKKQLKRDQLAPFFAVLAPCLIGMEACGSAHHWARKLQAFGHTVKLMAPQFVKPYVKTNKNDVADAEAICEAVARPNMRFVPIKTTEQQGILAMHRARQGFVKARTAQANAIRGLLGEFGIVIAQGIGHIAERLPGILEDGENGLPGSFRQLMQRLGDHLKELDRQVGQLEREIQQWHRGNEASCKLAEIPGIGPITASALVASVGDAKSFANGRQMAAWLGLVPRQHSSGGKSTLLGISKRGDSYLRTLLVHGARAVVRYAEGKTDPSSDWLKGLLARRNTNVAVIAQANKNARIAWALLAHDRRFRSGYTPAVAGA

SEQ ID NO: 250863 - protein, 314 aa, unidentified
MKDISTFVGIDVAKKSLDVATLPPSTPRTFVHDPPGRQELLDSLPEPKTCLIVIEATGGYERLLVADLLDAGHLVAVVNPRQVRDFAKAFGILAKTDRIDAAVIAHFGKQVKPRPLAEVHEKQGELDQLVTRRRQLVALRTAEKNRFAMAHSKPVKRSLQQVINTLNKEIKRIEKEISVLVESDDQWQGKADILSSVPGVGDITTATLIAEFPELGQINRQQAAALAGLAPFNRDSGKFKGKRTISGGRRTVRTALYMAALSAKTHNPLIRKFAERLEAEGKLPKVILTACMRKLLVILNTMLKTNTLWDPRII

SEQ ID NO: 250864 - protein, 362 aa, unidentified
MNYVGIDIHKRYSVLCAQDGAGRKLKEARIEGGGEGLVQFFHELEGPSKAVLEACWNWGLTHDWLEEIEGIEEVILAHPLKTRLIADAQIKTDRLDAYALGTLLRGNLVARAHIPRRETRARKNLLRQRLYWSRLRTMLRNRIHALLDRQRDLELPQCSDIFGVRGLGFLRRLELAEPDGTLLREALSLHELIAQQMRAQEKRIAAEFQLEASYEWLLSLPGVGPTLAAVLAAEIDQIERFPSAEKLCAYAGVVPTTHSSGGKVHHGGLLPSCNKWLRWALVEASWVAIGCSPYFGALYRQQRARGKKANTAITIVARRMCRILYALLSEKRTFEKRLGRAQTKAVPGCSGHRLTAISAMRS

SEQ ID NO: 250865 - protein, 427 aa, unidentified
MRFIALDVHRDFCEVAIKDQSGLRLAGKVRTAVAELQLFAQSLAPDDQVALEASEPALQIARILEPHVGGVAIANTRKLRAIAESKVKTDKLDASTLCELLAAGFLPAVWSPDEFTRALRRRLQRRAKLVRARTRAKNECHAVLARHLKGKPPMSDVFGKKGRRWLAALELAADESETVACCLREVDFLHSEIGLVERELAAQALGCEEIRRLMTVPGVSLVSAATFVAVVGDVRRFSSPKKLVSYVGLDPRVRQSGEAPARHGRISKQGSPEARHMLCEAAWVLIRTPGPLRAFYERVRARRGAQIALVATARKLSVLFWHLLTREEDYAFQRPTLTRRKLLGLELKAKDGRRSWPSGHSVGTKQDREREREYAKQVETAYRRLTADWQPRAPRSGAGATRGRAFSSHLLGEETATRQGTAPEPAL

SEQ ID NO: 250866 - protein, 358 aa, unidentified
MRFYTKEHQYYCGIDLHTKKMFICILDAAGQIRVHQNIKTDQETFLNIISPFREDLVVAAECMFTWYWIADLCAEKNIPFVLGHALYMKAIHGGKAKNDKIDSHKIATLLRGGMLPQAYVYPARMRATRDLLRRRNHFMRKRAELYAHIQNTRSQYNLPDFLGRIAKPQNREGIVERFHDPSVQKSIAVNLEMIQAYDHILTQLEHDLITSAKEHDLRSYALLQTIPGVGRILALVILYEIETIERFPQVQDFVSYCRLIKSIKESNGKKYGSSGKKIGNAHLKWAFSEAAVLFLKGNEPAKRYLERLSRKHCKAKALSILAHKLGRAVYFMLKNKEAFNQKKFLGLQKLEGMDQPVV

SEQ ID NO: 250867 - protein, 341 aa, unidentified
MKNLFVGIDFSKEKVDVAIIFAEGLVETSVRVFNEFKNSVSGYKQFVKWVEKNANGIDSSLWLFCGENTGDYSKPLCNHLYGRGFDMWLENSKCIKDASGIRRLKSDRADAAMIAEYAMRNHDKAIVYEPLSESLTQLREYYLYRQMLVRHRCSFEVRRGEKRLMMEKSAAKTVIAQSGKHIVTELNKEIAKIDKKIASLIESSDELSEVYRIVTSVPGIGTQNAVCLMVYTDNFRRFNYDARSIACYYGIAPFGKDSGTSVHVDPHVHHMANRHIKAMLTQAALAAVRFNPIIAQYYQRLIARGKKMPVAMNNVKNKLLHVVTSMVKNKQVYNPEYRFSA

SEQ ID NO: 250868 - protein, 325 aa, unidentified
MEESRLAATAVALSRRLGGEERYRLILEAGLHSPWMSRLLSDLGHDVYVANPRRLRAIYLNENKSDRVDAEYLARIGRLDTSLLFPLKHRSARTQADLALLRSRAMVVKARGMLIQYVRGVVKSAGGRIPLCDARGFARKAALHLPPELECALSPIVANIAGLDETIREYDKQIEQMTEDRYPETQLLRQVAGVGPITAATFVLTVEDPTRFAHSRSIGSYLGLRPRQDESGSIQRQLRITKAGDEHLRSLLVSCSQYILGHFGPDTDLRRWGLHLAERGGKNGKKRAVVAVARKLSVLLLRLWATGEIYEPLRNARLRGELSTG

SEQ ID NO: 250869 - protein, 399 aa, unidentified
MGVGMVAGIDWASEVHVACVVGGDGTVADRFSFTHDTAAIRSMVSRLRSANVAGIAIERGDGPVVEELLAAGLVVFVMPSRQIKGLRTRYGSAGNKDDRFDAYVLADTLRTDGHRWKPLRPDTGPTRALRALCRSRKDLVETRVLVTGQLRANLELAFPGAIGLFTKPASAISLAFLQRFPAAGKAAWLSPSRLASWLRSAGYTGGVSAGTLYGRLAAAAPGLTGPEGDARGQITLAFVAMLRTLNEQITVMDAEIGRLFAAHPDRHIFASLPRSGTVRGATLLAEIGDCRQRFPTDDALAALAGACPSTRQSGKRSQAVFRWSCSKKLRAAVMDFANGSRMSDPWAAAIYAAATGRGCRHPHAIRILARAWIRVIWRCWQDGTAFDPALHRGRQAAAA

SEQ ID NO: 250870 - protein, 408 aa, unidentified
MTAIGSPFNIVPLKYDIFIGMDVDKKSVAATIYNHNKKIGTFNTSYNSEKIINYARKHFPEKQVALAYEVGPTGYGLYDKLTEAGYKCLVVSASSVPTPARSRVKTNRLDSNYIAKALRGGELKGVRIPSPKYRYLRHLIHLDNTVTKQIKKCKCRIKALFLLEGFKYPNMSRNDYWSNNTINRLEIMELELPIRFKLDMLLENLHYFKQQKIRVKKEICGYCKNDHELADSMRYLMSIPGIGWTIASHLIARIGDWRYLCNVREIAGFLGLTPCENSTGDKVKKGNITRSGDAYLRNMLIEGSWSAVAHDPEMKEFYTRVYNSHPSDRAARKAIVAVARKMTTRIFRVLKDRRLYIASEIYKINHRPSNRKRRLMVPKDASTLRRTRKYVLRRDLNNSPVFAGSFAR

SEQ ID NO: 250871 - protein, 348 aa, unidentified
MRMYIGMDISLQRTHVCVADESGKIVWEGSVLSEVYAMIEMLNKQREQGQIEGVVFETGQLSTHIYHGLKEAGFPAICIDARHAHGTLKAQRVKTDKNDARGLAQIARTGWYRAVHVKSDESQSLRTLIAGRKQLVEARLTLEHHVRGVLKTFGIKLGIATVAGFEAKVKDVTSECAALVKTSMQALLDARNALLQQEKSLDQQCSQQARQDDVCKRLMTIPGVGVQTALAFRAEIDDPARFKRSRDVGVHVGLTPRKYASGEIDRNGGISKCGSAVLRTLLFEAAVTMLMRSKKWSSLKAWGIKLAQRSGFKTACAAVARKLAITMHRMWIDQTDFVFGKEPANQAI

SEQ ID NO: 250872 - protein, 344 aa, unidentified
MQITRVGVDLAKRVFQIHGVDEHGVVRASRAVPRPKLRAYFAQLPPCLVGMEACASAHYWARELGTLGHTVKLMAAQFDTPYRKHGKNDANDAAAICGAVGRPNMHFVATKTEEQQAVLMVHRARSLAVANRTAQINQIRGLLSEFGIVMALGIAVVRREVPQILEDGENALPSLAREVLRDLLEQLRMWDERVAQYDLKIRELALQSEPSRRLMQLESIGPLTATALVASMGDPSVFRSGRSYAASLGLVPRQNSSGGKQRLGQITKRGDCYLRCLLVHGARSHLRSVDRRTDAKSVWAQRLKSRRHLNVAAVALAAKHARIAWALLANGTEYQVAQERPFAA

SEQ ID NO: 250873 - protein, 316 aa, unidentified
MKQAKVFVGIDVAKARLDVALHPSGETWTVPNSEAGIATLVAHLQQQPVAHIVLEATGGLELPLLGALGAAALPAVAVNPRQVRDFAKALGRLAKTDRLDAQVLALFAERVRPALRPLPDQATQALSALVARRRQLVEMLTAEKNRRGQAPPTIQADIATHIAWLEGRLERLDKELGQHLKQSPLWRAQDDLLQSVPGVGPVLSRTLLADLPEIGTLDRKQIAALVGVAPLNRDSGTLRGARTCGGGRAAVRAVLYMATVAATRCNPVIRAFYHRLCQAGKAKKVALTACMRKLLTILNAMLKHRTPWHAERLQRA

SEQ ID NO: 250874 - protein, 348 aa, unidentified
MRIIGCDLHARQQTLAMLETTTGETANLTLLHEGNQVREFYSSLPQPVLVGLEAGGSMPWFLNLMEELGIECRVGHPAQIRAAEPRKQKHDRRDAELILKLLAENRFPAIWLPSRELLDLRALLLHRHQWVRMRTRIQNALQAIALANGLRRGPSLWSKDGQEKIAFLPLMPHTACRRSALQVMYRNIQSQIEKLTQQVAEQAENRYAAQRLMTHPGVGPVTALATEVFLGDPQRFADAKALASYVGIIPREYSSGGQQRLGGITKQGSPLLRFLWGEAGAHAVRRDPELKRFYRRKLVQKGLGKARVAVARKLGIRLWIMLRDEIDYPEFCRRGQMPVSGAACGGDA

SEQ ID NO: 250875 - protein, 422 aa, unidentified
MQVLYERCAAVDVGKDVIAVAVRLPGDGPDGRATVKRTFKTFYGVLGAAARWLTGQGVTHVAMEATGIYSMPVYHALIEHGDFERVLVCNAGHVKNVPGRKTDLLSDAEWLVRLLECGLLRGSFIPPADVKAARDVIRYRTKLTESRTSELQRLGNVLQDAGIKIDSVASKLATQSARAMVEALIDGERRPAVLADLAKGRMRAKIPDLARALEGRFGDHHALMCRLHLEHLDHLEDMIAELDAQVEEMMAPFRPQRDLLISIPGIGPRASAAIVSEIGADPGSWFPTPEQLASWTGLCPGNHESAGKRHHGKRRKGNQHLQPWLVECAWAAVRTDGYLRSFYRRQVRKFGGFGSPLAKKKAIIAVAHKLITIVWHVLTTGRPYQDLGADYFTSRLDPEIETRRLVAKLQAQGYTVTLEPAA

SEQ ID NO: 250876 - protein, 321 aa, unidentified
MTYIGIDVSKDSFVVAYSPEKNSRTRTFKNTTKGIHEFIQTISRDEHHCVMEATGNYSALLVYLLSEAGITTSLENPLKVKNFARAMLSTVKTDEIDARLIALYGEKMQPAPYKLRSDAILTLKQKRTVIRQLKKQLIATRNLKGSMEVLPFFDAKCKKSIEKTIAFLEKQVKDLEEDLASLAKSEYKKQMDLLTSVKGIGITLAAALIMATGGFTYFDNAKQLTRHLGLSPTYQQSGTSVNFKGHINRNGDSSMRSQLYIAACSSLRCNAECRACFDRLRSKGKPGKVAIVAVANKLIRQAFAVVTQEKPYVDGYISAKK

SEQ ID NO: 250877 - protein, 400 aa, unidentified
MISVGIDVSKGKSTVCILKPYGEIVSKPFNITHTQKDLSELSSMLFRLNDEVKIVMEATGIYHLPVLTYLQEKGFFVSVINPYLMKSYRNESLRKAKTDKIDSRIIANYGIDHWFKMKEFQTSGEIYEELKLLGQQYRHYMKLHLLSLAELTHLLDLTMPGIKNLLASWNETNRKDKRSDFVERFWHYDVITSMSEQEFTEEYILWAKEKKYVPSQEKAKVIYTLAQESIPTLPSETSSVKMLVTEAVRVLKEVDATLGLILSRMQEIAKTLPEYSVVREMGGVGNTLAPKLIAEIGDVRRFRNGKALVAFAGIDPPPYESGQFVGCNRKISKRGSASLRKVGYETMRSLKMRSSPEDPVYRYVVKKESEGKSKKSAKIAGLNKFLRIYYARVTELYKNI

SEQ ID NO: 250878 - protein, 372 aa, unidentified
MASIIYVGMDVHTTNFTFCCYTADSDRGFAVAQTEPDYRQVIKYMERVQKQRGEECKFVCGYEAGCLGYSLYHQLTRCGVDCVILAPSTMHQEKGKRIKTDRRDAENIAKCLAFSLYSPVYVPTTEDDAVKEYIRMRDDIKADLKRVKQQIIAFTTRHGFAFDGKSYWTQKHLKWLETLVFEHPLYKKTLQEYLILYYMLDEKVAVYATRIEEMSHLEHYEENVQKLCCFRGVAAPTALSLLVEVGDFQRFRSAKHFAAYLGLVPGEHSSSDKQIRTSITKAGNTHLRRLLVEAAQSYNRGAIGKKSAALKARQGGNPAEVIAYADKANERMQRKYYRIAFKSRHNIAKTAIARELACFVWGMMTGNISNAA

SEQ ID NO: 250879 - protein, 415 aa, unidentified
MSYKIAGIDVHKKVLMVVVMDAHAPDCEPERRRFATMASDLRRLSSWLREHEVKEAVMESTAQYWRSVWLELEPYMRLQLAQAFSNRAPRGRKHDFKDAERLVRRLIADELILSFVPNGEQRIWRNMTRMKTQLTRERVRLHSQMECLLEEMRIKLSSVLSDLLGASGLRILHALAEGETDPKKLAALGDDRLKCTEEQLVDALTGSSQPMHREMLALQLERLQLIDRQIEKLNGMIAQAMKPYEETVIRLAEVPGFGVDSAQQVIAEVGVKASTFPSAAQFTSWVGTCPGKDESAEENHSSRSAKGNKYLRRLLSQAAHAAVKKNGSHFQAVFRRLLPRLGYQSAIWAIAHRLCRVLWKILREGVRFIEQGKEPDPQAKKQRARILARALRKLGYNVAISPMNPPTAENPVPTQ

SEQ ID NO: 250880 - protein, 366 aa, unidentified
MSSISRCGPIHLGLDVHKDSISVAILRPDRETPDLERISSDDDAVRRLIARFPARHQLRMCYEAGPTGYELARLLASLGVACQVLAPSLVPHSPGDRIKTDRRDARRLARLYRAGELTPIRVPTLAEEAVRDLCRARADLVDDQRRARQRLGAFLLRHDKVYRVGTAWTVAHEQWLGRLHFDEPALHATVAHYRAVLADRDAALAAIEADLLPCFDREPFAQATHRLAAYRGVAQLAALTLASEVGDWRRFATAPAFMGFTGLVPCEHSSGGSTHRGHITKTGNTHLRTQLIEAAWAYQHRPAVGAGLRKRQEGLPTQTLARSWKAQQRRCGRFRRLAACKNVKTVVATAVARELAGFLWAEMTTD

SEQ ID NO: 250881 - protein, 352 aa, unidentified
MAATAQSAIAVIGIDIGKNSFHVVGLDGRGAIVLRQKWSRGQVEARFANMSPCLIGMEACVGAHHLSRKLKALGHDARLMPARYVRPYSKGQKNDFRDAEAIAEAVQRPTMKFVVTKTADQLDLQALHRVRERLVRQRTGIINQIRAFLLERGIAVRQGQRFLRVELPRILATPPDVLSPRMVRVIEGLASDWHRLDERIEGLSSEIEELAKRDAGCERLMSIPGIGPIISSAMVAAIGTGDSFSKGRDFAAWLGLVPRQISTGDRTILGKISKRGNRYLRVLFVQAAWVVLVKVKPTRWQGHGLRPWIEAAKKRLHDNVLAIALANKLARIAWSVLVHGRAFETNKRQAAA

SEQ ID NO: 250882 - protein, 342 aa, unidentified
MKKIFIGIDFSKLKFDAAIFQTESKSIVSNEVFDNNHSGYIEFLKWVKGNTVCQQSNLLFCGEHTGYYSANLSTFLHDSGHDLWLVSGLQMKLSQGIKRTKTDRMDACKITEYAYRYQDKVLLFQPISNALEQIRDLLSYRERLVETRKVLSTSAKEMKRVKNTASCDFIYLDSLDYIKSLSKSIRNCENRIEALINEDIALSTNYNLINSVVGIGLVNATLILVATSNFSTFSNARKFGCYCGVVPFEYSSGSSVRGKTRVSKLANQHLKTKLTLAAQNSIRHDPELKDYYLRKRNEGKCHWLVLNNVKNKLIHRIFAVVRDGKMYSKQYLHPLKSALLEC

SEQ ID NO: 250883 - protein, 349 aa, unidentified
MDEISVIGIDLAKNVFQLEAMTASGEVVWQKRLKRKAFIRFMTEEAPRCVVGFEACGGAHYWGRFLSDLGFRVKMMAPKSVKTFREGVHKNDQRDAHAAAVAASRAHIRAIRVKSAAAQAIQLLVRWRGLAIKQQGQTSNQLRALLNEFGFVVPKGRQRLLEAVARLSEDAGYLRLPAGLRQAIDRLCEQLVEQNQRVKEATELLAAAVKDDETCTLLRTAPGIGPVNVACLSVVLEAPDAFASARAFAASLRLVPRQSQSADKRRLLGVGAEAANHTRSNLVLAGQSLITMVKRMKQPPQDKFLLWIWHLYQRKHRNVATVAIAAKLARIAWAMASRREEYRPRLVSA

SEQ ID NO: 250884 - protein, 361 aa, unidentified
MMSNPESVNNFVGIDISKRGMEVLRISFNGKFERFKTKTTQEGEMKLINWLKGNDISVLEAGSQTFRIAKRLKNHGFDTIVLNPGDVRTIYASLRKTDKEDALKLARLAQRNPRKELPEVIVPTDEEEDARRLTTEQAHWSKQKTINKNRLHSLFTQAGLTDITKRNISSHANREEVIPYLPERYQREALRLQQSLELIDENLNAIDAEIRERLQRNKDYAKLSMSIPGIGPVTTHALLAYLGDCSRFSSGKQVSYYTGLVPRVDQSGESERYGSIIKRGCTPIRRVIIQCAWAMVKSEYGGPLKEFYEKLYPRIGKKKAIVATARKMVETFYAIMKSGEFYWGVPDGIILKKMKTYGLIA

SEQ ID NO: 250885 - protein, 482 aa, unidentified
MKKPNIYQNQSQELLHLFEEAGSSEKVMCVPMDYAKNDHLVMFLNGHGDILRKPFSVKNTPEGIGYIDEQVARFCRRRGIKKKHVFFGGEDANSFAKNFVSTLRSKGFVVANVNAHDAKKQRGNVQASTDRIDLMGIATLLLNCRANCCPAQSGIYRNLRTLVRHRRRLVQMLTEVKNRVHGIVDELFPGFLDEKNSGIIPFTQSSLYLMQDRFSPKQIRRRRRQKLIEILKRLGTSRAEKTAAKLQQYAGKVLHAPVEYVDTMQLSLAQHVKHISCLKESVVQMDKEIALNLAQTQGAFLTSVRGIGLVLAAGVTAEIGDPNEQKSLNNLASYSGIVPRVKQSGGLDGKTYTGPVAKRCNRILKDYVVKSAYHLGLHGPQDLMADYKRRDASGQHADFGIGRRYLRMAMSLMRTSQVYLPPNLRKDDYTRQQRAGYYLMSWPYLREKWKKVGALEAAFANNRPLGLWRQIVQELYDIKLKL

SEQ ID NO: 250886 - protein, 349 aa, unidentified
MQHYVGLDVSVKETSVCIVDKAGKVIREVRVATEPVAIFAVLTEEALAIERIGLEAGPLSQWLYSALAEAGLPVICVETRHMKAALSAQINKSDRNDARGIAHMMRVGLYRPVHVKTLASQKRRMLLTSRQLLQAKALDIENDLRGTLRNFGLKVGMVGTVKFEARIRELVADHPDLATIVEPLLIARRVLREQLGVLHRQLLEIVRHDEVCRRLMTTPGVGPVVALTFRATVDVPSRFTSSKAVGAAFGLTPRRQQSGEIDRMGGISKCGDALMRETLFEAALVLMTHSRKWSWLKAWGMKIARHRGMKRAIVAVARRLAVIMHRMWVDGTEFRWSRKEASGGVTVSV

SEQ ID NO: 250887 - protein, 407 aa, unidentified
MIFLGDDWAEAHHDIYICDEAGTRLASRRFPEGIAGVTALHEVASSLAESPSEVCVGIETDRGLWVQSMVEAGYQVYAINPRAASRYRDRHSLSGAKSDPGDAKMLAELVRTDRHNHRQVAGDSDLAEGVKVLARAHQNLIWERTRHSNRLRSSLREYYPAALATFDDLADRDTLAVLGRAPTPAQGRALTPGQARSALRAGGRTRNIDTRAQTIVEGLRGVSLAAPDAVVAAFAATTRAQVAILTALNEQITALEIELTAHFEQHPDADIYLSLPGLGVILGARVLAEFGDDPNRYVNAKSRKNYAGTSPITRASGTRHVALARFVRPSRLADALDQWAFCSLRTSAGCRAFYDHRRSRGDTHHQALRALGNRLVGILHGCLTHHTTYDEALAWSHRTDQTDQQAA

SEQ ID NO: 250888 - protein, 346 aa, unidentified
MNKITRIGLDIAKNIFVLHAVNEHGKLVKRQTLNRSKVLECFANIEPCIVGIESCASSQHWAREIAKFGHTVKLMNPKFVVPYRKSGKNDANDAEAICEAVGRPNMRFVPVKSVEQQAVCSLHTGRQFLVVQRTALINHCRGLLTEFGIIMPLGADKVRRLFAEILADENTSVPLFLKDLLQLHLQDLARLEQRIEAIDKQLAEWAKTNQQAMTLLQMLGVGVITATAFAAGVCDAQLFENGRQFAAWLGLVPRQYSSGGKNKLGSITKAGDVYLRTMLAQGARSIVFNAKKKSDPFSLWIQRLLERAGMNKTVIAVAAKQARIMWAIMAKNQDYQPERICSPLSA

SEQ ID NO: 250889 - protein, 389 aa, unidentified
MVLSQSVGIDISKATFTACLCKRYLDGTLQLSEVPQFANSKTGYNQLMKWQRKLASKEVAVSFVMEATGIYYEKLAHHLFKLKKQVSVVLPNKIVHYGKSLNIKTKTDPEDAKLISRFGAERKLQPWVPASPLFKELRALTRLYGSLQTDKTMATNRLKQLKCGYKPLKLGIKTYQDSIKRLKKQLAKIETEMVNLLKSDTEIWSKVKNLETVKGLGIKTIAIVLGETQGFKLIQNQRQLVSYCGLDVVHRESGTSIKGKTRISKKGNSHIRAALYFPAMVASRSNKRLSKVYQRVNKNKPNKKVGIIALERRLLVLMYALWKTNSPYKEDYHLERTSGIQEEKVSSSSSTQRVDQMKTEEKKVDGASRLTSTQNELLCNQASKALLHL

SEQ ID NO: 250890 - protein, 424 aa, unidentified
MKVTYKTCCGVDVHKSFLVATIITTTGGIEPSYQKKRYSTFNNSILEFKQWLLDNDCHDLCMESTGKYWIPVFNLLEDEINVTIANPKWVKAVKGNKDDTKDSKWIGDLFRLGLVKGSYIPCKKIRILREFTRYRYKLVSCRSSEKNRYQNALTVCNVALDSVVSDIFGKSSTSIIDYLLEQSGNSINHEEIASKLLKSLKSKEDAVIESIEGYQMTDSQKYRMHLVRAHMDYITAEINDVDREIEKLISSDPDFENAIQFLMTIPGVKRDSAITVISEIGIDMTQFSSSKRLCCWAGLTPGSNESGGKKKSVRVTRAGVYLKPALVQCAHAAVKSEKSPYYKKKYESLMKRRGKKRAIVAIARMILTAIYQMLSTGESWNPSDLYKIDIPEALLEKQKAKAIKQAMKLLQREGLYPPPEPIAS

SEQ ID NO: 250891 - protein, 474 aa, unidentified
MDYVGLDVHKDAVEAAVIDEAGKLRRRVRFPCTREELVRFAKRYLGPNARAALEATSHTWSIVEVLRPLAAEIVVSNPLRTRAIADAKVKTDKVDALVLAQLLRADYLPRVWQPDQATQGRRRLTNRRASLVADRTRVKNRIHAVLHQRLIRPMVNELFGTKGRAWLETLELDGAGRAALDSELRLLGQLESELSRLDEELAVDGYDEPRVRLLMTLPGVDVAVAQTLLAALGDIQRFRSPDHAASYLGLVPSTYQSGDPEHVYHGRITKQGKGQARWMLVQAAQHVGNHPGPLGNFFRRLAKRKNRNVAVVATARKLVTIAYHMLKNNEPYRYAVPRSTDTKLARMRVKATGERRRTGLPKGQPRPKAYGSGVRTRTVPALDTIYEREGLPPIAPLSDGELRVLRQQKVLKHVAQTSRPQRLPRRAAAPARPEAAGAPASSLRSARPASARQAPATTRRAKSTQTPSPGRRST

SEQ ID NO: 250892 - protein, 406 aa, unidentified
MFYGGIDVAKYRHEVCVVDESGNVVLQMFMNNTKKGLDKLLQNLNRLEIEVSNVEFCLEATGHYWLSLYCHLTELGYKIHVINPIQSDAFRNFYVRKTKTDRKDAQLLADIIRFGHVSETKLASETVLKLQSLSRLRFEFVRQVGGLKNRVLGILDRIFPEYPQCFSNVFINTSRELLKSFTAPEDLAAADLSELTAFLNEHSRGRLGADRAKQIQALAKGTFGINIALDAFTLELRLLVEQIEFIEEQISVIEEAIDQVMEEMRPSNDTAYRHVLETIPGIGPVLAASIIGEIGDINRFPNAKALVAYAGLDATVRASGQFEGTRNRISKRGSPVLRHSIWLAAVSARRFNPEMKEFFEKKRSEGKHTQVATGAVARRLVHLIYSLWKDNRPFDPNYQWSPTNSH

SEQ ID NO: 250893 - protein, 417 aa, unidentified
MWMDEQQTTSAGIDWAKDEHALCVVEEASGRGLFERRFAHDEAGIAQLCAKLVEHGVGRVAIERPEGVLVERVLEAGIAVLAIHPNQLKAARPRFRASGARAKSDSFDAFCLAELARTDQHRFRVLTPDSDQTKALKALTRSREELVGTRVALANRLRAELEAFWPGAAILFSEIDSAISLAFLKRYPSPKDASKLAEQRLEGFLRRHGYPGRKGAGELLGRLRKAPEGLAGEAEMEARRATVLALVGSLETLVEQIRLFEERIARAVRAHPDGGVFLSLFGGANTTLTAASLVAEIGDSRERYPTNEALAADAGMSPVAVESGKRKVAGFRRACDKRLRKAVGTVAESTRHHNPWAKEIYLRARERGCDHAHAIRILGRAWVRVIFRMWQEGVPYDPERHGGLRRLQTQEGLPQGV

SEQ ID NO: 250894 - protein, 405 aa, unidentified
MFYCGIDIAKYKHEATVIDQTGVSLLDSISFSNSKEGCEKLLALFQRLNIAKEDLLIGMEATGHYWLSVYGYLLEQGFEVKVINPIQSEAFRKMYIRQTKNDRKDSFIIAQIMRFGQFSATSLSEEVIIAMRQLSRYRLALVDACGDCKRRVIALLDQVFPEYDALFSDTFGVTSKEILSRYPVPEELLTVSTRKLTTLLENASHGRFGKEKAEQLKAAAANSFGVSFAKNAFAFQIRQLVEQLEFLEGQIMELEAQISSLLKQTGSYITTIPGIGDTLGAIILSEIGDIHRFNAPNKLVAFAGLDVRVTQSGEFTGTRQKISKRGSPYLRRAIWLAASRAAFCDPILSEYYQSLRARGKHHLTAVGAVSRKLCNTIYTILREERPWQPVPPRDKKVSNHTEQQR

SEQ ID NO: 250895 - protein, 418 aa, unidentified
MVISLAEKRRICMKQIVSVGIDVSKGKSTVCAMIHPNTIIKESFEVLHTVEEMSMLADYIGSLDGEIRIVMESTGHYHLPVAQFLYQKGFFVCVENAYIIRQFSRIMLHGAKTDPLDAKKLAKYGLAYWSELKPYKFHPSCYTELSLLSKQYQTYIKLLIVAKQNVIHLMDEMLPGFKEALDTASSVQFSKVKYVDFAKEFYHVDMIKSMGKEIFRENYKQWCKEKGYRFQSEKADELFHLAEDGIPTLPTEFPSTRLCMEVATEQVSQLGYALEQILSQMQNLAKTLPEYQTIRQMGGMGEKLCVRFIADIGDVRRFHNGKALVAYAGIDAPPYQSGQYTGTKRRISKRGNSALRKTGYEVMKSLKSHPPKTDTRVYDFIIKKENEGKSKKQAKIAGLNKFLQIYYARVMEIYKNIV

SEQ ID NO: 250896 - protein, 357 aa, unidentified
MQSKVKKINFKGYNIYSGIDVHEKSWKVTIMVGDKYYKTLTMVPKAENLEKYLAREFPGGSYYTAYEAGFCGFSIHRKLEEKGIRNMVVNPADIPTTDKDRSQKEDRRDSRKIAKSLKNGDLTAIYVPEKELEELRSLVRYRKSVSRDLAREKNRIKSFLKIYGIEEPEEISKIRSWSSKYVKWLEGIELDTEYGKMVIEERIETIKFLREKKLKVQRELQKVSLESKYREDIELLRSVTGIGRIVSITLLTELIDINRFKTLDQLCSYVGLIPRTNSSGEKERHGRITRRSNKEIRSVLIESSWVAIRQDPALMLKYNELIKRMKGSEAIVRIAKKLLNRIRYVLKNRKKYERSIV

SEQ ID NO: 250897 - protein, 457 aa, unidentified
MKIINPNCAGIDVGSRSHFVAIGQGNKDVKEFGVYAEDLKALAQWLKSQNITSVAMESTGAYWQNLFVELMNSGLEVILTNGKFTKNINRKKTDVLDCQWIQKMHTLGLLPSSFLPDETTEKLRTLCRHRAKMIAQKADTSHKMQKFLKWLNFRLDVVVRDITGLTGIKIIEAICNGDLNPKSLATHRHYNCKKSEEEIAKALVSNERKDYLFGLKQEFKRFRFYQKMIAECDVEIADFLQVFIDQKNDVVDDLPDKKPYKRQNKNGLRGLDLNIISYQYFNGVDLLKIPGVSHSTVLTFMSEIGPEGLKKFSSAKKFASWLRLAPNNKISGGRILSNRIPKGSNRLKIALRNAANAVGNLKDSDLGKFFKKIAFRKGRQAAITATARKLAVILWNMITKKEQYNPTNQYVFLDEKRRAIAQLRKKISKFGIDPNELGVFSRPEYKLAYEKKKPDNQ

SEQ ID NO: 250898 - protein, 398 aa, unidentified
MTRKNTLKSLPTDTEFRVVGLDLAKSDVSVAAIPVDNNTPSLVDQMTYADLLDWAGKISPTLFAMEPCNGYSLLCLQLENLGHEIKVISGSTVSMWINTHLSGQKTDLNDAIALARLAVSDAELTPIRHKSITEIRIQTVQAVRQQLMSQRSKSIVSFKALAQQWGIPCAAGHRNLKKLRESIEAKVDLITRPVANAMLFLLDAVKSLDRQIGQLNQTLQELVMSDERGRLLQSVLGVGTQISARVITVVGNVERFNSPRSLVAYVGVAPRNFITGHKNLTKKKHGNCPDLSHKGQGKISRRGDKLLRSLFIQGAACLYMQFCKDQLPECQLKRWILKQLAMQKPYGKLMVSLAAKLIRIVWAVLTYREKFNIQKAGMTRSMWSEMALETPLNKEVPA

SEQ ID NO: 250899 - protein, 472 aa, unidentified
MAAARRLVGIDLGIASAHTVRVLDETGETVAKRKCWPTVVSLTEIEAAALAGAGEGCRLEVIMEPTGPAWLPIAVFFASRGHAVFRVSSQKASDLRKFFAKHAKTNGIDADTLARLGIVDRAGLVELRLPDAPRAALDRRVRATDRLTRQAAEHKVRIKDLVRQVLPMSPLTGDLGVADLAVLERFANPAVLVRAGARRLTALIARTSHNHLGAERAGQWMAAAEASLALYAGHPAVAFAELAAEIVTEVRLLRAIQAELAVHADAREAAYAAVDPAALARSLPGLAEVGGPALVATMGDPARFARGKQFRSFTGLVPRASETGDTDRKGQPMSKAGSSLLRTTLVRAADTARKQDPQLARIYYTQMVERGKDHLGANCVVAAALAERAWTVMSRAQPYQIRDTDGRPVTAAEAKAIIAGNWTVPGQVRARRRSKKAGKAPKNVLAGQSKARAQHAGQRGDLPLPPSSALAS

SEQ ID NO: 250900 - protein, 450 aa, unidentified
MKPRVLEIEAGEEQMVERVAAVDVAKASAMLCTRVPHASVAGRRVTRVWEVPATTNAIIGLAEQLAAEGIERVVVESTSDYWRPFVYLLEARGLVVWLVNARDVKQVPGRPKTDKLDAVWLAKLNERGMLRRSFVPPVEIRRLRDYTRLRIDLVEERSRHVQRLEKLLEDALIKLSTVATDIMGVSGRAMIDALIAGERDPRVLAELARGRMRVKRPALVEALTGRFDAHHAELAQMLLDQIDALTAKTDLLTLRIDQLIAEIPAAQAPADPGPGGEPPDPGSVPLAVVQRLDEITGIGVHAAHVIIAEVGLDMTQFPTPDHLTSWAKVSPRTIQSGPKRRSGATGKGNPYLKRVLGEAATAAAKTNTFLGDRYRRLVRRRGKLTALVAVERSILVIVWHLLNDPTARYHDLGADFYANRVNKERKTRQLVHQLEALGHHVTLQPTAMAA

SEQ ID NO: 250901 - protein, 408 aa, unidentified
MNAVGIDVSKGKSMVAALRPMGEVALLPQEFLHTAVGLEQMAYAIIAPGEDTRVVMEATGRYHEPVAAALHECGIYVCVLNPLFIKQSGGGSIRKVKTDKADAMKIAKYGLDNWVDLREYTPMDTIRQQLKLCSRQYNLYIKTVVSLQNNLISLADKTFPGVNELFSSPERADGHQKWVDFATTFWHCDCICRVSEKAFTERYQKWCKRKDYHFRAEKALDIYAGSCGHFTTLPMNDNTKLLITTAAQQLLAGKMTLAALRAEMTRLAKQLPEYDTVLAMYGVGETTSAQLMAEIGDVRRFPRRSSIVGFAGVDPAVDQSGKHEAKSTPTTKRGSPHLRKTRYQIVCTYLRKAPEDEPVYQFLDKKRTDGKPYFVYMTAAQNKFLRIYYARVKECLEAFDAQQDTVQN

SEQ ID NO: 250902 - protein, 339 aa, unidentified
MFYSGIDQHKVFSYITTVDSDGKIIKEAKLNNNSFEILNYFSSLGKEHIATVETTGGWYWINDLLSSQGINLKLAHAKYVKAIAYAKVKTDKVDSHILAQLLRLNFIPEAYKIPDDIRTLRDTLRARLRLSVKRTSCINFMHRMLEKFNINDPSLLNDFYKLQYQQFDIQAKLLKEQMLTLEKSLYPTLVPNDDIQRLLWIPGIGKMNAFTILLEVGDINRFESEKNFFSYCRLTPSARNSGGKVRQKSSSKDGNKYLKIVFSDAAVHALQYYPVIKHYHNSKLRKKKKQVAKAIISKEIARIVYFVLKYKSDFNNKFKGVDLKQKKSVQWPRITSPDV

SEQ ID NO: 250903 - protein, 343 aa, unidentified
MDKKRYLGIDLHRDCFTCCIRLETGRNYLSRWKVEELGKFVRKLRPSDEVAVEVTGNTRLFYQAVAPHVQRVVVVDANQFRVIAHSVKKTDPNDARNLALYLEKDLLPEVRMKDPQRARIASLTQTRDTLVKLRTALKNKVNNLVSAQGINLSKESLASEKGLSAVLKFHFDPLLELELKVIVEQIRSLNRSIAELEETIAREGQKLEGHSNLTSIKGIGKLSGSILLSIIGDVNDFAEEGKLAAYFGIVPRISHSNETEHSGRITKRGTKLGRTTLVQCALIAQRYSPYLKSYYEKIKRRRGTGKAIIALTRKFLGIIYRTLKFKWTFADFPNFVLAEETTG

SEQ ID NO: 250904 - protein, 405 aa, unidentified
MKHVIAFDVSMGKSFMVVYNPLKTCELEKEIMHTRPEFLELKRIIEDIKIDFGELPHIVFEATGVYSRQLQRFMQENGYSYCLLNPLESKIQCDSLRIHKTDRSDAHKLAITHFSNERRVHADDNDVYLQLKGLSRHYGELDDELSIIRNRLHRVTQETFPEIEQVFKSKSELFLNFVQLYPHPDLILNHSKTVIKNRILANTEKRMSTVIAEKKALELLEAAMQSYPAVSKEDVRCDQARSYANRYQELLLQKEGCIAKMISLAAPLAEYDILLSIPGIGANTAVRLIAEIGDIRRFDNHKQLNAYAGIDIRRFQSGKTFYKDKINKRGNKHLRKILYIIIQNMIKQRRFGGNHIVNYYDKLKMQPYNKCHKVASIACVNKLLKNIFYLVTHDLDYDYRLAASS

SEQ ID NO: 250905 - protein, 387 aa, unidentified
MFYVGIDIAKQTHYAAVMNSDGVVLCEPFAFNNDHQGFDALLKIINSYPKDKTFIGMESTAHYSENLINFLYTRGFRICVINPIQTSVLRKSNIRKTKTDSVDTFLIIKALTLNHYRLFSKRDYDSLQLKNLCRFRQKLMKARTKVKIQLVSYVDLVFPELQYFFKSGIHTKACYSLLKNVQSADGIASMHLTRLTNLLHKSSKGHFKQSEAVHLKELASQSVGINDYTIGLQILQSINQIELFTQQLAEIEATIKDIMESMDSVIKTIPGIGFLNGAMIIGEIGDISRFEKPCQLLAYAGLDPSVYQSGNFKAAKTRMSKRGSKLLRYALINAAWQTTLVNQTFKDYYELKVSQGRRHYNALGHVAHKLVRVIHKMMTDNVVFNLT

SEQ ID NO: 250906 - protein, 347 aa, unidentified
MKAPQYYVGIDIASASFTCSVGKMEGRWQIVVRPASFANEYDSFSAYLNWLHDHGVKPDNSVICMEATGVYNEVLAHFLCANGYTVAIEPPLKVKRAFKPEGHKSDPVDSTQIAEYAYRFWDELSQWTPRKEILEQIKTLLTTREQFVVERSGHQNALQALKRKQVRTLMAEKMHEKAIEELKRHAQEIEAEIQHLIDQDPDLRNLAALLISIPGVGALLAAHMLLLFKSAPEPYNPKSLAAFIGICPYESSSGTSVRGPSTSRHYGPPALRKLLHLAAMSIATHQQQFRLYYLRKVKEGKPKQLVINNLANKLIKIMVAVARTRTKFIPNYCSVNPALLKMALTKS

SEQ ID NO: 250907 - protein, 346 aa, unidentified
MEHYAGIDVSLELSSVCVVDAQGKIVKEAKVASDPEGLIAFFASLGLAVKRIGLEAGPLSQWLQSSLKCAGLEVVLLETRHVKAALSAMTVKTDRKDARGLAQLIRMGWFRPVHAKSMGSQEVRALLVARKQLLGRLIDVELSIRGILRGFGLKIGLVTRKGFEARVRELVTGQATLEHITRAMLSARAVLRVEYEKLHKSMLAMVREDAVCRRLMTVPGVGPLVAMTYKSAIDDPSRITKSKAAGALFGLTPKKYQSGEKDITGGITRTGDEMVRTALYEAANVLLGRITRFSKLKRWGLDVAKRRGSKRAKVALARKIAVILHRMWIDGTTYRWSEAQTMATQA

SEQ ID NO: 250908 - protein, 400 aa, unidentified
MMTPDDIDVWVGLDVGKSAHHAHALDHDGNTLYDKPLKQDEKAIRTMLGKLSKHGRVLLVVDQPNTIGSLPLPVARNMGIAVASLPGTAMRRTAQLLPGDAKTDRRDAHVIAWAALKLPEPLRDAGPDDETLAALKLLAGHDEDLAHESTRHVNRLRSLLLQTHPAFERALKGERITRDATLALLERYGGPMGVKRAGIEDVKDWAKSNGLRAGRIIDDMFKAIGEQTVTVPGTLMAETIIPSIAHDIKTIRDRRREVGRQVEKLLEDHPLLTVLTSMPGIGVRTASNILLGIGGDIANFKSSAHLAAYAGISPVTGQSGTSIKGERPSRRGNKRLKNALWQTAFVASTKHPPSVAYYKRKREQGKHHNAAIICLARRRCDVIYSMLKNGTLYQEPALVA

SEQ ID NO: 250909 - protein, 361 aa, unidentified
MRKYDYTGKTVYLGMDVHKKTYAVTAICDGQIVKRDTLKASPSVLIAYAEKYFAGAKIESAYEAGFCGFYLHRSLEAAGIKNLVVDAAGIEVAVGDRVKTDKRDSLKLATHLSEGRLRGIHVPSPEREDKRAITRLREAFVRERSRIACQIKAQLHQHNLIGPDSKKMVCPKWIKELRNKTLAHGVKFALNQSMDLWLYLDAKVKEIDKEISTQAEQDGALEKVYTSVPGIGATSARVLANELEDTMQFKNERQLFSYTGLTPSEHSSGEHVCQGHITRKGKPILRKILVQAAWKAISIDASLSETFDRLAVRVGKKKAIIGIARRLIGHARACFRTGELYRIKADGNGYEGYALEMASVA

SEQ ID NO: 250910 - protein, 335 aa, unidentified
MKVFYLGVDVSKKKLDLCLRSNGKDILYDVIPNDLSSIKSWLTRTFEKFFLSEDSLVVCAEHTGQYTYPLVCATKSIGVYLCLEDAAKIKYCHGIPRGKNDKIDACRIAMYAERYNDCLQPYTASELIIQKLKNLSTERSMLVADRAKYQSQLKDQVDYMEHSIYIAKCNRVEGIINTFTDYIAQIDLEIKELINQAPVIAHQMDLLMSVDGVGERVALKMIMETDAFTSFTDPRKFCCHAGVVPFVYVSGSSQRSKNRVSNRADKSIKHLLHMAALSVSQVKNSPLKKYYDRKVKEGKNKMSVLNAVRAKLVTIMFAVIRADAFFSRNYQNSLA

SEQ ID NO: 250911 - protein, 471 aa, unidentified
MKRMNLRDMYPFFKTDVWVDVDEEVAHEIRLFDLEESAYRLRTYRHRAYYSLDRNDGIEQHVLFLSISPEEYYERKLSRQKNVTACILTPKGKEIRTFGTMTDDLIQMADWIKSHRCTHVAMESTGVYWKPIYNLLELEELQVMVINAQHIKAVPGRKTDVKDAEWIANLLRHGLLQGSFIPNREQRELRELVRYRRSLIDERSREVSRIQKVLEGANIKLSSVATDTLGVSGRAMIEAMIQGVEDPKFLSDLAKKRLKNKKADLERALHGMIGSHQKLMLGAQIKHIDFLDEQITKIDEEVRARMLPFEKDLERLDTIPGVGRRNAEQILAEIGTDVKNQFPSAAHLCSWSGMTPGNNESAGKRKSGRTRKGNKKLRHALVEAARAAARTKNSYLSAQYHRIAARRGANRAAVAVGHTILTIVYYLLVREQDYVELGADFYDQRRKDIVIKQSIKRLESLGVKVSIEQPA

SEQ ID NO: 250912 - protein, 346 aa, unidentified
MEHYVGLDVSLKLTAICIVDQTGKIVREGVVTSDPDTIAAFIKSHAPHVARVGLEAGATSTWLWTELNKMVLPVICIDARHAKAVLKMQINKSDRNDAVGIARIMQCGWYKEVRVKDLDSHATKALLVSRALLVKIKRDIENQIRGLLKNLGLVIGRAKMNVFATRAAELAEARPELAAAVEPLLKAREAVGRQIADLDRKVMRLARNDAQVRRFMTAPGVGPITALCFLATIDDPTRFKRSRSVGAYVGLTTRRYASGEIDWTGRISKCGDAMLRSYLYEAANVLLTRVAKWSTLKAWGIRIAKRSGLRKAKVAVARKLAVILHRMWIEGTEFKWSSKEAANQPA

SEQ ID NO: 250913 - protein, 361 aa, unidentified
MTDLLKAAVHTRAVSSGSDSEVVLGIDTHKDVHVAATVSTMGVLLGTRTFPATAAGYEQLLTWARTHGTVQRAGVECTSSYGAALTRHLHDHGIKVIEVNQPDRATRRRRGKTDAIDAEAAARAVLSGRATITAKTTNGAVEALRLFKLAKDSANKARTQAINQLKAVLVGADPSLREALSGLGPKTLFRRCAELPLPAATASITAKAVVHTLRLLAQRIHQLTAEIRDLERQLTETITATTPELLQRQGVGPDSAAALLIAAGDNPERMQHEAAYAALCGTSPVEASSGKTQRLRLNRGGDRQANAALYGIVITRLRWDQRTRDYLDRRLAEGKTRREAIRCLKRYVAREIFTMLQPAAA

SEQ ID NO: 250914 - protein, 389 aa, unidentified
MQIRPDQPQAPSAIRSDLGAIFVSMELSRSSWLITSLSPGSGEKMSKHSVLAGDIHALLTRFSALKQKALARTGETFPIIVIQEAGLDGFWIHRVLQKEGIESHVVDPASIATSRRRRRAKTDRIDGEALLRALLAYKRGEPRVCAMVKAPAPEEEDRRRLCRERKVLIVERISHVNRIKGLLFCQGVSGYQPLRRDRRRQLDELKTGDGRRLPNHLKVQISRELDRLELLLEQIKAVEGERDALLDAQRIVATSPAAMLLNLKGIGPEFTTVLCSEGLFRHFDNRRQVASYAGLAPTPWQSGSIDREQGVSKAGNPRLRETLIELAWLWVRHQPKSALTLWFEQRVTLNGGRHKKKTIVALARKLLVALWKYVTAGVVIEGAVMKTPR

SEQ ID NO: 250915 - protein, 416 aa, unidentified
MLFIGDDWAEDHHDVEVEDGDGRRLARARLPEGLEGITRLHALLAEHAPVSWAALPAAEAAGQVVVGIETDRGPWVTALRAAGYQVYAINPLSSARYRERHSTSGAKSDAGDAHVLAEIVGLDRAHHRPVAGDSDLADSIKLLARAHQTAIWDRTRQVLRLRSTLREFFPAALEAFADLSASDTLTLLARAPSPASAATLTRSQVSAALRAARRHHVEEKVTVLLGVLRAPALRQPPKLDNAYATLVLGQVRVIAALNAQIEQLAQVVAEHFDRHPAAETYLSQPGLGVVLAARVMGEFGDDAARFADARARKNYSGQSPITRASGKKSVVLARYATNRRLGAALHLQAYSALTASPGARAYYDTIRARGTGHHAALRQLANRLVGILHGCLKKGTCYDEDKAWQHHRADAENAAA

SEQ ID NO: 250916 - protein, 363 aa, unidentified
MYFVGIDIAKKTHQAAIICSDGKLIGKPFKFPNTVDGFNLFLEKLTAVNTDLSQFEIGMEATGHYWLNLYTWLSDKSFRLHVINPLQSDALRNLYIRKTKTDSVDAKIIADVIRIGQYSETQLADENIIALRDLNRQRFYLVDMAADLKRKIIAMMDRIFPEYQDFFSDMFGKTSVQIMKEYTSPEQILQIPTERLTQLLKKKQIADIEHIIAAQFTQFNTKLTTIPGIGTTLGATILSEIGDINRFDKPKQLIAYAGMDPSVKQSGNFVGTQSHMSKRGSPYLRRALWLAAVVAVSHNDLFKYLFQQKMNAGKTYAQAMGYICHKLLNTVFAILKTGEEYKPVYPPQIDVSKFADQPINSQL

SEQ ID NO: 250917 - protein, 429 aa, unidentified
MNYNTQNAKIASITEKTLIVGIDVGSENHYARAFSWRNYEYSKKPFAFSNDKAGFAAFKEWMDDIAEKHGMEVIIPGMEPTGHYWLNLGAYLQEQGMKPVHVNPHHVKKSKELDDNNPSKNDRKDPKTIAGLVNEGRFSYPYIPTGIYAEIRNLSNLRIQTQEEITRIKNRMARWFSIYFPEIKDVYRNPDAVSGLMVIKQAPLPCDIRELGVEGVNKIWRDARLKGAGIKRATTLVTAAEHSIGNTEAPRSARKEIRNLLEDYEGYKKRMDELMEEIEKTLSEIPYIDKLMEINGIGIKTVSCFIAEVGDIGRFDNPKQVQKLAGYAIVADSSGKHNGESRISHRGRKRLRYALYEAAISVIGKNKEFKEIHSYYRTREKNPLKKMQSVIAVACKLIRIFYTILTKGVDYDGQKMLNDIVRPEIQPAA

SEQ ID NO: 250918 - protein, 366 aa, unidentified
MKKISTVAIEGIQIFKDNQLTIGLDLGDRTSHYCILNEAGEVILEQELPTTTKGIEPVFSKIPRSRIALETGTHSPWISRQLAQLGHEVIVAHSRNVRLISESSRKDDRLDARTLARLARIDPTLLSPVRHRSAKAQIHLTVIRARAALVSARTALVNAARGLTKSYGARLRKCGTEQMTRELTKELKPELREALDPLLTEIESLNARIAEYDRRIEQIAKEVYPEVARLKQIKGVGPLIALTYVLTLDNPYRFRRSRDVGCFVGLRPGRRNSGMSEPQLHISKEGDRYLRTLLVQGAHYILGPFGQDSDLRRWGLKLSERGGRNAKKRAVVAVARKLAVLLHKLWVSKEVYEPLRNNRKQIAAVA

SEQ ID NO: 250919 - protein, 341 aa, unidentified
MRTLYVGMDIHKNFIQAAAMDEAGNIIKEQQFKSDAKEIKRFVKSLKTQKVHAAIEATCTWYHVYETLDALGVETTLVNMRRTKTIAESKIKTDKLDAKTIAQCLRTGFIATAYIPPKTIMEQRNILRHRMSLRKEITRYKNKIHAILLRNGIQHSDYSDLFGPGGMKFLRSVTLPDSEQYSLTSYLNIIETLIHEKTQTAEKIETLCKNNHQAMLLTSIPGISYYGAMIILTEIGEIHRFPHPKKLCSYAGLVPRTIQSGDHVYHGRILKECNQNLKWILDQCTHIHIRHCPNSSITRLYYRVENKKGRNKAIVAASRKLLTCIWYMLMKNETFKYSNDD

SEQ ID NO: 250920 - protein, 364 aa, unidentified
MLEDRRTVTVGLDVHKSSVRLAVVRGGEVLRERTLAYDHDELLGEIGAWPGARVCQEAGPTGFGLHRALLAAGIDSVIVAPGLVPSRPGDRVKTDKRDARRLAGLHEAGLLTEIYVPTPEHEALRDVVRAREDARLDRMRARHRLGKFLLRHERRMPTTYWGPTRRAWMGRQAFELPGQQDAFDDYLFAVDQIDRRIGVLEQAIDVLAKDGPHSELIARLRCMRGIDTLTAIGLVAEVGDFHRFKTAEQFMSFTGLVPSERSSGDSRRQGSITKAGSAHARRLLVESAWNSRRRPTVSYELARRQAAQDPAVLERAWRCQQRLHRRWQRMAGRGKPHQKIVVACARELAGFVWAIATDQPIRTA

SEQ ID NO: 250921 - protein, 462 aa, unidentified
MDKKSKVVFEETRRNVAGIDLAWRAEHYVCGPRRENGECEIASFGTTTPELHQMLRWLKERNVESVAIESTSVYWIPTADLLEANGIEVVLVDAREVRMVPGRKSDVQDCQWLQKLHSCGLLRGAFRPPEAVAAVRSILREKENVTKMRTQAIQQMQKSLDQMNIRVHHAVSDIDGKTGTAIIKAIVEGERNPAKLAALRDKHCKQSEKEIADHLTGTWREEHLFNLGQAFKTLQFLDERIAQYDSKVSELFSTLASSADTPDNSGQNHGQNIEPPLSGKKLAAKKRENAIDKANVSRFMGFDITSIPGIGYNTAAIIASELGTKFDCFPDERHFASYIGLAPSLGKSAGKNVRQKKRCKNTSRVGLVLRMAASTLYRSQTELGAYMQSVARRTDKKTAIRATARRMAHMIYRGVRYGQEYIDYGKQAFEARLRQKTLKTVNRLIKSFNINTSEISLAFSTT

SEQ ID NO: 250922 - protein, 367 aa, unidentified
MKKISTAGEKQSENFPEQKLTIGLDLGDRSSWYCVLDEAGEVVLEQRLGTTPKAVKEVFGKMPRSRIALETGMHSPWVSRGLSELGHEVIVAHARNVRLIGESRRKDDRFDARSLARLARIDPQLLAPVQHRSAQAQAHLMVIRARAGLVRARTSLINTARGLTKSYGERLRGCSPRNMNAEKARQLSPELQAALEPLLAAIESLSERIYEYNQQIEKIATNSYPRVARLKQVKGVGTLIALTYLLTLEDAQRFRKSRDVGCYVGLQPGRRNSGQSEPQLHISKEGDPYLRTLLVQGAHHILGPFGADSDLRRWGLKLAERGGKNGKKRAVIAAARKLAVLLHRLWVSGEAYAPLRNSRAMRLPAAA

SEQ ID NO: 250923 - protein, 347 aa, unidentified
MSESYEGRQFVGIDLHRRRSVLVRMTETGARLETVRISNDPEYLRQVMARAGEHPEVVLEATYGWYWAADCLAELGAGVHLAHPLGVKMFSLRRVKNDERDAADLADLLRMGRLPEAWIAPPATRELRGWVRHRAKLVGLRSNLKCQIHGILAAAGVQVPMSDLFGAAGQQLLAAVGLATESRARIDSLLRLITALDFEIELFAKLVAGRLRTHPAYQPIQQIPGVGPVLAAVFLAEIGDITRFHRPAQLASWAGLTPKHHESDTTVHRGRITKQGSRLVRWAAVEAVQRVGAHTALGQVRDEVGARRGRNIGVVAAARELTELVFYGMRDGHIRRLPPPPSRTPAA

SEQ ID NO: 250924 - protein, 342 aa, unidentified
MVISALGIDLAKSVFQLHGVDERGRVVLTRQLSRGQLLEYIAKLPKCLIGMEACSGAHFWARKFKTFGHDVRIIAPQFVKPYVKSNKNDRIDAEAICEALTRPSMRFVSAKSIDQHDIQCIHRVRERLISARTALMNEIRGLLAEYGVVLPVGKSALLNRLSDLLEKAVSRSDMTTLSFTLFSEMHAELRELDQRIGQLDDRIQALYDNHPVAQRIGQIPGVGPLTATAIVAATANPGDFKNGRQFSAWLGLVPRQNSTGGKNRLLGISKRGNVYIRKLLVHGARSAFIRMERHPDWKQTQWLKQLEVRRGVNRSVVALANKNARRIWAVMAYEEEFKQQCA

SEQ ID NO: 250925 - protein, 312 aa, unidentified
MANKPNVESSMNFYTNTHPYYCGIDLHTRLLYVCIIDNENNILVHEKIADSPELLLTILKPYLGNIVVGVECMHCWYWVSDFCEKHNIDFILGHALYMKAIHAGKTKNDKIDALKIAKLIRGGNFPLAHAYCKEHRAVRDALRRRTHVMRMSAQLKGHVSATISQYNLPALESRLNLQNSPDRQRMHHFFPDEAVQKSMDLNLNIIATMVHEIYKIEHYVKKNAQHHKGRDFHILQSFPGIGKILALTILYETGDIQRFPRVQQFASYARLVKCKAESAGKSYGTQGNKIGRCIYFMLKNQQVFDEQKFLNG

SEQ ID NO: 250926 - protein, 321 aa, unidentified
MTYVGIDVSKATFVVAYSSAKGSETKTFKNTVKGIREFIQTISPKENHCVLEATGNYSMLLVYLLSKAGFVVSMENPLKIKNFARVMLSVVKTDEIDARLIALYGERMQPAPFKLRNDSILLLKQKRTVLRQLKKQLTANTNLEGSLKVLPFIDSKSKKVLEKTIKFLQKQIKEMEEELTSLAEIEYKKQMDLLTSIKGIGATLAAALIIATGGFTYFDNAKQLTRYLGLSPTYQQSGTSVNVKGHINRNGDAHLRSQLYIGAMASLRCNTECKACFERLRSNGKPGKVAIIAVANKLIRQAFAVVTQEKPYVDGYKSAKP

SEQ ID NO: 250927 - protein, 399 aa, unidentified
MLAVGIDISKSKSVAAILNQDGSMHTSPFEFHHTQPELDAFIKYILNSNQSATILMENTGHYHYPVLKAFQEAGLPVCIVNAYQIKKFGDMDLRKAKTDKKDAVRIARYALEKSYSLVPYTSMEQKYEDLRFLARQYNQRMLTLKTNKVFLLNLLDETMPGITNILPLTTRTPETSLSVLFINRFKSYDRIKKMGKNRFLDAFEKIARKSRNRQTKTYGLAIYEAALRNITTRGENEYILAAQDQCLELVCESQKAADSIILKMQTLAETLPEYAVLRSMAGVGDRLGPLILAEIGDIRRFHSGKALNAYAGNDAPPYQSGTFESHNRHISKRGNAALRKYCFEVMQALKLTQPQDDPVYLFLLKKEQEGKPYNVAKMAGVNKFLRIYYARAMETHKQQ

SEQ ID NO: 250928 - protein, 342 aa, unidentified
MAHTLSHYRLFVGIDVAATTCAVAWMHATSQPSRAISIDQTAAGFAALQHKLLSIEPDPQAILIVMEATGTYWMRLASSFVAASFAVAVINPAQAHDFAKALLKRSKTDAIDAQTLTELGARLQPQCWTPPPQVFTELQQRLVHRDGLVAARTQFRNQLHALLQQPLVIESVRTRLESLISSLNEEIATVEQEIAAALQQDEAWAAAAARLATITGLGTLTVAWILTTTINFTLTTTPEAAANYAGLAPQLRQSGSSVRGRPRVGHGGNARLRRALYMASLSAIQHNPLIKAFYTRLRAAGKPRKVAVCAAARKLLRIAWAVATKEQDFDPAYATSSRQEVA

SEQ ID NO: 250929 - protein, 331 aa, unidentified
MNLAGIDVANETFDIQRRCTEKITHRTFSNTKSGHQQAIASLQRGCRQVRVCLEATGIYHLQLALALNRAPGIELMVLNPKAARRFAEAQMVRGKTDKVDALVLLHYLECMPFKPWSAPSHHRLELQSMAHRLAQLTKEQTRERSRLHAAERAGAHTRVAQHDTRVHIRYLERRYQLLETKAIELMKQYAIMAEDLALVDTVPGFAETAAMQVLAEVGVLPDDLQPQQWVAQAGLDPKPDESGTSVYSPRHISKEGNAKLRAALFFPSMSACRCDPNVRAFYEKLLARGKTKRAAQTAVMRKLLHSIWGILKHRQPWDGDKFCRIEKPMIA

SEQ ID NO: 250930 - protein, 348 aa, unidentified
MDKITAVGLDLAKQIIQVHGIDAAGHVVLRKAVRRERLLALLAQFPLCVVGMEACSGAHHWARQFKQLRHEPRLMAAEFVRPFRKSLAAKNDANDAEAICTAVVQPNMRFVSIKSVEQQALLSLHRIRQGLIEERTATINRLRGVLAEFGVVLPQSVPALQRALPTVLADAERLPAVVQRSLQLLLEHLRELELRLAEFDRQIAQHAKSSAPAQRLAALPGIGPLTASAVVATVGNAQDYRNGRQFAAWLGLVPRQYSSGGKCKLGPITRRGDAYLRALLVQGARSTLQAALRRAPARHDRLSAWIVQLAQRVGYHKTLVAIANKHARIIWALLAREQTLDLARTTTH

SEQ ID NO: 250931 - protein, 414 aa, unidentified
MSKPQVIDDEEHERVHERVAAIDVAKDSGVVCTRLPHPSRPGARQSTVWTVRARMGAVGKLARQLKNSGIELVTLESTSDYWRIWFFVLEGCGLAVQLVNAAQAKNLPGRPKTDKLDAMWLARLTEMGLLRPSFVPPAAIRDLRDYTRARTRLVQERTRCYQRLEKLLEGALVKLSSVASKLTTESAKDMIKAMIAGQRDPKVLAGLARTRMKAKHDDLVEALDGMFDDHHGELARMLLDQIAFLDERATQLTTRITAAVAAMPAAWGVDGDGTTGPDAGTGPDAAVLPAAARLAEIPGISENLARAIIAETGLDMSRFPTAAHLVSWAGLCPPARQSGARTRAGQKGQGNGYLRGYLGQAATGAARTATFLGERYWRIARRRGKAKAQVAVARSILVIISLGDLGVGLAKARK

SEQ ID NO: 250932 - protein, 482 aa, unidentified
MKKRNIYQNQSQELLHLFEVAGSGQKVMCVAIDYAKNDHLVLFCNGHGDILRKPFSVKNTAEGIAYIDAQVRRCCRQRNIEKQHVFFGGEDANSFAKNFVSALRNKGFVVANVNAHEAKKQRGHVQASTDRIDLMGIANLLLNCRANCCSAQAGIYANLRTLVRHRRRLVQMLTEVKNRVHGIVDELFPGFLNQNNSGIVAFTQTSLYLMQERFSPKQIARRRRQKLVEILKRLGTSRPEKTAAKLQHHAAKVLHAPVEHVDTLQLSLSQHVKHIRCLKESVCQMEKEIALKLSQTQGAFLTSVRGIGLVLAAGLTAEIGDVNAQKPLNNLASYAGIIPRVKQTGGLRGKTYTGPVAKRCNRILKDYVVKSAYHLGLHGPPDLMADYRRRRVSGQHADFGIARRYLRMAICLMRSSQVYLPLNLRKENSTRQQRAGYYLKSWPYLREKWQRAGALEAAFTTPRPLGLWRQMVQQLYEIKLKL

SEQ ID NO: 250933 - protein, 339 aa, unidentified
MELNVVAIDIAKKVFQLHWVEPETGSIERLKLKRAQVLQWFVNRTPSLVLIEACGGAHEWGRQLIKLGHDVRLLPAKMVRPFVQRNKTDAADAQAIWTAGQQPGTRFVPVKTEAQQVVLALHRLRAQLMKMRIMQTNEIRGLMYEFGIVMSEGHRALLKELPAAIEEAKAKLPAMFIECINEQVRRVNDLERDIATIERRLSAHLRKSTACKTLAEIPGVGLMTATAVVSTMGTPTAFKNAREFAAWIGLVPRQTGTGGRVRQLGISKRGDAYLRTLLMHGARSVVRSERSTSWPWLSELLKRRPYSVVVAAVANKLARTIWAVLARGQEWRPEAWQAA

SEQ ID NO: 250934 - protein, 348 aa, unidentified
MDHYAGIDVSLECSSVCVVDGTGQIVREGKEVSEPEALIAWFASIGLTVERIGLEAGPLSQWLCPALRGAGLAVELLETRHVRDAFKAMPVKSDRNDARNIAQLMRLGWFRPVHCKSMSAQETRAVLTTRKLVQSKLRDIENSVRGILRNFGLKVGKTTARSFASRITELVAGHPILETIAQRLLAIHAVLVCEFNSLEKHVRLMARSSPQARLLMTTPAVGPIVALTYASAVDDPARFRSSKRAGAHFGLTPKKYQSGQTDVTGRISKIGDAAVREALYQAAHVMLTKPIKGCSQLKSWAMRVARRAGMRKAKVALARKLAVILHRMLADGQVFNPTAKSVAMAAAA

SEQ ID NO: 250935 - protein, 481 aa, unidentified
MWDGSRFAPRIVPGRKALGRTVIGYKGESRAAIYFKETIAMAKRKVRDGLSENDSVIVTEDNEVYYERCAGIDVHSGLFTVCLRIGRRSEIREFGTTTGEIRVLCAWLKDSGCQMTAMESTGSYWKPLYNIFEQEGVPAMVCNAYHIKNVPGRKTDIADARWIARCLREGLLNPSFIPDREQRELRDMTRFLKSQTEERARNINRLQKFLEGANIKLSEHVSDIEGMSATELLDLVIGNPDFTLDDVRQRMHGNMKSTPEQLFASLEGYITPIQRKFFVHVMHIIREQTTQIEETKALVDSVLSDNYKSAIAALDKIPGIGEASALTIVAETGTDMSHFRNQHAFSKWAGVAPGNNESAGKAKKAKTTPGNKTLKSALTQSAKTAARNRSSFFNAQYHRLVSHRGKNRATMAVAHSLAIAIYFVLSGQEFKDLGSDYYNQFNREKKINSHIRQLSKLGVSICVSDDSIERAVEKPPDISVA

SEQ ID NO: 250936 - protein, 397 aa, unidentified
MIAVGIDISKAKSTVAVIDSDGTVLASPFTMAHSQPEMEAFVTYLKGLGEPTTILMEYTGHYHYPVLKKLQDEGFPVCIVNPYQMKKYGDVEIHKAKTDKKDALRIAAYALEKSYKLVPYSSMEQKYEDLKFLSRQYSQRITYVAKLKVQLIALLDQTMPGITRILPLNSRNPEKCALLLFIKRFKSFDEIQRIGKARFLASYDVLAKKASERSASSKGLSIYELAVDSITTRGEDPYIWLSQNQCVDLLSTTQNAADEIISQMRNIAETIPEYTVLRAMHGVGDRLGPIILAEIGDVHRFHSGKALNSYAGNDAPPYQSGQFESRNRHISKRGSSTLRKACYEVMQALKLTKPQDDPVYLFMLKKEQEGKPFNVAKMAGVNKFLRIYYARAMELYK

SEQ ID NO: 250937 - protein, 397 aa, unidentified
MYIVGIDIAKRKHEAAVIDGEGTVIIKPFSFTNNCSGYNRLLAMLARAKLPLDEVSFAMEATGHYWLALFTRLQKEGFRVQVINPVQTNSIRSFYIRQAKTDPRDALLIAEVIRFGHFSESTLHPENIYELRELCRGRHAIVSMQADVKRKVVALLDQVFPEYETAFTNMFGDTSMAILQACPTPKELSEMPLEELCHLIEVSSHKRFRMAKAQELQALARGSFGFAMAGDVFSTMIRLYAKHLDFLKQQVREMDRKIAEIMDTLDTPITTITGIGPTLGAYILSEIGDISRFSSAAKLAAYAGIDPTMRQSGEYNGVRNRMSKRGSPYLRHAIWLAASSAVLHDPALKLYFQKKRDEVKPYMASVGHACRKMVSIIYAVMRDNKAYTPCIPNEISA

SEQ ID NO: 250938 - protein, 378 aa, unidentified
MLEPLTVLSVCWSVAVDGFEQTGWHMATALMIDVVAGVDTHSETHHVAVLDSVGRLLGTREFRAQPAGYVELASWVGSFGRVVVIGVEGTGSYGAGLTRCLRDHQIRVIEVNRPDRRTRRVRGKSDPIDAESAARRALSGVEKVVPKDTSTVVESIRVLRVARTGAVKSRTAAYNQLKDLIITAPEPLRSSLRGKSLHRVSQEVARLRPDSTQLAAPLQATKSALRSIAVRVGALNSEIAELDKHLKTLVAAAAPRTLALRGVGIEHAAQLLITAGGNPERLRSEAAFAALCAACPIPASSGKTSRHRLNPAGDRDANRTLYMITISRLRYCARTRAYVERRQADGLSKREAIRCVKRYIARQTFHTIRADLAAKANP

SEQ ID NO: 250939 - protein, 389 aa, unidentified
MIYVGIDVAKDKHDCFICNGDGEVLANVFTIENSKSRFEHLLSIINTCTGVDDKKKVGLEATGHYSYNLLGFLLDNGLPTYVINPLHTNLYRKSLSLRKTKTDKVDARTIASMLMSDVSLKPYSQTLYHNEDLKSLSRYRFDKVKECSKLKTSVSRLINILFPELDRLVCSVHMTSIYALLSEFPSAKDISSAHLTRLTNLLYSVSKGHYNRDTAIKFRDAARNSIGCYMPAKALELKHTIKLIRELNTEIKEIDIEIKRIMDDINSPILSVPGIGYSLCAMIVSEIGDFNNFSTPDKILAFAGLSPSTYQSGKLDNAYAHMEKRGSRYLRYALFNAAKLVCTWDNTFSAYLAKKRNEGKHYNVAVSHAAKKLVRLIFALEKSGRPYKV

SEQ ID NO: 250940 - protein, 367 aa, unidentified
MKKVSTVAAKPGKKISQQKLTVGLDLGDRNSWYCVLDESGQIQREQRVRTHAKGLREVFGELPRSRIALEIGTHSPWISRLLSELGHEVIVANARKVRLIGESRKKDDRLDARTLARLARIDPQLLCPVKHRSAKAQADLTMIRARAGLVRARTALVNTARGLAKSYGERLRGCNVRNLNPEKAEALSPELQRALEPLLAGIEAVSEQIREYNEGIEKLAQERYPQVALMKQIKGVGTLIALTFLLTLEDPHRFGKSRDVGCYLGLQPGRRNSGQSEPQLHISKEGDPYLRTLLVQGAQHILGPFGPDCDLRRWGLKLAERGGRNGKKRAIVATARKLAVLLHHLWVSGEVYEPLHNSQRTTVAAAA

SEQ ID NO: 250941 - protein, 398 aa, unidentified
MKTCGLDVHKDSIFCAVYNGKDYSEVKEYETTTPKIRQMGEYLLGEGVAKVAMESTSTYWVPVWDILLEMGFELMLVNPFLIKQMPGRKSDVKDAQWIACLLYKGMLRGSMIPSPTIQELRTYSRKYTKLQEQKTRSLQKMDRLMVMCGFRIGSCMSNLGTKSVMLVIQALIMRETNPEVLERLVYGNTANKKSGKLREALTGNLKEHNRRQLEWEKQEYDLFEIQTEQCLTQMRRICQEHYSGEMELLRTIPGVSEISAMIIIAETGGDMRVFENSGKITGWTGLRPRNDESAGKYKSTATTKGNKYLRFILTQVAWAASRIKNGWFKEKFNRLAMRKSRKKALIAIARKVLTVAWNVLYYKTPYNPLMVHIYDPVKVEAKIDYHQREMERMQKLLK

SEQ ID NO: 250942 - protein, 403 aa, unidentified
MQKLYAGIDISKDTHHVCVLLPDNNTQELKVKHETKKLREFVEHLKRLQEEYQAEVVIGLEAINGYASPLDKMLIDAGFRVLNINSARLYNFRRLYGAPFKNDPHDARLIATYIRSGEVLEHKNLKPAIEVKEIPPVHRKLRRLSRYRNELVREKVRVSNRLTKLLGEYAPLFLSLGPVSKNKALWKFLARYPYVSEWKSLSEGEIVDISFGDGYRIGRKRARKIKEVLEMVEVYEREDEEEIGMIVRDYAMRLLELSGKIKEVDEKIMEAGEESEVYMRLLEEPGISHGIASVIVGEIGTILRFDRESSFAAYNGSGVLDDQSGKKKNTKKIILYNRELKRAMRNWAYARMRCHEETKRYYLKKRKEGKTHLQALKCIERILSRKLYKLLRRLEMKSLTFTT

SEQ ID NO: 250943 - protein, 377 aa, unidentified
MHSENIAAYIGLDVHKETLAVAIAAPERLGEVRYYGTINNEAQAVRRLFQKLQGLYGNILSCYEAGPCGFGLYHQLTAMNIKCQVIAPSRIPKSPTDRIKNDHRDAISLARLLRAGELTPVWIPDLTHEAMRDLIRARAAAKRDSRVARQRILSMLLRTDKRYAGKHWTGKHRTWLANQSFSQPSQQIAFQHYCQSLEQIEDRILQLDQEISRLLPEWSLCNLVCQLQTLKGVGQLIAITLVAELGDFSRFSNPKQLMAFLGLVPSEYSSGNSIRPRGITKVGNRELRRLLYEAAWSYRTPAKVGAWLIYYRPDSVTQYSKDIAWKAQQRLCSRYRSLTAKGKKSQVAITAVARELTGFMWDIALAAQSSFSQQKQN

SEQ ID NO: 250944 - protein, 430 aa, unidentified
MKKRTYRKRALQDVDIAALALDLRSGRLVVAIDVAKVDMVAALTDGVPGPPRVLATVAWRNPTDNGEFLALLDTVRASGLAVQIVMESSGTYGDVLRQQLVDRGFPVFRVSGKQTYDAREVYDGVPSVHDAKSAGIIAKLHLDGQSAPWCAPTDDKRRLQASILQMDLHHEHYLRLVHKLEGYLARHWPEISVMLELTSATLLAVLGRIGGPADLARDTEAARRLMRGMSHGLMSDEKIDAVVRAATTTAGVEMLAEERAALMLLASEAHRSLRAFKEAKTRVEALGADGPARAIAPVVGRTTAAVLVTEVGDGREFASVGAYLKAFGLNLKERSSGKHKGLLKLTKRGPSRARQYLWLATCRWLQKDRIARAWYEAKIARDGGRRAKAVTALMRKFAKALFHVARGVPLDSTKLFDLTRLRLSQATAPA

SEQ ID NO: 250945 - protein, 391 aa, unidentified
MICVGIDVAKDKHDCFIISSEGDVLADVFTIPNNMEGFSCLLQKIQVCAADQGKIKVGLEATGHYSYNILGFLLDSGLDTYVLNPLHTNLYRKSLSLRKTKTDRVDARTIAAMLMSDVGLKPYTDTAYHNEELKSLTRYRFDKVKERAQLKQSIARLVCILFPELEKLVPTLHMASVYALLDECPGARQVANVHLTRLKTILHEASHGRYGKDVAVSIREAARVSIGSVIPAKSLELRHTIRLIRELDAEIEEIEAAIQTIMDELHSPITTIPGIGFRMGAMILAEVGDFSRFDSPDKVLAYAGLSPSTYQSGQLTNCYAHMEKRGSRYLRFAIFNATKFVCHWDSTFAAYLAKKRAEGKHYNVAISHAAKKLVRLIFALEKSGQPYRQIA

SEQ ID NO: 250946 - protein, 320 aa, unidentified
MRNAVGLDISQNTFDAAAIVNGKRKQALFNNSINGFENFKAWLDGFDCELHICMEATGNYFEDVADYIGQFYTVSVINPYKISEYGKSRFHRTKTDKQDARLIAEYCHTAMQKDLPARQKISIGHYRLKRLLALYDQLKIQKTAQKNRLKVAKDEFVRKIHHAQIQELDQHIQQVEAEIQAITNSNQDLKAVSDRLQTIPAIGKLTAAILTNYLLSGDFKTANQFTAFAGLNPQQKESGTSVKGRSSMTRYGNRRLKSALFMPAMVALNRDYFPDFVKRLKAKNKPKMLILGALMRKLLVVAYHVHKTQKPYNPERYKSA

SEQ ID NO: 250947 - protein, 342 aa, unidentified
MEITTLGIDLSKTTFHVIGLNARGEIVLRKKFSRKQLLVFTANRQQMLIGAEACGGAHYLARALREQGHDVRLMPAQYVKPYVKTNKNDYLDAEAIAEAVQRPTMRFVPIKTDDQLDLQALHRVRDRWVARRTAVMNQMRGFLLERGITMRKGPSHLAAQLQIIFGEGNCSFSGRTQCLLLELKHEWDELERRIEEASAELQRIAQQDDACSRLMEIPGIGPLVSTALVASVGNAITFRKGRDLAAWLGLVPRQHSTGGRPKLLGISKRGNEYLRRMLLHGARSVMMQVERNPSALGVWITDLSKRKHHNVTAVALANKMARIAWAMLTRGSHYSASQLAVA

SEQ ID NO: 250948 - protein, 399 aa, unidentified
MNYFGIDISKRTSVIAHYQDDIFQKEFTIQNNKNGYNQLLNYLNEMDQFQFVFEATGIYSRGMVKFCRVNQIDFIEMNPLEARFKTSSLRAWKTDESDAHKLALLAPYLKASTSLDSNPDIFFELRERAQFHVEIENDQNRLKIMIIELLHQTFPGLEKLFKNRYSKIALNIIEEYAHPDLVSQKDIESLTSSIMEYTNKNLSYQKAQNYAERLNKIAQESYPNVKHSSFLVKKVRLLIQQLKSSIQQLSQLDKEMIELAQQLECFEVMHSIPGIGKLTVAMIIGELGDLTKFKTNKQLNAYVGIDIKRYQSGKTQYRDTINRRGNKKARRLLFLVVMNIIRGQRNYNNHIVDYYYKLRKQPNEKSHKTAVVACINRLLKTLHYSVNESKLYDYQMSPH

SEQ ID NO: 250949 - protein, 367 aa, unidentified
MKKVSTAAVKGTKNFSQPKLTIGLDLGDRSSWYCLLDEVGEVLQEQKLSTTPKAMREAFGAMPRCRIALETGTHSPWGSRLLSELGHEVIVAHARSVRLIGESRKKDDRLDARTLARLARIDPQLLCPVKHRSAKAQADLTVIRARAGLVRARTGLVNTARGLVKSYGERLRGCNVRNMNPEKAEGLSPELQRALQPLLAGIESLSERIRECNEGIEKLAQESYPQVALLKQIKKVGTLIALTYMLTLEDPHRFRKSRDVGCYVGLQPGRRNSGQSEPQMHISKEGDPYLRTLLVQGAHHILGPFGADSDLRRWGLKLAERGGKNGKKRAVIATARKLAVLLHRLWVSGEVYEPLHNSHQTAMPTAA

SEQ ID NO: 250950 - protein, 412 aa, unidentified
MVGQYMAMRKREEVFPNAAAVDVGASSHWAAVPPGRTDQPVREYGVMTGNLHALADWFIECGVDTVALESTGVYWIPLYEVLEQRGLKVWLVDARQMKYVPGRKSDVQDCQWLQKLMSLGLLRGAFRPAGEVCVVRAVARQQKVLITEQGQWVQRMQKALVEMNIQLTEVLTDVMGVTGQAIIRAIVAGERDPKCLARYRDGRVKASAAEIAEALRGNWREEHLFVLSQALAMYDDIGRRLLECDAKLQQLLAERAEHAVDLGKAPRQGSKQRIGFDARQAMANWAGVDLTRIPGLGVTVVMTLLTEIGPDLSRFESVKHFCSWLGLCPGTKISGGKVLYSATKRSANRARQALKMAAQALSHSDSALGAFYRRLCTRMDKLRANTAAAHKLARMVYFMLTRGEAFVEQGQQ

SEQ ID NO: 250951 - protein, 345 aa, unidentified
MKILALDLGNYKSVACVYETTLVSHKFTRVVTTPKGLHDLLVEEEPERVVIEICPLAGWVSDLVRALGIELQVASTTHDAWRWKNVKRKNDRQDGLKLAQLSALGQLTLVHVPEQGVRQWRALINYRQRLVSRRTKIQNHIRALLLRQAVAMGAGHRGWTRAGIGQLEALAKPLNEVEREELWRGELALELDGLKALAEPLRQVEQKLDELGAADEQVQLLRTIPGVGPRGAEALAAVIDKAQRFKSGKELGAYLGLVPKQIQSGESNRLGRITRQGNRLLRSLLVEISWSGLRYNSWMRSVYEQVRRGSKARKKIAIVAVARRLLIRCWAMLRDGTTWRPASNT

SEQ ID NO: 250952 - protein, 358 aa, unidentified
MADLETTVIGGVDCHLDTHHAVALDTHGRRLGDQSFPTTSHGYHQLLAWLQQFGRVHAVGVESTASYGAGLTRYLVGAGLTVIEVNQPHRQVRRRRGKTDALDAEGAARSVLAGEATAVPKDTTGSVEAIRQLRLARASAVKARTAALTQLGEVIATAPAALRERLSGPASLHARATRCARLRADQARLHLPLEAAKFVLRSLSQRILALDAEIARFDAHLATLVASVAPRTTALLGVGTLTAAQLLITIGQNAARVGDEAAFAHLCGVAPIPASSGKTNRHRLNIGGDRQANAALYLIAVCRLRYCERTRAYAARRTHAGRSKRDTLRCLKRYIAREVFHTLRADLAAFRTAQPAPA

SEQ ID NO: 250953 - protein, 285 aa, unidentified
MQSVSTIGLDIAKSVFQVHGVDAAGQVVIRRQLKRRFVLSFFEKLTPCLVGIEACASSHHWSRELQALGHTVRLMPPAYVKPYVKRQKNDSTDAEAICEAVTRPNMRFVPTKTNEQQSCLMLHRVRHLFIRQQTAVINSIRAYLAEFGIVAPVGRRGVEQLLEVVADPADRRVPEVARACLAALGGQLRVLKAQILEFDKRIIAWHRSNATSRRLDVIPGVGPAPATALVASVADATTFRSGRDFSAWVGLVPKQNSSGGKDKLGRISKQGDRYLRSLFTAGHSP

SEQ ID NO: 250954 - protein, 350 aa, unidentified
MKNHITIGVDLGDRHHIAVVLDPNGNQLEATKLINTKVALKRFFQPYDGATVAIEAGTHSPWISRLLESLGCTVYVGNPRKLRVIWDCTDKSDLKDARMLAMIARLEPKLLWPIRHRSINAHNDLEVIKAREMLVQSRSKLINHVRSAIKGIGQRLPTCSAASFATKASEQIPSALQPALIPLLETIAQITEKIRTLDKRINVLALKRYPHTHWLQQVRGVGPVTALTFVLTIEDPARFAKSRMLGPYLGLTPRRDQSGQIDKQLPITKAGNALLRKLLVNCAHYIIGPFGADSDLRRHGLAIAARGGKNARKRAAVAVARKLAVLLHQLWVSEQNYVPLHSRINLGKAA

SEQ ID NO: 250955 - protein, 445 aa, unidentified
MACTSEYGRVTDLGCEGTGELGRGPADPGRPWPQARSDVVPLHAFRTPEDTMTATTDHYLGIDVHKRQAQVAVLDDEGEVTEEIRVAKADLDEIVQKYAGSSAAPEAGSNYFTIYDRLDEELDVTLANPVKADWLADQKQNNDRKDAKNLARYLRLGKVPESYVRPEEYRRYRALARGRKKLVDKRSDFKNEVSSLLDQNGVTYDESLWSDQGREFLRELTLDDASELLLGQWLEAIDEFTVKIKRMQRRIEEVAAEVDELDTLMSAPGIAAFSGLMIHGEIGEVGRFDRAAEVVSYAGLDPVIRESGDSRREGRISKEGNGYLRWILVQCANTAVHNAEDPYLSQFYWRLRKNRNKPHKVAIVATARKLLVALFNMLSKNEPYDHAHNARIEDDFYNQRSMTETVNSSVKRSYGSAVRAREWYREFREIVLMCLVYNIKQYVTR

SEQ ID NO: 250956 - protein, 414 aa, unidentified
MLYIGIDWATDSHTVTLLGATGEVLESLAIENRLAGFLTLLETIRKHMSKLEPAATSKSVSFAIEDQNQRLTDFLLAQDFQGHLIEPSRMKGYRLRYRSSGNKTDPDDSFILADVLYRDHNQLPRMAPDSEVIRALKTLLRDREGFVRDSTRLTNRLTACLRQYYPEALGFFEDVAGKTVLDFIAAFPDFAAACCLSRGAVKRFLAEHHCNRETQLERIMAVLGSSPTPVPTVVVRTKRQQALAIIQQLHAVQAAVADYDAEIERLGKENDEVQRFRGLPGGGSITGAGLSTLFGEDRSRFTSAMSVQSLAGTAPKTIQSGQFRTACFRFGCNRFYRMLLQQMALGALRRSAWAKQYYRGKRKEGKTHQHALRCLANLLLKIAYAIWRDRTEYSEDRHLAQIMRHHLRPTSNSV

SEQ ID NO: 250957 - protein, 396 aa, unidentified
MCKVIMIGCDLHDSTTVLMVADGPGTPVRKGFVTANRAGMIEWLHDYAVRRGAERIVFAYEASGQGFGLYDDLTDAGIECHVLAPTHLPHSAHSRKNKTDDHDALMILDEVRAHVLAGRKLPDVWVPDHQTRDDREAVRLRLDLAAQRTRLKNQIRNLFKRAPLALPDDFTKSGDWSKASVAWLRAVAAGTIGGLREGIRTALASLVELHEGLTVQIKTLDRAIVQLSRTERYAGQFRRLKLLPGVGTLTAMVFLTELGDLARFANRRQLAAYLGLAPSAFESGQNNDRKGHITKQGPARVRHVLCQAAWAALRVSPEWRAKYDRIKRGSKSRSRIAIVAIMRQLGVTMWQTARSPELTALLDEADARKRKEKTSARARQKGGRPSRIAVTSAQPE

SEQ ID NO: 250958 - protein, 398 aa, unidentified
MTESSDYESVQVFIGVDVGKDTHHAVAINRSGKRLFNKALPNDENKLRSLISGLKQHGQILLVVDQPATIGALPVAVARSEGVLVGYLPGLAMRRIADLYAGEAKTDARDAAIIAEAARTLPHALRTLKLADEQIAELSMLYGFDDDLAAQTTQASNRICGLLTQIHPALERVLGPRLDHPAVLDLLQRYPSPEKLASLGEKKLAAQLCKLAPRLGKRLAADIAQALAEQTVVVPGTNAAAVVLPRLALQLITLRKQRDEVALEVEQRVLAHPLYPVLTSMPGVGVRTAARLLTEVACRAFASAAHLAAYAGLAPVTRRSGSSIRGEYPSRRGNKALKRALFLSAFAALRDPISRAYYTRKMSQGKRHNQALIALARRRCDVLFAMMRDGTFYTPQAS

SEQ ID NO: 250959 - protein, 349 aa, unidentified
MKIVGCDLHARQQSIAMVDTETGEFTEKTLCHEGNAVRAFYASLEGPVVVGIEATGAMQWFLELLDELGIEGRVGHPAKIRAQETRKQKHDRRDARLLLQLLSEDRFPEIWMPSTEQRDLRTLLRDRDQWVRMRTRVQHTLQAIALNHALRQGRALWSATGQTALEALPLPPYTRQRRDELLALYAQLQKRIQELNKEVEAQARQRPQARRLLTHPGVGPVTALATDVFLGDPSRFATGNQVASYIGMIPSERTSGKQQRLGKMSKQGNALLRYLWTEAAMSTVRKDPELQRFYRRKLIQKGMGKARIAAARKLGIRLWIMMRDQIDYQEFCRRGKLRQTGETHAGMPA

SEQ ID NO: 250960 - protein, 343 aa, unidentified
MDYFAGLDVSVKDTSICIVDDTGKIVREVKVASEPEALLAVLKNPAYHFKRIGLEAGPMSQWLFSGLAEAELPVFCVETRHMQAVLKAQINKTDRNDARGIAQMMRVGLYRPVHVKTLRSQKLRMLLTHRKLLQSKAIAIENDLRGTLRNFGLKVGIVGKVKFEARIKELVENLPDLVVLVEPMLIVRRVLREQTVILHRRLLAIVRDDEVCRRLMTVPGVGPVVSLTYRATVDVPARFHKSKAVGAVFGLTCSKYQSGEVDWSGRISRCGDEMMRVMLYEAAQSMLRSKKWSWLKAWAMQIARRRGMKKAIVALARRLAVIMHRIWVDGTEFRWTREQATAA

SEQ ID NO: 250961 - protein, 482 aa, unidentified
MAKQKKSTFERLQSGKMNRKQRRELGRQIAAGDAPLEVVHPNAAGIDIGNESHFVAIAPDRDEMPIREFGSWTSDLHEMANWLKSRGIETVAMQSTGVYWIAVLDVLESYGFQVFLVNARGTKNLPGRKSDVQESEWLRKLHSYGLLRNSFRPSEHIRAVRTIWRQRERCVRECGRTIQQMQKALTTMNIQLANTITDISGVTGQAILRAIVAGNRDPRDLAKLRNKQIAASEEEIVHSLQGNWRGDVLFELSQVLEAYDFYQKQITACDRELQKYTAAIASREIPEKQKLPEGVRPLPSAKPHRRCTPHKKNRPCFDLAAELHRTMGVDLTRIDGIDAITAQVIFSEVGPDFGAFPTENHFASWLTLAPQRDISGGKVIRRVPAAGRNRVANALRMSAQSLWHSDSYLGARYRRLRARLEGKIAVKAMARYLACLVYRMVTNGQAYVDLGAAHYELKRQEKERVAFEHKAAALGFKLIPAT

SEQ ID NO: 250962 - protein, 337 aa, unidentified
MEYFAGLDVSMEETHVCVVTRNGTVIHEAKVPSTPASIAATLARVPSCQRVLFETGRMAPMLYHGLSQLGLPVVCVESRQAYQALKSLATHKTDRNDARGLAHLARTGFFKPVHVKSLPAHAVRSLIIARKKLVGQRVTLENQIRGLAVVFGVRLPRALSPAFIRQALQASEGIPGLSAAMKGLVAARAAVLAAVVAIDGDIRKMARASAACRRLMDIPGVGQLTALAFTTAVDDPERFRRSRDIGAYLGLVPRRYQSGEVDYTGGISKCGDRRVRTLLYEAANVMLTRYKGPLKLKAWALAIAKRSTMRKARIALARRLAIIMHAMLRHGTEFKSA

SEQ ID NO: 250963 - protein, 431 aa, unidentified
MNLKLHDPENEPDFSAFIGMDWGDKSHAIALYNPHSKQTESSLVPQSAETLHAWLDQMETRFGGKPVALAIEGTRGAVFPVLLGRQWLHVFSVHPATSSRFRTAFAPSGAKDDEPDAQVLLKILRCHRDQLRVLSLDDFETRLVGGLCEARRGAVDQRTQLCNRLTACLKKYYPQALELVGEHLDSPMALEFLEQWPDLFALKKARSATLTKFFYDHNVRSPKVVEARLKLIEKARPLTADPVILSISVSQMRLFVAQLHVVQEHIERFESQIATAFKAHPDAALFSQLPGAGKVMAPRLLAAFGADRERFPSPESLQKYAGLAPVREKSGGSLWTHWRWHAPTFLRQTFVEWAGQTVVYCAWAKAYYKTMKAKGKTHWVILRSLAFKWIRILWKCWKERTPYNDELYQKQLEKRNSPLAKILSEKLPNPT

SEQ ID NO: 250964 - protein, 340 aa, unidentified
MLVMIGIDPHKATHTAVAVDDDEKEIDEFTLRASNDQAERLRGWADRFTKREWAVESGNGLGYLVSRQLVAAGETVFDVPPVLASRVRLLGSARSQKNDPNDARSIAIAALRSDRLAIVQPDDHVTVLRLLVKRHRDIAQLRNKHCSRLHALLLEVAPGGIGVKISVTNASRLLDSIVAGDETSRFRVLIARELVDDIARLDATLKASKKRIAIAVQTSETTLTDIVGVGPIGAATIIGYTRDITRFPTRGHYASYNATAPIEASSAGNKRHRLNPRGNRILNHVIHIAAVTQLRHDTSGRAYYDKKIAEGKTPKEAIRALKRRISDAVYRRLIADTNNQ

SEQ ID NO: 250965 - protein, 464 aa, unidentified
MKKHNQKRKSKSRKKHSKTHNLKSFPTININAAGIDIGSEEHWVAVPEDRDEKPVRCFGCFTSDLHAMANWLKKCDIDTVAMESTGVYWVPLFQILETQGLDVKLVNARHVKNVPGRKTDVEDCQWIQQLHTYGLLSGSFRPEDSICVLRSYWRHRDNLIRYAAAHVQHMQKALTEMNLQLHKVISDITGVTGMRIIRAILDGERDLIKLAQMKDPRIKKSTATIAKALEGDYRQEHLFALKQAVELYFFYHQQIEACNQQIESYLNQLEPKFDSDADPKPIKRKKQASKNEPSFDLTTHLYRITGVDFTEIDGLNVLTVQSIISEAGLNPEAFGTAKRFSSWLGLCPENRVTGGKIKSVRTRKVVNRAAKAFRIAANSLKNSPSALGGYYRRMRARLGPPKAVTATAHKLARIFFHLWKNGGSYQDLGADYYEQKYKDRIVKNIKKRAKQLGFEITLQPIGNT

SEQ ID NO: 250966 - protein, 345 aa, unidentified
MVYCGMDIASVSSYVYVADKQGRKLSAGEIATTEQAMRDRLGPFVGRKLSIAIEAGNQTAWIHEALVKMGSAVTVVNPAKVKAIAQSRRKTDKIDAKLLCDLLRLDGLPHPVHMPSERARAVRGLLRARKQLVSARTKLCNVVRGMLRQEGIRLRLRALSTYVGWQRVQADGFDRPHMATIVATYYESFVRLTKSIRELERELDAQERADKRAARLETMPKVGQITALTTISALDDPGRFRSSRKAVSYSGLAPTVRSSGERTVYGSISREGRSELRAVWVQVAHLVVLDRKRSTQALRTWFNRVARRRGKKTATVALARKLLVIAYHILRDETVYDPTRLKRAG

SEQ ID NO: 250967 - protein, 392 aa, unidentified
METMTNRPAEPTAVRTDLGAIFVSLELSRSSWVVTALLPGGGEKMSRHAVPGGDIAGLLDRFSQLRDKAQARTGRSFPIIVIEEAGLDGFWIHRALQKQGIESHVVDPASIATSRRRRRAKTDRLDGETLVRTLLAFKRGEPRVCAMVRAPSPEDEDRRRITRERKALIAERVEHVNRIKGLLLAQGIRGYEPLHRNRRARFEELRTGDGRDLPPHLKAQILREIDRLELLLNQIKAVEAERDRALAAEPQDREAPAAAKMLLDIRGIGPEVAAVLWSEGLFRHFDNRRQVAAYAGLAPTPWQSGAVSREQGVSKAGNPRLRSTMIQFAWLWLGHQPDSALTRWFRARVEQNGGRQRKTAIVALARKLLVALWKYVTSGVVIEGARMKPTAA

SEQ ID NO: 250968 - protein, 455 aa, unidentified
MPKTKTGNRPELKPVNLGAAAIDIGSKMHMAAVNPAYADIPVRMFGTFTSDLHDLADWFKACGVTSVAMESTGVYWIPVYEILEQRGFDVILVNARFAKNVPGRKTDVSDAAWLRQLHSYGLLRGSFRPDAEIATLRAYLRQRERLVEYAAAHIQHMQKALMEMNLQLHHVVSDITGATGMRIIRAIVGGERNPDVLATYRDVRCHSSADTIRAALVGNDRDEHVFALAQSLELYDVYQAKMLDCDRKLEVLIAALSRKAAKPVGKLSKPRIKTKQVNTPTFDVRAALYGVLGVDLTDIHGLGPSLALKLIGECGTDLKAWPSAKHFTSWLCLAPGNKISGGKVLSSRTRRSSSRAAALLRLAATTVGRSDTALGAFYRRLSSRAGKAKAVTATARKIAVLFYNTLRHGMSYKDAGADHYEQQYRSRVLANLQRRAKSLGFVLQAIPGNTGPAVS

SEQ ID NO: 250969 - protein, 316 aa, unidentified
MFVGIDVAKAELVISILPAAERFTVANDERGVHTLIERLRSVTPTLIVLEATGGFELLGVAALAAAGLPVVVVNPRQVRDFAKATGQLAKTDRIDADILARFADVVRPAVRPLIDEAAQELEALLTRRRQLLEMLQAERNRTGQVFGKGKRVVKKSLKNHISYLERELRMTDTDLGDMIKASPLWRERDELLQSVPGVGPVLSRTLLADVPELGRLSRREIAKLVGVAPLSRDSGTMRGRRFVQGGRATVRAVLYMAALVATKRNAVIRTFYLRLVAAGKPKKLALVACMRKLLTILNVMVRTAQPWITDAALIPA

SEQ ID NO: 250970 - protein, 411 aa, unidentified
MPDSDRIAGIDVHKAMLAVVVVEGTSQSCRCIERAKFGATESELRRLAAWLVGRRVRDAVMESTAQYWKPIWMQLEGQFQLYLAQAQSNRAPRGRKSDFRDAERLARRHLAHELILSFVPNAEQRLWRTMSRTKYQLRRERILVQNQLESLLEEMRIKLSGCVSDLLGASSRRILQALSSGERDAEQLAAMADPGLRASRDQLTDALAQAAWLTPAHRQILGLFLERLDLIDAQIQTLEVSLAGAMRQHQDAVRRLAEVPGLGPDSAQQIIAEVGPTAATFPSAPELAAWVGTAPGREESAGVSISNRSPKGNRMMRRVLNQAANAAVRAKGSFFNQLYHRLVVRLGHNKAIWAVANRLCRLVWKILHQGVHYIEHGNQPDPSRLKQSVQRMIRELKHLGYSVQPTAQIAN

SEQ ID NO: 250971 - protein, 319 aa, unidentified
MSSELVYVGLDVAKATLDVALRPSGECWQAANDDAGVADLVARLQVLAPTLIVCEATGGFERPAVAACAAVGLPIVVANPRQVRDFARSTGQLAKTDTLDAGILALFAERVRPTPRPLPSDAAQLLDALLTRRRQLLEMLVAEKNRLGFAPQPLHRGIRQHIRWLERQLDDVTAELAARIEASPVWQAKSNLLQSVPGIGPIVSAVLLGELPELGALSHKQIATLAGVAPLARDSGTLRGKRMVWGGRGGVRTALYLAALCGRRWNPQLRVFYERLRAAGKPKKVALIACARKLLTIVNAMVRDHARWASPTLRVQHSC

SEQ ID NO: 250972 - protein, 384 aa, unidentified
MAPPARPRVVMGLDVGKSAHWACVVTREGELLASGPIPNRENAIDGLYAQYPGALVVVDQVRNIGSLALSRAKLAGMPRAYLPGLAAHGASRLFAGDAKTDERDAMVIAKTALGIPDALLAVADRPPEIEVARSLAAQRYFLTCENTRSKNRLRSILLESCPEFEAQADLSDPALELMAAVGGPWSISEASSRPVGALTRGCRRAKVAALAGSVESSSRPHPAAVACEDRAVRLLARRISENDAEIESLASEISALLAADETHRRLLTVPGIGPRTASELVISIDIADFADHDRLASRCGLAPRNRRSGTSISSVSASQRGNKRLKNLLVFSCNCLARSRNRWGDHYARCRDRGMPHGKALKAVARKRLKVIYAIMRDKVPYEA

SEQ ID NO: 250973 - protein, 377 aa, unidentified
MRGISSPVRVTQEGPDGLSRYCPVRVICLEIQLCFLTGALLWQVKLRKPPLWVAWIHIKICTLPLNNKVLGTQYFSATRQGYRQMLTWMASFGTLKRIGVECTGTYGSGLLRYFQNAGLEVLEVTAPDRMERRKRGKSDTIDAECAAHAAFSGIRTVTPKTRDGMIESLRVLKTCRKTAISARRVALQIIHSNIISAPDELREQLRNMTRMQLIRTLGTWRPDAREYRNVTNVYRIALKSLARRYIELHDEIAALDVMIAAIVDELAPELIKRNAIGYESASQLLITAGDNPQRLRSESGFAALCGVSPVPVSSGKTNRYRLNRGGDRAANSALHIIAIGRLRTDAKTKEYVARRVAEGHTKMEAIRCLKRNLHVTA

SEQ ID NO: 250974 - protein, 388 aa, unidentified
MNTQTVNELTPSATSTCFMAIELSNTSWLIGMMTPLSDKISLRKIDSGAVQQLIEIIDRAIEKVSRATGRVPQIVSCYEAGYDGFWLHRVLEARGVVNHVLDAASLMVSRKARRAKTDRLDAEKLVRALMAFWRGEPKVCSILRVPSIAEEDAKRLHRERQFLMKERVQHIGRIKGLLATQGIRDFWPSRRDWAQQLKASITGDGRPLPPQLTAEISRHCRRLALVNTMLNEIDAQRDAAAETKTEVDSSQPQCDDGIRRLVQLRGIGPHVATVLEREVFYRRFKNRRALGSYLGLTPSPFQSGSMDRDQGISKAGNPRARTVSIELAWLWLRYQPQSALAGWFKQRTGSLKGRIRRIVIVAVARKLMIALWRYLEAGLVPDGAVLKA

SEQ ID NO: 250975 - protein, 360 aa, unidentified
MVGIDLHSNNALCGLMDTSGRRLLHKQLPCDLTAILQLLKPYKKRIDTIAIESTYNWYWLVDGLQDHGYHVVLANPAAMQPYSGKKHTDDVSDAYFLAELLRLNLLPTGHLYDRKLRPVRDLLRRRMLLVRQRTTLILSFKSLNERTLGQRVPLARVKDMEPEEAQARFTEPADQLLAGEQITLMAHYTAAITKIEKHILAVAEKSPAYQRLQEMPGIGKILGLTIALETGDAQRFADAGHFASYCRCVKSVRQSNHKKKGENNRKCGNKYLAWAFVEAAHFACRHDERCRRFYDRKKQQANPVIATKSLACKLAKASWHVMKEDVPYDATRVFGPARKSDFGETGREPAKGSGHPSQQD

SEQ ID NO: 250976 - protein, 385 aa, unidentified
MQTPNDLSQSGIVLKQDSTLIAVIEMSLSSWLVAGMVPSVERQPLKKLAIDENALLKLLHRWREEAEKAGRKIERIAVAFEAGRDGFWLARWLRARGIEAHVIHASSVAVSREHRRAKTDRLDTELLKRAFLGWLRGERDHCKMVAIPTIEDEDAKRPNREREGLVGEQTRIINRMKAALSRLGIRGFNPKMKKAAQRLEDLRTPEDEPIPPNTLAELRRDMERRRLISEQIRQIENARLERIEHAPRHGPHAMVRVLARVIGVGIETADMLVQEALSRNMRDRRAVARYAGLTGSPDESGTRRREKGLARSGNARVRRGMIQLAWRFLMFQKDSALARWFRARTENARGARKTMIVALARKLLIALWRLVREGVVPDGVVLRPV

SEQ ID NO: 250977 - protein, 343 aa, unidentified
MQVSTIGVDLAKNVFQVHGVDNVGKVVITRQLRRKQVIDFFSKIPACLVGMEACGTAHHWAREISKLGHTVRLMPPSYVKGYVKRSKNDAADAAAICEAVTRPSMRFVSIKSADQQALLMLHRTRDLLIRQRTQLINALRAHLAEFGLVAETGREGLAQLAEIVTDESNRDALPPAMKQALQAIIDQLAALELQIGALDRAIHAHHRVNDMSCRLETVPGIGVIGATAIASTVTDPSNFKSGRDFAAWVGLVPRQHSTGGKERLGGISKQGDRYLRRLLVSGATAVVRNARQHPQKHPWIMRLLARKPAKLVAVAVANKMARIAWAIMAKGGYYRAPELAVAA

SEQ ID NO: 250978 - protein, 408 aa, unidentified
MKTLHKRCAGLDVHKSEVVACLRLVSKRKVEREVRRFPTTTRGLLELAEWLERAGCTHVAMEATGVYWKPIWYTLEGRFALILANAAHVKNVPGRKSDVNDATWLADLLAHGLMRASFVPPLAIQELRDLTRTRKQVTREIVQHVQRIQAVLEEANIKLCSAITDIMGASGRRILKALIAGETDAEKLAALGSERLGCTRAELVEALTGRVREHHRFVLAQHLRTIEHLEESVAAFDARIASSLSPFRDIAERLNEVPGLGRTAIETVIAEIGTDMSLFPTAGHLLSWAGLTPRLDESAGKRRSTRINKGAPWLKPVLVQSAWGAVRKKNSYYQAQFLRLRARRGAKKAAIAVAASILTTIYHMLRHGTCYQDLGPEYFARRNPAKAAARLASRIRNLGYHVEISAAA

SEQ ID NO: 250979 - protein, 349 aa, unidentified
MTTMADPRSAVFGGVDTHLDVHVAAALDGVGAELGVKSFPTTAAGYVQLLEWLTSFGAVIKVGVEGTGSYGAGITRHMLGAGVAVVEVDRPNRQKRRRVGKSDPVDALSAARAALSGDAHGAAKTRNGSVEAIRVLRVVRSSARRDRTEALNQLRSLVSTAPDELRGKLRDLSGLQLIATTAALRPGSQLDVLSATKTALRELGRRAQYLVDQISRLDDQLGPLVAATAPKMITQHGVGTDTAGALLVAAGDNPERLRHEAAFAHLCGSSPIEASSGKVTRHRLNRGGDRQANNALWRIVIVRMSNDPDTRAYVERRTKEGKSKREIIRCLKRYVARELFPLLPQGISP

SEQ ID NO: 250980 - protein, 352 aa, unidentified
MLIIGCDYHPRMQQIAYVDTETGEGGERRLMHRDGEAERFYRELKQRPIEVRVGMEATGYARWFERLLTELGFELWIGDPARIRARRVRKQKTDRKDAQLLLRLLLEGDGFPRIWVPSPENRDLRQLLWHRHRLVQMRTRIMNQLQAVAMNEGLRRKRALWSESGRKQLESFLLAPWATRRRQDLLELLDRLNPTIQELTAAVEKEAENKPEVQLLMSHPGVGPLTALAFVLIIATPERFQCGKQMGSYLGLIPCEDSSADQQRLGHISKQGSSLLRFLLVEAAQVAVRVNPEWRRRFLHLAMRRGRKIAKVAMARRLAVGLYWTWRKEWNYQQVVKFGSHVGQPELRHGVQ

SEQ ID NO: 250981 - protein, 350 aa, unidentified
MSMLAELVEVVIGVDTHKDTHTAAVVDARTGGVLARATVTADPDGYAELIAVAEQHCGLRAWAMEGTGGYGAGLARHLAQAGELVVELDRPKRPARRAGAKSDPIDAERAARDALARTRLAQPKTGAQRAALQMRLTARRAAIEAASDAQRQLQALVITAPEVVRARFRGQGTRAMITTASRLRPTATSGDVEAITALTVLRDLARRIQFLETEAAGHEAELRAIVRSWRPDLLQLPGVGPIVAATVLTAWSHPGRCRDDAAFAMLAGAAPIPASSGKTVRYRLNRSGDRQLNRALHTVALSRLRYDPRTRDYADRRRAQGKTDREIKRCLKRYIARELYRRLEAAPSPA

SEQ ID NO: 250982 - protein, 348 aa, unidentified
MVTIGVDPHKETHSAVAADPLGREISKRTEAAVHDGFGRLMAWARELDHEHVWVLEDCRHVSGPFERFLIDHGESVVRLPPRLMAGARDSVREPGKSDPIDALAIARAALREGIETLPTARLAGAELEIRLLCVHRQRLVDARTRLANQLRWELHDLWPGWDTSRARLRSPATQQQIARRLSRAEPTVRVRIARDIIRRIRELTRTIDQLHQQLAELVATVAPQLLAENGLGVITAAKLIGEIAGVERFTSDAQLARLAGCAPVPVSSGRTDRYRLDRGGNRQLNHAIHMLALSRLRHDPQTALYIAKQRARGKTQREAIRCLKRHLVRRIYHLLRDPSSIPITICLT

SEQ ID NO: 250983 - protein, 337 aa, unidentified
MMYCGIDLHSNNSVVAIIDDADRVVAQKRLPNDITKIVGFLARWQDELVGVVVESTYNWYWLIDGLQDAGLRVHLANTVAIKQYDGLKHSGDETDARHLAHLLRLGILPTGTILPREHRAVRDLARKRMQLVHSCTAHVLAVENIMARQLGGRMSSNQIKRLTGDAIDEMALAADVSLAIKTNVAVIATLQAQIEILEKRLQQHVKPRAQYGFLTSVPGIGQALATVILLETGPIDRFADVGNFASYARCVDSVRTSNRKKKGEGNVKNGNKYLAWAFVEAANFARRFCPEAKRFHERKKAKTNNIVATKALAHKLARACYHILKEGKPFDVTRCFA

SEQ ID NO: 250984 - protein, 428 aa, unidentified
MNCNTQNAKIASITEKTLIVGIDVGSETHYARAFDWRNYEYTKKPLEFSNTEAGFQTLKEWMEEIAGKHGKTTVIPGMEPTGHYWFALGKFLQDNGMKPVHVNPHHVKKSKELDDNNPNKNDRKDPKTIAALVNEGRFSYPYMPVGIYAEIRSLSNLRFQTQEELTRIKNRLARWFSIYFPEYKDVYGDLKAVSGRMVLKAAPLPEDIMKLGAEGVNRIWRDAKLRGAGMKRAKTLVTAAEHSIGSKEAPEAARMELKNLLDDMEAYASRLEEQLRRIEEKLKGIPYIDNLLAIKGIGMATVSGFIAEVGDIGRFDSPKQLQKLAGYAIVANDSGKHNGESRISYRGRKRLRYVLYEAAISLVGKNAEFREIHEYYQTRKENPLKKMQSVVAVACKALRIFYAILTKGIQYDPEKMLGDIRRPQVQAV

SEQ ID NO: 250985 - protein, 404 aa, unidentified
MIFVGIDWSERHHDVCVLDAEGTVLARGRVPEGIEGVAKLHETLAEHAEQPEEVIVGIETDRGLLVGALVAAGYQVFAINPLSVDRYRDRHSTSGAKSDPGDAKVLADTVRTDRHNHRPVAGDSELASSIKLLARTHQSFIWERQRHVNRLRSALREFYPQALQALGTELASRDAIAVLLIAPTPELGRRLSRSKIAAALRRAGRQRNVRPRAAQIQRALRSDQLGVSASLEETYGVIASSLVGLIAGLNDQIAGLEQGLHRAFEQHPDAEIILSLPGLGSTLGARVLGEFGDDRTRYADARARRNYAGTSPITKASGTHRVVLARFARNERLYDACHMWAFASLTASPGSRRCYDAQRERGKTHNQALRALGNRLVGILHGCLKRGELYREDIAWRVREAEAA

SEQ ID NO: 250986 - protein, 358 aa, unidentified
MQIIGVDLHTRQQTVAMLNVETGEIVEKTLRHEGDAVREFYSTLAGPTRVGIEATGSMQWFLELMEELGIDCQVGHPAKIRAAEPRKQKHDRRDAALVLQLLIENRFPSIWMPSREQRDVRSLILYRHQWVRIRTRVQNALQAIALSHGLRRGSSLWTEAGQQAIASLSLTRYTAERRTALQSLYGHLEKRIDDLDRKVEELAWQRPQAQRLMTHPGVGPITALATETFLGEPKRFVDGKAVASYVGLIPSEHSSGGRQRLGGLSKQGNPLLRFLWCEAVGHAVRKDAELQRFYQHKLVQKGLGKAKVAAARKLGIRLWILLRDQIDYQEFCRRGQLRQKHGGAHAGMPACEHDPAQQ

SEQ ID NO: 250987 - protein, 338 aa, unidentified
MRLYCGIDLHGNNAYLVVIDEHDRVLYRRRLANDLAVILAELDPYRNELVGVVVESTFNWYWLVDGLMDAGYQVHLANPAGMEPYTGLKYSDDDSDARWLAHMLRIGALAEGYICPPEQRALRDLLRKRSRLVQQRTANLLSLQGIVRRNTSQRLSAAVLKSLEHGELSELLKTPNVILTAESTWRVMECLDGEVKRLEQEALRQIKPDPLFELLKSIAGVGNVLAPVIQLETGEINRFPSAGDYVSYCRAVGGRRLSNGKAKGRGNRKNGNPYLGWAWIEAAFGALRHHAPVRRFYERKKARTHQLVARKAVAHKLARAGYYVMRDRVPFQIDLAFG

SEQ ID NO: 250988 - protein, 422 aa, unidentified
MSYCPVAGIDVSKQFSDMCILSPDNKIFAQEKIYHDETSINRANALLQKAERLFFSKPVIVMESTSHYHLILFQFFSEHGYDVIVVNPLQSNSMKDFSIRKRKTDRVDAFKLAMMYRTKTLRPSQIPQTATRALRQLCRHRAELLNDVSSYKNRLTALLDQTFPGYDKVFSDVGGVTSCAVLVRFPTPTILLVEEESELVEVIAAASKSGYSFAKKKAGLLISAAQKAQTLGIHSCADETLIVCTIQMLRTLSESVLQIETAIDNLLAQIKEMRNNVSLLQSIPGIGSHSAALLLGEIGDISLFKKPKQLAAYFGLDPTERQSGSFRGTKNKLSKRGSPYARAALHMGVVNSICKRGKDSAANPVLLSYYEKKCKNKPAKVAQAASMHKLVFIIFAVLRDQKPFELKTPEQHAVEQGFVKAA

SEQ ID NO: 250989 - protein, 362 aa, unidentified
MLNKESVVVGVDVHKYSHTAVALDAWGQEKGTLEFSNDSLPEYATWLGSLGEKPNIVVALEDVNCYGVHLVEELRKNGWNIRYVPAILTERERKQSTTRHKSDYADAKRVGKVMLTKYEETLPAREGIATETELRAAQALDLLLMERRDLVREKTILKNQLHGLLHQYYGDHYTDQFKKTFHKDSVAFYEHDLAGGGRNSSETKIILAGGIVRRLKRLTLLEKQIVVISKEITMIGSESPAVQALAETIHGCGMVTACAIIAELTTIKRFDSRDKLAMYAGVAPIEHSSGRKVKLHTNPFGNRRFNKALHVIALSQIACKGDERGRVYYQKKLAEGKTKLWALRCLKRQIAKIVFRILKAAA

SEQ ID NO: 250990 - protein, 365 aa, unidentified
MNNAYNTAIGLDVGDRKTQVCVMAKDGKSPKIVMEMAIPTTKEGLAKFLSTQDRSTPVAFETGTHCRWMNEVAQELGFKTYVANPCRLRMITESKTKNDVNDARMLARLALLDPGLLHPVKLRGPEHQKMLNLHGARNLAVKQRTEAIVQLRAMAKSMGFRIAKCQAASFHNLDRRAWPEAFRCIAWPMLKNLEQLAITIKTYEKQIRELAETPTFKAQVERLREIHYVGLYVATEFIAATGGDMDRFEKPRDVGPWLGITPKQDQSGDVDRQCHITKAGSPFMRRLLVESAQMILRDGAVDTDLKAKGLRICARGAKIAKRKAVTAVARALAVLMVAMLKKPDAPYVPLSERCEKELLAMRAST

SEQ ID NO: 250991 - protein, 405 aa, unidentified
MLNAVGIDVSKGRSTVAVLQPGGVVIRKPFDVYHKQSDLKELTAYLKSLEGETKVVLECTGQYHRPIVEAIHRVGIFVSAVNPHLIKNFGNNTIRKVKTDPADSRKIARYTLDNWDRLQEYSIMNTTREQLKTMNTQFDFFMKQKTAAKCNLISLLDQTYPGVNKFFDSPVRSDGSEKWVDFAYSFWHVDCVRKLSLNAFRDRYMAFCKKHGYQYSESKADEIHNASKDLVAVFPKEPAYKDLIQFSIKQVNLASEHIEKLRAGMNELASTLPEYSVVMSMYGVGPTYGPQLIAEIGDVMRFTHREALTAFAGVDPGRDDSGQHVSKSVPASKCGSARLRKTLFQIMTTLLQNMPADDPVYKFLDKKRSEGKPYYVYMTAGANKFLRIYYGKVKEYMRSLEASNS

SEQ ID NO: 250992 - protein, 381 aa, unidentified
MVNPTTLPDRTLEQACTMVLFMALELSDKKWKLALSDGTKRRIVTIAAGDLVALGEAVAKAKARFGMHGVVPIVSCDEAGRDGFWLHRYLLHCGVANVVVDASSIEVNRRARRAKTDRIDVEQLLRLLIRYHHREKRVWSVVHVPSVEEEDARRLHRDLERLKKERTGHRNRIQALLVSQGSRLQPRHDLLERLEAARLWDGSALPPDLQAEVRREEARLRLVDEPIRALEAEQARRLEAAATPCHQQIAHLMRLRALGLTSAWVFVMEYFGWRQFHNRKEVAALAGLTPMPYASGDSARDQGISKAGNRRIRTLMIQIAWGWLRYQPHSALSIWFNTRFALGGKRMRRLGIVALARRLLIALWRYVQSGAIPEGASLKPL

SEQ ID NO: 250993 - protein, 404 aa, unidentified
MKGPIVSIDVSKGKSDYQAFKDLNVKYTGSRSIKHNKEGFDEIVNLVREMEKKLETEVCVVYEATGVYHRVLKKVLEDNNIKQFIINPLLSAKTRKNDSLRSPKTDKLDPKSIAKTYYSHSLHNSHKQETIYHELRELSRYYEDILVHIRKDKVAFRAQLDIVFPGYDTLYDDLYGPVALAIIEKYPHPEMLQKKKINTVSKVIQNKTCHRQAVSDTMADKAIEYSKAIYSGCDKDDIEVLILQRFIKKLNEDMAEAERTIGEMIKLAQELPDFNIIKSIPGIGDNLAARIIAELGDMTRFKKKNELVAFAGLDPRISESGQNDGDHMHITKKGNKRLRCLLYLAVTCSIRLKRDDNSIKDFYIKKKQQSNPMCSKAAKTACASKLVRIIYSMCKTGELYQYNK

SEQ ID NO: 250994 - protein, 351 aa, unidentified
MLIIGLDYHPSFQQITFVDNETGEHGERRLLHQNGEAERFYRELKQRGVKVRIGMEATGHSRWFERLIVELDFELWIGDPAQIKAKRVRKQKTDREDARLLLTLLMEDRFPRIWVPGADNRDLRQLLWHRHRLVQMRTRIMNQLQAVAMNEGIRRKKGLWSNAGRAQLESFSLAPWAARRRHDLLELMDRLNPTIEELTTAVKKEAEKMPEVLRLMTHPGVGELTALAFVLILGTPQRFQCGKQIASYLGLIPCEDSSAGHQRLGHITKQGNSLLRFLLVEAAQAAARSNPDWRRRFMHLAMRRERRIAKVAMARKLAVCLFWMWRKQWDYEQLKKFGSYAGESDHVHGVQ

SEQ ID NO: 250995 - protein, 310 aa, unidentified
MDAIFVGIDVSKDQLDVHVRPNGERFAVGRDGKGLEELIGRLRTLSPQLIAIEATGGFETIAAAAIAGAALPLVIVNPAQVRHFAQAVGKRAKTDPIDAEVIAFFAEAVKPEPRPLPDEQARLLAELVARRRQIIEMIVAERQREKRAENVRVRKSLTRTIKSLEKELPEIDGDIDTLVRGSPAWREKEDLLVTFPGIGNTLARTLLAEVPELGTLNRREIASLAGLAPFTRQSGRWKGKSIIGGGRTALRAALYMAALSAIRCNRTLKSFYQRLLSAGKPKMVALIAAARKILTILNAMLRDRKQWQPA

SEQ ID NO: 250996 - protein, 348 aa, unidentified
MLADRLDYVIGVDSHRDAHALALLAAPTGAPLLESELSADRRGYEGALALARAQAPGERLWAIEGSGSYGAGLARYLAEQGERVVELERPRRRQRRRGKSDGIDALRAARAALAETKLALPRAGGAREGLRALVTTRTGAVAGRRAALNQLRALIVIAPESLRGELRGLTRAKLVTRCLRLRPERRAEPELRATTLALRACARRVSSATAEERELRREIALLVEQLAPQLLRERGVGVITAAQLVISWSHRGRFSGEAAFARHAGAAPIPASSGQVERHRLDRGGDRALNRALHTIVLARRKHDPATIAYGQRRRAEGKSVRETIRCLKRYLARHLYRVLEAGPMSSA

SEQ ID NO: 250997 - protein, 338 aa, unidentified
MELYAGIDLHSNNNVLVVLDESDRVIYQKRLHNVLADILAALASCGGTIKGVAVESTYNWYWLVDGLQEAGHKVHLVNTAAVKQYDGLKYSGDFSDARHLAHLLRLGILPEGYIYPREERAVRDLLRKRSQLVRTRTTQILSIQNLLARNLAIQASGNLIKGWQDANIDALELMSEQKLALKSNLALMHCVDEQITLLEKAILTKGKLKSEYKSLRTVSGIGEVLALTIALETGELSRFAEPGNFASYARTVNSRRESNGKKKGEGNTKCGNKFLAWAFVEAAHFAVRYDPVIARFYQKKCAKSLSVVAIKAVAHKLARACYHVMKKGEPFDVKRAFG

SEQ ID NO: 250998 - protein, 416 aa, unidentified
MKKHNNSGKKSEPTSKGTKSRGPVQRDTKEVLAELVGKLKAKLDPTKVAATSAGEKHQRGELRPNLDRLTVGVDLGDQWSHYCILGLEGERLAEGQLRTTQEDLATFFQGLNEARVVVEVGTHSAWVQEVIRGCGHEVLVANPRLMDGSKRRKRKNDRIDANKLAHLGRVDPESLYPIQHRSREVRQDLVMLRARDALVAARTEIINTTRGLVKSMGTRLPKCSSRSFAQKGEEAVAVEMREALLPLVRLAATLSADIKEYDKKIEELGREKYGHTALLRQVKGVGPITALAYVLTLENPQRFAKSRDVGPYLGLVPKQEDSGESQPQLGISKAGDTMVRKLLVGSAQYILGPFGPDTDLRRYGLRLCERGGKNAKKRAAVAVARKLAVLLHRLWVSGEVYAPLHHAMSAPIVAAA

SEQ ID NO: 250999 - protein, 430 aa, unidentified
MEVIYPKACGVDVHKSFIVAVICDSTSAKPQYLRKRFSTFNNSLIEFRNWLLANDCQNVCMESTGKYYVPVYNALEGHISNVVVANPKWVRCIKGEKDDNKDAKWIADLFKLGIVRGSFIPNKDIRILRELTRYLYKLTNMRTSEKNRFTNALTVGNCKLDMVFSDIFGKTSSAIINTILSQNEYNDEDILKNIQKNCKSSNEDILNSISGISWETAQKQRMNVIQEHIDYLDKSIKTVREIIDSIITPYESAINLLCSIPGINRKSAITIISEIGTDMGQFSSHYRLASWAGLAPGCNESAGKKKSVKISRAGVYLKPALIEVAHSAVKDKTNDYYAKKFNVISKRRGKKRAYIAIARKILVAIYHMLSIGEFFNPTDLSKAETSDKDKIKFTKNNFMQSTKQLISLGLTIDELQTLILSKISESTPVI

SEQ ID NO: 251000 - protein, 339 aa, unidentified
MWIIGCDYHPRFQQIAFVNTETGECGRRRLGHVGEAEQYYRSLQGQQVRVGMEASGHARWFERLLAELGHELWIGNPSEIRATVPRKQKTDTRDADQVLRLMVEERFPRIWVPSAEERDLRQLVLHRHRLVQMRTRVKNQLQAIALNEGVGRKPGLWSRQGRAQFAALALPAWTARRRQDTLELLAELLRRTEPLNQALEQEAARRPEVVRLMTHPGVGKVTALAFVLTLGEPSRFACGKQVASYLGLIPAEDSSGGKQRLGHLTKQGNALLRGWLVEAAHVAARSEPQLGRCYRRLAMKKHRSIAAVAVARKLAVRLWWMWSRGLDYGQMFDSGSHAG

SEQ ID NO: 251001 - protein, 360 aa, unidentified
MEDGQEVAGRIVVGGVDTHKDLHVAAVVDEYDLVLESQCFATTRQGYKQMLAWMCSFGQLRRVGIEATGTYGAGLLRYLHSVGVEVLEVTTPDKHDRRRRGKDDDLDAQNAAHAAFAGKRTVTPKSRDGMIESLRVLKACRKTAVSARRVALQMIHNSIVCAPDELREPLRKLTRMQLIRTLAAWRPDLSDYRAVVSAYRITLKSLGRRYLELHDEIADLDAMIGAIVEELAPSLVARNSIGHESAAQLLLTAGDNSERVHSEASFAALCGVSPVPASSGKVTRHRLNRGGDRAANSALHIIAIGRLRTDPRTKAYVAKRIAEGHSKLEAIRCLKRYIAREVYVLISQRRREIRRTQIAT

SEQ ID NO: 251002 - protein, 359 aa, unidentified
MKDDSTLYVGLDVHKDSITVAYALGSGEVEVFGKIGATKADIDRLCKRLQSKASRICVVYEAGPCGYGLYRQLIQKGFDCMVCAPSLIPKKPGERVKTDRRDAVKLVRLLRAGDLSAVYVPSVEDEAFRDLARAWVSAKDDLKRARQRLKAFLLSHGVRYTGRADWGPAHRRWLSAYAFDSAWQQLAFEELRRTIEDRLAQCERLEVALREAVLNWHFYPAVLGLQTMRGVQFTTAVGMLAELGDLSRFAHPRQLMAWLGVTPSEHSSGDKRRLGSITKTGNSYARKLLVEAAWSYRHPARVSPEIQRRHEGIPKPIVDRAWEPCIARTPLNAASAACPRNNACTFAQNRKDTVHCARF

SEQ ID NO: 251003 - protein, 345 aa, unidentified
MEPMYYIGLDVHKRKISYCVKDGSGKIYVEGTLPATRLDLDVWMKTLPHPWSVAMEATMFTGWIYDHLKPHAATLKVAHPLMLRAIAAAKKKNDRIDASKICNCLRCDFLPECYMAPTAIRERRRTLRYRNLLVRQMVQMKIKISALLREAGVSYNKQRLHKAGYFRELLATNPDIDEGLGSLLRLCRETVVRLQKTESALVRSLGRDSLLMDRVERLMTIPALGPITALTWALEVGDVQRFSSIKKAISYCGLCGAERSSGSTVQRTPLSKQRNKHLQTTLIEAAKMAPRNSPELAMLYDKEKQKGNANRATLAVARKLVAYLVAVDRRQKEFLTVERENRTAA

SEQ ID NO: 251004 - protein, 411 aa, unidentified
MEQIHDRVAGLDVHRDQVTVCVRTPGPGGGVQTEKARFDTTTGGLAALAGWLAGREVTLAAMEATGVYWKPIYYALEDRFLVWLCNAHHVKNVPGRKTDMSDAEWLADVAAHGMVRPSFVPPPPIRELRELTRYRKTQVDARAAEIARLEKVLQDAGIKLTSVASKVLTQSGRAMIEALIAGERDPAALAGLAKGKLRPKIPQLTAALHGHFGEHHAIAAARILAHLDFLGDTIAVLDGQIAARVAGHCQSAARLLADVPGLERRSVEVIIAETGADMSCFPSPAHLASWAGLCPGNHESAGKRRKVATTPGNPWLRRTLIESARAAARTRDSYFGAQYRQIARRRGPNKAAVAVAHSLLDVIWHMLTTGEVFADLGADYFTSRQDKEHQTRRLVSQLEKLGYTVQLAATE

SEQ ID NO: 251005 - protein, 410 aa, unidentified
MDVMIVCCAGLDVHKDSIEACVRRIEKDGKLQQQNRRWGTMTRELESMAEWLSREAVTHIAMESTGVYWKPIFNILEKRFQVLLVNARSIKHVPGRKTDQKDSQWIAQLLQYGLLKGSFIPPRQQRELRDLTRHRAQVLGEHSRILNRIQKVFEDANIKLGSVASDVGGVSGRLMLQAMVEGEEDAEKLANMAQGRLRSKQAQLREALHGRMSEHHRWMLRLLYDQLLSVESFLSKLDERIEQLTRPQQPVVEKLDQIPGIDRRVAEVLLAELGTDMSPFPSSAHLTSWAGLCPGNNESAGKRKSGKTTKGSRWLRQALVQAAWAASRKKDSYFQAHGRNLMRRRGKKRGLVAVAHSLLVVIYHMLKENTDYVDLGAKFLDQIRSEHLIRFHTKRLQELGLKVLTTPLAA

SEQ ID NO: 251006 - protein, 419 aa, unidentified
MTRKDDSRIIRIVHPICCELDVHKESVSACVIFPDSNGEEQHEIKVFSTFTDDLKQLRQWLLDHECPVVAMESTGVYWRPVHNVLEQAVQVVLANARNMKNVSGRKTDIGDSRWIAGLLRHGLLKASFIPPMSVRQWRELTRLRKKYVQSVGDYRKRTHKLFESANIKIDSVVSDLFGVTGRNLMKLLIVDRELTLTDIEACIRGKLKGKEVELFRSIQGFFMGHHRFILKTLLGTIANLAGQIEALDQQIRSLMKDQSDLLERMKKAPGISDVSACDILAEIGPTLDSFPTDTALVSWSGLCPGNNESAGKRKSGRSPVRKHHLKTIMIEVAWAAIKKKGSYFKDKYYRLKARRGAKKAIVAIAHRILLGVYHVIKDGAEFRDLGEDYLTLRNKEKKVLYLQKQALALGFNLIPQAIQ

SEQ ID NO: 251007 - protein, 347 aa, unidentified
MTIYVGIDLHRKRSQIAALDEWGTELLSRRVANEPEALKAILAELGGELQVALEATYGWEWLADLLEGEGHELHLSHPLRTKAIAAARVKTDTVDARTLAHLLRTDLLPEAYVAPRELRDLRDLLRHRVVLTRMRSALKNRVHALLARQGIQREHADLFGKSGRAFLAELPLREPACRRLASLLSLIDDFDREIELAKREIDALARHDPRVDVLCQLRGIGPYTAMLVIAEVGEIERFRSARHLCAWAGLTPTVRSSDGRARLGHISRQGSPHVRWALVEAAQKAATGGGPLRAAFERIAKRRGRNIAKVAVARRMLTLCYYGLRDGEIRCLQAPGPASARPVTAAP

SEQ ID NO: 251008 - protein, 430 aa, unidentified
MTKLHSTPTDAVLVAIDMSKHRQEVLLERPEGGRRRRMTVMATKEDYDRLAADLAAIGRPIIVGFEATGNYHRTLAHRLLSAGFELRLISSVGLARTREALHNGWDKNDSKDAQVILHMLRIGATQRYVDPLAAGINDLQEMSKTHEAISKAKTQTWHRILTHYLPLYFPEIERFAGNSRSDWFLALIERFPTPGSITALGREAFTKQAWPLIGRKVSKARVVNDIYETACASIALPIDEDSTAVTMFRMVIAQARTLIQQRNEIERIAHDALAANRDYQLLRMIPGIGPINALTILAEAGDLRRFAHHRQFLKFCGLDLATCQSGIFRGRTKLSKYGNARLRRTFWMATQVAIRQPNNSFRDKLGRYVAGHADDPDRRRKAMTALTAKMARVVHAVIKTGTEYRPFLERADTRWKDPSLLCREGASATL

SEQ ID NO: 251009 - protein, 374 aa, unidentified
MEKDSRFVGLDVHADTIAVAVAEPGGDVRTLGTIPNTRDAVRRLIAKLGARERLRVCYEAGPTGYVLYRQLTELGVPCAVVAPTLVPVKAGDRVKTDRRDAAKLARSYRSGDLTPVWVPDAAHEALRDLVRAREAAKQDQLRARHRLSKFLLRHGRRAPAGFKAWGAKHDAWLDTVRFDAPAHEATLADYRHEVDHATERIARLERALTAVVAAAPAPVRAVIAALQALRGIAALGAVTIVTEVGQLSRFAHADELMGYSGAVPSEHSSGPKTRRGAITKTGNAHLRRILMEAAHPYRHRPAVGYTLRIRQRGLSEEIKAIAWKAQHRLHARYRHLSDKGKPLPKVITAVGRELLGFVWAIGVCVEREEAARAA

SEQ ID NO: 251010 - protein, 343 aa, unidentified
MKVTTVGLDLAKNIFHVVCFDERFKELRKRMLRRNQVVLFFANLPSCCIGMEACASSHFWGRELSKLGHEVKLIPPQHVKAYLRGNKNDYNDARAIAEAATRPGIPGVAVKSVEEQDMQALHRLRSQCLRDRTALTNSTRGLLSEYGIVLPKGIASLRKHIPELLEDADNGLSILFRNLLARRYEQLAELDGHIAFYTNKLERLGREDAACQRLQTIPGFGPIVASAFRGAIGNGRAYSKGRDVAASLGLVPRQHSTGGKNILLGISKRGDQYLRSLLVHGARAVVIQAARKKDLLSRWLNRIHKERGLNKAVVAMANKMARIGWVILRYNTSYNPLSAVSAC

SEQ ID NO: 251011 - protein, 341 aa, unidentified
MKNKSFIGIDISKNVIDVSIFCEETPIKDFSHDVFNNSRKGFGEMCTWLKKNHVVLSNCLFGMEFTGSYSMELEKFLNARNYQFCMLSTHVVKHYPMGPKDKSDKIDSAKIADFLYRYNGTECVKPYNMPDKTMQRLKALMNERKFLVEQRTCFMNRRQLCTTKEDTQLYDGYIKKLSHDIENIELEEQKLLATDDSLLSTYKNLLTIPGIGFVNAINVIVITRNFTAFETARQYASYVGVAPHFRTSGTSVKWRPRPSARCDGQAKADLSMAATVVVQYDAELQSFYNRKLGGKQDSDTKRKALNAVKFKLVLRMFAIGKQNRKWEPLDSKSSNEKLAIS

SEQ ID NO: 251012 - protein, 420 aa, unidentified
MANNEPIQVVHPCCCGLDVPKRQVQACVLRTTTAGQVEPLQRSFGTVSAEVLALADWLDSLGCTHAAMESTGVYWKPLFNLLDGQFTVWVVNAQPIKQVPGRKTDVSDAAWIAGLLRHGLVRPSFIPDQEQRELREVTRYRRSLVDERTAEVNRRQKTLEGANIKLAALASDVTGQSARAMLEQLVAGGSAPALLAQLAQGRMKAKIPALERALTGRFGAHHRFLVARQLAHLDALDALIAELDAEVARRLVPFEQEVALLDTIPGVGRRTAQDLLAEIGPHMEQFPSAAHLARWAGLAPGNNISAGKRKGGKTRKGSRWLRACLVVSAHAVGRSKDPVLGARFRSLAARRGKERAAVAVGHSILVLAYYILRTHQPYHPPLPLTRPSRPEPSTDQLVEQLRARGFVVTLQPAEPATPAA

SEQ ID NO: 251013 - protein, 441 aa, unidentified
MESTLGRIPKSEVHGIALSMDEIRSNVMKVIYKRCAGLDVHKKTVVACRINLDGDLEHRLEETRTFKTMTNDILILTAWLKEGGVTHVAMESTGAYWKPLFNILESEFEVILVNARHIKHVPGRKTDVKDAVWIAQLLQHGLLKASYIPEESQRALRDLVRYRTKLVQERSREINRVQKVLEDANIKLSSVVSDVMGVSARAMLTALVNGQEDPETIAQLAKGRMRSKIAELEEALTGRMARHHRLMLSLHLEHIDDLNTKIERLQNEIDQGITPFNQNQEVERLDGIPGVGLRVAQAIIAELGIDMSRFPSSGHATSWAGLAPGKNESAGRNQSAKTVKGNRHLKAMLVQAAHTVARSKDNYLSAQFRRISRRRGKKRAAVAVARSILVIAYHLLRDGTAYIELGGDYFDKRNKQQLERRLVKRLEQLGHKVVLEPAMAV

SEQ ID NO: 251014 - protein, 434 aa, unidentified
MFANYSAAEDIMKEYAAYLGIDWADTKHDLCLIDTASGTKTRLVIQHTPEAIAEYFTGLRARYAGQQIAVGLEQSRGPLLFALLQYDFLVLFPINPTTLAKYRQAFSPSRAKDDPTDAAYVAELLMQHGDRLKAWHPDDDETRTLRYLVEHRRRLVGDRTRLSNRLTSLLKCYFPQVLTWFPDIRTELVCDFLLRWPALERLRGVKRTTLLNFFRAHHSVRRDTLEKRLAAIKESVPLTTDRAVINSSVLMTTALAAQMKTTIAAIREFDSEIEKLCLAHPDFPLFQSLPGAGDVYASRLLAVIGSDRARWATADELACLSGIAPVMERSGKSVWIRWRYFCPKFMRQSFHEYAGESVKHSFWARAYYQQQLSKGKSHQAAARALAYKWIRIIWKCWQTRTPYSEVKYLESLRKKGSPLLAFAVTNPSSSLKTS

SEQ ID NO: 251015 - protein, 338 aa, unidentified
MSIVMGLDQHRAQITADWLDTDTGEVKRGRVAPADRAGVRRFLERFVGRELEVALEATTGWRFLVEELRRVGAVVRLAEPAETADLRGSKKRAKGDRGDARHLRELLMIGRLPESWIPPDHILDLRARVRLRHELGEQRSEWQQRIQATLYHHGCPQRRQLMVGDGRDWLAQQPLPDTAREQVTIALAMIDALELQIRPIEKELRAYARRQIGCRALMAHYGIGELTAVTILAELGDCTRFSSSRQAVRYAGMDITVYQSDRHRAPGHISRQGPPALRWALYEAAQVARRPGSPDRDYYVQAAERIGGNRACLSVARKLLKRSYHTLRELGEQALAPA

SEQ ID NO: 251016 - protein, 427 aa, unidentified
MTYRIAAIDVHKKMLAVVVADVAGEGEYQFERRKFGATPDQLHLLAQWLCQQEVEEVVMESTAQYWKPVWGALEQYWQPERQKREGARKMSGKLHLCQAKSNRGRRGRKNDFADGERLIKRLVAQELVLSFVPDAEQRLWRTVTRRKYQLTRDKVRFQNQLESLLEQAHIKLSSLVSDLLGVSARRMLKAIADGETDPAALAALADYRLRATPEQLRDALGACGQLHGVYRRLLKMALEELKLMEDQIQQLEQEASELLQQHQDAVQRVAEVPGFGVDSAIQAIAEVGPEAAAFESEKKLSSWVGSCPGEEESAGESKSTRSPKGNRAMRRLLNQAAHAAIKVKGSIFEVTFQRLLPRLKYQQAIWAIAHRLCRLLWKILHEGVRYEERGPAVSAKSKSRRAARMIKELKALGYRIEGGSLPAGTPA

SEQ ID NO: 251017 - protein, 385 aa, unidentified
MTIQTSISTFVPQNYQVFSGLDVDKGSIAVTFSDHNRLINSLRLPYSSEQLLNYVRKHFPQQRVAFVYEAGPTGFGLYDEITAEGHPCLVVAPSMVPTAPGKRVKTNRLDSKKLSEGLRGGQLQSIHVPTRPYRELRHLVQLRDTHVRQLTATKCRIKSLLLYEGIPYPDPKGRWSAVVIAKLRVLPCTEAVRFKLDHLIGTLYFHFNSAALVQKQIRRFCQADPELRQSIALLKSIPGIGWIVAAHLVARLGDWREIDNVRSIAGFLGLVSSEHSTGDKHNGGSITRTGDSRLRNKLIQSAWTTIKKDPELRAFYRSVYQRQPKKLAARKAIVAVARKLTTRIYAVLKQQRPFVSRPDSATAPLTTEETAALRERLDTAQNEQP

SEQ ID NO: 251018 - protein, 331 aa, unidentified
MDEVKRFVGIDVAKTALDVFIGSAGAAFSVANDEVGIRELLRQLKSADFVILEATGGLEMPVASALAMIGISVAIVNPRQVRDFARATGRLAKTDRLDAEILARFGEAVRPAARPLANEQAQALEALVTRRRQLVEMLTAEKNRRINAPKVLHRSIDEHIRWLEKRLSGFDDELAALIRDTPLWRERDELLRSVPGVGKVLSSTLLAHLPELGMLNRKQIAALAGLAPFNRDSGKLRGSRCIWGGRAQVRRVLYMATVAGVRSNPAIRTFYLRLRANGKHAKPALIACMRKFLVILNAMLHNKTHWQTPALTSSTSPFSPRLGADAQHGCC

SEQ ID NO: 251019 - protein, 341 aa, unidentified
MAVAGGLDLHRGQLTFDYVDTGTGESWRGRICPADRESLRGWLRRFHGVPDVEFAVEGCTGWRYVAEELQRAGITPHLAEPAETAGLRGRKRRAKTDWADARHLRDLLLDGRIPESWIPPGHVLEARALVRLYKDLLEERTSWQQRVHATLFHQGIPVVPKLGTADGQQRLDAAELSAAGRRAVQAGLRQIERLTQEMASLRRELARLSSRQPGCRALRRAHYGIGGLLSVAVWAELGDCRRFSSSDDAVRHTGLDITIYDSDGKRARGHIARQGPPVLRWALYEAALYASRPASPDYACYCGVRDRIDGQRALLSVARKLARRCYHTLRDLGEDALAPAA

SEQ ID NO: 251020 - protein, 457 aa, unidentified
MLICEGAVSDQDQEKPLSLFQSLAGKVVLLLKKTDLLSTLFVGIDISSRSNVVALLDFESQKPLQTFSVANNQPGAIELAQHLLEFLDSRPDLRKLVVALESTSFYGVHIANFLSSHETLASFRTAVYCLNPKTVANYKKSFIDLGKNDFVDAFVLADFARVGRITNKPWRGSQFLALQRLTRHRLHLAKSLTKEKAYMLSNIFLKFSEFSLLDGEQQPFSDRFGKAAASVLTDFLSTEEIVDMPLDALIRHICEKGRNRFQDPEATASLLQKAARDSYRLDKCLYEPLTISIASSFNLISTYTAEIKAVNKAIEKTLKGLDPAAYQCLLSIPGIGPVMAAGILSEIGWIDAFKSQESLAKYAGLVWRENQSGNYRADDTPMSKAGNAYLRYYLLEATSHVKNHCQEFAAFYQKKYAEVKTHQHKRALALTARKFIRLIFGLLAKHQLYSSNRVVQA

SEQ ID NO: 251021 - protein, 314 aa, unidentified
MKNYVGIDISKKDFYASSSEEDAPLKYDNSKTGLKAFCKQLKKLNFQPDNTEIGVESTGAYHYLLAMYCTNKGYTVKVINSLIVKKHNQTNLRRVKNDSKDSMLIRYCLVQGFGYPFQETPESILIRTILRQRNSLADLRRTFKVKQVDLELKETSLNIKLPEVNKDIISFVSEQMNELDKKMKQFEPQLQKLLQTIPGVGPITAISFIAELGNIERFSSSKKLTAFVGLDSRVHQSGTSINGLGYISKRGNKILRTRLFNASMVAVQRPNIFKTFFDKKISEGKPYMVALCATMHKMVHVIYAVWSRGTPFVA

SEQ ID NO: 251022 - protein, 342 aa, unidentified
MDISTMGMDLSKTTFHLIGLSPRGEIVLRKKLSRKQLLTYTATRLPMLVGMEACAGAHFLARALRDQGHDARLMPAQYVKPYVKTNKNDYLDAEAIAEAVQRPTMRFVPIKNDEQLDLQALHRVRDRWVARRTAVMNQIRGFLLERGIAIRKGPSYLMTQVKIIFSDGNPSFSERLLHLIHELKHEWDELERKIEEADTELARIAKEDDGCHRLMEVPGFGPIVSTALVAAIGNGVNFRKGRDLAAWLGLVPRQHSTGGKTRLLGISKVGNEYLRRMMLHGARSVVMQMERKPSALGEWLTSLSARRHRNVTVVALANKMARIAWAILSKGTHYCAPAFVAA

SEQ ID NO: 251023 - protein, 366 aa, unidentified
MQKTSTVRVNGNMIFKGHKLTIGLDLGDRWSCYCVLDEAGEVLMEKKLPTTPEALEQTFVRIPGSLIALETGTHSPWVSRRLTELGHEVLVAHAQKVQLISKSNRKDDRHDAWTLARVARIDPELLGPVRHRSAKAQIHLTVIRARAELVRARTALVNAARGMAKSYGERLRKCGTQQVSRELAAELSLELREVLEPLMAEIESLNERIKEYEVRMEKIAQESYPQVELLKQVKGVGTQIALTYVLTVEDPHRFPKSREVGCFLGLRPGRRDSGESQPQMHISKEGDRYLRTMLVQGAHYILGPFGEDSDLRRWGLKLAARGGENGKKRAVVAVARKLAVLLHRLWVSGEVYEPLRNSQKAMRAAA

SEQ ID NO: 251024 - protein, 341 aa, unidentified
MKHYAGLDVSLEETFICVVDESGKRVWRGATKSDPQTISRVIRKRAPKLVELGFEAGPLCTWFWHEFKEMGLPVVCLDARHAKAALSMQVNKTDANDAYGLARIVRTGWYRAVDKSIESHVVRSLLAVRSQLVGIRTRLSNQLRGILKTFGLVVGKVSGRSLESRVRELTAGNLMLKDVVESILNVWRTIYDQLAVIDKKLRQFSHSNEVCRRLMSVPGAGPVTAAAFMAAIDDPDRFKRSSSVGAYFGLTPKRYQSGEVDRSGKISKCGDSRVRSYLYEAAGVLLTRVKKWSKLKAWGVRLATRVGLRKAKVAVARKLAVILYRIWVDNSKFQWGDAPSL

SEQ ID NO: 251025 - protein, 352 aa, unidentified
MNSVKYVGMDVHKGITVIVVLNAAGHVESRTQVKTKAENFRDFFRGLSGKVEVVFEEGAHSAWLYQLLKPLVAEVTVCDPRHNKLIGDINKSDDDDAETLARLLRMREVKAVYKGDGEQQKLKELCRAYKNLVEDTTRAQNRLKAIYRGRGLDSSGTEIYRPERRADYLARLSDEAARFRAESLFDQIESLRELRKQAKSRFLEQARKHPDYPILASVPGFGAVRVGELLAIAITPDRFRTKRQFWPYIGLAVVTKSSADYKEVEGRIIKSQKVSTRGLNWNHNPRLKQVFKGAAQTALHRGEIRAYYQRLVERGTRPALARVSVARKLAAITLTLWKRKEKYDPKKITAQN

SEQ ID NO: 251026 - protein, 340 aa, unidentified
MTIVTLGLDLGKNWVHMVGLDADGRIVLRRRVRRDRLLVETVDMPPCLIGMEACCGAHHLGRALAAQGHTARLMPPQYVKRFVKSNKNDHRDAEAAAEAVQRPTMRFVPLKSEAQLDLQTIHRVRQRLVGRRTALINQLRAILLERGITVARRRRVLELRLRAILADESARLSARVRHLIEDMRAEWRDLDARIDAFDAELTAKARQDDACRRLCEIPGIGALNATALVAAVGNGAVFDRGRDMAAWLGLVPREYSTGSKQRLLGISKRGNKYLRTLLIHGARAALPYLAARNDRLGSWLRSLLARAHRNVAVVALANKLARIVWAVLANDGCYAMPTTA

SEQ ID NO: 251027 - protein, 368 aa, unidentified
MFIERTSLGLDVHARSVRAAAIDTVTGEVIERRLAPDTAAVVGFVTELAVDHGPVLVTYEAGPTGYGLARGLLVAGHRCQVAAPSKLLRPVGDRVKTDAKDAVLLARLARNGDIVEVTIPTVAQESARDLVRARDDARTALMAGRHRLSKLLLRHGHVYDGGQAWTGRHDAWLRRTRKEHLARGGAGTLAAFDDGYDAVTHTLARRDRLDAAILALAEDSEFTAVTRRLCCLRGISTMTGFALAVEIGDWHRLTGASVGAYLGLVPTEHSSGGSRSQGGITKTGNSHARRLLIEAAWHHQPGYVAGKTLRDRWALAPAAAAARGDAGNRRLHHRWTVLAAHRKRHTVANTAVARELAGWCWSLAVMDQ

SEQ ID NO: 251028 - protein, 314 aa, unidentified
MTQPPRFVGIDVSKAQLDVAQRPGGRFTVSNTEAGVMELLARLAAEPPTLIVLEATGGVELPLTGALAAAGLPVVVTNPRQIRDFAKATGQLAKTDALDAQVLAHFADVVRPEPRPLPDAQTQELAALVTRRRQLIEMLTAEKNRLASACVVIRKPLRAHITWLERALDQADTDLAEAIQQSPVWREKEELLRSVPGIGPVLTTTLLANLPELGTLTHKQIAALVGVAPLNRDSGTLRGKRTVWGGRAQVRAALYMAAIVAARFNPVIRVFYQRLCVAGKAKKVALVACMRKLLTIVNAMLKHRTPWRQRVEPA

SEQ ID NO: 251029 - protein, 347 aa, unidentified
METIVRIGLDTSKSVFQLHGVDGMEQPVLRRKLRRGQVLAFFGRLPPTLVAMEACGASHYWARELRSLGHEVAMIPPQYVKPYVQRGKSDAADAEAICEAPSRPKLQKNFVPIKSPEQQGAQMLTRVRNQFIGRRTQLANSIRGYAAEFGFTAPKGLSRLPQLLIDIRADATVPDLAMELIEALAAEMARVDDQIVTLDKKLMQLHRSSEMSRRLATIPGIGPIGATLLSIKVVDARGFKSARNFAAWLGLTPKNHSTAGKNRLGVITRAGDGMLRTVLVAGATAVIADMRRRGSRPWSWLKDMIARKPPKLVAIALANKLARIAWKLMVSGERYRPASAVPMPTPT

SEQ ID NO: 251030 - protein, 323 aa, unidentified
MDSVMMTTLGLDIAKAKIDCALLLKNKVKSKVFPNNPDGFNSLIGWLAKHGVSRVHACCEATGTYSDAVALFLHEHGHVVSVVNPAQIAAYAQAHLSRAKTDALDARLIARFCEREQPQPWTPPPAEERLLLALLRDLQNLQAIQQAESNRLATAHAFVRERIERHLTFLASEIEQIKKLIEQHIDRHDNLRGRRDLLDSVPGLGENTIPWLIAYLSDGGRFGGAKRAVAFFGLCPKPHQSGTSVRGKARIAKTGHADMRHVLFMPAMVAYSRCKAYAPFVQRLKAAGKPPKVIIVALMRKLVAIAQAILKSGKPFDPDLHHA

SEQ ID NO: 251031 - protein, 348 aa, unidentified
MNTTTIGLDIAKAVFQVHGIDARGQTTLRKRLRRAQLVTFFANLPPCLVGIEACASAHHWARELSKLGHEVKLMSPQFVKPYVKTNKNDARDAEAICEAVRRPNMRFVAIKTVAQQELLMLHRVRQRLVLERTAKANQLRGLLAEFGIVLPQGFPALERGVPEVLADAENGLSDRLRERFSQLFSQLRELCTTVRQWEQQILAWHRENLLSRRLDQIPGIGPLGASALLASIGDIRTFKNGRQLAAWLGLVPRQDSSGGKTRLLGISKRGDRYLRTLLILGAQSVLRQMKRNPARAAHSWLGRLTARSHPHIAAVALANKNARIAWALLAHEREYQADYRARVAPAPV

SEQ ID NO: 251032 - protein, 409 aa, unidentified
MEVVHARCAGLDVHKKSVYGCVICCEADGQKRQEKRSFGTMTADLLSLSDWLREHQVTHVVMEATGVYWRPVWAILEGQFDLMLVNPHHVKAIPGRKTDAKDCEWIAELLQHGLVRGSFVPPTEIQDLRDLTRYRVELTQAQNRIANRIQKLLEQANIKLSSVASNALGVSGQQMIEAIIAGVNDPERLADLAQRRLRGKIPELQLALEGRVRDHHRFLLKEFLEEWKALGTRIRRIEEEIDRRITPFEEAVTLWQSIPGVDRVTACNLVAELGVNMAQFPSAQHLASWAGLCPGNNESAGKRMSGTTREGNKWLRRTLCQAAWAVTRKKDCYLSAQFRRLAARRGMKRAVMAVAHTMLIIAYSMLKTGRSYHELGGNYLEQINKDQLQRYFVKRLQKLGLTVTVAPAA

SEQ ID NO: 251033 - protein, 428 aa, unidentified
MEQVNRNRLEEFRQLRQEVRHSEEYLIVGIDIAKDQHHAFFGTATGKTLLRRLVFSNDHEGFRKLLDHAEALRVRQGLKKVVYGMEPTANYHKPLGEYLITLGRMVVLVSGVTVKRNRESLDGRWDKYDGKDAANVADLISQGKCLHYEHPSAELRGLRGLLSLKRRLKRQEQGYRVRIRNHLIAQYFPEMDSPYGRSETEGLAIVRWCFPPSQITELDVDPFIERVTSRRVRMEQRRRLEAIWEKAGESIGCERVPGVEHEARVMVEGLRQIREMIKETESKIQELCNEFSGYRFLLTIPGFGPDVSAKVLGAIGDPDRFQNGKQVLKLGGLDLSADRSGKDSDKAIPEISKRGKADLRYALFQAALIASTRNQDFMRYYTAKLRGREREKGIHMKMRVKLSAKMLLIAWTLMKKKEAFNPAYLNAE

SEQ ID NO: 251034 - protein, 364 aa, unidentified
MNVEESIRLEEFCQLKKEIRGSEEHLIIGIDIAKDKHHAFFGTATGKTLLRRLIFENNIEGFGRLRTRTEAIKVQHRLSKVVFGLEPTANYHKPLAEYLIKCGHNVVLVSGVAVNKNRELLDGRWDKHDTKDSANVADLISQGKCLYYDYPSMPLRDLRNLLSLKRRLKKQEHGTRIRIRNHLLAQYFPEFDRYFGKGCSESLPIVKWCLNPSMISGMGYEEFVQLVAPRIKTMGQEKRLKSIWRMAVDSIGCEVGQALDFEAKLMVEDLQQIKDSIRAVDEHIEDICLGFPEYSYLLTIPGFGPDVSSKVLGAIGNPSRFDNGKQVLKLAGYDLGANRSGKTSDSAVPVISKRGKAYLRYALY

SEQ ID NO: 251035 - protein, 391 aa, unidentified
MTYFVGIDIAKYKHDCFIQDHNGVVIRNSFTFKNNQSGFNEFLSVLYSLDQSQKIKIGLESTGHYGSNLKQFLVTHNFDYMEFNPLLIKNFSKSTTLRRTKTDKIDSALISTFLTTVDYKPNTNQSYHIHALKSLSRLRDSLIKQRSQILIRMTNVLDVIFPEYKPFFDKSLTAKTCLYILENYGSPEKISHMNIDSYNKMKKQLRHTISYPKFEKLKDLAKNTIGTTDDIYLFELSTLLDIYKKFTSKIDDIDKQLTEYYLQKNSHIHTIKGVSSVTAAGIYAEFGDISNFETPNQMLAYAGLDPSKNESGEENHKGHMVKHGSGHLRQLLMNAADSFALHNPVIYQYQFKKKNEGKHWRVVQSHVARKLVRIIFYLEKNDIDFNEKLLR

SEQ ID NO: 251036 - protein, 340 aa, unidentified
MTITTVGIDLAKNVFAVHCVDQNGITVLVKPKVSRAALPELIAGLPPCVIGMEACSGAHYWARLFRQYGHEPRLMAAKFVSPYRMAGKSGKNDAADAQAICEAVRRPHMRFVPVKEESQQAMQCLHRTRQGFIEEKTATYNRLRGLISEFGIIAPQSTDALRHIVSEQKNSLPLQVQQCVDDLLEHINRIEDNIAEYDRILSRMAKSDHRSQRLMELKGIGPTTACALVASIGNAHDFKNGRQLAAWLGLTPSQYSSGGKSKLGRITKAGDSYLRTLLVQGARSVLIGAEKRTDSFSRWVCSLIERRGYWRAFVAIAAKNARLCWASLHYGDDFRLYSAS

SEQ ID NO: 251037 - protein, 367 aa, unidentified
MKKVSTAVVRQSRNICPPKLTIGLDLGDRNSWYCVLNEAGQIQLEQGVRTNAKALREVFGKMPRSRIALETGTHSPWISRLLSELGHEVIVAHARKVRLIGESRKKDDRLDAQTLARLARIDPELLSPVKHRSAQAQADLTVIRARAGLVRARTALVNTARSLAKSYGERLRGCNVRNMNPEKAEGLSPELQSALEPLLAEIESLSERISEYNDRIEALAQHSYPQVALLKQIKGVGTLIALTFLLTLEDPHRFRKSRDVGCYLGLQPGRRNSGQSEPQMHISKEGDPYLRTLLVQGAQHILGPFGVDCDLRRWGLKLAERGGKSGKKRAIIATARKLAVLLHHLWVSGEVYEPLHNSSRTTFAAAA

SEQ ID NO: 251038 - protein, 365 aa, unidentified
MASVAHLAPIHLGLDVHRDTISVGILGPGEAVPAVDKIAHDEPSVRRLVGRLGDPRRLRACYEAGPTGFELARLLHSMGISCQVIAPSLIPKAPGDRVKTDKRDCRRLARLYRAGELVAIRIPTSTEEAVRDLCRTRGDMVEDRMRARHRLSKFLLRHGQVWRAGKAWTLAHERWLLTQRFTEPALQTTYDHYRAVLQARDVQLEAIEADLAVWQDRAPFAEAVARLGAYRGVTRLGALHLAAEVGDWRRFARASAVMGFCGLVPSEYSSGQVTHRGHITKAGNVHLRTQLIESAWAYQHRPSVGARLASRQQGLDPQVVARAWAAQLRLCGRFRRLAASKPSTNIAAAAIARELAGFLWAEMAA

SEQ ID NO: 251039 - protein, 417 aa, unidentified
MAKKIERKETRDELFYERCCGIDVHKKMIVACYRSGRNLTIKEYGTQSKDLRELANWLLEEKCEMAAMESTGSYWKPVYNILELLGVEVIVVNAQHLKNVPGRKTDVKDAEWIAKQLSAGNLRASYIPDREQRELREVTRYRKSLTEERAREINRLGKMLEGGNIKLTSVVRDVLGKSARKLLMTFVEGSDITGETIGSLINKQLAGKSAALVDAMDGVMSNVQRKLVKAVLDHIDDMTRRIGELTKIIEEEMEKYDSAIQRIDTVDGIGEQSAQVILAEIGLDMERFPKPGHLAKWAGLCPGNNESAGKKKGGRASKGNAILKTTMVQCAQSAVLKKGTFLRAQYDRLVVRRGKNRAIVAVAHSMIIAIWHMLKNEQDYCDLGGDYYNKFNPQKKIAMYLKKLTELGWSPPIQASA

SEQ ID NO: 251040 - protein, 465 aa, unidentified
MAVRGSPPVLASHTRRLIRTSPRWLIEARRHAAWPLYRKGGHQVKESVRIVGFDCGEDEHSAVLLDSSGEFDKRLPVVNERGLIQEALAELLLEVGPDTQLVVVVESKRSHGRIVADVATELGCELWQVNTVALNHFRDLEGQPRKDDEWDAYLAARMVYLRMGGCREAIETTEEERALSRLTRIHSRVTEDRKRYVARLRAVLLELAPQMLHAKWDGPRPDSKAMLYLLERWPGFDGLERAQLRSIEKILRQCRYKSEDRTPLAKLIRKAAREISIAAEERSSLTMELDLLVRHIRLCDESIAQVYVEIVGRVERHPVGRKLLEMQGIGPVIAGVLVSELFPVARVAPEPKSATYSGVTPLARKSGKSLDHDRLTQGVNKRVLHALYTSSVVAIKNSAVDRAYYEKKLRDYAGHPKPHVAAFIALSRQRHKVIYKLMTTDARYDKEILVASHLERIQRDRIAAA

SEQ ID NO: 251041 - protein, 429 aa, unidentified
MKLLPVAGIDVGKNFSEMAILTPTNEVYARMKIRHDSCHDIDKAVQLLQNVEKDFGAKPVIIMESTGHYHKILFYFLNKLGYEVSATNPIQTNSIKNVGIRKVKNDKVDARKIALLYRLGEISFTKIPDAKLDCLKSLCRQYYNLSDELTAYKNRLTAVVDQLMLNFNHVFKDNCSLTALAVLEKYPSPKHILEANQEELITLIQKTSRKSSKWAKDKYELLCSKAKDFEPLSIDSTANLTMLKINIIMIRTLSGSLKSTIDAIHQLLKEDVAKNASAMAPIIELLCTIPGIGVLTAATILSEIRDFSLFSKPDKLAAFFGIDPSVTQSGNFEGTRNKMSKRGAKLLRRVLFTVALANIGKKSNGKLSNPVLHEFYQKKCMSKPKMVAIGAVMHKLVFIIFAVFRDRKPFELRTPEEHAIRLKTKASAA

SEQ ID NO: 251042 - protein, 321 aa, unidentified
MFVGIDISKLSFDVAILQDNAYHHRNFNNNADGFSVFLRWVKSFKTPALFCLEATGIYGLALAKYLCQQQQKTIVANPIQTHAFAKMEMSRNKTDKADSKSIARYAQHLDNQGLCDNALYTLKDADFERIQFLVTRLDQLNKMRTQENNRMDVSLDKAAVQSVKAMCRFIDKQLLSVQNKIADIVKHNRQLNEQVELLTSISGFGDKTAWAILAYIGDVSLFDNAKQISSYAGLNPSIEQSGSSINRSRLSKMGCARLRKSLYMPALVAVRHNPLMRALYERLQAKGKPKKVALVAVMRKLLVLAYGVLKSGKPFDINYQQ

SEQ ID NO: 251043 - protein, 330 aa, unidentified
MQGRDIKEEKPMEKEKVYVGIDVAKASMDIAVHSTGQRWSFLNDDTGIAQAVTCLRELAPELVVMEATGGIELPLTAALVVAGVPVVIVNPRQVRDFAKATGRLAKTDALDARVMAHFAAVVRPTPRPLPDVQAQEFSAILARRRQVLEMLTAEKNRLGTARKAVRERIRAHITWLEQELANLNQDMRRSVQESPVWREKDNLLRSAPGVGPILSATLLTELPELGTLNRRQIAALVGVAPLNRDSGTFRGKRTVWGGRATVRAALYMAALVATRYNPVIRTFYQRLCAAGKAKKVAITACMRKLLIILNAMLKHRTSWGLAPQILVPCH

SEQ ID NO: 251044 - protein, 357 aa, unidentified
MSEGTWVGLDVHARKVVAGVLAGGSGELQTLRVSPVSVEAVGWLSTLPAPVRVAYEAGPTGYGLARACAAAGISCTVAAPSKILRASGDRVKTDRRDAERLARLLRLGELVAVRVPEPHEEAARDLVRAREDARGELMRARHRLSKLLLRYGLVYDASAWTLAHDGWLRRQRFASRPLAIAFDESYAAMLQAKTRRDALDQAIIELAAEPPFADVVGRLVCLRGVATLTALALTVEIGDWQRFGPQSLGPFLGLTPSEDSTGERRRLGAITKTGNTHARRLLVEAAWHQRRPLRASTTLERRRQGQPAAVRARADQSARRLHQRWHALEGRGKKRTIVAVAVARELAGHCWALATME

SEQ ID NO: 251045 - protein, 340 aa, unidentified
MHKWSEEVFLCCGIDVSAAQLVVALEGEGSRGLQRSFPNRASGHQALILWLQNRGTRIRVCLEATGLYSLDLALALHRATGIEVAVLNPKKVNRFAATLCRNKTDPADAQVLAEYARRMPFQSWHPPQAAALELRAITRHIAALTQQHTQQSNRLHALSASSASSRCVQQDLKRSLRDLERRTEKMRRAALALIAQDTELRPRFALLLSMPGIGEVSALNLLGELALLAPTLSVRQWVAHSGLDPAHHDSGTSVHKRARISRAGNRYLRRALYMPALVAARHDPHLRAFYQTLLARHKAKLQALMAVARKMLHAIFGMFRGLTEYDGARLFPVLELAVPA

SEQ ID NO: 251046 - protein, 348 aa, unidentified
MATTYIGIDLHRTVIQICVLDERGEILAEERVPYASREEGQRAVEVVKRFAPDCRIAVEALGLNRWFVNACRAEGLDVLVCDPRKLGLGKLGKKTDRRDAYEIARRLRLGDLERMARTYYPSDAEYARRKLLRVRHCLVHLRQQTTNQLRAMLNAYQLEAPRTVLYSGPSQAKLAALRLPEAELQVAFDALLAVLERIQKQILALERRIEAMPRQEPELGALVAMFPRLGAQSVATLRAELGDARRFRKARAVAAYAGLVPTVAQSADVAHHGSLTKQGNRELRWILSQWAVRLMAADPLVAAWATRMRRRMHRNKVRMALARRLLVGVWITLTRGEVFDLRRCLGLP

SEQ ID NO: 251047 - protein, 443 aa, unidentified
MRFVGGDAQALFVGQVRGFDPGQCLLVPVDVGKSTAMALVADLFGEIVVEPFGFDLTESGVSVLVAAVSEAETERGAILVRFGVEAAGRYHRTLMAGLRRQGLEVVELNPGAVKEARSGQGKRRLKSDVRDLAAMADLLARGGGRPPQPVDAEMAVQAAWAGHRRRKLKVRTALQNQVIGQIDVVFPGLIGCFGDLLETKAGRVIVHHICEPSRIRRLGIEGLRSYVAKRGCRMSRPKAGQVLAAAKTALRLDDAEHQAASAVLAADIALLATVEAEVERAEVLLGQMLDQTPAGVLASLPGVGVVRASNYEAALGDPHRFANAAAAYRFSGLVPTDYESAGRRRPGPHISREGSTELREANIELGRGLASHQPDFGAYKASKLAEGKKPSVAAVAVGRRAHRLAFAMMRDQTRYDPDHWAEAVAAGRSVMTQTQRRVDVTTT

SEQ ID NO: 251048 - protein, 356 aa, unidentified
MPSITSETAAFDVAGGVDTHQDTHTAAVIDLVGRVLGTQRFPATTAGYTALLTWMRGFGRLGRVGVEGTGAYGAGLTRTLHAAGVEVIEVDRPNRKTRRLQGKSDPIDAIAAAKAAQAGDHTGIPKQRDGRVEALRNLRVARRSAIEQRADTQRQIKTLIVTAPDQLRTRLRALSVKQLIVTCANLRPDHTDAANPATAATIALRSLARRHQRLSAEITDLDELLQPLIAAINPNLLTANGVGPDVAGQLLVTSGENHDRLNSEAAFAMLCGVAPIPASSGKTTRHRLNRGGDRQANAALYRVVLGRLRWDPHTRAYAERRTKEGLSKKEIIRCLKRYVARELYQLITSNQPQPTT

SEQ ID NO: 251049 - protein, 380 aa, unidentified
MSIILYVGMDVHSTNYTLCTFSFQVNTETGILDERIAYQVQIEPDYKLILAYLQTIREHYPEDEVDFVCGYEAGCLGYSLYSNLTKAGVKCVILAPTTMAVSTDAKKRKNDKRDAERIAKCLAYGTYKAVYVPSEQDNQIKEYIRMRDDHKLQHKKVKQQILAFCMHNGYQFSGNNWTAAHMTWLKTVAMPAMLRETLDEYILTLVQLTDKIERFDNRIEELASLPSYKEKVQKLSCFIGIKTHTAMGIIVETGDFERFPSAEKYSAFLGLVPSESSSGEKQIMSGITKAGNSHIRRLLIEAAQRYGRGHIGYKSKALKARQKDNPPSVIVYADKANERLRRKFYHMIRQGKKNNVTKAAIARELACFIWGMMTDNTDVS

SEQ ID NO: 251050 - protein, 428 aa, unidentified
MNDIKDTKREHFCQIIREISGSNEYLVVGIDVAKDKHHAFMGTATGKTLYRRLIFENSRSGFVGLLEQVELIRSQNGLKKVIFAVEPTGNYHKPLSRFLVDSGSHLVLVTGKAVKNNREVLDGRWDKHDTKDAANVADLASRGRCQYYDRPSEKIVEMRDLLSLRRRLKKDEHGIRVRIRNTVLAKYFPELDKYFDTGRGEILSIVKWCPNPAKIADMPFDRFFRMVTKRERGIAQKLRLRKIHASAGESIGCPMGEAAEFEAKLLVDKLNQVRQDIGEVEKRIKEISEGFAEYRYLLTIPGYGPYVSSVVLSAIADPFRFDNASQVIKLSGYDLCADRSGQSSDKAVPVISKRGSGELRYALYQAAQVASVKNRYFKVYFTGLLQGRQRERGIHTKMRVKLAAKMLVIAWVMMKRKEAFDPGRLNIG

SEQ ID NO: 251051 - protein, 315 aa, unidentified
MDTPFVGIDVSKETLDVAVLPGGGRKTFRNDDVGCEQLTTWLLDVEPVIVVLEATGGFEMLAASTLSSAGLPVAVVNPRQVRNFAKALGKLAKTDAIDALVIAHFAQAVKPKNRPLPDDQALALKALVTRRRQLIEMLVAEQNRLAGAHPRVKPAIRISIDWLRTQIEEIDRTIATSITDSPLWREKEELLTSVKGVGPVVASSLICLLPELGILNRKQISALVGVCPYNRDSGAYRGTRSIRGGRADIRSILYMAALSATRHNPVIKAFYRRLKQAGKVSKVALVACMRKLLTILNALLRTNQKWNAARALSLT

SEQ ID NO: 251052 - protein, 355 aa, unidentified
MYYGGIDAHLSYLTVALVDKHGVVVWQGSLATRSPERILEALAPFRPLEVVVETCPFWPWIHELLTPAGIGFHLAHAQRLRAIASSAQKNDQVDALLLARMLLAGLIPEAYARSAAQREGLRLLRHRAGLVRLRTLAANRIHSQLHQSRLQLPREKLLRKEARAWLASEAWPRLQPEQRSLIESQLQLIDTLAPLIRGLDRRIQAQAQDSASAQLLMTIPGIGFYRGLLLATELEPIARFPRVEKLCSYAGLAPVTRSSGGHTRHGSIPAGANRWVRGALVSAIPSHLRAAPESGLSRDYALLKARLGWRVARVAAARKLARVIYAMLQRRESWRATGSPQEGTLGTSSRPDLPR

SEQ ID NO: 251053 - protein, 339 aa, unidentified
MNIVTCGIDLAKSIFQVHGVDENDEVVARKKLSRAKFLAFFVKLTPCLIGMEACASAHHWARELTRLGHTVRLMSPQHVKPYIKGNKNDANDAAGICEAVSRPSMRFVGAKTQEQQGMLMLHRIRSQKVKNRTALVNQIRGLLAEYGEVLPVRITQLRKGLVHLLTQENCKNLSEMAKRNFYELYEDLLVLDDQIERVEKELMTTSKQNQDCQRLMTLPGVGWITASALVAHIGDISQFKNGRELSAYIGLVPRQHSSGGKNILLGISKRGDAYLRTLLVHGARSVLKYSEKKEDKDNLWLKQIAERRGKNKAVVAQANKTTRKVWALLTHQTTYRQAV

SEQ ID NO: 251054 - protein, 373 aa, unidentified
MEKFTKYVGLDVHKETIAVGVAEAQGGEVRFFGEIANTAQAIGKLQRELKKGGARLSWCYEAGPCGYGIYRQLRALDEHCDVVAPSLIPRKAGDRVKTDRRDALSLARLQRAGELTAVWVPDGAQEALRDLTRAREDMKQLQRQAKQRLVAFLLRHGKTYPGKSNWTQAHYHWLETVKCEQPVQQIVFQEYVDVIKVMDKRVQAMEEQLAKQISESVFWPVCQALMALRGVNLITAATVVAEIGDLRRFRSAPQLMAYLGLVPSEHSSGERQRRGAITKTGNSHVRRVLVEAAWTYRFPARKSAELQRRAERAPQVVQDIAWDAQKRLCGRYRHLVGAGKMKVQTCTAVARELAGFVWAIGQEIAPLALAAHK

SEQ ID NO: 251055 - protein, 325 aa, unidentified
MAVIGIDVSKQKLDCAWLRDVTTGKVKTRVFANRQQDFPRLVEWLEHQTGESLDQLYVLMEATGIYHETLAYWLHAAGIQVYVLNPAQVRDFSRGLGIRGKTDKKDSVVLARYGATQRPEAWQPEPEEVRKLKALAARLDALDKDIQRERNRREKAEFAMATDILRSIDDILLALTRERDRLQQEIDDNLDQHPDLKQDRALLQTIPGVGPAVSLRLLAMLRSRVFESARQAAAFAGLVPVSWESVSSVRGRPRLSKAGNPKLRQSLYMAAVVGLRRNPDISALYQRLTTNGKSKMAALGAAMRKLLHIAYGVLKTQTEYRPQTA

SEQ ID NO: 251056 - protein, 386 aa, unidentified
MHTPIAPVSGSSRLGEQVDAVIGVDTHTDTLSACLVNPVGAVLAEITEPANPVGYRRLIAWSTKEQAKHGCPRLVWAVEGTRSHGAGVTRALRTAGQIVLEATRPPRAARRPGGKSDPKDAVHAARAALANTHHAEPRADGPREALRMLLGVRSAALTARTDAINELKALIMQAPDELRGRLRGLTSSAQIAACRRLRVPATPDPEALRHDPQVVLVDAETRARLACMRRLARRIGDLTIEIDDAADEIHTLVHALDPTLLAEVGVGPITAAQILISWSHAGRLRSEAAFAALAGVSPLDASSGAQQRHRLNRHGDRALNSALHTIAVTRERCDPRTKAYIQRRVSEGKTRREARRMLKRYLARHIYRHLERAVTSVPNEGALLAA

SEQ ID NO: 251057 - protein, 353 aa, unidentified
MLIIGCDFHPGFQQIAIFDNQTGAYEERRLSHRAEAEQFYRSLAGQEVRVGMEACGHYPWFERLLAELGFELWLGDAAKIRASVVRQQKTDRRDAEHLQMLMREDRFPRIWVPSLEERDVRQLLVHRHKQVQARTRTKNQLHALAMSQGVQKKWKLWTAAGRAELESLELLPYAAQRRRQLLHRLDALEAEIAALNRQVEEEVKGRPAAVKLMTHPGVGPVTALAMVLTLGPAERFRDGRKVGSYFGLIPSEYSSGGRQRLGHISKQGSSFVRFLLVEAGQSAARKDAELGRFYRRLGARKHRALAKVAVARKLAVRLYLMLREDWTYAQLCRAVVQASPSHSVAASKNRPLE

SEQ ID NO: 251058 - protein, 381 aa, unidentified
MTTTATCHVQENTTAGTLFVAFELSEKTWKLGFTTGHGQKPRERTVPARHQERVLEEIAHAKRRLGLPDTAPVISCYEAGREGFWLHRFLQAHGITNQVVDSSAIEVNRRRRRAKSDGLDVRKLLSMLMRYHHGERQVWQVVKVPSIEAEDHRHLHRDLETLKQERASTTTRIKGLLSSQGLRVTSLTTLPEQLEALRLWDGSPVPPGLRCRVLRVYAHHTFLSEQIAAVEAERRAQLQASTDAKIDKVRQLMLLKGIGINGAWLLVMEFFGWRAFKNRREVGGLAGFTPTPYQSGESAREQGITKSGNRHVRWMTTELAWSWLRFQPDSALSCWFRERFGGGGKRLRRIGIVAVARKLLIALWRFLQTGVLPAGAVLKEG

SEQ ID NO: 251059 - protein, 429 aa, unidentified
MKIIYPRVCGIDVHKKFIVAVICISESVEPVYLKKRFSTFHNDLIRFRDWLIQNDCQNVCMESTGKYYIPVYNILESNISNIVVANPKWVRAVKGEKDDDKDAKWIADLFKLGIVKSSFIPQKDFRILRELTRYKYKLVNMRSSEKNRYQNALTSGNCKLDMVFTDVFGKSASNIIDLILSDNPYTDEDILSKVHKNCKASPDMILNSINGTDLTPVQKSRIELVNNHIKQLSSNIQRLDKLIDLMIEPYEDYISFLCQIPGVSRNSAITILSEIGVDMNQFTSTRRLTSWAGLTPSSNQSAGKKKSVRISRAGVYLKPCLVEVAHAAVKDTNHPYYANKFNKISKRRGKKRAYIAIARKILVAAYHMLLTGEIWNPADLAEVETPVEQRIKYVKNNLKSDIKQLLDIGLTVEELTLMIQQNANNIATQ

SEQ ID NO: 251060 - protein, 333 aa, unidentified
MKIFVGIDIAKLNHFAAAISSDGEILLEPFKFTNDADGFQLLVSKLESFDKNSIIIGLESTAHYGDNLVRYLVAEFYQVCVLNPIKTCQMRKNNVRKTKTDKVDTYVIAKTLMMQDNLRFVSFFDLDMMDLKALGRFRQKTIKQRTRLKIQLTTYVDQVFPEIQYFFKSGLHQHAVYALLKEAPSPKEIASMHMTHLANLLKVNSHGHFTKEQAKELRVLAQKSVGANDSAISIQITQTIQQIELLDSQLQKIEAEITDIMKFNDSVIMTIPGIGYINGGMILGEIGDIHRFSNPNKLLAFAGLDPSVYQSGNFQAKTTRMSKRGSRVYDMPL

SEQ ID NO: 251061 - protein, 374 aa, unidentified
MADEETISWFAGVDWGSERHQVCLLDARGTTAGEREFPHSGEGLTELGDWLLSMASVASTVAVAIEVPHGPVVDALIDRGFVVYAINPKQLDRLRDRFSVAGAKDDRRDAYVQADGLRTDRRLFRRLQVADPRLIELRAWSRLAEELRAERVRLSNRVRHQLWRYYPQMQKLTDDLAAPWFLELWAIASTPAKAVRLRKSTVERLLKQHRIRRIDAETALRILREPAIKVAEGVAEAACIHMRSLVARLRIVNRELRKAERKLDELCTAISEIEQTSGQGLQRRDVAILRSMPGIGRINLGTLLSEASGPLSRRDYEGLRTLSGAAPVTKRSGKSLIVVRRYAAHVRLRDTVYHWARVATQRDPKCRARYTAWN

SEQ ID NO: 251062 - protein, 366 aa, unidentified
MAPIYIGVDFHARQQTICYLKTETGELVTCELKHQDKQKVLAFYAQFRGSVIVGLEASGYSPWFERMLEELGCEVWLGHATEIRRRARWRQKNDRRDAELILDLMLHDEFPRLHRPAVQSREVLRMLRYRQKLIKIRTMSKNSLQAIALQSGLAQGSRLFTKDGQQQLGAAEMSPVMRWQRDHWLQLMAPLNQQLLETMVWFKAQSKGDVYITRLRTHPGIGLLTSLCLVHTLQPVSRFRNTRKVAAYAGFDPVERSSAERKCFLGISKAGSRLLRYLLVEAAQTAVRKDEDLKRFYQRLADRRGRPKAKVAAARKLLIRAYIMLRDEIDYAEFRHRAVAARLARRGQGPSKVPEVLIGQPASPEP

SEQ ID NO: 251063 - protein, 342 aa, unidentified
MNHYAGIDVSLECSSVCVVDANGKILREAKVASEPEALIAWFRSSGFDLERIGLEAGPLSQWLFAAMREAGLAVELLETRHVRKAFEAMPVKSDRNDARGIAQLMRLGWFRPVHCKSMSAQETRTLLTARKLVQSKLHDVENSLRGILRGFGLKVGKTTELKFAGRIEELVAGHPHLQVIAKALLAVRAVLRTEFEVFEKQVRKLARSDMRTRLLMSTPAVGPIVALTYASAIDDPARFKSSKQAGAHFGLTPKKYQSGETDYTGRISKIGDSSVRTVLYEAAHVMLTKPVKGCSQLKSWAMRIARRAGMSKAKVALARRLAVIMHRMLADATPFNAAAAAA

SEQ ID NO: 251064 - protein, 406 aa, unidentified
MLFVGDDWAEDHHDVEIQDETGRRLAKARLPEGISGMARLHGLVGRFLPEDGDAAGVKIGIETDRGPWVAALVASGYQVYAINALQSARARQSQGVSGAKSDAGDAHVLADLVRTHSHQLPTVAGDSEHAGAVKVLTRMHQTLIWDRTRQVLRLRSSLREFFPAALEAYEDLAFPDVLELLTKAPEPNSAVRLTRAQITAALTRAHRRDREAKTTAIMAALAAEHLTQPPLIAAAYGATVRALAALIRTSNEQITALQGQVEACFGQHPDAEIYLSQPGLGLVLGARVLAEFGDDPTRYDGARARKNYAGTSPITRASGKKKVVLARYVRNNRLADALHQQAFSALSGSPGARAYYDALRDRDISYNAALRQLGNRLVGILHGCIKTHTHYDEATAWNQHTQQAAA

SEQ ID NO: 251065 - protein, 331 aa, unidentified
MKTNEIIGIDVSKLLIDVCIYSKQIVQQFENSKSGFKLMLKWSFKNSSFSKEETMFVFEHTGMYSHLLSVSLTEQKLSFFIASGLEIKRSIGIARGKDDQIDAKRIALYGYRLKEELKPSKLPKRSILQLKSILSLRTKLNKQRAGFKVTLKEQKRIYKAKEYKIIFDVQQKMIAELTKQIHKINTQMQAIIDQNIMLKETYKLVTSVKGIGMQTAIMMIVFTDNFSKFENWRKFASYGGVAPFPYQSGTSIKGRTKVSHLANKKLKAIINMCAISAIQHNPEMKLYYHKRIKQGKSKMSTVNIIRNKLIARVFAVVKRQTPYVDTFKFAA

SEQ ID NO: 251066 - protein, 376 aa, unidentified
MSEGISFAGLDVHKKSISVALLKPGAREPIEWQQANDAQSVKRLVRKLKREGGETVRCCYEAGPCGFGLQRTLCSAGIECEVIAPALIPLKPGERIKTDRRDARKLAELHRADLLTAVRAPTPEEESVRDLCRCRDDVREELMSARHRLGKFLLRRDLRYGEGRAWTQKHRRWLKSVQFEHRAAKATFDSYLHAIEVLEERMRAVDKELAAVAAEEPYREPVAWLRCFHGIDTVTAMTIVAELHNFRRFETPRALMAYLGLVPGEHSSGAKTSRSSITKAGNKHVRRILIETAWHYRHKPTVGANLRRRREGQPAAVIAIADRAQHRLHRRYWRLLLHNNKVPNKAVVAVARELVGFLWAALYDGDWSASGGCPTS

SEQ ID NO: 251067 - protein, 436 aa, unidentified
MAETDDTRQTIKHHTIDDHTVVIGVTLGREFHALCLMNKEGDTLGSYPELSNTRKGFDVFHRLVEETKQTYGFTHVVIGIEPTGHAVRKMVAFAQENGYDVRLVRTAAVRQDARTIALLVKEGHAQDTRMEEGVYRQLRCVAHTRESVLRRQTAAQRAFRAILDDCFPELSGIFPSLKSKGLRALLTAYPFPDDVLKAGCRGVTELLRKSAGKKALGRAQKVVAAAEESVGVTAGKADRMRLMISLDDYTRSAARLKELDRELTDLLTELPFSASVLSLPGVGPVTCGVFFGELGNPTSFTHPKKITSYAGYDPRTQNLRGKRAISKRGRPLLRKYLYLMSLGVVKRSSFFKQYYERKQKNPQGKKRAKKEALCAVAIKLIRVIFALVRDRRSFTETMDHGVEGGPEAPHRQNGLDEGVVAFHRPLRGSPHEGPLC

SEQ ID NO: 251068 - protein, 329 aa, unidentified
MFKFFIGADISKSTFDVSYWKGKAIYLGQFSNDLEGFGLCIKALKRQTNCSIQEWFFVFENTGAYSKQLKKLLLFKSIACVEENPLKIKRNAPLKRGKSDPSDALMICEYAVEKQFKLSPDKQTNKSIQKVRLLLNRRDLLVKHKTSAHHSHSEQVVNMPKDVKEQLTLLHLDLLDKINAQIKELEQLIKSYLKEDKEVKNNFDLATSVTGIGLITGAFMICLTNNFTTTTCARQFASYAGVAPFPNESGTMKGKHRVSKLANKQMRSLISNGVISAIQHDPFIKQYHQRLKEKNKPPGVILNNIKNKLIARVFATIKRGTPFVKLAYQ

SEQ ID NO: 251069 - protein, 409 aa, unidentified
MNKVDIAPFEVFCGIDVGKTSNHIVALDRYDDKPLINRKVPQEEAEIRAALEEAGDFGLALVIVDQFGAFGRLVVGVAKSMDIPVAHMSPRRFRQVAETYGEDKFDEKDAFILADASRTTPRNIEFVGNRAESMAEIKVLSSRRDDIVEERTRCYNRLHDFIHQVSPPLEELFSKRKLHNDLEIRLIARYGGPIGFRRAGRARASTWAAELKYHCVDGPKKVEQVFDVLDRQTVMLPGAAVIEEQIRSIASRIIELLAEEKRLNLMIEQRAKMIPEVDLLQSIPGVGPVYAALIAVEIGDIGRFRDSNHLASYAGVAPRKEESGTSVHKRRKRKGGNRRLKNALMQSSQRSVQCDPLARAYYERKRAEGKKHLQALRALARHRVTVIFAMLNEGTFYEPPVEVDENGRG

SEQ ID NO: 251070 - protein, 342 aa, unidentified
MKITTVGIDLAKSVFQVHGVDQGGKPVVQKRLSRQQVLRYFAQLPPCLVGMEACGGAHYWARKLQAQGHTVKLMAPQFVKPYVKANKTDAADAEAICEAVTRPNMRFVSIKNAEQQSVLSLHRARQGFVRARTAQANQIRGLLAEYGIILPQGIGHVTNGLPGIVEDAQNDFPGVFRELLERLRVHLIELNRQVQELEVLIDGWHRRSEGSQKLAQIPGIGPLTASALVASIGDARNFKNGRELAAWLGLVPRQHSSGGKVLLQGISKRGDAYLRTLMIHGARSVTRVAEKKSTPTDRWTTGVLARRHKNIAAVARANKNARVVWALLAHDRDYNADYKWAA

SEQ ID NO: 251071 - protein, 372 aa, unidentified
MRMEAWVEAQRFSLTTGAVSWKFIGCDAHKKFSVFVAVNEKGNAGEALRVAHDRQLYREFLARLPPHSSIAVEASGSYSWLVEEMERSGHHPKLCNPLEAKRRMGLTHKTDKLDARGLAILLRNGTLPEVWIPPSELRDQRELLRLRIFLVRLRTRVKNRIHATLKRFNVQVPGADLFGVAARLELGTRLPELPEHSREAVEQELATLDFLETQIESAEQLLEAIMKVSMEADLLKTLPLVGKILSMVLMLEIGRVDRFPTAAHLASYAGLVPRVHSSGGHTRMGQVCGNVNRNLKWAFVETGNLIVVNQRRLAGSHVVRLYQRIKRNKNHQKAVVAVGHHLAEAAWWVLTKQEVYREPCNSRQQALSSTLG

SEQ ID NO: 251072 - protein, 425 aa, unidentified
MNETPPFACTIGLDWADQKHDLWICPAGSSKSEHLRLDQTPEALHQWVAKLRARFDNQRVAIGIETSRGPVISGLLAYDFIVLFPVNPKALKDYRAAFSVSGAKDDRTDAMLLEEWVRLHRDKLKALEPDTELTRKLAGLAENRRHLVDERTRLVNQLHSALKTYYPLAESLLERQMTNPMATEFLIRWPDLEALKKTRPQTLRAFFYKHNSRSASLIEQRLQAVEQAKALTTDPAIVEPARGLVSALAGMLRPLHKSLGHLDQQIQNAMDQHPDAALVRSWPGAGPALAPRLLVAFGTHRERFGSATEVAQFYGIAPVVQQSGNTKTVHMRHRCPKFGRQTFHENAACALKKEPWAKCFYESHKNKHDGKHHQACRALAYKLVRIYFRCWKDRKPYQPDQYLQALQKHGSPLHKSLADQPAKPL

SEQ ID NO: 251073 - protein, 333 aa, unidentified
MGKKLVVGVDVAKGSFAVSLFDGERFRDFSLSSSPEELLERVAPHLPEDPGEVFFIMEATGVYHFNLALFLRKKGYPVSVVNPFVVKKFAEMLQKRAKTDSVDARTLAQFGFFASPPPFVPKDEKAYLLEEIQKSIEDYQKRRTEILNHLEALRHRPFYHPKLQKLYEEELQRIEKTLKDLEKEAENLAMEYAPREYELLQTIPGVGKRLAGAILGILSPLTRFESSKELSSFLGLAPQIDQSGKRKERARLSKRGNPLLRKLLYLASLSASRFNRQCKLLYERLVTQGKPKKVALIAVANKLLKQIFAILRSGIPYDPYYLEKKRNVVTQGA

SEQ ID NO: 251074 - protein, 339 aa, unidentified
MKKITTIGLDLAKHVFHVVGCDSRGKIIQKKMLRRGQVMAYFANQPVCLVAMEACASAHYWARQLQKLGHEVKLIPAQFVKGYLRGNKNDYNDAAAIAEAASRPEMRCVAVKDAEQQDIQALHRLRERTIVSRTALSNQLRGLLAEYGLILPRGLSVLRREIPRVLEDAGNGLSERFRRLLARGYDQLRELDEHIAFYTHELQRYGAEHEACQRLQSIPGFGPITASLFHSVVGDGRAYRRGRDVSASCGLVPRQHSSGGKQVLLGITKRGDRYLRSLLIHGARAVVIRAAGKTDKLSCWLNRLRAERGFNKAVVAMANKMARMGWAILAHNTTYQAAD

SEQ ID NO: 251075 - protein, 341 aa, unidentified
MKDTMIGVDLAKRVFQLHGAAMTGEVKFRKKLSREQFRAFMATQPAALVVFEACGRASYWAREMEALGHEVRLIAPQYVRPFVKRQKNDAADAEAIVIAARQPEMRFLAPKTADQQAKAVLFRSRERLVHQRTELVNALRAVLYEYGHAFPLGFCHLKRIATVVEESDCDLPALVIAECQDLLAQIAEKTERIEAKTMALKALAAETDTARRLQTMPGVGPLTALAVEAFAPDMAQFKSGRDFAAWLGLVPRQHSTGGKARFGRISKAGQNDIRRLLIIGAMTRIMGRARHTVPAESWIGRMLARKPKMLVGIALANRMARQIRAMLTKNEDYRDPALATA

SEQ ID NO: 251076 - protein, 345 aa, unidentified
MKHYCGLDVSVKETSVCIIDETGKICRETKVATHPDDLISVIKDPKWQIERIGLEAGPLSQWLYEGLAKAGLPVICIETRHAKAFLKAQPNKTDRNDARGIAQMMRVNLYRPVHVKTLTSQKHRALLTARKLLQEKAIAIENDIRGLLRNFGLKVGLVGKVKFEERINELVDDRAELREIMQPLLTARKLLREEFTKLHKKVLDLVREDEVCRRLTTIPGVGPIVALTYTATIDIPVRFAHSKAVGAVLGLTPKLKESGESKRVGRVSCCGDAMMRSLLYEAAQVLLANVKKWSWLKAWAMNIAKRRGRQKAVVALARRLAVIMHRMWSNGTEFCWTRESLPVAA

SEQ ID NO: 251077 - protein, 400 aa, unidentified
MLLFFEVITMIFVGIDVAKDTHYAAVSDDSGAVLVKPFAFQNNAEGFCLLLKKLSEFDRSKLLIGLESTGIYSENLICFLYESGFRLAVINPIQTATLRKTAIRKTKTDKVDTMLIIKSLMVNSYRLYSQRDADSLKLKTLCRFRQNLKKSKARLKIQLAGYVNLVFPEFGKFFKSGIHIAASYALLKKYSSPKEIAALRTSTLCTLLSKASHGRFGKDTAEALKSLALSSVGVKNPYISIQIAQTIAQIELLEQQIKDLNSAIEEAMESLNSVLMTVPGIGAVNAACILGEIGDIKRFSKPCKLLAYAGLDPTVRQSGQFTAKSTRMSKRGSALLRYALINSAWQLTLNDTTFKAYYDLKRSQGLNHYGALGHVAHKLTRVIFKLLTSDTPFNPAKLLA

SEQ ID NO: 251078 - protein, 467 aa, unidentified
MKHNQQRARSGKKSRGSISLLERIQPDAAGIDCGQNSHFVAVPPDRDPQPVREFRTFTADLHRLADWLAQCEVKTVALESTGVYWIPLYEILEQHGFEVLLVNARDVHNVRGRKSDVKDCEWLRELHSVGLLRASFRPAATIVPLRSLMRQRQTLVEEAATRIQRMQKALTEMNLKLHTVLSDLTGQTGLKILRSILNGQRDPEQLAAHRDHHCHASHQEIVAALTGNYRAEHLFALRQNFAAYEFHLQQIAECDTAIEKLLAKLAEQQPPPCGPLSAPRRKRGSKHAPTFDIRTSLHRLTGGADLSQIDSIGPHAALQIVAEIGTDMRRWPTEKHFTSWLTLAPNNKVSGGRLLTSRTPPSANRAAVILRRCAMSLGRTSTALGAFYRRLAARTGKAKAITATARKLAVLVYRVLSGDLVYNDPGAAAYHQLNRARELKSLRKRAKLLGYQLVNHSTGEVLATPVS

SEQ ID NO: 251079 - protein, 321 aa, unidentified
MQEWYLGIDVAKKKLDCALRQPDGKHKHKVFDNTPNGFKELQQWICSFDVPQLHVCMEATGVYWEAVAEYLANHRYVVSIVNPVQIKAFGASRLVRTKTDKVDAKLIADFCKESRPEPWKAPSLQEQELRAMVLRLDALQEIRTQESNRLEVAREAVKDGITSHIVWLDEEIAHLSKKIRDHIDSDPDLKDRKALLDSIPGVGERTIALLLAFSLAPGRFANARQVTAYAGLDPRHHESGSSVQGKTRISRVGHNLIRKGLYMPAMVTLYRTNWGKRFLARLSSAGKKPMVIIVAMMRKLLHVAFGVLKSGQKFNPDLHAA

SEQ ID NO: 251080 - protein, 347 aa, unidentified
MRFYTTQHKFYCGIDLHARTMYLCILNQEGRIVLHRDIKTNPEVFLKTIAPYREDIVVAVECIFTWYWIVDLCSQEHIPFVLGHALYMKAIHGGKAKNDKVDAYKIATLLRGGMMPMAYVYPADMRATRDLLRRRNHLAHKRAELIAHVQNTLHQYNLPEIGKNLGKKGNREGVAKRFPDMIVQKSIELDLGIIDHYDQLLHRIEHEISLIAKKCDADSYFRLRSIPGIGRILGLTILYEINDINRFPRVQDFVSYCRLVKCTKESAGKITGTSGKKIGNVHLKWAFSEAAVLFLRRNPEAQKYRAKLERKHGKAKSLTILAHKLARAVYKILRQKEVFQPQTFFAK

SEQ ID NO: 251081 - protein, 408 aa, unidentified
MEVLIRRCAGLDVHKDTVVACARIAHGNQVDREVATFQTTWRGLLALSDWLSKHGCTHVAMESTGVYWKPVWHVLEGSFELVLANAKHIRNVPGRKTDVNDAVWIADLLAHGLIRSSFVPPEPIRQLRDLTRTRTQLMHEVSRHTLRIQKTLEDANVKLTGLISDILGATGRAILEALIAGQTDLEALAELRRGRLKATREELIEALRGSVRDHHRFLLKLHLGQIDAASAAVREVEARIGELLRPFREQIALLITIPGVSQTTARIIVAEIGLDMSRFPTSGHLVSWAGLCPRSDESAGKRHSTRLRPGAPWIKSALVQTAWPASRKKNSYLRAQYLRLKLRRGPKKAIVAVAASILTAAYFILSRHVPYSDLGPGFLDHQDRDKIAKRLIRRLNDLGLNVEVKNAA

SEQ ID NO: 251082 - protein, 495 aa, unidentified
MSDLLSVPENGEIVILEEGTEIQDTKAYGLGIDCHSKFIQVSVFVKKSLKFYEYRREFGTDWDSLVFAKKWVLAVISSCSDPVPDMSSSPLHYCIESTSTYHMPILLAWEGAPSVVNPTIAGASKRKTDVLDARLLALHDLTGVWPQSYVPSSDVKALRVMISERSRYVRESTAAGNRINNIIIRFGLTIGKDGSVVKNSNIRAIIENQISDSPSHMEGICPLSIPVDVRRILRDEYQKHDYAVSCAANLETQIRNKAFSMDWETASGTLPGTEMIRILTTAPQVGETTAITWLSHIITPRRFHNAKALAAYCGLDPSLKVSAKHVTSTVMRGGCKELHHALTSAADRMIRRHNEMFGRWGYLLYQQTGKWKKATNAVARKLAVALYYMMLTGQPFSYEKYNLVKNMSILNIPVSMLPKLNPDFKRYIRVLEEKGIMTTSDLATSYLSCELGSVKGLGKKFFITIKEFLSNQQKYRNLYNELTKGDIENASSCQN

SEQ ID NO: 251083 - protein, 329 aa, unidentified
MKEFLVMGVDVAKATLDLCIKPGDVKMQIDNNLQGFKKMHKELKKMLNPETRVIVVMEHTGSYSVRFEKFLTRSSIGYCKVPALQIKRSMGMIRGKNDKVDATRIAEYGWLRKEQLTGDLPCNEHIERLKSLLSLRSKIVRDRSGYICRLKEIKAATDYGKSDIIIRTHQRILTSLTTELKLLEKQIRELVNSNDDIKKTSDLIRSIKGVGEVVAAYMICCTNNFKRFTKARKFNCYAGLAPFKYESGTSIKGRARVSQLANKEAKAFLTMAACCAIRCDKELKKYYQKRVSEGMKKMSCLNIIRSKIVSRIFAVAKRQTPFVDLSLAA

SEQ ID NO: 251084 - protein, 415 aa, unidentified
MALKIVYKVCCGIDVHKTFVVACIASTNDKGITSYESHRFSTYTSGLKTLLQWLLDRNCKDVCMESTGKYWIPVYNILEKDCSIVLAHPKYVKAIRGKKTDKKDAKWIADLFKHDLVAGSFMPPADIRQLRDLMRYRFKLTCFKSSEKNRLQNCLTVSNIQLGNVVSDTFGKSAQAILDKILENPADTSFDLEPLVFKSLKKKLPELRDAIDGYITPEQAGKLKVIKAHYENLESRKAELEELILALAVPYQQELAILQTAPGISSDFTAIGIISEIGTNMEAFPSAKHLCSWAGLTPTNNESAGKKKSVRVSKAGCYIKPLLVQCANAVIKSTKHPEMRNRYLRIKKRRGHKKAIIAIARMLLTALYHMLKNGENYNAELYQKSDLPPVDREITVEQALMIARNQGYKIKSATA

SEQ ID NO: 251085 - protein, 421 aa, unidentified
MLIKYGSEGAAVLFVGDDWAESHHDIEIEDEAGRVLARRRLPEGLAGITTLHELVAEHLDPTAEPDQVQLGIETDRGPWVQALLAAGYVVFAINPMQVARYRERHSTSGAKSDPGDAHLLAEIVRLDRAHHRPVAGDSEIAEHVKVAARAHQTMIWSRVRQVNTLRSMLREYYPAALAAFGADLAGREALAVLAAAPSPDQGRRLSQTRIESLLRKAGRQRNVAATAATIRATLTSKQLTARPGVVPAYAASASALIVVLSAMAEQTEVLAGQVEQGFGQHPDTEIYLSQPGLGVILGARVLAEFGDDPNRYADARSRKNYSGMSPITKASGTKRVVLARYARNRRLGDALFLQAYSALRASPGARAFYDRQRVRGATHYQALRALANRLVGILHGCLRHQTLYDENRAWHSEPDKLSSAA

SEQ ID NO: 251086 - protein, 354 aa, unidentified
MPSSTTSKKRQTRLATGANAVFAGIDYHKKFSVITLGDADGKVLEQIKLPNEEKKLRQFFLRHAQVVCAIESCRGYEWYLKLLADLGLTVHVANTYAVRLIADSRCKTDKIDSRILMELLAKGFLPTCYQPTQAERQLRERLKWRVSIVRSRTKYKNKAHAVMDKENKPGNLDSRKARRIAKHRDDQLSLPRQYLLDQNIDVVEYFDRKVKAEDAWIEEVAANSPDAQRLKSIPGIGDMAALMLIAEFGDVSRFKKAKNASAYLGLVPRVYATSDTRRIGRITKTGSGILRWLLVQDAWGAIRTCSAFRIRYNRIMKRRGKHIAIVAIARMLAEIAYRVLRDQTSFDETKLALG

SEQ ID NO: 251087 - protein, 370 aa, unidentified
MSIKRILVNQIDTNLEYEVIGIDLAKNCVSAILLTTDGEIFGIDRLDYQELEKSAQELSPTIFAMEPCTEMNYMVQKLEDWGHHCIVISGKNVKDYVESHFSNQKTDLNDAQALAFLTKDTQLRTVKAKDPEQLKYASLTTLREQYVKQYRQTMVSLKGICQVWGLNISKGISGKARLKDMIENHADFPAELRTALVGMVAHAQAVQKDLKSVTKILEELAKKDKACQLIQTVPGLGTICSCRLRATVGDIQRFKHPKDFPAYYGLVPRSMATGHNEKKGKITHRGDKTMRSLMVQGAGIVINQATKGNLNSKQLTKWILKKQKEKMPWGKLVCAVAAKLLRIVRAILISGKPYNPKIAGVAKCSLPKAS

SEQ ID NO: 251088 - protein, 383 aa, unidentified
MKNNQTKPIHGSNTSIKNTAQSNPALGHASAPVRHTFTLGLDVDLNNVVTAIQCDRGTIALAQKFSRARLLDWVKKQVAAGHEVHTVYEACGFGYTLHHALVAAGAHSIVTTPMRLSPERRRKNDRLDARELCVRLARYLDGHAHELKPIRIPSPAEQERRELGRQREFFQRELRRLENHGRALRIEFEHETLPAGWAGPRKWKQIAPTCSEFVRGQLEPVVAQIRACQKQMAQLTAQIEARVASEKLPKGLGALTVALLDGEVCDWQRFKHRKAIGSYTGCCPSEHSSGGVQRFGHIDRHGNKHVRVLLVEAVWRLLKWQPNWHARVKYLQKLKHGASLKKKIAVALARQLAIDLWRWRTGRVTAAELGWTLNPAAAGASAA

SEQ ID NO: 251089 - protein, 415 aa, unidentified
MPLARWVGRAIGLDVHRDFCVVAICDEGKVRSAGRVPSTPEGLGMFADSLSPTDRVALEVTGSCWEVARILKPHVNRVIIVSPDDTGIAAARAKTDKLDARALALLLWRGELDAVWMPDERCQILRRRLARREQLVRARTRSKNEIHAVLQRRLKGKPPCSDLFGVKGREWLTGLELPLEERESVDAGMRHVEFLDAEVAAVERLIAQQALNWPEIQRLMTVPGVNVVCAASFMAAVGDPTRFITSGKMVAYLGLDPKVKQSGEAPARSGRISKRGSASARWALVEAAWTAVLQPGPLHGFYERTKARRGHGKAIVATARKLTVLFWCMLTRQEDYAHQQPSLTQKKLRRLEITAGAPKRPGKPSGTWSTNVMMRDAERAVAQQAEASYKRMVQDQQAGGPARKVGASVSMEHAK

SEQ ID NO: 251090 - protein, 357 aa, unidentified
MGEGSWVGLDVHARSVLAGVLDGASGELFSQSVSPRSEETVAWLASLARPVRVAYEAGPTGYGLARACAQAGIACTVAAPSKIPRASGDRVKTDRRDAERLARLLRLGELVAVRVPDPVEEAARDLVRAREDARGDLMRARHRLSKLLLRHGLVYEGGAWTLAHDAWLRRQRFAEHVLALAFDESYGAVAQAKGRRDALDRAIAELAAEPPFAEVVGRLVCLRGVSTLTALALSVELGDWERFRPQSLGPFLGLVPSEDSSGERRRQGAITKTGNTHARRLLVEAAWHQRRPLRASAALERRRQGQPASVRSRADASARRLHARWHALEGRGKRRTIVAVAVARELAGHCWALATMK

SEQ ID NO: 251091 - protein, 445 aa, unidentified
MFIQSQDDSHCCYSFFIKVVILMMKLKYSICCGLDVHKNVIVATIVTTNKDGISEYLQKSFSTINSDIQRFHNWLIENNCYHVCMESTGKYWIPIFNYLENDIDVCLTHPKYVKAIKGKKTDKKDSKWIADLYKFDLVRCSFIPPKDFRQLRELSRYRFKLVCMKSSEKNRIQNCMTISNVGIASVLSDPFGKTATEIISYLLEHTADSMDEKAVRKLIKKGAKSKSDEIIEAIKGYTIETDQAKKLELARGHLEYLDDMITQTEVELYVRIKPYYEFVEFVSTMPGMTELSSTIVLAETGVDMDIFDDAKHLCSWCGLSPANNESAGKKKSVRIAKAGDYLKPMMVQCALAAIKSKKQPYFAIKYGRIKKRRGHKKAIIAIARMMMVCIYHMVSEKKPFTPTDYEELMNPQNHVERVVLNENNVFAYLESLGYDSSKLVKRNDN

SEQ ID NO: 251092 - protein, 344 aa, unidentified
MSIVGGFDIHRKQITFDYLDVETGQLQRGQIVPADRAHLAGWLAERFAGRGDVEFAVEGCTGWRYVAEELARAGVVAHVAEPADTAALRGRKRHAKTDKTDSRHLRQVLADGRLPECWIPPSHILECRALLETYRALRVEHTAWVQRIHAVLFHQGVARSGDLRTEQGRDTLRAVAAAQLSPAGQVQIATALDMLATLDGHLDALHARLLQAARRLAGARVLAARLYGVGPITALALTCWLGGAGRFSSARKAVRFTGLDVTVYSSAGKRTPGHLSRQGPAVLRWCVYEAGKAHARGTAADHRYYERVKDRIDGKRAAISEARKIVRQACHILTELGDDALAVT

SEQ ID NO: 251093 - protein, 375 aa, unidentified
MIAATRPAVSVSEPVLYVAFEVGKKEWKLAMTSGVGVAPVLRTVASGAWAAVERALATGRQRCGLPAAARVVSCYEAGRDGFWIHRALSARGVRNRVVDSSSIEVSRRARRMKTDRLDAIKLVQMLVRVCGGEQRVWSEVRVPPVEAEAARHVSRERTALTGEQTRLINQMRSGLATVGGTLPSRRPEGWWTTVRDWAGAVLPAPLQARLARAHARLALVAQQIQALDAEQATRVAAAAPESAVQRLVQLKGVATTSASILIDEGLVWRAFQNRRQVGGLLGFAPVRYDSGDSSRDQGISRAGNDRLQSVMVQVAWSWVHWQPFSALTIWYRERFGGGKRARKIGIVALARKLLIALWRWATAGIVPAGAVLKRA

SEQ ID NO: 251094 - protein, 348 aa, unidentified
MKYYAGLDVSVKETSICIVDESGKICRERKVVSHPEDLIAILSDPAFSMDRVGIEAGPLSQWLFDGLAKAGLPVFCIETRHTKAFLDALQQNKSDRNDARGIAHMMRVGLFKDVHVKTLTSQKRRALLTARSLLQAKAIDLENEMRGLLRNFGLKVGRASGGAFEGRILELVEHDAELREIMEPLLAGRRKLREGLAKIEKKVLAEAHQDEVCKRLMTVPGVGPIVSLAYVSTIDIPSRFRHSRSVGAILGLTPVLKQSGEMSRASHVSLRGDAMMRRLLFEAAQSMMTRVVKWCWLKAWAMNIAKRHGSKKAKVTLARRLAVVMHRMWADGSEFRWTREESVSTAVA

SEQ ID NO: 251095 - protein, 346 aa, unidentified
MEHPTTIAVDLAKSVFEVAVSKEPGRVCQRRRLTRSQMAAFFANRPAATVLMEACGTAHFWGRLLRGFGHRVLLLPAQHVCRYRLRDKTDTADALALLEAHRNEKIVPVPVKDLSQQCIAGLHRIRSGWLATRTARLNTVRGLLRELGIVIPLGSQLVLPRLSQALSEPKQLIPEILHPVLLAAAAEVRQLEQNIKDAERQLEALSKTLPAAKRLRSVPGIGLLTATALVASVGDPSRFRSGRRLSSCLGLVPREHSSGSSRHLGSITKRGDPYLRTLLTHGARSVLWAAKHDKNPDALRRWALSVQARRGHNRATIALANKLARIAWAIWSKNTVYQTAAENTVS

SEQ ID NO: 251096 - protein, 373 aa, unidentified
MHGSLQQQPCQSSLRYSRILALDLGKFNSVLCNYDPANAGHAFVSLATDRQTIRDRLTVAAGASDRSSILVVFETCEISGWVYDLVSEMGFKVAVANPSNEAWRWTKVKRKTDRDDALKLAKMAAMNELPTVHMPPPQQRQKRRLVHHRRSLVQRRTQTKNQIRSIFGQQGIALPRGTKCWTKAGVQQIQTEAKKITKCEVDDLWRGRLDVELKLLAMIDHQIKNVDKSLEALADDKVKLLMTVPGVGIGLAQTVVVHLDDPHRFKCVAQVGSYAGLVPKQMQSGEMNRHGHITRRGPSLLRGILVEVAWMVYRHNPWAKAFVDRVSRGIKARRKIAIVALARKLLIRLWAMLRDNKPWRESSMGVPPMSPVA

SEQ ID NO: 251097 - protein, 314 aa, unidentified
MFIGIDVSKARLDVAIRPSAEKLSVSNDEAGIQALVTRLSEIKPALIVLEATGGLERSVSGTLGSAQLPVVVVNPRQVRDFAKALGQLAKTDRIDAEVLARFAEAIRPPLRPLPDKVSLELRSLIARRRQLIEMMVAEKTRLSTASKAVRKRIEAHIRWLETELDRADKDLDHSIRQSPIWCENEDLLRSVPSVGPVVSRTLLAELPELGRLNRKQIAALVGIAPLNCDSGTFRGRRGIWGGRATVRAVLYMAALVASRRNSVIRNFYKRLRDKGKAPKVALVACMHKLLTILNAMIKHKTRWSEIIPQTSLDF

SEQ ID NO: 251098 - protein, 357 aa, unidentified
MDIMHYVGLDIHKKTISFCVKLADGTIVREGVVKATRKDLDRWMATLPRPWMAAMEATIFTSWVYDHLLPHAAAVKVAHPLMLRAITAAKRKNDRIDAGKIADLLRVNLLPECYMAPQELRDLRRSLRYRNLLVRQSTQTKNKVSGLLMESGIDYSKQKLHQKRYFSELLKRQGEEQLPPSLTPLLELSRTTIETTQKMERQIVRGLRQDPLLAERVERLLTIPGVGPITGLTWALETGEPGRFSSVKQAVSYCGLCGAEDSSAGKPKRTPISKQRNKHLQSVLIEAAKLAPRHNPELARVYQQEKDKGNHNRATLAVARKMVAYLLAVDRRKTGFVIPPAEKVASVAKVASVAKVA

SEQ ID NO: 251099 - protein, 433 aa, unidentified
MNHKLQKIRAKKLSVVRGEHTHIIGVDIAKNKHWACIMDSLTELPVGSPFAFQNTRDGFLRLLGQIGKAQERTGATRVVVGMEPSGHYWKALAAFLREMGITVVTVSPLHVKRAKEFDDNSPTKNDRKDAWVIARRINDGDFFDPYLPEGIYADLRALTQTRQQQRAKLNQAQNQLHALLDEYFPEFTSVFADPFGQASIHVLGHCPFPSDILALCPKELAKGLSQASNGRVGTTRAVKLREAAKDSVGVRHGLEGVRLRLRQYLAEISFCKAQLHETEAAMAEALQKTGLAAYLLSAPGVGVVTAASLLGEAGDLSRYEDWRQLRKLAGYNLKENSSGLKNGHTHITKRGRPGLRCLLYQAAMILVTRNAQFKALYQHLKTRKENPLKGKQALVAVACKLLRVLFTLAIKKRCYDPAVVLGEFRATQIGLAA

SEQ ID NO: 251100 - protein, 343 aa, unidentified
MQVVRIGLDLAKYVFEVHGVDSLEKVVVRKTLRRDAVARFFANLPRCLVGMEASNGAHYWARVLSDLGHEVRLISPQFVTPYVKSNKNDRNDAEAICEAVGRPSMRFVPPKSTDQLAVQAVHRIRRRLVADRVRLVNQIRGLLSEHGIVIARDISQLRRSLAVIVGNDEDGLSGMIRSLMRELQAEMAEIDDRIATYDRRIREIFRASEQCQRLGKIEGIGPVTATALIAAVGDRTCFKNGRQFAAWLGLVPKQRSSGGRPRLFGISKRGDRYLRTLMIHGARAALGKAAGKQDPRSLWLGKLRQRRHPNVAAVALANKNARIVWAMLSGGTFYEHAPSVKAA

SEQ ID NO: 251101 - protein, 480 aa, unidentified
MRFYREQRQFYCGIDLHASKMYVCVLDDQGNVVLHRNMRAEPEPLKRALAPYRASLVVGAECMFSWYWVADWCRAEGIEFVLGHALYMKAIHGGKAKNDRIDSEKIARLLRGGTFPLAHVYPKEMRGTRDLLRRRTLLVRRRAELLAHVQNTHTQYNVPTASGKGRDRVREGIDTTAFEDPSVQVMLDADIEVIKQLDETIARLETHVLKHAKVHDAARLHLLQTTTGVGKVLSLVMLYEIQDVNRFETIGQFVSYARLVSCAKESAGKKQGSGGRKIGNAHLKWAFSEAAALMIRSSPEAKAFMEKMTRQRGQGPGRGPRRGQDRPGRLLDDEAQATLRRPEALEEQPAQGRPHAGGSRHERLTAHAGLVGEPTVELSDALATDSSAGRAPRTRRRHLRQGNPLTAGRRRSLRLHLLPPQCRAEDRRLTCFEEPPASARHHSRAHTGRRARRTDHTRSLPVPRADLNGGVPRARTRRFE

SEQ ID NO: 251102 - protein, 423 aa, unidentified
MEVMHRRVAGLDVHKETVVACVRLMKGRKATRECRSFAATTTGLLELLAWLTASRVTDVAMEATGVYWTPVWKILNEGDFELIVANAAHIKRVPGRKTDINDAMWIADLVACGLIKASFVPPESIQELRSLMRTRKQLVREQTRHVQRLEKTLEEANIKLGAVISDLMGVSGRRMIEAMIAGEDDPHRLAALARRSLKAAPHTLAEALHGRLRAQHRFLLQLHLQQWDAIDAAIRQIDREVAAQVARLDAEAEDGQAPFCELIDRLSGIPGLSGLSATTILAEIGRDMSRFPTAGHLVAWAGLCPAQNESAGKRKSARLRRGAPWLKTMLVQCAWAAKRAKNSYYSAQFHRLRSRRGPQKAICAVAASLLTAIYHMLKAGAPHRDLGADYFDRRSPEAKAKRLVTQLAKLGFTVQLQPLAEAA

SEQ ID NO: 251103 - protein, 312 aa, unidentified
MEKLSYGGIDVSKDRLDVVVLPEGWFFSVSNDTAGWAELVARLHPLAVSAIGLEPSGGYERGIIRALLAAGLSVRRINPNKLRQFARARGVLAKNDRLDARLIAEYVAIMPTRVVQRDDAVERLAEIVTMRRQLCDEHVAVENQAAHLEDAMLRRLSKRRLVRLEADIRLLDKRLAEMVATNAAFAQPYELLTSMPGVGPVLAFTLIALLPELGKMSRKQIAALVGLAPYDFDSGKLRGHRSIYGGRMPIRNVLYMAALSASRYNPALKTFSNRLAHANKKSKVIIVAVMRKMITTLNAMLRDNAAWQPQSN

SEQ ID NO: 251104 - protein, 422 aa, unidentified
MLEESLDDQQIIERVAALDIGKAELVCCVRLPGPGGSRRRLQEVITYSTMTPSLQVMAERLLDLGVTRVVMEATSDYWKPPFYLLEAHGLQTWLVNAKDVKHLPGRPKTDRLDAVWLCKVAERQMIRPSFVPPPPIRRLRDLTRYRAALVSDCTGEKNRVEKLLEDAQIKLSVVASDIFGVSGRDMMAALIGGQRDPKVLAQLARSRMRVKIPQLEEAFVGRFGEHHRFLLAKMLQRVDAISADIAEVDARIDAEIAPFADTVARLDQIPGVGVTAARVIIAEVGLDMSRFPTSSHLTSWAKFAPGVKESAGRKKGRGSTGHGNRYLASALGEAAVGSARTDTFLGERYRRLARRRGSKKAMVAVGRSILVIVWQLLSDPNAHFHDLGPDFYANRLGADRTKRNHIRQLEALGYKVTLEPAA

SEQ ID NO: 251105 - protein, 383 aa, unidentified
MRAVCGLDVHKDTVYLCILCSDGEIFEKVYGVLTHQLRQMCRDMRIRGVTEVTMESTAMYWIPIWRVLEPHFRLKLVNPYFIKQLPGRKSDVKDAQWIAECTLKDLVRSSFVPPELIQQLRQYDRRIYDLDSEVVRKLSKLDGIMQRSNIRLSNYVSNTDTKSYKDVVDELCKGVTDPEELIRKVHGRIVNKHGRETILASLTGVVSDAEKDTMRQLREEITLAEKNKQECLDKMVAICKTHYPKELKRLMTIPGIKERAATSLIAEIGVDMTKFQTAAHLASWSGLKPRNDVSNGKYKSRRITHGNVYLRKTIIECAWAATRTKDCFFSRFSYHQTVVRKKHKLKVLVAVARKLLIAVWHVLHDEKDYVDFNPDRKEPVTNG

SEQ ID NO: 251106 - protein, 411 aa, unidentified
MQVIHPRCAGLDVHQKTVVVTSMITQQDGTVQRERQTFSTMTTDLLVLDDWLRQRQIEVIALESTGIYWRPVFTILEEGRTVILVNARHMKAVPGRKTDIKDSEWIADLLRHGLLQASFIPPEPIRELRELTRYRKTLIQERADEVNRLQKVLEMANLKLAAVATNVLGKSGRAMLEAILGEQQDPQILAELARGRLRSKLPALQQALEGRVQPYHRFLITRILAHIDFLEQSLIVLQREIEERLVPYAEAVELLKGIAPLQEKAIATVVSEIGVDMDRFPSDKHLASWAGVCPGNHESAGKRLSGKTTPGNPYLRAVLCELAWVVAHMKDTYLSAFYHRVARRRGKKRAILAVAHKLLIIIYHVLKTKKPYADLGVDYFDKLETAQIQRRAIRRLEQLGYQVTLTPLQLA

SEQ ID NO: 251107 - protein, 356 aa, unidentified
MSEKLNNEIAVIGIDIGKNSFHLVGQDRRGRIVLRQKWSRGQVEARLANLPPCLIGMEACTGAHHLSRKLQALGHDARLMPAKYVRPYSKGEKNDYRDAEAIAEAVQRPTMKFVATKSADQLDLQALHRVRERLVGQRTGIINQIRAFLLERGIAVRQGLHFLRAELPAILAKRTDVLSPRMLHVIEDLAGDWRRLDERIDALSDEIMTLARQDKGCERLMTVPGIGPIISSAIVAAIGSGDAFSKGRDFGAWLGLVPKQMSTGDRTILGSISKRGNRYLRTLFVQAAWVVLVKIKPEGWERYGLKSWIEAAKQRLHRNVLAIALANKLARIAWAVLHKGRAFECVKTNATAPRPA

SEQ ID NO: 251108 - protein, 346 aa, unidentified
MDKVHIIGFDLAKQVFQAHGADASGATLFRRKLRRAEVLPFFRKMPSCIVAMEACGGAHHWAREISALGHEVRLVPPAYVKPFVKRGKTDAADAEAISEAAVRKSMRFVPVKSAEQQASAMVLKSRALLVRQQTQLINALRGHLSELGIVATVGMRGLAILIAMLRDEADLRIPRRARLALSELADQIDMIGLQIRKLERGLVEQVKEDDELRRLTTIPGVGVMIAASIKAHVPDVEGFKSGRHFAAWLGLTPKPRSSGGKERLGGISKMGNPMLRSLLVLGAASVLRRVKANGGGPSWLVALLGRRPFKVVAVALANKMARMIWALLSKGGVYQADRVFANSTAA

SEQ ID NO: 251109 - protein, 331 aa, unidentified
MDNQIDLKYYIWRYSHALCGIDVAKNKHDVTALNVSGKTVLKPLTFSNNKAGFELLDLSLRQLNQDYLIALEDTGHYAFNLLNFLHEQGYKVYTYNPLLIKKFAKSLLLRKTKTDKKDAHGIALKLLSDPNREQFQHDNRQVELKILTKHIHRLKKKQSDWKVQYTRCLDIIFPELDKIVGKHSEYTYQLLTCYPNPQKRLEAGFDKLIEIKRLTASKIQDILSVAPRSIGTTSPAREFEIIENIKHYKRLIDKAEKCVNDLMAELNSVITTVTGIENRLGAVILAEIRNIHAFDNPAQLQAFAGLDSSIYQSGQIDLAGRMVKRGSPHLR

SEQ ID NO: 251110 - protein, 348 aa, unidentified
MTVNLRNEQGDVILKRQVSTEWPRVRGFLEEVQKRSLPEGGFTAILEICGFNDWLLKLLVEYGCHETILIQPKKQSRKKTDRRDANALGEILWVNRQRLLAGKMVQGIRRVQLPCEQDAGDRQITALRKRLGQLRTRTVNKIKHILRKHNLEQECPTKGIDTIKGKKWLGQLALGTIDRLEMDQLLAQWKLWEEQIEKVEAEVQKRQAQSKTAAVLATIPGCRAYSSLALASRIGLIERFPRPGSLANYWGLTPGCRNSGEATDRLGSITKQGSAMARFILGQLVLHVLRRDAWMRAWYGRIKRRRGAKIARVAVMRRLATIIWQMVKHHEPYTVGGPPRRKHQSQAA

SEQ ID NO: 251111 - protein, 393 aa, unidentified
MPQPNDLSRSLTALDQDSTLIAVVEMSQSSWLVGAIIPGVERRPAKKLDASEGMLLALLHRWRDEAAKAGCTIDRITVAFEAGRDGFWLARWLRQRGIEAHVIHATSIAVSREHRRAKTDRLDAALLQRAFLGWLRGERGHCTMVAIASLAEEDAKRPSREREALVGERTRIGNRMKSTLARLGIRGIRPGLRKAAERLEQLRTPEGAPLPPNTLAELRRDLARLRLINDQIGEIEAARLERLRQQPDEARHPMILLLARVVGIGIETADMLVQEVLSRKLRDRRAVARYGGLTGSPEESGARRREKGLARAGNARVRRGMLQLAWRFLMFQKDSALAQWYRARTADARGATRKTMIVALARKLLVALWKLVTTGELPNGVVLRPAIQAAVRR

SEQ ID NO: 251112 - protein, 339 aa, unidentified
MELYAGLDLHSRNTYIGIMDKTFNRVFKKRVPNHLELILQTLDPFRDQIKGFVVESTYNWYWLVDGLIDAGYSSAHLANPSAIKQYEGLKHSDDQHDAFFLAQLLILGILPQGYIYPKKGRPVRDLARKRMFLVQHKTAHILSLQSLLQRCCAIKVRANDMRHLTVEELEMWLEEEHLVLSAQANLDSINFLKQKVKQLEKAIIQKVKLNKEFKYLLTVPGIGNILAMTIMLEVGNIKRFPKVGNFTSYCRCVPYRRLSDGKSKGQGNRKNGNRYLSWAFTEAAQLGRRHNERFRRYYNRKVAQANTSLATKALGNKLARICYYIMRDQVPFREELFCH

SEQ ID NO: 251113 - protein, 385 aa, unidentified
MEVLHPHCAGMDVHQESVVVCVLTTGQDGNIVSETRTFGTMTKQLFELLSWLESESVTHIAMESTGVYWKPIYNVLEGYFDITVANAHRIKNVPGRKTDVSDAEWIAKLHRVGLIEPSFIPPEDIRELRELCRLRKKRLGHLTAEKNRIQKYLECSNIKLGTVATDVFGISGRNLLARLIAKGYVDEQDITDSLKGRLRSKKELVSESMVGSLTPHQIDLIRDCWEHIEYLEKSLENLEQKIDAHLVPHREEYELLQTIPGVSEATAASLIAELGVNMNQFPSADHLSSWAGVAPGNHESAGKKKSTKSLKGNSHTKVALCEAAWAVARTRNNRLSAKFWKTASRRGKKKACIAIGRTILVIAYMMLKNKQAYIENGSSPVNPAS

SEQ ID NO: 251114 - protein, 343 aa, unidentified
MVHYIGLDVSLKRTSICVVNQVGSVVREGVVDSEPEAIATFVRSKAPGAVRIGLETGPTATWLWTELKQLGLPVICIDARHAKAVLKMQINKSDRNDAAGIARIMQTGWFKEVRVKDLDSHSVRALLASRALLVKIKRDLENQIRGLLKNVGLVIGRAKFNVFTVRAEELIEDRPELMAVVRPLLKARQAIEQQTDDLDRKVLKLARYDAQVRRFMTVPGIGPITALCFKATIDDPTRFKRSRSVGAYVGLTTRRHASGEIDWTGRISKCGDAMLRSYLFEAAGVLLTRVPKWSALKAWGMRLAKRNGLRKATVAVARKLAVILHRMWIDGTEFNWSKKEVAA

SEQ ID NO: 251115 - protein, 344 aa, unidentified
MTPIELNATAHDASLSLFAGIDVGAEELVLVIRKNGNPFDPQKYANTRADHARLAKKLSKLPGIIVCLEATGIYHFDLSIALHDAGVLLMVVNPKSSHNFAKVLMKNSKTDAVDAHTLAEYAARMDFVAWTRPTTEKLALRSFARRINALTRQKAAAKNHLHALNATLETPKAVLRDARLAIAQLERRIDHLTAEALLLIAAYPDLKRILTLLVGIKGIAETSAIALMGELLLLPPGLSHREWVKFAGLDPKAFDSGKSVHKKTRLSKAGNRQLRSALYMPALSAKQHDPHVRAYFQHLVDNGKKPLQAVCAVMRKLLHAIHGMLKHDQPFDNSRFYVIPSAVE

SEQ ID NO: 251116 - protein, 453 aa, unidentified
MSDERSRSKPSGLPIIHPFAAGIDIGSRFHVAAVSPDLCDEPVQTFQAFTSDLERMANWLVATGTKTVVMESTGVYWVAAYEVLESHGLEVILANAREARAVPGRKSDVNDAQWLQRLHACGLLRASFRPGRDIAELRAYLRAREKHTDYAAAHIQHMQKALTFMNIQLHHVIATITGVTGMRIIRAIVAGERNPDALAAMRDVRCKESLETIRSALVGNYQPEHVFALKQALALYDFYQQCIDECDAEIERTVAGLNIGKPIPDAPLPKAKHRSKLPSDPKFDARAALYQLTGTDLTQIHGVGPFLALRFIGECGTDMSRWRTAKHFTSWLTLSPGCKISGGKVLSAQTRKTSSRLTVAIRLAAVTVGRSNTALGAFYRRLAGRIGTAKAVTATARKIAVLFYNAMRYGMDYRDPGADHYEQQYRDRVIKQLHRRAAQFGFALQQQESTANG

SEQ ID NO: 251117 - protein, 359 aa, unidentified
MGYERTFVGLDVHARSVVGCALDTGTGEVLRRRLGTSPGEIRGWLGELAGPVAVTYEAGPTGFGLARDLCGHGIRCLVAAPSKITRAPGDRVKTDARDALLLARLLKLGEIVEVIVPSVAAEAARDLVRAREDCRGDLMRERHRLSKLLLRNGIVFSGGQAWTGVHDGWLRSQSFDQPARQAAFESAYEAVALTSGRRDRLNAAIEAMAADSEFTPVVDRLGCLRGVSTLTAFGLAVEIGDWHRFTGSSIGAFVGLTPSESSSGQSRSLGSITKTGNTHARRLLVEAAWHHRRRYVVGATMTRRWDRADAPARARGHQGNQRLNARWQRFDARSKRPAVANVAIARELAGWCWSLAVMT

SEQ ID NO: 251118 - protein, 388 aa, unidentified
MYHVGIDISKFKHNCFIATDAGVKVKEFVFDNNKSGFTELEGSLKALGKPKEIKIGFESTGHYGTNLKYYLSNLGYTYVEFNAYLTHMFSKALSLRKTKTDKVDSKVISSMLGSVDYETLHTKFYHINDLKELVRQRNVYLNSRSKELVKLTNLLDKAFPEFKPFFNNRLGTGAQFVLKRFKTKARIAKLSISDFDLIRSKMMGRFTYPKFNRLKQLANDSIGVSSKAYDFLIQTAIKQYEHLNETLKIIDTEIITLYKQTDSKLLTIPGLGIITAATIYAEVGDFKNFSNPAKLIAFAGFDVRIIQSGTQEHYGKLVKHGSSLLRNAIWTYALPAVKFIPTINDYYHKKRSQGKHHKVVLSHICRKLIRMIYYIEYHNVSFDSNLSR

SEQ ID NO: 251119 - protein, 328 aa, unidentified
MFYLGMDVAKAKLDCCLLLDEATGRRKTKAVNNTRPGIVELLALVAKQNISPQELHVVMEATGVYHEQAALALADAGVTVSIVNPAQVKDFGRGLAVRTKTDGVDSFVLARYGALLKPVAWHPPPPEARMLQALLARREAIAQDMQRERNRQEKADATDTPEPIRQSLADSIGFLSRQLAQLQQDIDRHIDRHPGLKHDLALLQTIPAVGPKVGSNMLSVMHSHDFGSAEQLAAYLGLVPVERQSGSSVMGRARLSKAGPARIRAVLYMAAVVATKYNPHIKAVYERLLARGKSRMSALGAAMRKLVHLCFGVIKTQTPYQPNYVKIA

SEQ ID NO: 251120 - protein, 423 aa, unidentified
MPYRIGGIDVHKKRLAVVVADVEVDEEYQFERRWYGSNPEQLQKLAEWLIAQQVEEAVMESTAQYWKPVWSTLERYWKPNCQNREGTGKMSGTLHLAQALSNRGRRGGKKDFRDAERLVKRLISQELVLSFVPDSEQRLWRTLTRTKYQRTRDKVRLQNQLEALLEEAHIKLSSLVSDLLGVSARRMLQALGDGATDPAALAALADQRLRATPEQLRDALGACAGLNPVYRRVVKMALTDLQLIEQQIGQLDQEMASLLHEHQDAVQRLAEVPGLGVDSAQQIIAEVGAKAATFASPKNLVSWVGACPGDEESDQVNRSKRSPKGNRQMRRILNQAANAAVKHKGSIFEIVYRRLVLRLGHNKTIGAIAHRLCQLIWIILHKGARYEERGPAVSEKSKRLRTSRMIRTLRMLGYRVEPALIPA

SEQ ID NO: 251121 - protein, 345 aa, unidentified
MSEILKQVVGMDVSQNELVVSLGRMTRSLDPEIYAFKTFANKSSGFAALEAWVNKNTDQQVPVRFVMEATGVYHEKLAYYLSEQNREVSIVLPNKICNFAKTLEIKTVTDKTASQAICRFGLGKKLDIWQPPKKIFRDIKQLARERDQIIAERTVSKNQLHAENAEAFPNKRSITRLNERIQLFNRQEKEIRYEIAEIIQQDDELVERIKNVTTIPGVAKLTAVIVLAETNAFNLITGRKQASSYAGFDIVEKQSGTSVKGKPKMSKRGNRHLRKAMHMPALAAIRHDERFKAIFVRLVSKHGIKMKAAVAVQRKLLELIYTVWTTNTKYDPNYLQNMIENDKAA

SEQ ID NO: 251122 - protein, 355 aa, unidentified
MKQEKYIGMDVHQATISVAVVDSNGKLIMECILETKAATILEFIHGLRGSLSVTFEEGTSAAWLHDLLKPHVTHLVVCDPRKNALLKDGSKSDRIDARKLADLLRGNQLHPVYHGEHGVRTLKELGRSYQTLTKDVTRVMSRIKSLYRSWAIPCSGTTVYAPRHRAEWLAKIPQPGVRLRAERLYQQLDLLQPVRQEARRDLLRESHQHHAVKLLRQIPSIGPIRAALLVALLQTPHRFRTKRQLWAYSGFAIETHDSGEYRYVRGKLQRNRERITVRGLNDNHNHDLKNLFKGAALSASTQPGPLHDFYTALVEKGMRPTMARLTLARKIAAITLTIWKKGASFDAKQLHRQAA

SEQ ID NO: 251123 - protein, 411 aa, unidentified
MRVHHTVCCGIDVHKKSVTACLMWGPADREPQWEIRRFGTMTSQLKVMVEWLKQANCEIAAMESTGAYWKPVWNVLEGKIKLVLANAKHVRSLPGEKTDNKDGKRIASYLRHGLIRPSFVPPRDIRELRDLTRYRQKLLANGAAERNRIQKLLEDANIKLGSVLSDVFGVSGQRMLQALVNQPTTDVEQVAALAHWRLAPKIEQIKHALEGHVTAHHRFMIDLSLGHMQYIEQQILRLDEEIARHIQPYQKQFQLLQTIPGIGGNASAAVLAEIGPDVSPFDDEGKLASWSGMCPGNNESAGKKFSSNTRKGNPHLASTLVESAWASTHTKNCQFKTRYYRLRSRRGPQRAIVGIAHALLRTIYVVLKTGQPYQEPLRPALTEDRRDRKTERLSRELRNLGYDVILRIKTP

SEQ ID NO: 251124 - protein, 324 aa, unidentified
MALYGGIDLHANHSVIVVIDDQDHMVDQKRLPHQLDSILARLAPYPVELNGLVVESTSNWYWLVDGLMEAGYQVHLANTAAIQQYEGIKHSNDFSDAQWLAHLLRLGILPEGSIYPQEERGVRDLLRKRMQLVQQRPTNLLSMQTQAARNTGQAWSGNRIKQLTCKEVDELVVDEHLALAITSNLVVMQCLNAHVHTLEKVIKRHVKLKPAFEPLLSVSGIGEILGLTIMLETGDIGRFPSVGDFASSCRCVGSERLSNGKRQGRGNTKNGHKYLAWAFVEAANFAVRYHPQIKRYYQRKAAKTNTMVATKTVAHKLARACYDI

SEQ ID NO: 251125 - protein, 423 aa, unidentified
MSYRIAGIDVHKKMLAVVVSDVEVDGEYQFERVRYSSSPEYLRRLAEWLIAQRVEEVVMESTAQYWKPVWEALERYWKPICQEREGAGPVSGTLHLAQAQSNRGRRGRKKDFPDAERLVKRLVADELVLSFVPDTEQRLWRTVTRRKYQLTRNHVRLQNQLEGLLEECHIKLSSLVSDLLGASARRMLKALAEGETNPVALAAMADKNLRATQAQLCDALGACTELTPIYRRLLQMFLEELKFIDQQISKLDQELASLLSRHHDAVVHLAEIPGLGVDSAQQIIAEVGAGAATFPSAKQLSSWVGACPGEEESAEVSKSHRSPKGNRHMRRILNQAANAAAKSKGTIFEIVYRRLVSRLGHNQTIGAIAHRLCRLIWIILHRSVRYEERGPSVNAKSRRHRTNRMIRELRSLGYRIEPLVATA

SEQ ID NO: 251126 - protein, 307 aa, unidentified
MANHVTKITLGVDAAKDHHVIYNWQTSQTTRLANKIGDIKTWLKTFHGPVRIAIESTSNYHLTLVDEALALGYEVYLVNPRQLVHYREAVNVRNKTDPLDAWLLARYLEHEVDQLRPFQPRDPRAQRLWRLVLRRATVVKSRQQLQQSFAEVQVSIRGVLTQLKDLLARINRQILTLIRELGWWSDYQHCLSVPGIGSVNASALVVAYHRGAFSGSDAFISYLGLDVRIRESGCFKGRRKLTKRGEPELRRLLFCASHPARHYHRFAEYYQRQLDKGLSKIASRVILARKLARIAFTLMRNEENFIR

SEQ ID NO: 251127 - protein, 422 aa, unidentified
MNTNLLSSEHAEASIQYVCGIDIGSQSCSGCIMRPNKEMVVKPITFANTKDGWTVFLERLKRLEAGPSQIVIGMEATSRYHENLYYELKQRGYQLRLLHPGQTHHFHQQQGLRAKTDRLDALTIARVLLSGEERLGYLPNEQVATYRELVRLHTQLSEEVARYQNQIQALVVVLFPEFTQVFADPCLPTALAVLKTYPHAQAVAQAGVQGVYRVLQGIPATKFGRPTAEKLVRLAQGSCTSGRVLSGRASSVRILCDQLEHTQANLHQLEEELEQLVSTDPGAKGLKQMPELGSKTVAVLRAELGEVDRFAYTDQAVAYAGMDIQIKESGKFKGKAKLSKRGSGLLRQMLYLAALRSIRLESSAFGAYYHHLVERGLKKVSAMMAVMRKMVVVATHLMKTGEDYDPSKVWVGIPTQTLLPLR

SEQ ID NO: 251128 - protein, 346 aa, unidentified
MEYYAGIDVSLELSSVCVVDGRGKIVKEAKVASEPEALVYFFKELGFPVNRIGFEAGPLSQWLHAGLTQAGFETVLLETRHVKAALSAMTVKTDRKDACGLAQLLRMGWFQQVHAKSIGSQEIRALLVARKQLLGRLLDVELSIRGILRGFGLKVGQVTRKTFEARIWELVTGHTTLERIAEAMLSARATLQAQYEKLHKAVLAIVREDAVCRRLMTVPGVGPVVAVTFKSAVDDPSRIAKSKAVGALFGLTPKKYQSGEKDVTGGITRAGDEMVRTALYEAANVLLSRITRFSKLKRWGMDVAKRRGSKRAKVALARKIGVILHRMWIDGTTYRWAETKPIAAQG

SEQ ID NO: 251129 - protein, 342 aa, unidentified
MSKIITVGLDLAKNVFQVHGVDDAGRAVLRKKLRRAQVLEFFGQLPPCVIAMEACGGAHFWAREIGKLGHDVRLIPPAYVKPFVKRQKNDAADAEAICEAAQRPTMRFVPVKSEETQGAAMVFRVRELLIRQRTQVINALRGHLTEFGQIVPQGAANASKLIAIVNDPVSGLPADAVGTLKVLVAALTHLEAEIGKLDAEIAHRAKENELARRLMTVPGIGPLIATAIAVLALPPETFRKARDFAAWLNLVPRQHSTGGKQRLGATTKMGERSFRRLLIIGANSVIIKRHVHAAARPGTWLGEMLKHKPPMLVRVALANKMARIVWALMARGSVYQSPVAAA

SEQ ID NO: 251130 - protein, 317 aa, unidentified
MQDKLFFGIDVAKEWLDIACHGRPGGGRIANSPAAIAAWLGALDPAAVGLVAFEPTGGYERLLRKALCESGIRFVRVHPNEVTAFRRRRGRKAKTDAIDAALLAEFAALELAQRGLAPLVEGDPALRALTVRRRQLADALHAERCRAALADNAIVENTLQQVIAALRGVLDAVEEAIARHIAAHPKLAATAVLLRSFKCVGPVTVHTLLAELPELGQLDGKEIAALVGLAPQTRKSGKQQARALTGHGRPGVRRVLFNAARSAIQWNPAMRQFYRRLVDLNHRPGKLALTAVMRKMLVIANAIVRSGQPWHGASTRP

SEQ ID NO: 251131 - protein, 347 aa, unidentified
MKFYTIQHQFYCGIDLHTDWMYLCVIDAEGVVRLHKNIRTEPEAFLRAVKPFRDDLVVCAECMFTWYWLADLCEDEGIPFVLGHALYMRAIHGGKAKNDKIDSHKIAVLLRGGMIPCAYVYPRRMRATRDLLRRRNHLVRKRAELYAHIQNTASQYNLAEPLGRIAKSRNRRGLLARFGEGSVQKNMAVDLALIEFYDPLIKELEQAIEKTAQGHDPVALALLRTIPGVGQILALVMLYETEDIARFPRVQDFVSYCRLVKSARESNGKKKGPSGKKIGNAHLKWAFSEAAAMFLKNNEPAKAYLAKLANRHGKGKALSILAHKLGRAVYFMLKNQVSFDQEKFLAA

SEQ ID NO: 251132 - protein, 357 aa, unidentified
MATYYIGADVHSNSIEMAILNRKKIVQRYTIPAGISAAAEVLDSLNGKKYMAIEEGPMSGWLYRNLLRKVDRFIVSDPRRNKLISSDGDHDDRIDSAKLAMLLAGGYLREVYHSDDDQRVELKHWVSLYHDRVRDAVRNINKIRARCRMHGVTIPRKVLRQPEHRAAWLRKLKNTALSNQLSMLWIGYDATAKQARMAKQRLINLSKRYPITRLWQQLPGIGIIRAVTIFAYIDTPWRFRKKNKLWKYCGIGLQRTASGTDKKGKPKPARLQLPWAANRILKNAILGAALTAIHQKQNFFKDDYERMVLNGIMPSNARHTVARRLLTVMWGMWKRSCQEGLDEVSLPELNEKNVYAY

SEQ ID NO: 251133 - protein, 353 aa, unidentified
MTDQRRAVVAGVDAHTDEHHLAVVDLQGRLLGAAAFPTTAEGYSRLIGWLRGQGEIERVGVESTGAYAAGLVRALLADGIRVVEVNQPHPHARQRLGKSDPIDAELAARAALSGQATALPKQTSGIVEAIRQLGVARAGALKARTAALQQLDDLLITAPEALRSELRRGRTLKARAALCLHLRPDSERLHEPAQAAKLALRSLARRARELEREIAELDQQLERLVTLAAPRTLQLFAVGTQSASQLLVTAGQNIERLRSEAAFARICGAAPIPASSGRTTRHRLDYGGDRQANRALHMIAVCRLRYCERTRAYARKRTADGLNRREILRCLKRYIARQTYHTLRADLEALNGA

SEQ ID NO: 251134 - protein, 343 aa, unidentified
MKLMRVGVDLAKNIFQVHGVDRHEQPVWRRRLTRKNWFEVLLKTVEPGCEIGMEACGGSHHWARQLQAKGFTIKLIAPQFVKPYVKSNKNDANDAEAICEAMSRPSMRYVAVKSIEQQDIQAVHRVRSELLGQRTAKGNQIRGLTAEYGLVAPLELSHLRRAIPSWLEDADNGLSERFRRLLHGLWGDLRRLDERIDELNHEIMAIAQENPTVQRLQQLRGVGPITATALVATIGDAKQFANGRQMAASLGLTPRQCSSGGKDRLLGISKRGDSHLRTLLIHGARAVIRTAKDKDDRLSQWVTSLAARSHTNVAAAALANKTARIAWAMLSNGTDYQPNYSQC

SEQ ID NO: 251135 - protein, 376 aa, unidentified
MTQTDVQYPTIHLAIELSRSAWLVAARLPGVEKPSLHRIEGGDTAALLALAAALRARAAARLGTPVRVACCFEAGRDGFWLHRLLTAEGIAAYVLEPTSILVNRRARRAETDRLDALGMLRVLAAYLGGDRQACSMVRVPTPEEEDAKRPHREREELVRERVRLENRIAALLATQGVRERPSLRSWERDLAALRTGDGRPLPPHLRAELDRLRRRLVLTLGLIREVEAERDAALAAGPRDAAGRKIAALCRLRGVGANFAAVLTREVFYRAFDNRRQLAGYVGLAPVPHQSGEADRDRRISRAGNARARTTLIQLAWLWLRYQPDSAPARWFRDRVGALRGRTRRIAIVAMARKLLVALWRYVETGLVPEGVEVAA

SEQ ID NO: 251136 - protein, 343 aa, unidentified
MEHYAGIDVSLESASICVVDGSGRIVREAKVASEPKALIAWFGGLGSELARIGLEAGPLSQWLYAGMREAGLAVELLETRHVRDAFRAMPVKTDRNDARAIAQLMRLGWFRSVHCKSLPAQELRAVLTARKLVQGKHHDIDMSLRGILRGFGLKVGLTTPRSFEGRIRELVAGHPTLQAVADALLRARASLGEQLGKLQKRLVSVAREDQRARLLMSTPGVGVLVALTYVAAIDDPGRFKSSKTTGAHFGLTPRKYQSGETDVTGRISKIGDASVRTALYEAANVILTRPVKGSSLKRWAMQVAQRVGMRKAKVALARKLAVVLHRMLADGTRFVAEKAAAAA

SEQ ID NO: 251137 - protein, 340 aa, unidentified
MEKRYIGIDLHRNRFTCCIRLENERTYVTEWELEDLGKFVKKLRPSDEIAVEITGNTRLFFDAVAPHVARVVVVNTNQFKVIRQSVKKTDPHDARALALYLSKNMLPEVRMKDKEHGQLASLTQTRDTLVKLRTALKNKINNILSARGLNLAKEALSSEKKLNEVVELPFDEIVRIELRVIVEQIRSLNKSIAELEKTIVEEGSKLEGHKGLSSIKGIGKITGAILLSVIGDVNDFADEGRLASYFGIVPRVSNSNETEHSGRIHKRGTKLGRTALVQSALIAANYSSYLKRFYQQVKARRGAGKAIIALARKFLGIIYRTLKNKWVFEDFPNFVLAEAS

SEQ ID NO: 251138 - protein, 409 aa, unidentified
MLFAGIDWSEKFLDFHLRTAEGKVLAEGKVKPNVKGMADLFAQLETHAPTSEIGVALETAHGAWVQALLDRGYLVYPLNPKTVERFREALSANGVKTDTIDRKVLAMFLVTFHQDNKPLRPDAPEIIHLRLLCQDRLRLVEERTAKVNELGAILKCYYPAFLGLFGHLDSDIALDFLRQYPSQKQMQTLSERRLRTWLSRHHYSFPRRVDGMVGLLKQPVLPVAEHLQDAKKTLIDYLARSLKMLNAEIAERDKQINDHLDRLPESNWVRSLPGAGNVLAPALLACLGRDPKRFCSVGEARALMGTAPVTKASGQFRMVHFRWGCWKFARRTLQLFADQSRHQCDWAQGFYEKQRHSGHKHHAALRALAHRWLKILLAMKQSGDMYDEAIFMNSQRRYLLKSPMLKTST

SEQ ID NO: 251139 - protein, 387 aa, unidentified
MFYVGIDIAKNKHFASVMSSDGEILCEPFSFSNDITGFKFFLSKISSLDKQKLLIGLESTAHYGENIISFLFDLDYKIGIINPIQTASLRKSSIRKTKTDKVDTFIIIKALTLNNFSLLNLRDVNVLKLKGLCRSRRNLVTLRSRSKIQLATYVDQLFPELNSFFKSGLHINVSYQLLKLYSSPKDVANLHLTTLSNVLTKASRGKYTKHDAIRLKELASNSVGINNPSLSIQIKHAIDQIELFTGQINEIENLYKSILDSTNSPILTIPGMSYIQAAPILACIGDINRFNHPCQVLAYAGLDPSVIQSGNFNARSTRMSKRGSGMLRYALVYSAHNVVKNNSTFRDYYLSKTSQGKSHYCALGHAAHKLVRVIFKLLKDDIPFNLA

SEQ ID NO: 251140 - protein, 354 aa, unidentified
MRIIGCDYHPGFQQIAFVDTDTGELQERRLQHREEAEKFYRDLAAQGIKVRVGMEASGHARWFERLLAELNFELWIGDAAEIRTKRVRKQKTDRQDAQLILKLMLKDDFPQIWVPSWENRDLRQLLWHRHRMVQARTRIMNQLQAVALNEGLRCKKRLWGEAGREQLEAFRLAPWASRRRRDLLELLDRLNPTITELTQTIEQEVEKCPEAQRLMTHPGVGPLTALAFVLIIGTAERFQCGKQIASYLGLVPSEESSGDRRRLGHISKQGNSLLRFLLVEAAQVTVRSLPEWRSKYFHLAMRRGRKIAKIAMARKLAIHLFWMMRKEWDYEQVKRFGPHAGQPEHRVGVQQNTE

SEQ ID NO: 251141 - protein, 348 aa, unidentified
MVTIGADSHKRTHTLVAVDEVGRKLAERTAPATPDGHLELLRWAEQWPDRTFALEDCRPLSRGLERDLLRAGERVRRVPPKLMAGARRSGREPGKSDPIDALAVARAVLREPTLPVARLDGPERELRLLVDHRDDLVAMRTQHENRLHGHLHELFPGATPTRRTLARPRVLAALEQRLAAVEGPVALIAGHLVGQIRQLTATIDELERAIGQRVAVLAPSLLALQGCGPLTAAKLLGETAAIGRFRSAAAFARHNGTAPVPVWSGNTTHVRLNRFGNRQLNAALHRIGITQIRLGGKGARYVEKRLAQGNTRVQAIRALRRQLSDEVYGRMRDDEAARAATSALAAAA

SEQ ID NO: 251142 - protein, 440 aa, unidentified
MKKRKDRVCGADVHKDLIVATITGDDVPSIQENFGTTKSELERFRSWLVANKCEQVAFEATGIYWMPIYDSLIKSIDTIVANPLQIKTIPNDKSDSKDSKHIATLCLNGQIKRSRVFSNEDRDLRTLTRARSGYVKTQTQFRNRIHKYLSACGIKLSSTMDDIFCKSGRHILNGLAEGKPIEEILKGIPSGKIRKKKDLIRSALANDLGETNRMLVRDALEILGDIESKIEKTSHEILKKVQQRSKDLAIVMSIPGIAFVSGSVVLSEIGNYRDFQNPEQLAKWCGLNPGENESAGKKRKCGITKRGSKFIRVVLVQAAQTISNMGSKTRLSRFYQRLIKKKEHNVAIIAVARKLICLIYHLLINQELYLEDDCRKRRSKKDKSCQAPSFQEEHLADKVAAIVDAFYNLSDSNRKNALMRALGDISEINIGQKRPSKGGG

SEQ ID NO: 251143 - protein, 430 aa, unidentified
MGLVVPTTVHPEREDQPLPYDWFVGIDWGSEKHQVCVLDGDRRRVGERVVEHDGASLTQLAAWLWALTRGQPQRVAVAIEVPRGAIVEGLIERGFHVFAMNPKQLARFRDRHTMSGAKDDRRDAFVLADSVRTDQPSFRRLQLEDPQFLLLRDLSRAEETLLEDFRRSANRLGDQLHRFYPQMLQLCSAADESWLWDLIDLAPTPAHAALLSAEQVQRVLTVHRLRRVTATEVLACLQTPALPVAPGAAQAAQAHCAFLLPCLRVLAEQLQACSQQVSALLSTLAEAPGEGEGPSDVAIVLSLPGVGRKMTAWLFAEAAQPLAERDYQVLRTHGGVAPVTRQSGKRRVVVMRRGCDPRLRHALYHMARVAMQRDAHFKSVYAALRAKGQRHGQALRNLADRLLRILMAMLRHRTCYDASQIHREPVVQMG

SEQ ID NO: 251144 - protein, 331 aa, unidentified
MNYIGMDIHKQFTVAVVKDERGNKLAQEKFNNTKENFSNFLEVYKHNETKIVMESTCVWEYIYEILEAMNYCVKLANPVRTRAIAEARKKTDIVDAETLADLLRADLISESYIPPKAIRLLREIARERKTFIKQTTQIKNRIHAILIKRGIKIPTTTLCKGTLLWIRSNTISENILKNYLDLLDYYELKLDEINSRIKAIAEKNTDAELLMTIPGIAEIRAVDIVSEIGEIKRFPTADRLCSYTGLVPSIHQSGDTLHFGRLVKQSSKALKWALIEVSWNIVRTKKNNPLQEFYKKLAKKKGKSKAICATARKLCCVIHAMLTNREEFRYS

SEQ ID NO: 251145 - protein, 354 aa, unidentified
MIIIGADYHPGFQQIAFVDTDTGEFQERRLQHREEAEEFYRELAAQAMQVRVGMEASGQARWFERLLSELHFELGIGDAAEIRTKRVRKQKTDRQDAQLILRLMLEDRFPKIWVPSWENRDLRQLLWHRHRMVQARTRIMNQLQAVALNEGLRCKKRLWRDTGREQLESFALAPWASRRRRDLLELLDRLTPTIAELTQAIEQEAKKCPAAQRLQTHPGVGALTALAFVLIIGRAERFQCGKQLASYLGLVPLEDSSGNRRRLGHITKQGNSLLRFLLVEAAQVTVRSDPEGRSKYFHLAMRRGRKIAKVAMARRLAVRLYWMWRKGWDYEQWKKFGSHAGQPGNRDGVQSITE

SEQ ID NO: 251146 - protein, 337 aa, unidentified
MENSKNQTYNHYLAIDWSQNNCTIASMTGYSEEPRVVEIAPDIKLLKNIVNNHKGNKILAVEETTSSHWIYVEMKDFVDKVLVCNPYRNRLLSEGPKDDKIDARKLCLLLRGGFLKEVYHSCEADYYIRKLASAYDDLVKASVRVKNQRSSIYRSEGLKYKKDKIDKKKKYAHFVEAQQLRTIAHFDQEQKQYEKEFASIRKNNQLVKYLSKVPGLGDITSVKIYATVIDARRFTNKYKFWAYCGLVYHLRESGKRYYGRKLPKYSRVLKTVFKSATVAALRGKSDIRDYYEQMLKKGISERDAKSHIARYIAKVSFAIMKTKTPYIAYQWRKADVN

SEQ ID NO: 251147 - protein, 344 aa, unidentified
MKKIVKQVLGVDVAQKELVVSLVQRTESQENLLIASGVFDNDLRGFSSIITWLKRKSSTGLPVEFVMEATGVYHEKFAYFLDQNDLRVCIVQPSKISNYARSLETKTVTDKTSSQAIAYFGLDRKLTLWKRPAGGYKNLRQLTRERDQLIQERTVIKNQIHAEHAEAEPSVDFITRAEKRISLINDQENEIRSQIKTLITNDKQMFDKAVIIQTIPGIGPLTAAIVLAETNGFDLIRNRKQLTSYAGLDVREKQSGTSIKGKASISKRGNKNLRKAFHLPALTAVRSDEAFKQLFNRLTSRHGVKMKALVAIQRKLLELTFTLVKNKQAYQPVRKDEEQPLLVK

SEQ ID NO: 251148 - protein, 309 aa, unidentified
MSDSIVVGIDVSKNQLDVAFDPVGKTLAFANDAQGHAALIKMIKPLSLQLIVLEATGHYEQLFVSALLAEALPVVVINPRQARDFARAIGKLAKTDAIDAAMLARFGRTVQPEIRPLADQKTLLFQEKLARRRQLVQMHTAESNRLKQARSEPVQQSIGQMMDLIKQQLADNDDDLGRMIHDCPAWREKEQLLKTMPGIGKQTARILLIQLPELGRCSRQQIAALVGVAPINRDSGKRRGQRTTVRCGLYMATLVASQHNPVIKAHYQHLLALGKRKKVALVACMRKLLIMLNAMLRDNQPWRTMPLNT

SEQ ID NO: 251149 - protein, 324 aa, unidentified
MKRKVYVGMDVHKETIQIAYLTSNTKEMVKEQQIKHNEVHIKKFINKLKTEWNEIHCCYEAGVTGYPLYRYLKSLGVNCILVAPGKIPRQSSDKIKTDKRDAIKLARLLRSGDLESIHVPSEEDEAVRDYLRSRDSLRLDLGRNRQRLMKFLLRKGNVYSTTKYWTVSHYKWLSNLHFENEILHETFNDYYSRVRVQEENLKAMDQKIQEIAKSEAFRERVGILRCFRGVDYLTAMFLLSEVNDFRRFKTAGSFMSFLGLVPGEYSSGSKRKQTGITKTGSPRLRRILTEAAWQHRFPGTGSKIVAARRTGQPALVVALAEKLP

SEQ ID NO: 251150 - protein, 332 aa, unidentified
MQTETCPLHIGADVAKDEIVVACEEQYFAPHAIDNRRSTLTTFLKAVPPGSQIGMESTGSHHELLATLAHKMGFVVFVLNPKDTRHYAKAMGLRGKTDRVDAKLIARFVDREHAKLHAWIPPTPEQRQLGRLLRRRAKLSTIKAALVQSLQGLSGVSAELKALRQRVQCVIVRIDAKIKALIAASAERQQAYTRLLSIPSVGSVVGSSILIYLERMPFPDADAFVAFSGLDPRPDDSGHRHGRRRLSKRGPSELRRLLYVAAMSAARTEAWKPIYRHYLARGLPTTAALVILARRIARTAWSMYTHKTTFNAQRITKQPSGQSTAPMADVKT

SEQ ID NO: 251151 - protein, 404 aa, unidentified
MKGPIVSIDVSKGKSDYQAFKDLNVKYTGSRSIKHNKEGFDEIVNLVREMEKKLETEVCVVYEATGVYHRVLKKVLEDNNIKQFIINPLLSAKTRKNDSLRSPKTDKLDPKSIAKTYYSHSLHNSHKQETIYHELRELSRYYEDILVHIRKDKVAFRAQLDIVFPGYDTLYDDLYGPVALAIIEKYPHPEILQKKKINTVSKVIQNKTCHRQAVSDTMADKAIEYSKTIYSGCDKDDIEVLILQRFIKKLNEDMAEAERTIGEMIKLAQELPDFNIIKSIPGIGDNLAARIIAELGDMTRFKKKNELVAFAGLDPRISESGQNDGDHMHITKKGNKRLRCLLYLAVTCSIRLKRDDNSIKDFYIKKKQQSNLMCSKAAKTACASKLVRIIYSMCKTGELYQYNK

SEQ ID NO: 251152 - protein, 453 aa, unidentified
MAKPIKGRSLSLECIEPNAAGIDVGATEIYVAVSADRDAEPVRCFKTFTGDLQQMAAWLKQRRITTVAMESTGVYWIPPYEILEEAGIRVCLVNSHYVRNVPGRKSDVSDCQWLQYLHSVGLLRPSFRPDAAICALRSLSRHRASLVESAAVHIQHMHKALTQMNLQIHHVLSDITGISGMAIIEAIVVGQRDPLRLAGLCHARVHADQQTVIKSLTGNYRPEHLFTLKQSLAAYKNYQQLLAECDQEIQRLTNNMPGKIDGGTAAGPKPTRQKRRKNQFHFDIGSELHRLFGVDLTAVPGINALTAHTLLAEVGPDLSRFPSADAFANWLALCPGNKKSGGKVLSSKTRPTNSRLSHALRVAAQTLARSRSYLGNFYRAMRARLGAPQAITATAHKLARILYHLLTTGDAYDESVFAREQLKQNLRLHKRLSKQAQNLGFQLVPITPAGACS

SEQ ID NO: 251153 - protein, 341 aa, unidentified
MQATRHIGIDLHRNQFTCCVRLENGRNYLSEWKLEDLPRFVKKLRPSDQIAVEVTGNTRLFHDAVAPYVKRVVAVDPNQFKVISHSVKKTDPNDARNLALYLEKDLLPEVRMKDKTQAQLASLTQTRDTLVKLRTALKNKVNNILSAHGINLEKEALSSEKKLNEILAMRFDAMVRLELEVIIEEIRSLNQRIAKLEKTIADEGSKLEGHKNLTSIKGIGPLTGSILLSVIGDINDFADEGKLAAYFGIVPRVSNSNETERTGRITKRGSKLGRTALVQCALIAQRYSPYLKRYYEKIKARRGTGKAIIALARKLLGIIYRTLKNKWVFEDFPNFVLAEAA

SEQ ID NO: 251154 - protein, 335 aa, unidentified
MDFCFFIGIDIAKDTLDWAVYTQQGLQLSTHTPNTLAGIKTALAEFKALPGWNPKQAGFAMEHTGIYNAHLLELLHQQKLAIWLESSLQIKQAGGMQRGKTDKVDAQRIAQYAYRFRDQIRLWEPPREVIQKLAFLSATRQRLNQAYNLLAVPVAEQETFISKSLQKTLKGNVKKSLIALKEEQKAVEQAIKQLIEADARLKELFDLMVSVPGIGPVIATELLVATNEMQTINEPKKLACHAGVAPFEYRSGSSIRGKTRVSHQARKRLKSLIHMGTMSAIQMKGDLQDYYQRKLGEGKHKMLVLNAVRNKLIHRVCAVVRRGEKYEKNYAPALA

SEQ ID NO: 251155 - protein, 409 aa, unidentified
MQVVHEVCCGLDVHKKSVTACVLWASGRRRQTREFGTFTKDLLELGDWLRSSGVTHIAMESTGVYWKPVWNLLEGQFEVLLVNAQHIKAVPGRKTDQKDSEWIADLLQHGLLRASFVPPTPTRELRDLTRYRASLAQEINRIANRIQKVLEDGNIKLASVATDTLGASGRAMLEAIVHGEQDSQRLAEMSRGLLRKKIPELQQALLGRITAHHRFLLRELLDHLYFVESKMRRMEQEIAERLSPFQSEVARLCTIPGVDRVTAWGLLAEIGLNMNQFPDAQHLASWAGLCPGSHESAGKRKSGKIRKGSLWLRRCLCQAAWAVSTKKNNYLSALYRRLAARRGSKRATIAVAHNLLVISYYILRDQTCYRDLGPDYFDRLNPQGLRRRLTKRLEGLGFKVTLEPSAQVV

SEQ ID NO: 251156 - protein, 359 aa, unidentified
MQRNKISFKGQKIFVGIDVHKTTWEVAVLTESGLLKRHPQEASAKVLFDFLRKHYPDGEYHAVYESGFSGFATYYALKEFGIECTIAHAADVPTTQYENVMKTDKIDAEKLARALKNGEIKRPVYIREKDNIDDRAVIRIRKTIQKQLSGYKARIKHMLHCNGVEIPERFSKPTSHWSRAFISWLMQDVKLLSSTRRSLDLLIHQVEVIRGTLLEATRELRKLSQTERYKHRFELLMTIPGIGQHVSMCILTEVWDVSRFPNERAFAHAMGLVPTCHDSGPHKSNGEQTFRGNRYLGPMIIEACWVAIHKDMGLAACYAYHKQRTNPQKAIVRVARRMSNIIYSVLKNDKAYEPYQWDK

SEQ ID NO: 251157 - protein, 416 aa, unidentified
MKSWQELTHYAGFDWAKDHHALVVVDRQGRIVADFEFAHTLEGWKGFADKLSAWPNLAIAIETSQGAAVDQLLQQECLVYPVHPVAAQSYRERKAPSGTKTDHLDAWGLADALRGDGHGWKALRPMDPLTQQLRLLCRDEVSLIEQRTALVNQLQQALAEYCPIALQAFDDWTRPFTWEFVLAFPTPQVLAGAGKRRWEKFLHTHKLWRPETAEKRLRLFAQADQFKASEPVVRAKSQLAVSLCKLLCTLEQQLKLYRKQIEALFREHPDHDLFGSLPGAKQVLAPRLLGAVGNDPDRYGSQEVLQCIAGTAPVSYQSGQINKVRVRWLCDKFMRHTVHLWANCFRKASVWGQTYYRKKRREGMSHAAALRCLGQRLLKILFRMLQTKMPYDAELHARSQQKHGSWVLKLVNQSPA

SEQ ID NO: 251158 - protein, 317 aa, unidentified
MAKRVAKITLGIDVAKDECRVCQWESTEALTLPNQAGSIRAWLQSLQGPVQIALEPTSHYHLVWVDAALALGHEVYLINPRQLAHYREAVNVRNKTDPQDAWLLARYLVHEGCQLRAYQPPCRKAQQLWALLKRRAVAVTARKQLQQSFREINLSTRALLSQFQHLLARIDRRMSILIQALGWAGDYQRCLSIPGVGPLNAAALVTAYHRGAFANSDGFVAFIGMDVRLRESGRYRGKRKLTKRGEAELRRLLYCAAQPARTYPPFENYYQRQLDKGLPKIAAKVILARKLARIAFSLLNNQQMFIRQTEKTVAYSP

SEQ ID NO: 251159 - protein, 415 aa, unidentified
MGYKVAGIDIHKKVLMVVVMLIQAGGLVEKIERRRFGTTTPELEKLAAWLQALGVQEAVMESTAQYWKPVWGALEGKIPTLHLAQAFSNRARRGRKDDFRDAERLVRRLVAGELVLSFVPDPEQRNLRTMTRMQVHLTYDRGRLHNQVECLLEEMRIKLSSVLSDLFGVTGRHILGAMAKGETDPRKLAAWAGNRLQCTAKELVAALTGHVQPMHQRLLGLYLERLKLIDQQIDELQHMIAEALQSEQDAVQRLAEVPGFGADSAQQMIAEVGPQAATFPSAGEMSSWVGTCPGQNQSAEENHSSRSAKGNRYARRVLTEAANAAVKTKGSHWQVVFRRLLPRLGYQQAAWAVAHRLCRVVWKILHDKVRYVEQGVNRDPKARAHRARTLARALRQLGYNVELTPLTPAPAPTSP

SEQ ID NO: 251160 - protein, 365 aa, unidentified
MQQDITSIGLDVHKRSISVAVRQGGVLVHEETLPNERAAVARWARRWKRRSQGRLTCAYEAGACGYALQRQLEKLEISCDVVAPSLVPRKPGERIKTDRRDARKLAEYLEGGHLTPVHPPTPAQEAARDLSRAREDVKQDRMRCRHRLTKFLLRHGKTYTPGRKHWTGAHRAWLAKLSFEEPPAQVVFDDYRLAVAQLDGRVEALDQQIEALAQTAPYRAAVGALRCFRGIDTLTAFGLVSELHSIEHFDRPSGLMAFVGLVPSEASSGERQRRGAITKAGNGHARKLLIESAWHARHKPAIPVALRQRRQGQPPEIIAMADVAQQRLHRRYWHLVQRGKPNTVAATAVARELAGFVWAALRATA

SEQ ID NO: 251161 - protein, 473 aa, unidentified
MGKGSGISRSDRRRNARRERLRDLVPRDGVVLGIDLGDQKQALALVDHDMRVLWRRSPRCAAHQLGALLADAVAAAAAAGFSRVTVACEPTGARWMQVQRLCAEAGIGLVCVQPLVSHIAREQEDYTGSKRDEPDAVLIARLAAELHCYVPEELGEEWACLRQLGRRRGQLITMATAAAQRIRDWLSVAWPSAVTAAADPFGSMTWLAALEVVTSRCGADPARLAGGLGEEEFLALVRAASPGWGTARPDRRIARKVLALAGDPDAVPAMRRALFRRIRDELGDLQRFRRQLKEAEADMCALVTELGLARLGDIPGLTLTGAASILAEAGDPRRYETSSSLVKHAGLSPSDNASGAFEGASRISRRGRPSLRLAAWRAIFPLVSHNPVMKAKYDALAAAAEESARAAAGSARPGSARAAQAARTARAARARARVACAASLLRWIYYMTVHDAGWDPVAASGGRLAPQEAPQAA

SEQ ID NO: 251162 - protein, 383 aa, unidentified
MSSTTIDQKNDITIAIELSRSTWLVAAHLPGVERPQFHKIEAGDTAAVLSHLSALRRRVFAHSAATPALSCCFEAGRDGFWLHRFLTAHEIANYVLEPTSILVNRRARRAKTDRLDAEGMLRVLAAYLQGDRKVCSMVRVPTPDEEDAKRIHREREHLVQEKLRIENRIQALLFTQGIQDRPSLRSWERDLAAVRTGDGRELPHHLRAELGRLRRRLVMALQLIREVEAERDEAANALPRDKTCRKIEALCNIRGIGANFAAVLTREVFYRSFDNRRQLASYVGITPMPYQSGGMDRDRRISRAGNPRARTTMIQLAWLWLRYQPGSDLAKWFRDRVGTLTGRARRIAIVAMARKLLIALWRYAEDGVMPAGVEIRAGVAVPA

SEQ ID NO: 251163 - protein, 365 aa, unidentified
MKKVSTVAVKQSRNISEQQLTIGFDLGDRSSWYCVLDEAGSVLLEQRVSTTPKAMKEVFGAMPRCRIALETGMHSPWVSRLLAELGHEVIVAHARNVRLIGESRKKDDRLDAQTLARLARIDPQLLCPVKHRSAKAQADLTVIRARAGLVRARTALVNTSRGLAKSYGERLRGCNVRNMNPEKAEGLSPELQRALEPLLAGIESLSERIGECNERIEKLAQESYPQVARLKQVKGVGTLIALTYLLTLEDAQRFRKSRDVGCYLGLQPGRRNSGQSEPQMHISKEGDPYLRTLLVQGAHHILGPFGVDSDLRRWGLKLAERGGRNGKKRAVIATARKLAVLLHRLWVSGEAYEPLRNQKAMPAAA

SEQ ID NO: 251164 - protein, 477 aa, unidentified
MVVGFSFLPVFFRVIPIYLWYTFSGAVDLYLFNYSFDWYEVTQTTAFRLLLLISLLTPDVSIYVITQPDSLWKTTAPNLFLRRYSHMSLYFVGIDISKYKHDCCILSAADQQVVSRFVFGNDKSGFDELLTALRSLSDPEDIKIGFESTAHYALNLELFLEKAHHSFMEVNPVLISEFKKSTSLRRTKTDRIDCESIARWLMTVEYKPHSKGFYHAYSLKSLTRLRDRLVRQRSFYLVKITNVLDHTFPEFKPFFNDHFSKTALYLLKNYGSAEKMARMNSASYDKLRVLSHGRFTPQKFLALKALAADTVGVTNEIFESELSCLLNLYENLADQVSRLEDQICQLIEDIQPHYMSIPGIGPLSAAVIYAEYGDVSNFSSPAQMLAFAGLEPGIYESGTESHKGRMVKQGSSQLRYVLLNCTLPLIRFDMTFAAYYAKKRSEGKPHRVAITHVAKKLVRVIYALEKQNTDFAAQALR

SEQ ID NO: 251165 - protein, 412 aa, unidentified
MDVVHERCAGIDIGKADVKVCVRVPGPGKRRRKEIRTFLTMTKDLLAMRDWLIAEGVTVVGMEATGSYWKPVFYLLENDIECWLLNARHMKNVPGRKTDVADSEWICKMVEHGLVRPSFVPPPEIRQLRDLTRYRTEVIRERTREAQRLEKLLEDAGIKLSAVVSDLLGKSARAMLEALITGERDPEVLAELAKASMRAKRQILAQALTGQFTDHHAFLARTMLDRIDAVTATEARLSEEITRQLAPFHRQIELLATIPGVSTRSAEMILAEIGADMHRFPSAAHLASWAGMCPGNHESAGKHTSGKSRPGDPWLKNALGLAATSAARSKNTYLASRYKRIAIRRGKKRALVALGHTILTSIWHMLTNDAEYADLGADYFLQRTGRARQTRRLVSQLNMLGYQVSLQSAEAG

SEQ ID NO: 251166 - protein, 343 aa, unidentified
MDHFVGLDVSVKETSVCIVDEVGKIVREVKVASEPEALLAVLKKPAYRFKRIGLEAGPLSQWLFGALAEAELPVVCVETRHMQVVLKAQINKTDRNDARGIAQMIRAGLYRPVHVKTLRSQKLRMLLTHRKLLQSKAIAIENDLRGTLRNFGLKVGIAGTVKFEARIRELVQNLPDLAALVEPLLIVRRVLHEQISVLHRRLLAIVRDDAVCRRLMTIPGVGPVVALTYRATIDVPARFKNSKAVGAVIGLTPSKYQSGEINRTGAISKCGDEMMRVMLYEAAQVMLTRTNKWSWLKAWAMKIARQRGMKKAIVALARRLAVIMHRVWVDGTEFRWTRKVVAA

SEQ ID NO: 251167 - protein, 311 aa, unidentified
MTKDTIGVDISKDHLDAHRMSDGASRRFANGKAGHKAFVTWLGGPGARIVYEPTGPYHRAFERELAQAGCALVKVNPRQARRFAEATGRLAKTDRLDAAMLARMGALLDLEARPVRSSLLSDLKDLHMAREALVKARTAAKNRAKNLTLPILRRHNAAQLRQIERQMAAIEAEITVLVRADPDLARRFDILVSIPGVSAITAFALIIDMPELGTLSNGQAASLAGLAPVARQSGNWTGRAFIRGGRANVRQALYMPALVAMRFNPDLKAKYDQLKAHGKAAKLAITVIMRKLIVLANTLLRDRRKWSPNLP

SEQ ID NO: 251168 - protein, 388 aa, unidentified
MHVYVGVDIAKELHYAAIMDSDGVVSKPFSFENNDKGFNLLLSHLAPYNKESILIGYESTAHYQENLAYFLKSLGYRTAEINPLQTTALRKANIRNTKTDSVDARLICLALMNHHIQGDQRDSVRLDDLYQLCKMRMDTMKKRTTCKIQLVATMDRIFPELASFFDNNLHTNTIYRLIESFPLPSQIKKTRIDILTKLLHKASRGHFKKEKAQKLKNLADISVGIPSDIFAFQAQQLVHQIEFYTDQIQTIEERINTNPDVMSSPLMTIPGIGTFCVACILSAIKNINDFGAPCKILAYAGLDPVIRQSGKFNASHTRMSKRGNSLLRYALVWSAGNVVKNNHTFAEYYRHKTEDQGKSHYQALGHCAKKLVKSIYHMLKYNESFNLD

SEQ ID NO: 251169 - protein, 343 aa, unidentified
MELYVGMDVSLKETSICVVDDRGEIVSEGTVLSEPSALAAFIRAKAENAKRIGLETGPTATWLWHELRALGLPVICIDARHAKGALSLQINKSDRNDAVGLARIMHAGWYKEVQVKSLVCHEIRAMLNSRAQLVNAKRDLDNQIRGLLKNHGLVIGKAGGKVFHHRAEELVGEHRLLQEAVRPLLAVREVVRREIAGLTRKLMALARNNDESRRLMTVPGIGPINALAFCAAIDQPARFRRSRSVGAYFGLTPRRHASGEIDWTGRISKCGDAMVRSYLFEAAGVLLTRVPQWCKLKAWGHRLWKRIGFKKAKIAVARKLAVILHRMWRDGTDFIWATKEATA

SEQ ID NO: 251170 - protein, 390 aa, unidentified
MNATTAAIDLAKNVFQVVLVDANYRVLEQHRLTRAQFERFFDNRKVSRIVMEACGSAHHWARVFGARGIEAILLPAMYVRAYVRRSKTDAADALALLEALRCADIVAVKVKSVEQQSLQALHRTRSLWMGTRTSRINALRGFCRELGLHVPIGARTGLEAMGRAVADEQSPITPLLRPIMLQLLDEIRLLETRVAQLERQLAQLARESHACKLLMSIPGIGLLTATAILAATAGSVAHFKSARHFASWFGLTPKENSSGTMRRMGRISKMGDRYLRMLLTHGARSVLRAAKVAQLKGIELIGLRHWALALQARSNHNKSACALANKMARICYAVLRDQTPFGQPAARLAKKMQRQSFELAYRSTIHYLALPRDDSTHHGNYGRTTTRRCR

SEQ ID NO: 251171 - protein, 337 aa, unidentified
MRIIRIGLDTSKHVLQVHGVDENEQPVLRRQLRRSEVEKFFAKLAPSRIGLEACGASHHWARVLRGLGHEAVLLPPQYVKPYVKRGKNDQIDAAAICEAMSRPGMRFVPIKTAERQAALMVLRVRDLLIKQRTMLSNAIRGHAAEFGVVAAKGPARISELLQRAHGEAAGVPALAREMLSLLANHLDALEARLKALETQLVAWHRQDPVSQCLATQPGIGPIGAVSFALKVTDPKGFRSARHFAAWLGLTPKEHATGGRRRPGRISRQGDETLRRLLVLGATARIRFAKAGRASPWLINLLARRPNKLAAVALANKMARILWAMMMSGETYRHPQQA

SEQ ID NO: 251172 - protein, 345 aa, unidentified
MEHIGIDLHKRESQICIETEAGEIIEKRIRTDRERFEVVFGGRPRAKILLEAMTESEWVARCLEDLGHEVIVADPNYAAMYATRSRRVKTDRRDAVTLADACRLGAYRAAHRASDRQRHVRAELAVRDTLVRTRVKCVALVGALLRRHGIHVASGNVDGFVKRVARQVMAEAQRAEIAPLVALISTASVEIEAADQRIAAIAADDPVIRRLRTVPGVGPVTATAFVATLDMWERFEGPHQVEAYLGLAPSERSSGEKQHRGRITKAGNSRARWLLVEAAWAILRSRRDDTEPLRRWAQRVAVRRGMKVGIVALARKLAGILYAMWRDGSTFEKRAGRTMEVTATT

SEQ ID NO: 251173 - protein, 315 aa, unidentified
MSNKQVVGIDVSKATLDVASLPVSEALQFSNDGSGIDDLTKRLKDSKADLVVMEATGGYETAAATALVAAGLRVAVVNPRQIRDFAKATGRLAKNDRIDAEVIAAFGQAIEPEIVRLPDEDARELEELLVRRRQLVAMRVQEMNRLGLVRGSMRKNIKAHIEWLQNQIDRLDVDLTARLRSSPAWRAKDELLRSFKGVGPITSSTLLIALPELGQLDRRAIASLVGLAPFNCDSGVMRGRRTIYGGRSRVRTMLYMAATTAIRSNPVIRAFYERLKARGKPHKVAMVACMRKMLTILNAMLRQSTPWTPESNPVA

SEQ ID NO: 251174 - protein, 313 aa, unidentified
MTEAALWIGIDVAKAWLDVADAGTERPWRVANDATGIAAVVETLAARSPRLIVLEPTGGLETAVVAALAAAGQVVAVVNPAQVRAFAAAHGQRAKTDALDARLLARYGERMRPPARPLPDAATQELRGILARRRQVVEMHTAEVNRRPTTAPSLLPRLEAHRAYLEAELAELDRALERAIQASPVWQAKAALLCSIPGIGPVVARTLLAELPELGTVTRQEAAALVGVAPLNRDSGTLRGRRAIWGGRAALRAVLYMGTLRATRCNPAIRPFYERLVAAGKARKVALVACMHKLLTILNAMVKHQTLWQAQAA

SEQ ID NO: 251175 - protein, 447 aa, unidentified
MQKKNVKMEVVNPNAAGIDIGSRSHLVAVGQGNQDVKEFGVYNVDLQAISTWLKENEVKTVAMESTGTYWQNLFAVLQAEGFQVILCNGKFTKNIKGKKSDVQDCQWIQKLHTLGLLSGSFLPDEATEQLRTYCRHRANLVDNAADTARKLQKYLRLLNLRLDVVVNDITGLTGLKIIDSICKGEINPQKLAKLRNGNCKKSEEEIAKALQTNGRKDYLFALRHEYQMYLNIQAKIVECDAEIEKMLTQQINNDDDKRQHFVDKKVHKRINKNTPRNIDINLLSYQYFEGVDLLAIEGVSYSTVLTLMSEVGNGIHKFETAKQFASWCRLTPNNKISGGKVLSSRIPKGSNRVKIALRNAANAIGNLKGTALSDFFNRISHRKGRSAAISATARKLSVIIWNMVVKKVPYTPQTEYQFLDQKRKKIAAMKKLIAKFEISPVDLNLQL

SEQ ID NO: 251176 - protein, 364 aa, unidentified
MKRKVYVGMDVHKETIQIAYLTSNSKEILKEQQIKHNEVQIKKFIKKLKTEWNEIYCCYEAGVTGYPLYRYLKSLGVNCILVAPGKIPRQNTDKIKTDKRDAIKLARLMRSGELESIHVPSEEDEAVRDYLRSRDSLRLDLGRNRQRLMKFLLRKDIKYSTTKYWTVSHYKWLNNLHFNNEILQETFNDYYNRVRVQEENLKSMDKKIQEIAESEPYREKVGILRCFRGVDYLTAMFLLCEVNDFKRFKTAGSFMSFLGLVPGEYSSGSKRKQTGITKTGSPRLRRILTEAAWQHRFPGTGSKIITARRSGQPALVVALAEKASLRLHKKFRNLQLRGKTPQVMITAVSRELSGFLWAAMNLVA

SEQ ID NO: 251177 - protein, 341 aa, unidentified
MGEVTTIGLDLAKQVFHVHGADVSGTALFSRRLTRSKLLGFFATQPRCLVAMEACGGAHHWGRELERLGHEVRLIPPAYVKPFVKRQKNDARDAEAICEAAQRPGMRFVAVKDEEQQASAALFRARDLLVRQRTQLINALRGLLAEHGWVAPQGRFRMAQLMADIEDSGCALPGPARAVFLVMIEAIRALDERVGGFDRDIAGRAKQNEDARRLLTVPGVGPVTATAMLALAAPAASFRSGRDFAAWLGLTPRQRSTGGKERLGGITKAGERTLRRLLIIGSSAVVRHASKHGAPQGSWLAGMLARKPRMLVTVALANKTARIIWALLAKGGVYKAPVATA

SEQ ID NO: 251178 - protein, 417 aa, unidentified
MIVDSVARKRSAIKPDTLVVGIDLAKHTHVARGRFYDGSYTKPLKVPNTHAGFLDFTEKINDWKPRPESPVIVGVESTGSYGINLVRWLSEHDCRVVLVPSLHVCREKELPDNGRGTSDNKDALIIADLVARGQFLGFVALSGACLELRPLVSLRARLVREHTRWINALRQTIDVLFPEFETVFVDFKRPNVRLVLDRFGTVASARAHSPTEMRRLLALDGARVSLAKLKRLGAAAAESIGPLQVSAGQERSLREILETLAMLEKRIADLETEIVHLLKQLPETEYLMSVKGVGAMTAAIILAETGGLAQYSCAGAVLKLAGLNLYQNSSGQYQSGRHISKRGRSQLRRALHMVAVQNARRGWPLQPYYAALVERGKPKNVALTAVSCRLVRLLYALVRDGRCYSECPPQENRPQAA

SEQ ID NO: 251179 - protein, 348 aa, unidentified
MGWTGRAPAPDGTQSAPGACQEKERRHASHVQRSRSDYYRNGYGQEHTSHCLIGIEAGLATHYVARELAALGHDVKQVPPTYAKPFRQGHKNDFRDAYSVAEAVQRPTTRFVPAKTDEQLDLQALHRVRSRLVSERTAVINQIRGFLLERGIIVRQGLRFLRQALPDILAKRTDVLSPLMVRIVADLASDWRQLDERIEPVTDEIETLAKSDDGCRRVMTVPGIGPIISSAMVAAIGNGAAFARGRDFSAWIGLVPKQMSTGDRTILGRITKRGNGYLRTLFVQAARVILLRPASWPKHSFGVWLARAAQRLHRNVLAAALANKLARIAWTVLAQGRGYEARITKPAV

SEQ ID NO: 251180 - protein, 354 aa, unidentified
MRQFKENITENKTICVGLEDSKRNWKLCVRADGNIVHETTMPARYNILQSYLLKNYPGCKIRLLYEAGFRGFNLYDRLTDDGIECVVTPPSKVTQEKCSKYKNDRNDCRRLAKILEVNDYKACHVPDKERRQDRQVSRTLVCVQKDMNRIRNRIRKFLEYHGVDDNFKPGRWSNADYDKLRELILPETLQFNLNILLTQLDELRNHKKILTQKLKDLCNKPRYRKTFNIIKSAPGIGWFTAIRLVLEWGEDMSRFPSGKKFGSFTGLTNSEYSTGESTRFGRITGQSAYFVRAWLIQCAWVAVRRDPALQDKFERVWRNSGNKKKAIVAVARKLSERLRICVLKEEFYCLSLIK

SEQ ID NO: 251181 - protein, 352 aa, unidentified
MTVIIGVDAHKRTHTLVAIDEAGRELAEKTVAATPDGHLKAIEWAAQWPERLFAIEDCRHLTRRLEVDLLRVGEAAVRVPPQLMAGARQSGRERGKSDPIDALAVARAALREPDLPVARLDGESRDLRLLVDHREDLVRERTRVQSRLRWHLHELFPGLEIPPKALRRQHVLDGLSDRLAGVTGTVADIARELVVRCREDTRRANELEVEIAGIVRRLAPSLLALPGCGVLSAAKIVGESAGVSRFRSKAAYARWNGTAPIPVWSGNSPKYRLSRGGNRQVNAALHRIAVTQLRGVGDDGRAYVEGRMAAGATKTESLRLLRRRLSDVVFRRLRADECADSAAAACPVMLAA

SEQ ID NO: 251182 - protein, 388 aa, unidentified
MFFLGIDIGKNTHVASLLDEKAKIIFKAYSFANTLDAAEALLVKLEPYKDSLEIGMEATGHYWLSLYSFLAEHKFIVHVLNPIQTDGWRKGIEIRKRKTDVIDSVLIADLIRYGDFLETSLADEDILSLRNLSRFRVYLVNSVSDLKRKAIAVLDQIFPEYASVFSNVFGQTSKELLKSLSLPSDYENLSATKIEEVLSNITQKKKASKTISTLSDKASRSFGISFCKDSFAFQLKLIIEQICFIEEQIASVELEIDQLMSNLGTNIKTIPGVGSVIGAVILGEIGDIERFDNPSKLVAYAGLDASVSQSGEYEASSGKLSKRGSPYLRKALYMAAQRAEFCDPVFHAYYEKKRNEGKHHLVATNAVARKLCHTIYAILKKDIPYEVQ

SEQ ID NO: 251183 - protein, 418 aa, unidentified
MKKHNNSGKKSEPTSKRAKPQGPMRRDTKEVLAELVGKLKEKLDPKKVAATSAGERDQRGELRPNLDRLTVGVDLGDQWSHYCILGLEGETLVEGQLRTTQEDIAEFFQALNAARVVFEVGTHSPWVQEVICSCRHEVLVANPRLMEGSKRRKRKNDRIDAHKLARLGRVDPQSLHPMQHRSREVRQDLVVLRARDALVAARTELINATRGLVKSMGSRLPKCSSPSFAQKVEETIPVELRDALLPLVRMVATLSDCIQGYDEKIEKLGREKYGHTALLQQVKGVGPITALAYVLTLEDPDRFVKSRDVGPYLGLVPKQEDSGESQPQLGISKTGDTMLRRLLVGSAHYILGPFGPDTDLRRYGLRLCERGGKNAKKRAAVAVARKLAVLLHSLWVSREVYEPLRQGMSAMMTPAAAA

SEQ ID NO: 251184 - protein, 398 aa, unidentified
MDLPVYYELETNNGNRDYRIQIGGHYMNYNTVYVGMDVHKESFTLCSCKYEDEKASHYQRTPASYKNVLRYLAFLRTIYGEDTRFVCGYEAGCLGYSLYHQLENFNVECVILAPTTMLEQRSKRRIKTDKRDAEIIARSLAQHNYSPVHIPTETDNQTKEFIRMRDDHKAELKKIKQQILAFCLRQGYQYDGSGNWTAKHVKWLRSLKTEGLYKEILDEYLLTYTILTDKLNRLDQRIEELASKEEYKESVSKLTCFLGIKIHTALSVIVEVGDFQRFVSARKFAGYLGLVPGQHSSGDDRNGLGITKAGNTHVRRLLVESAQSYTRGKIGYKSRVLRSRQAGNSPQIINYADRANERLRRRYYQMVLKDGKKYNIAKTAIARELACFIWGMMTDNIY

SEQ ID NO: 251185 - protein, 490 aa, unidentified
MEKTSNAVFEEMRRNVAGIDIAWRGDHYVCGPRAEDGECEIASFGTTTPELHRMVNWLLERKVQSVAMESTSVYWIPATDLLESKGIEVVLVDSRQVRMVPGRKSDVKDCQWLQKLHSCGLLRGAFRPPEAIAAVRSILRERETLQAMRTQAIQQMQKSLDQMNIRVHHAVSDIDGKTGTAIVQAIVSGERDPLKLASLRDKRCKKSEKQIADHLTGTWREEHLFNLGQAFKTLQFLDERLDEYEQKAQTMLASLAEAASSRQDSEQSPPPPPLPSKADNDVETLAASALSAEGAGSCDNVEESPPRSSKKVSEKELVYNVWQDIIERIMGFDITTIPGIGTNTARIIISELGTTFDRFPDERHFASYIGLAPALGKSAGKNISQKKHCRNTCRAGQVLRMAASTLYRSQSELGAYLRSVARRTDKKTAIKATARRIAHLIFRAVKYGKEYVDCGAEEYEARSRERTVRTVNRLIKSHNISSSEISALTA

SEQ ID NO: 251186 - protein, 459 aa, unidentified
MKKAAVSKGANKKKVAVMTHVIEPNAAGIDVGSTEMFVAVPVDRDPQPVRRFTTFTNDLVALADWLKQCGITSVAMESTGVFWIPLFQLLEDRGFRVCLVNARHAKNVPGRKTDVADCQWLQYLHSVGLLRASHRPTQSICAIRSLWRHRESLVQIAAHHTQHMQKALDQMNIQLHHVISDITGVTGLAIIDAILGGERDPKKLAQLRNARIKASEQKVAEALVGDYRSEHLFVLRQSLEAYRQYQRWITDCDREIERQLSRIESKIDPAQHPLVRTKDDRRKPRGNEARFDLRNDLYRIFGVDLTDVPGVSSLTAHLLLTEVGADLSKFPSAAAFASWLGLCPDNRISGGKILSAGTRHVVSRLAIALRLGAQSLYTSRSYLGDYFRRMRARLGPPAAITAAAHKIARILYHLITTRQRYDESVFAVLEQRAQQRQISILKKRASVLGYELKPAACVP

SEQ ID NO: 251187 - protein, 368 aa, unidentified
MRSVVYVGLDVHKDSITVALARGGRGAAETWKTIPYDGVRLMKALKMLVESPEQLRVCYEAGPTGFGLCRRLREAGIDCIVVAPSLVPSKAGDRVKTDRRDARKLAHFLRSGDLTAVHVPDEAVESIRDLERARDDAKCAERVARHQLSKFLLRHERRWEGTTWTQKHRSWIRAQKFSYPAQQWVLEDYLKTVEDAAERVAQLSEAVAALVEKTVLGPLVKSLQAFRGISTISAVTIAAEVGDLRRFATPGQFMSYVGLTPSEDSSGKRRRQGPITKCGNRYLRRILVEAAWHYRHAPAMSQELRRRNQGVALEVRRIAWEAQKRLNKRLYHLIHAGKSTQKAVTAVARELAGFIWAVGQQDMLLEAA

SEQ ID NO: 251188 - protein, 312 aa, unidentified
MNSSVFVGIDVAKDHLDIAIRPGEKVWTVQNNEKEIEELATQLQENQPELVVMEATGGLEMNVASALAIIGIPVAVVNPRQVRDFAKSTGKLAKTDTLDAKVLAHFAEAIRPEAHFLSDEQSKQLKALVGRRRQLIEMIVSEKNRSHRCYKNVLDKVLEHIVWLEESLENLDKELAQAIHDSAIWREKDELLESVPGIGKITSSVILASLPELGTLDRKKIAALVGVAPFNRDSGTMRGKRSIWGGRAHVRCILYMATLSATRYNPVIKRFYNRLIEAGKTPKVALTACMRKLLVIINSMIRHSTTWRFQPI

SEQ ID NO: 251189 - protein, 319 aa, unidentified
MITAATHQEQRNTTEATLFVAFELSEKTWKLGFTTGHGQKPRERTVTARHQERVLAEIAQAKRRLGLPDTAPVVSCYEARREGFWLHRFLQGQEITNHVVDSSSIEVNRRRRRAKSDGLDVRKLLRMLLRYEQGERQVWQVVKVPSVAAEDQRHLHRDLETLKQERASTATRIQGLLRSQGLRVTSLTKLPEQLDALRLWDGSPIPPGLRRRVLRVYAHYTFLSEQIAAVEAERRAQLQASTDTHIDKVRQLMLLKGIGINGAWLLVLEFFGWRAFKNRREVGGLAGFTPTPYQSGESAREQGITKAGNRHVRWMTTES

SEQ ID NO: 251190 - protein, 343 aa, unidentified
MDYFAGLDVSVKETSVCIVDDAGKIVREARVASEPEALLQVLTNNSYRFKRVGLEAGPLSQWLYSILAEAGLPVICVETRHMRAVLKAQINKTDRNDARGIAQMMRVGLYRPVHVKTLPSQKLRVLLTHRKLLQSKAIAIENDLRASLRNFGLKVGMVGTVKFEARIKELVANLPDLAVLVESLLIVRRVVREQLAILHRRVLAIVRDDDVCRRLMTIPGVGPVVALTYRVTVDVPARFRNSKAVGAVFGLTPAKHKSGESDRTGAISRCGDEMMRMMLYEAAHIMLVRSTKWSWLKAWAMKIARHRGMKKAIVALARRLAVIMHRIWVDGTDFRWTREVAAA

SEQ ID NO: 251191 - protein, 315 aa, unidentified
MRRVIGMDIHRTFGEVVIWEEGRLRNAGRVDMTRTALEGFGKGLRATDEVVIEATGNCMAVSRVLSPFVARVVIANPLQVKAIAHAHVKTDKIDAGTLASLHAAGYLPEIWTPDAATERMRRLAARRFQIVRHRTRIKNEVHSILHAHLIPRCPHADLFSTVGRAWLLRQPVPEDERGAIERHIRELDRLTDDLVAIDREIAGDALDDDAIARLLTITGVNLTVAAGIVAAIGDINRFSSPKKLVSYFGLNPRVRQSGLGAAHHGRISKVGLHLHGPIIRHRSRGRANDRHKHGVVARRHLAGFDRITQLAPPRV

SEQ ID NO: 251192 - protein, 413 aa, unidentified
MEVVHVRCAGLDISKKDAKVCVRVQGAGSRKTATTVTTWGSMTNDILRLRDHLVAEKVTCVVMESTGDYWKPFYYALEDALPVMLVNPREARNRPGRKTDVSDAAWLADLAAHGLVRGSFVPPEPIRQLRDLTRARTALAHDRGRLTQKIEKVLESAGIKLSAVATDITGVSGRAMLEALIAGERDPEVIADLAKRSLRRKIPDLTEALGGRFTEHHGFMIRMHLDLIDQHTQALERLQARIEEAMKPFTAARELLCSIPGWATKVAEVFIAETGADMSMFPTAAELVSWAGLSPGANESAGKIKSTKIRPGNRHLKAAVGVAALVAARSTNTTFFGARFRRITVRRGPMKAVVAVEHAMVKTAWHMLVNGEFYRDPGPDHYTQRRPEHAKANAVRQLEALGYRVILEKPDAA

SEQ ID NO: 251193 - protein, 441 aa, unidentified
MAMRKREEEVVFPNAAGIDVGASSHWVAVPRHSADEPVREFGAMTDDLNALADWLLQCGVDTVALESTGVYWIPLYEVLERRGLTVWLVDARQMKYVPGRKSDVQDCQWLQKLMSLGLLRAAWRPGDEVCIVRAVVRQREVLLVEQASWVQRMQKALVQMNIQLTEVLTDVMGMTGQAIIRAIVAGERDPAVLAKHRNARVKASVAEVQRALTGNWREEHVFVLAQALAMYDSLAQRVAECDAKLETLLAPLGRHDVKPVGPAKRAGKNTPGFDLRTALARWAGVDLTRINGLAVTSVLTVLSEIGPDLSRFANVKHFCSWLGLCPGTKISGGKVLSARTRRSTNRVRQALKLAAMSLSRNGSALGAFYRRMCARMDKPRANTAVAHKLARMLYFMLTRGEEYVDQGQQHYEEQQRQRSIAALKRRAAAMGFVITPATATS

SEQ ID NO: 251194 - protein, 389 aa, unidentified
MQSPRRGRSAKFSGRQTVKEPITSYVGLDIHKDSVAISIADAGRAAARFVGTINPYPAELCKALRRQRCRPESTLVVYEAGPCGYGWVRYLRKQHWACEVIAPSRVTRCPADQRIKTDRRDALLLARESRAGNLTSIVVPDERDEAMRDLSRAREDACAARLRVRLQMQAMMLRHGRHYQGRSNWSQAHDRHLSTIRFEHPAQELAFNEYRLASKEACERVQRITDAMRELCNGWRMNPLVKALMCLKGFDLVAAVTFVAEMGDLSRFPHPKALMSYLGLVPSEYSSGASRRQGAITKSGNKHARRILVEAAWNNRFKAQVTRTLQVRQEAQPAILREISWRAQLRLSKRWRSLAMGRKLPQNKICVAIARELCGFIWDLAQHVPIKAA

SEQ ID NO: 251195 - protein, 355 aa, unidentified
MNQEKYIGMDVHQATISVAVMDSSGKLIMECILETKAATILEFIAGLRGTLSVTFEEGTSAAWLHDLLKPHVSHLVVCDPRRNALLKDGSKSDRIDARKLAELLHGNKLHAVYHGEHGVRTLKELGRSYLTITKDLTRVMSRIKALYRSWAIPCSGATVYAPRHRAEWLAKILEPGVRLRAERLYQQLDLLQPVRQGARRDLMVESHKHHAVKLLRQIPSIGPIRAALLVALLQTPHRFRTKRQLWAYSGFAVETHDSGEYRFVRGKLRRNRERITVRGLNHNHNHDLKNLFKGAALSASTRPGPLCDFYVALVEKGMRPTMARLTLARKMAAITLTIWKKGVEFDAKQLHRQAA

SEQ ID NO: 251196 - protein, 336 aa, unidentified
MSHYCGIDLHSNNHVVVVIDEEDKRVLEKRLSNDLSLTLKALSHYRKSLQGIAVESTFNWYWLVDGLQEQGYDLHLVNTAAVKQYDGLKYSGDHQDAFHLAHLMRIGILPTGYIYPKEQRAIRDLLRRRLSLVRAASTQLISAQSQIWRSTGIRIKSGELRKPVFVPPPVDDYTRQAVHAVLAVYQAIQCEIDGLEKSAYQAVKLTDDFAILQTITGIGKILGLTIMLETGDIHRFASAGNFASYCRCVDSKRTSNGKNKGVGNAKAGNKYLSWAFSEAAHFAVRFEPLAQRFYERKKAKTNGIIAIRAVARKLARATWMMLKHQVPYDARRMFPG

SEQ ID NO: 251197 - protein, 373 aa, unidentified
MKKRNSSQKSRTRTVKTKRAKEVIAIGMDLGDRTSRYCMLSDEGEILREGEAATTKAGMVETFGSLGRVRIAIEVGTHSPWVSRLLQKLGHEMVVANPKQVKLITESSRKDDRLDAQTLARLARIDPQLLRPIQHRSEKAQSALMVIRVRAALMAVRTSLVNTVRGLTKSMGERLPKCDADQMGVLQAASLPPKLRQVLEPLLKEVESLTEKIKDSDREIEQIARKDYPETALLQQVGGVGTLIALTFILTIEDKDRFQKSRDVGCYVGLRPRRSDSGQSQPQLRITKEGDPYLRTMLVQGAHYIISRRGPDTDLKRWGLNLAKHGGKRGKKRAVVAVARKLGILLHRLWVTGEVYEPLRNHNLRQGQKKVAA

SEQ ID NO: 251198 - protein, 402 aa, unidentified
MDVHKTFIVACIATTDSNGFTIYQSKRFSTFTGDLRRLAAWLADNNCRDVCMESTGKYWFPVFNLLEQFCNVVLAHPKYVKSIRGKKTDKKDAQWIADIFKHDLISPSFIPPFEIRQLRDLTRYHTKLTGFTTGEKNRAQNCLTVSNIQIDQVFSDVFGQSGSAITKQLLEHPNGDFNVAPFVNSRVKAPIPKIQAAIEGSICFQQAEKLRTIRQHLDSIQTCKASLEALIDKCASQFQSQIELVITVPGIQRFSAVSIISEIGVDMSVFPTAKQLCSWAGLVPQNDQSAGKKKTTRISRAGEYIKPLLVRCSLGAIATKKHPEIKERYTALKKRRGHEKAIIAICRMLLTTIYAMLKKTEPYDPSHYRAFDLPPDYRSITPDQAMRLARRLGYTIVTTQAS

SEQ ID NO: 251199 - protein, 425 aa, unidentified
MQAMKTHVAGVDVHKEILAITVLIGPTDQEPQATQFECSTFTDDLLACGLMMKEMGVTDVAMESTGVYWKPVFNVWDKLGLRVIVGNATHIKNVPGRKTDMNDSRWIAELHRFGLIRASFIPDVEFQRLRLLSRHRTNLTEDLSRVRNRVQKVLEDGNIKLGSIVSDVFGVSGRQVLELIANDYTHPDILVTAMTTKIKRLEDAKKALTNCLTKEHCFVVNQLMKQFSDLEARIRDVDNELVTRVQPYAHLVEKLDEIPGIDVILAMGIIAEASADMTAFRDERSFAAWAGVASGNNESAGKKKRSKCRRGNPYLRRILIQAAQGAVHSKKSFYRSKYNKLSFRLGSKNKAKVAIANKLARVVYKVLAGATYKDLGYMRGDPREEKIKKLFTQLRALGVEITGHNHQFINAKRKVKVDDSGIILQ

SEQ ID NO: 251200 - protein, 323 aa, unidentified
MTRIICGVDISSSSLEARIGRQGAAASFPNSSEGIAAQAVFCRTQQVELVAMEATGGYEQQAFAQLSQQGLPAAILNPRAVRRFAESMGRLEKTDTIDAGMIAWYAEVSQSMPLCLAPASQQHLRALVTRLRQLTQIRTAQLNQQRLVTDPAVQACFEELLAVLARQIRALEQSIAALIDQDPLWRELNQAFRTIKGVADRTVARLMAEMPEIGTLSNKTVSKLAGVAPLARDSGKHQGKRAVRGGRSAVREILFIVASVVGRFEPDFIAFRQRLSAAGKPPKVVRIALAHKLLVRLNAKARHIRQSMDADSCHRATPLAGKA

SEQ ID NO: 251201 - protein, 419 aa, unidentified
MTRRIAGIDVHKRVLMVVVLSVSEDGAAASTREKTKCGTLSTELEELRQWLREKGVTEVVMESTAQYWKPVWLALEGGFELGLAQAWSNRAPRGKKSDFRDAERLARRHVAGELTMSLVPGAEQRQMRELTRRTAQLNRELVRIQNHIESLLEPARIKLSSVLSDLFGATGRRILQALAQGESDPEKLAALADDRIRCSPARLAEALRGSRTPMQRRLLKQMLQDAELAEAHKKELEEMTGELMRQHSGAIRRLTGVPGIRLRTAEDVIAEIGPDARAFPSAARLASWVGACPGREESAEHNHSARCAKGNMSLRRALCEAAQAAVNTKNCRFQQKFRRLLPRLGYAKAIWAIVRLLCIVIWNILHQGADYIERGGQTTPGAIRRRAQRLNKELRAAGLSLVIVPLTPQTQTVSAAPGL

SEQ ID NO: 251202 - protein, 340 aa, unidentified
MKLYGAIDLHSTNSVTVVIDEQDRVVYQKRLPNDLALILRELSVYQSELEGIVVESTYNWYWLVDGLMEEGYKLHLANTAAIQQYEGLKYTDDHSDARWLAHLLRLGVLPEGYIYPRAQRPVRDLLRKRSQLVRQRTTNLLSIQNLLTRNTGSSLSARRVKGLDVQQVDELLPNPDLALAVKANLSVLCSADEQVQILEQTVTQRVKLRSQFSFLKTVPGIGEILALTIMLETGDIRRFASVGNFASYCRCVGSQKISNGKTKGKGNTKNGNKYLAWAFVEAAHFAIRFNSKIKSFDQRKKAKTKGVVAIKAVAHKLCRACYYIMRDRVPFNITKAFDQN

SEQ ID NO: 251203 - protein, 378 aa, unidentified
MNRATNSTAPADRLFCAVELSKNSWLLGIQFPDHQKASVYPIKGGDSEGLMVKLVAACDRWTKVSGKKPSIILCYEAGYDAFWLARFLKARGIDCLVVDSASMQVNRRSRRAKTDRIDLGKLLRALIAWCGGERHVWSVVRIPSVDEEDLRRSHRERSRLITERTAHINRIKGLLFAQGIRGINVKACYKTLQIDKLLTGEGRPLPPRLAREIKREIDRLALVQQQIAAIEEERDESPTTCKETEKKRAQLLLLKGIGPTGSAVMAREVYYRQFSNRRQIAGFLGLATSPYDSGQMERSQGISRAGSGPVRATMIQIAWLWIKHQPKSAIAQWFVQRTEGQSGRIKRIMIVAVARKLTIALWRYLEQGLVPQGATLTR

SEQ ID NO: 251204 - protein, 457 aa, unidentified
MGHARARKVPARLVEDEDYQLRYERVAGIDVAKAKADVCTRLPPAREGGRRASRLEEVPATAAEILALAGRLLADGVQLVVMEATSDYWRIWFYLLEAAGLNVQLANPAHARQLAGRPKTDRLDAQWIARLAEMGLLRPSFVPPPEIRALRDLTRSRLQLTRDRTREWQRLEKLLEGALVKLSSAVHSLARTKTARDILEAIAGGEGDPKALAALAHDGVKGGRAAIERALDGMMPGGHHLMLIRVHLDHITFLDRAVSAVEDEIAAALDAIPAAWGIGADGVPCPDPGPDATVLTAAERLAEIPGVSPKLATAIIAETGLDMTRFPTAAHLASWAGLAPVARQSGPRNRKPGKGQGDAYLKGYCTQAATGAARTSTFLGERIRRLSKRLGGNRAKCAVARSILVIIWHLLADPEARFTDLGPDWHQHKAGRDRKIQAHLRQLHALGLDVTVTPAAA

SEQ ID NO: 251205 - protein, 352 aa, unidentified
MGIVVALDVHRSQITFKALDQQTGELRRGRITPATRAEVRSWLRQFADSQAEFAVEGTTGWRFVVEEIERAGHRAHLADPAETAARRGRKRRAKTDDADCDLQLRLLLAGELPESWIPPEPILELRTLVRLRKTLIDQRSAWQQRIHAQLFHQGVPAGLRLRTQAGREALQRVELSPAGRELVALGLRMLDSFDLELAPLDRRLRAFANRQPGCRALIEQLYGVGPVSATAIVAELGDCRRFSSSDDAVRHAGLDITVYQSDDKRAPGHLSHEGPELLRWALYEAAVSSARAGSPDHAYYLQVAQRLGHTRACLSVARKLCRRAHHTLRELGEQALAPIEQPANEQAIAAAA

SEQ ID NO: 251206 - protein, 470 aa, unidentified
MKPYFLGGDASKGYCDFTLLDQKKNIVEENFQLDDCYEGHQSLCLFLEEFFSSHENDENVIIYAGFESTGGYENNWYQLIWKLQYSFNIQVARLNPFGVKYHKKASLERIDTDKISSRKIAEYLIAYPEKVEYSKEDYFAGLRRHWKFIRLLKNQKSQLQTNLKAQLYVAHPQLLPYCIDGISNWLLLSLQKYPTAARLANASIKTLSQIPYLPEARAKELVGDAKKSVASMQSPSMENIITSAVNQILYLQKEINQQVNLMISTYDFPEIEILSSFIGISQYSAFGLLLEIGAIERYALVKNLVSFFGIHPVYRESGDGSWGMHMSKKGRKEPRWILFNVAKSAIVHNEMIKQLYEGYQAKGKCKMAALGIIMHKILRIVYGMLKHKKKYDPTVDMTNRKKTARQKEPTKPKPEKSRRYQDYDRKAPISRRQTKKRNNKQKEKQKEVISIDREKEKGYGNQGNNPNPKE

SEQ ID NO: 251207 - protein, 391 aa, unidentified
MLNDAPRPAQAAIRTDLGAIFVSMELSRRTWLITSLSPGAGEKMSKHSVPASDVPGLLHRFAELKRKATARSGRDFPIIVIQEAGLDGFWIHRVLQSEGIESHVVDPASILTSRRARRAKTDRIDGETLVRTLMAFKRGEPRVCSMARAPTPQQEDRRRVCRERRILVGERVRHVNRIRGLLFAQGVFGYEPLRKHRRERLKDLRTGDGRPLPVHLKAQIIRELDRLELVLAQLKTVAAERDTLLKTASDEMPSPPAMLVQLKGIGPETAAVLWSEGLFRRFDNRRQVAAYAGLAPTPWQSGSIDHELGVSKAGNPRLRTTMVELAWLWLKNQPTSALSLWFHERVQRLGGRMRKTIIVALARKLLVALWRYMTAGIVIEGAVMKPASATI

SEQ ID NO: 251208 - protein, 415 aa, unidentified
MEPMHRRVAGIDVHRMKHVVTILIGREDGAVSSETREFGGFKRDMRALVAWLQTHRIQQVVMESTGIYWKSVFGHLEAAGIPALVVNAFHVKNVPGRKTDVGDSEWLAQLARFGLLRGSFIPPKDLRELRIVSRYRRKLTGMLAGEKNRLHKLLDDAGIKLGGVVADIDGVCASKMVEGLIAGGKPDELAALGRGKVRATTDILEAAMDGELSARHRLVLDMAYDHLRYLEGKLAALDRYLLAAMQPYAWAWRLLQTIPGIDAVSAAMILIEIGDDPHRFGSPARLASWSALCPGNNESAGKRKSGKTRHGNPIVRYLLCEAANAARRTKTVFRAKYESLVIRRGHKKTIIALAHKLVRTIYFVLVRRKPFRDSTVDYEAASVAKNAPRWIRALKKYGYWPQVAAPNPLTAATAS

SEQ ID NO: 251209 - protein, 347 aa, unidentified
MKRIAVDLAKSVYQVAESVRSGQVVQRKRLNREAFRRYIQEQAEPVEWVMEACGTAHYWGRVAQALGHQVRLLHPRYVRPYRRRNKTDRNDCDAMLEAARCTDIHPVPVKSHGQQQLQQLHRLRETWKKSRTQRINLLRGLLREAGIEAPASTAAFIRAASELVDQPELAPLSRLLHIVLAEINLYEQCMAECEQQLKRWHADDDIVRKLDEVSGIGLLTASALTAAVGRPERFASGRQLSAWLGMTPREFSSGERRKLGHISRQGNVYVRTLLIHGSRAALLAAQRCQARTPEKLTQLQRWAVATAARIGHNKAAVALANKLVRICWAVWCHERRFNGNWQSTKPA

SEQ ID NO: 251210 - protein, 328 aa, unidentified
MSATSEQIFIGIDVSKATLDLAVRGQAKAQQFVNTDAGVGALIDSLATRKDSVAVVLMEATGGLERLAATALCLAGYAVMVVNPRQAHDFAKALGFLSKTDKSDAQALAQFAHTLYSSDKRDKLLLKLPTVQQDMLAAMVTRRSQLVVMRVAEGNRLASSHPTQKKSIQAVLKVIDRQVKELDADIAGSLGKHFKEKLDLLKGMKGVGISTQAALMASLPELGSLSAREIGKLVGVAPLNCDSGTMKGKRVTWGGRADMRSALYMASLSAVRHDPLIKAFYQRLRAAGKPAKVALVACMHKLLTIMNAIIKSGKPWQAGYGCPQAGDA

SEQ ID NO: 251211 - protein, 413 aa, unidentified
MGRKTAEVELHYERCCGIDVHKELIVACFRNGTKNTIREFGATSKELQKLAEWLTEVDCEMAVMESTGSYWKPVYNILEMFGLELMVSNARDVKNLPGRKTDVKDAEWMARLLAQGLLKPSFIPDRPQRELREVTRYRKSLTEERAREINRLGKMLEGANIKLTSVLTDVLGKSSRALLEAALSGESITDITIEGMLKGKVKGKSALLVDAMDGVLSKTQRLLIKAVLDHIDDMTRRISDLDDIIKDEMEKYDEAIRRLDNIPGVGISSAQAILAEIGLDMSRFPTSGHLAVWAGVCPGNNISAGKSKGGKTRKGNQTLRATLVQCAQAAVNTKGTFFRAQYDRLVVRRGKNRAKMAVAHSIIIAIWHMIKHESAFAELGGDYYNRLNPEKKINMYLKKLKDLGWTPPVPVVA

SEQ ID NO: 251212 - protein, 347 aa, unidentified
MDYVGIDLHKTSSQICTLSAGGELTERRIKTTKAAFDEVFAGRPSAHILVEASTESEWVAQHLENLGHEVIVADPNFAPMYASRDKKIKTDKRDARALCEACRLGAYRPAHRTSERQRKIRAQLLVRSTLVRTRSKYISLIGALARREGCRIATGGSDNFVKRAEGANLPEHVLAAVAPLFESLKMLNRQISEADAELERIVKEDEVVRRLCTAPGVGPVTATTFAATIDDATRFGAAKQVRSYLGLVPREYSSGERQHRGRISKAGGSRARTLLVEAAWALLRWRNAKNQALYDWAMRIAARRCRARACVALARKMAGILYAMWRDGTEFDPQAVSRGVEHAAAAA

SEQ ID NO: 251213 - protein, 394 aa, unidentified
MIYVGIDIAKDKHDCFIVNSDGEILFDVFTIQNNMDGFEDLLFKIKSVEKNPDKVKVGLEATGHYSCNILGFLKNKGLSTIVINPLYTSLSRKSISLRKTKTDKVDARTIASMIMSDVSLKPYSDTLYHNEDLKSLTRYRFDKVAQRAKLKQSVSRLVNILFPELETLVATLHGKAVYELLSEFPSAQHIASANLKHLTHILDKASKGRFKRVTADEIRETARKSIGSYLPAKSLELKHTIKLIGELNTEIAEIETEIKKIMDAIDSPIISVPGIGQNLGAVIVAEIGDFSRFESPDKILAFAGCSPSTYQSGQLYSSHAKMEKRGSRYLRWALLNAAAYVCKWEPTFAAYLAKKRAEGKHYYVALSHAAKKLVRVLYHLETTGDTYHPTSILS

SEQ ID NO: 251214 - protein, 352 aa, unidentified
MTERSKEQTVKFVGIDLAKRSFHVHAADARGERVLSKKLTRARLPGFIAQLPACTIAMEACGSAHHWARTFRGYGHEVRLIAPQFVKPFVKSNKNDAADAEAICEAVQRPNMRFVAIKSVEQQDIQSIHRMRSLVLGQRTALINQTRGLLLEYGIEVAQGRAALQRRLPEILEDAGNGLSGRFRAELQGLYEELQHLNARVAHYDAQIDQIAKDNAQAQTLMQLPGIGAKGATALLAAVGEDPSLFKNGRGMAAWLGLVPRQHSTGGKERLLGISKRGDVYLRQLLIHGARSVLRVAEHKDDPLCRWATALKTRRHPNVAAVALANKLARIAYAILTTGQAYDPNSTRSIAA

SEQ ID NO: 251215 - protein, 433 aa, unidentified
MLKINYMSTLFVGIDVSSKTNAVYAMDFEENRYISSSFGNNQPGADKLVNMIAECMQKHKNLDTLLIVLESTSVYSVHISNFLSASEVLMPYRPYVFCVNPKATSNYRKSYIGMEKTDPTDAYLIADFGRVGRTKKLEPWRGGQFIALKRLTRHRMHLSECITREKTYMVSNLYLKFSELQLLEGDDKPLGSLYGATSSAVLTEFLSPQEIIDMPEEELLAFLAQKSRNRISDISKTSGLLRKAARDSYRLDKCMYEPLNISLASSFNCIHAYQKEIRLIEQAIEKCINGMNPNALIILQSIPGIGPVWASGILSEIGDITAFHSSDALAKYAGLYWPKGDSGDFTSEDNQISKAGNPYLRYYLGEAANSVRKHIPEYADFYARKYAEVTKHQHKRALALTSRKLVRLVFGLLAKNQLYTGEKLDTEYNIESN

SEQ ID NO: 251216 - protein, 362 aa, unidentified
MIVVGVDPHKRTHTAVAVDQATGELEAELTIGARPPGHEELLAWARELGHERLFALEDCRHVSGALERFLIARGERVVRVAPKLMGQSRRSSRSYGKSDSIDALAVARAALSEPELPEARLAGAELEVKLLLDHREDLVGEANRMANRLRWHLHDIDPELGLARGRLDRSDWMERLARRLSRGEQTVRVRICREQLRRLRTLAREIKGAEAELAALVRSQAPELVELPGCGTLCAAKLIAEVAGVERFSDHAKLAMLAGVAPLDASSGRQQRHRLNRKGNRQLNLALHRIAVTQARVHPPARAYLERKRAEGKSRREALRCLKRHLARVVWRTLRAARSERMISISPNLQETEMPTPTPVLT

SEQ ID NO: 251217 - protein, 453 aa, unidentified
MAQRNRSISLKPGISRVALSITHPNAAGIDIGSASHFVAVPPDRDDEPVREFPSFTADLNALADWLTACGVDTVAMESTGVYWIPLFELLEARGFTVLLVNARHVKNVSGRKSDVLDCQWLQQLMTYGLLSGAFRPSDAVCALRSLWRQRGMLLRSQGRHVQHMQKALTQMNVQLANVISDVVGETGQKILRAIVAGERDGQVLAAMKNVRIRASVNEIAKSLQGNWRAEHLFALKQALEAFDFIGRQVSDCDREIEMQLEALQIHDGIPAKGKKRSRARNAPKFDLRTQLFRMCGVDLTRIDGVDVTTALAVISETGADMSRFPTAAHFASWLGLCPGTKITGGKVMSGKTKRCANRAAQALRLAAAALRSSQSALGAYFRRMCARMDKPKAVTAAAHKLARLIYTMLTKAEEYTDQGQDYYEERYRERVLRQLAQRAEKMGMKLVISEQHA

SEQ ID NO: 251218 - protein, 355 aa, unidentified
MNDAKYIGMDVHTATISAAVRDSSGNLVMEATIETKAETILEFVHGLRGSLRVSFEEGICASWLHDLLKPHVSEVLVCDSRKNALLRVGNKNDREDARKLSELLFLNKLHAVYHGETGIRTLKELARSYLTITRDLTRVMNRLKAIYRGWGIACTGQQVYAPRYRAEWLAKIAETGVHRRAEVYYQQFDVLAALRQEVRRELLAESRKHPAMKLLRQIPSIGPIRAALLIALMQTPHRFRTKRQLWAYCGLALRTYDSGEYRFVGGQLKRSKKAVTIRGLNKNHNHDLKNIFKGAATRAAATAGPFQKFYEARIASGLKPPMARLTLARKIAAITLLVWKKGVRFDPEQLKQQAA

SEQ ID NO: 251219 - protein, 355 aa, unidentified
MDSKKYIGMDVHKESISMAVMNGAGKTVMDCVIETKASMILQFFDGLRGDLHVTFEEGTSAAWLYDLLKPHVTKLVVCDPRKNASMKEGNKSDKIDARRLAELLRMNHLNPVYHGEHGLRSLKELVRSYLTITKDFGRVMSRVKAIYRSWAIPCAGKQVYAPRHRAEWLGKITEPGVRRRAEFYYQQLDALRTVRQQVRRDLLAEGKKHEVWKRLCQIPSIGPIRAAVLLGILQTPHRFRTKRQLWTYCGFGIETQSSADHRSVGGQLQRAKKQISILGLNRNCNHDLKNVFKGAAVVASSKPGPFREFYTALLTKGIRPEMARLTLARKIATIVLIVWKRGACFDAQHLKPQTA

SEQ ID NO: 251220 - protein, 444 aa, unidentified
MRHARRSLNLQVVRICGSVAVRRTRLTTFFLTCILRPGVRSGSHFFRQAWQILKSADERLGPTRGLTGKPSACSVRKRHHAAEVFQGERVVEYVAGVDSHKGTHTVVILDAVGVQQASLQISADAEGYAKAITAARTLGQVTWGIEGSGSYGRAFARVLVEQNFTVYEVPGVVTKRHRRHGTRHGKSDAIDACAVAEAVLRERARLPRVVIDETQETVRLLYDRRNRLLRDRTTAINRVRALAMRLGIEAMPADLSSKRSLKTAHELVTARRGSSLLLDEIADEMTELLDDIERLVDRVRQLERKLRPFVERLAPGVLRLPGASTIVAAGIFGHAGALTNYRSASAFAMRAGVAPVLVASGKSVAVRVNHTGDRQLNRCLHVIALTQVRLAGHPGQVYYERKRREGKTHRAAIRALKRQLATVVYYRLREESALGELPRATAAA

SEQ ID NO: 251221 - protein, 343 aa, unidentified
MEKTTVVGVDLAKTVFEIAVSNTPGQVSDKRRLPRTKFLSFFKELPPATVVMEACGSAHYWGRVFEGFGHTVVLLPPHLVKPYITRNKTDRADAKGILEAYRNDQIHRVPIKTLEQQTLGAVHRLRSRWIKARTAQVNTARGLLREFGINIPVGIEHVVPQVRLLVEDADSKVPDPLRPLLVGVCEQIELLGQQIELAEQQLEDLAEQTPLVKRLRTIPGIGLISGTALSAFVGTVDRFPTSRHFACYLGLTPSERSSGTKRRLGSISKLGDIYLRTLLIHGARSVITHARRAKSNDRLRSWALRLVSRTRYNKAVTALANKLARVTWAVWKSERDYEPQAAV

SEQ ID NO: 251222 - protein, 359 aa, unidentified
MDHIIIGVDTHKSNHIAVAINAQGARLGVVTIPTNRQGYRDLEIWAAKFGRIKAFGIEGTGSYGAALSRDLLVKGHTVLDVMRPNRQLRYLHGKSDSLDAESAARSVLNGQASALAKTQAGSSEMIRHIKIVRDSAVKVRSQAMITLKTMIINAPTELRDSLDQIEGPISLIRHIAALRPGDTASPTASAKWAMRALARRWLVLHEEIQAHEVELERMAREKAPELMKSHGISTQTVAEMLILVGDNPERIKSEAALAKLCGVCPIPASSGKTSRMRLNRGGNRQANAALYLVATVRMQTTKKTKIYVARRTAEGKTRRETALPQALHRRRDLSLSLRPTDSGIQHLTDIGASQGGAIK

SEQ ID NO: 251223 - protein, 369 aa, unidentified
MADRITYVGLDVHKDSIVVAVAAGGLRGEVREYGRIANTSTALDRLLRKLGGDGMRLRFCYEAGPCGYGIQRRLSTRGHECVVVAPSLIPKRAGDRVKTDRRDAASLARLHRAGELTAVWVPDVGHEAMRDLVRARLDAVHSLRRARQQLSGFLLRHGCHYGRPAWTRLHRRWLAGLKFEQAVHHIVLEDYIAAVEAAEARRNRLTAQIEAMLPDWTLAPVVAALQTMRGMALVNAASLIAELGDLSRFANPRQLMAYLGLVPSEHSSGSSVKRGGITKAGNAAARRLLIEAAWSYRFPARLSRELLLRQESQPRLIRDIAWKGQVRLCARYRRLARTGKPANIVTTAIARELAGFVWAIARQVTLTTD

SEQ ID NO: 251224 - protein, 489 aa, unidentified
MKSQPSKRARKDKKQGKEASNNPTLVKWNEMNRKQRREMMRKVQSEDLSLQVVHPHAAGIDIGNESHYVAVPPSRDPQPVRCFGCTTAELKKMAEWLTQCGIRTVAMQSTGVYWIAVYDILEEAGMEVYLVNARETKNLPGRKTDVQEGQWLMKLHTYGLLRNSFRPSQEIRTLRTYWRQRHDLVRSTGRHIQRMQKALTQMNIQLANVISDISGVTGQTILKAILDGQRDPRELAAYRDCRVEASEEEIVQALEGNWQEDQLFVLRQEQAGYEFCQKQITECDQQLAQYLARLEDQTQGATLPEETRKGRRKKKKGNPQFNLREELFRMTGTDLTQIDGIDVMTAMTVVSEVGWDMSKWKTENHFVSWLKLSPDNKISGGKVIGKGRMPTNNRATTVLRMAATTLRESDSYLGAQFRRFRTRLGPPVATKAMAAKLARLVYRMLRYGMKYVNQGAEFYEAQHRKQQVIHLKRKAAQLGLEIIEVAAAA

SEQ ID NO: 251225 - protein, 320 aa, unidentified
MLSFCGIDVSKDRLDVMVLPEGHRSWVPNDVAGWAELVEQLRDCSIAAIGIEASGGYERGAMRALLAADLPVRQVNPFKLRQFARASGVLAKSDPLDARMIASFVATMPTRPAPRQAPAAERLTEMLAVRRQLSAEKVAAENASRLVEDAMLQRLSRRRIARLAADVDVLDQRLVEIVATDVALAHRYRLLTSMPGVGSVLACTLIALLPELGRLSRKQVAALVGVAPYAFDSGALKGRRCIWGGRANVRQVLYMAAMSASNWNPVLKAFHDRLAAAGKLPKVVIVAVMRKMITMLNAMVRDDVLWADRLSGRHIVPTTR

SEQ ID NO: 251226 - protein, 399 aa, unidentified
MAQPVWAGVDAGKADHYCMVINDDAQRLLSQRVANDEAALLELIAAVTTLADGGEVTWAIDLNAGGAALLIALLIAAGQRLLYIPGRTVHHAAGSYRGEGKTDAKDAAIIADQARMRHDLQPLRAGDDIAVELRILTSRRSDLVADRTRAINRMRAQLLEYFPALERAFDYNKSRAALILLTGYQSPDALRSAGGARVAAVLRNRKARNADTVAATALQAANAQHSIVPGQQLAATVVARLAKEVMALDTEIGDTDAMIEERFRRHRHAEIILSMPGFGVILGAEFLAATGGDMAAFASADRLAGVAGLAPVPRDSGRISGNLKRPRRYDRRLLRACYLSALVSIRTDPSSRTYYDRKRTEGKRHTQAVLALARRRLNVLWAMLRDHAVYHPATTTAAA

SEQ ID NO: 251227 - protein, 402 aa, unidentified
MVVGQPLWAGVDAGKSDHYCVVIDADGKRLLSRRVANDEAALLELINAITALAGGGELTWAIDLNAGGAALLIALLIGAEQRLLYISGRTVHHASGGYRGEGKTDAKDAAVIADQARMRRDLQPLRAGDDIAVELRILTSRRTDLVADRTRAINRLRAQLLEYFPALERAFDYSASKAALILLTGYQTPDGLRRAGAARLAAWLRKRKARNADAVAAAAIEAAKSQHTVVPGQQLAAAMVARLAEEVMTLDTEIGDTDAMIEERFRRHRHAEIILSMPGFGVILGAEFLAATGGDIAAFGNTDRFAAVAGLAPVPRDSGRISGNLKRPRRYNRRLLRACYLASHIAIRTDTASRIYYDRKRAQGKRHTQAVLALARRRLNVMWAMLRDHKPYQPTAPNAATA

SEQ ID NO: 251228 - protein, 416 aa, unidentified
MKKTQNTRGYERYFAIDTHREYHLVGGQNEDQEWVVNPRRVSIEKFAEWAQKNLRAGDIVVLETTTNVWETYDRVAPLVSRVLVANAAAVGEIAGARVKTDKEDIKRLLKLLFGGIVPEVWVPPAHVRELRGFISYRNRLVKMATMIRNHLQSLLHKHSLMLPEEGILNQAWWDAQTSISALEKMQIRQELGLLDEIKKLQAAVSEELEKQSTGEQWGKQALELMQLPGVGVIVAMTVLSAIGDISRFEDARHLVGYSGLGAGVHDSGKTHLEKHITKKGRKELRWIMVEAAWRAVRMSPYWKEQYEKHLKRMRKPNQAIVAIARKLLVAIWHVLTKEETDIHASEDDLAYKMLLLSWSLKDNVRMGLSYKQFAKYALMKLGIENDITRFVRREVPRRLAPREEVLTRMAELGIAQ

SEQ ID NO: 251229 - protein, 405 aa, unidentified
MNAVGIDVSKGKSTVTIRRPGDVVLMQPCDVPHTQSAISALIEQIKSLDGETKACMEHTGRYYEPVANWLSDAGIFVSAVNPILIRDFGDDSLRTPKTDKADSKKIARYALDRWAKLKQYGSMDKTRNQLKTMNRQFGFYMDQKTAMKNNLISLLDQTYPGANDFFDSPARSDGTQKWVDFVYTYWHVDCVRGKSLQAFTEHYQKWCKRNGYNFSASKAEKIYQSSSDLIAVFPKDDSTKTLIRQAVTMLNTASKTVEALRIKMDQTAATLPEYPVVMAMNGVGPSLGPQLMAEIGDVTRFTHREALTAFAGVDPGKNDSGKHSQKSVRTSKKGSPSLRKTLFQIMDGLIKRSPVDDPVYAFMDKKRSEGKPYYVYMTAGANKFLRIYYGRVREYLASLEESKES

SEQ ID NO: 251230 - protein, 312 aa, unidentified
MTKTICGVDISKKHLDARIAPGEAFARFTNDAAGIAKLAAFCGEHKVELVVMEATGGYERLAFTLLWEAGAACAIANPRSVRQYAEAMGFLEKTDRIDAFIIARFAHSKGLKPTPPSSKIQCRLKGLVVRLRQLTDDLVINKQRRHQVEDEEIRATFDDIIALIKRQSRRLEGEIASLIDDDPLWAVLDKTFRTVKGVADRTVARIMAELPEIGTYDNKAISKLVGLAPLAHDSGKKNGKRSIRGGRSGVRSILFLVADIARRYDPSLADFHRRLVAAGKPKMVVRVALAHKLLVRLNAKARDARAQYANAT

SEQ ID NO: 251231 - protein, 330 aa, unidentified
MDHLGIDIAKTKFDVCLLAQPRDRHASFANTEAGFMLLREWLDRHRTDATAPLHACMEATGNWGLDVASFLHQDGITVSIVNPKQIKSFGDSELARNKTDRLDAALIARFCRAHTPRAWTPPNPRLRELRDLVRRCDALKAARTQEINRQKAGCASAVVAASIAAHLHVLAEQIAGINEAIRTLIAEDPTQQHDFNLLCGVPGIGEVTAAVLLAELPNITEFTPKALAAFAGLSPAEHSSGRSRSRSIGISRIGSARLRSALYLCALSARRHNPRLAAFVRRMAEAGKPPKVILVAIARRLLVYAHAVLRKQTPFRADDPTPEALLANPI

SEQ ID NO: 251232 - protein, 318 aa, unidentified
MPESIVIGIDIAKQTFDAALGVSGSIKTFANDDAGFDTLLANLAGQAVDLIVMEATGGLESNLACALQAAGFAVAVINPRQARDFAKAMGYLAKTDRIDAKALAELAQVLACSPERDRFVTVLPTPEQQALQALVARRRQLVAMQVAERQRLSVSHAAARKSIEGMIMAIRTQLDEVETELAKHIETHHADLALRLSSVRGIGPTTVATLIAEVPELGQLSRREISALIGLAPFNRDSGQMRGKRAIFGGRGQVRRGLYMAALAAIRFNAVIKQFYDRLVAAGKRKKLAIVACMRKLLTILNAMVRTGKAWDDSLHTA

SEQ ID NO: 251233 - protein, 309 aa, unidentified
MPAINYVGVDLSKPEMVVDLSAEAKPRAFSNDANGHAALLAALPADAHVVCESTGGYQSALVRALQKAGVPVSVVLPGRVRAFARARGLRAKTDPIDARLLTAFGQAMAPAAAAPLSNAHDELQQLARARRDLVAQLNDEASRTEHFTLPCLQQQAQERRALLQRQIRDIEKRLRALIAADPAWRWKAERAQEVCGIGEVSAWTVLTELPELGQLERGEPAGLLGVAPDPQDSGPRRGHRHISGGRSHARKVLYMAALTASHHNPVLAPFYQRLVARGKPKLVALTAVMRKLIELLNRLLAEPHFKLAQ

SEQ ID NO: 251234 - protein, 402 aa, unidentified
MNAVGIDVSKGKSMVAIMRPFGEIVSTPFEIKHTSSDINSLVKLIKSIEGESRIVMEHTGRYYEVLAHQLSEANLFVSAINPKLIKDFDNDSLRKVKTDKADSVKIARYALDKWQNLKQYSVMDELRNQLKTMNRQFGFYMKHKTAMKNNLIGILDQTYPGVNTYFDSPARSDGSQKWVDFASTYWHVDCVRKMSINAFIDHYENWCKRKKYNFSKSKSEEIYGKAKELVPVLPKDDITKLIIKQAVDQLNSASITVESLRTLMNETASKLPEYPVVMAMKGVGTSLGPQLMAEIGDVSRFTHKGAITAFAGVDPGVNESGSYEQKSVPTSKRGSSDLRKTLFQVMGVLIKTHPQDDPVYQFLDKKRAQKKPYYVYMTAGANKFLRIYYGRVKEYLASLPES

SEQ ID NO: 251235 - protein, 470 aa, unidentified
MNSKAKTVKTQVTNEDLNAKTSAIQKNLVAKTWLELESHGKFDKNGKLDFIKEDMLIVGCDVGSDTHYLRAIDTRGKELSKTAFRFENNEAGLKAAFDWMLSLAAVNVKTQIVMGLEPTGHYWFCLTAWMLSHGITVVQVNPYAVNRTKEVEDNSQNKNDRKDPKVIANLVKDGNYGVPYLPEDDYATLRSLSTLRSELVENRTRATNRLHRELKIHVPEYKGMFGTPDGAFALTLLKEAPVPEDIVALGPDGIKKVWKDAGLRGRGYSTIDHIIELAKHSIGLTSDVVAAKESIKIWIEEIQSLDENIKRIEAMLEEICGKIQFADNIQEIPGIASIIKAGIIAEMGDIRRFDDVKELQKLSGLSLVACSSGQHKGETKISHRGRKRLRSWLYMAAGCAVASSEEFAKLHEYYTTRPDNPLKKKQSLIVIACKILRIIFAMLRTGKKYDPQKMMADIKRHETVSPAAAA

SEQ ID NO: 251236 - protein, 421 aa, unidentified
MENTAARKRKQVPEGYLIIGVDPHKKRHAAMVITQDFSIRDKFKFDNTREGLETLVRRVRMEMVKSGCRGVMFAIETGGHYWRNIAYFLDEQGIPFRFINQFTLKRRREGKDLNRRKNDYRDSEVAAQLLCTGEFTESKVPQGVYAELRTAHNAYRRLVKERTRITNLVKGLLDGLFPEFTQVFKDPCALTALSVLSTCPIPKVIACMTEDEFVATIEAQHKGRLMRKKLRGLHYSARTSIGIDAGARSVSSEISFLVEKLELIRRHIRVIEGTLVSLVDETEEGKYLLSIRGLNYIAVAGLLAELGCFKAYRSAKQMIKMAGSNPTESESAGKKGSHTPMSKQGRPVLRYCAWTSVIPMLRFNSDFRAWAKQRRERPAHANPLSGREVVGAALNRLFRLAFAMVKNQTYYRSPQLVQVTG

SEQ ID NO: 251237 - protein, 350 aa, unidentified
MIIIGCDYHPGVQQISFVDTDTGEFQETRLQHREPAEQFYRELALRGMQVRLGMEASGQARWFERLLAELKMELWIGDAAEIRAQRVRKKKTDREDARHILRLLVEDRFPRIWMPSWENRDVRQLLWHRHRMVQMRTRVMNQLQAVALNEGMRCKKRLGGERGRQQLESFPLAMWGSRRRHDLLELLDRLNPTIAELTQAIEAEVANYPAAQRLMTHPGVGALTALAFVLIIGETERFQCGKQIAAYLGLVPEENSSGESRRLGHISKQGSGFMRFLLVEAAQVTVRSDGQWRSRYFHLAMRRGRKIANLAMARRLAVRLYWMWRRQWDYEQWKEFGPHAGQPGMSDGVK

SEQ ID NO: 251238 - protein, 348 aa, unidentified
MRFYTGQHRYYCGIDLHARTMYVCIQEHASGEVVLHRNLRCDPELFLKTIAPYRDDLVVATECIFCWYWLADLCAREGITFVLGHALYMKAIHGGKAKNDKIDSRKITVLLRAGALPQAYVYPPGMRATRDLLRRRLFFVRKRGELFAHIRITFHQYNLPIPGGQLLYQCNRAKVPDAFCDPIVRASVEADLALAGHYDGLIRSIERTILEQAKVDDLSTLILLQTIPGVGPILSLTLLYEIHDITRFPRVQDFVSYARLVKSQKSSAGKVLGTSGAKIGNAHLKWAFSEAAVLFLRKNPRGQKYLDRLRSKHGKGKALSILAARIGRASYFMLRRNTAFDPDRFMSH

SEQ ID NO: 251239 - protein, 320 aa, unidentified
MSPNTTNTRTETNSVVHVGLDIAKAQLQLHLQNQQHVLPNTVTGHQRLIRLLRVVAGAHVVCEATGGYERKVVAALHAANLPVSVVNPAHVRHFALAQGQRAKNDPIDAALLTAYGHALRPNATPVPQAVLAELRELVQWRDHLKEQLVRARQPAEHATLAFVRRQQSKEATHLEKQMAAVEKELAAALTRHPRWREQVQRLAELDGVGTLTAVSVLSQMPELGHLNRGQAAALAGLAPWTRQSGPWEGQRHIGGGRAVVRRALYMSAVALARQTGSILGKFYARLRAAGKPAKVALTAVMRKLLLQMNQVLKYHVPDPA

SEQ ID NO: 251240 - protein, 363 aa, unidentified
MMVWTLPGPAPRMECLPQEVAMTIVRIGLDIAKHVFQVHGVAEDGRVLLRRQLRRGQVVAFFADLPPCLIGIEACPSAHHWARLLERLGHRARLMPPQYVKPYVKRQKNDAADAEAICEAVARPTMRFVPVKTEDQQAALMLHRARELLVRQRGMLINGLRAQLAEFGIVAAQGRTGLSDLVKLLQGPTVVEVPNLARAAMAELVRQLQELTLRIRVMDREILAWHRSNAVSRRLESIPGVGPITASAIAASVTDAGQFRNGRQFAAWLGIVPRQNSSGGKERLGRITKWGDSYIRKLLVVSSCALIRYARGKSPATNWLTGVLARRPAKVAAVAMANKTARIIWAVLRDARLFRKEEMATVA

SEQ ID NO: 251241 - protein, 367 aa, unidentified
MKKVSTVAAKPSKKISQQQLTVGLDLGDRNGWYCVVDEAGQIQLEQRVRTNAKALREVFGEMAHSRIGLEIGTHSPWISRLLSELGHEVIVANARKVRLIGESRKKDDRLDAQTLARLARIDPELLYPVEHRSAQAQADLMMIRARAGLVRARTGLVNTARGLAKSYGERLRSCNVRNLNPEKAESLSPELQVALEPLLNAIESLSERIAEYNERIENLAQQSYPKVALLKQVKGVGTLIALTYMLALEDPHRFGQSRDVGCYLGLQPGRRNSGQSEPQMQISKEGDPYLRTLLVQGAQHILGPFGIDCDLRRWGLKLAERGGKNGKKRAIVATARKLAVLLHHLWVSGEIYEPLHNSQHPAMLAAA

SEQ ID NO: 251242 - protein, 343 aa, unidentified
MQSITTIGLDIAKSVFQVHGVDAEGSVIVRRQLKRRYVLAFFQKLPPCLVGIEACASSHHWSRELQALGHTVRLMPPAYVKPYVKRHKNDAADAEAICEAATRPNMRFVATKTPEQQSCLTLHRTRHLFIRQQTSVINAIRAHLAEFGIVAPIGRLGVEQLLGVVSDAGDKRLPDVARACVAALGAQLQRLKVQILEFDRMIRAWHRSSEASRRLDDIPGVGPALATALVASVADPKMFRSGRDFSAWIGLVPKQNSSGGKDRLGNISKRGDRYLRSLFTTGALAVIRYAKIHGTKHRPWLTALLTRRPTKVAAIALANKIARMAWAMMARGERYKEPAALAA

SEQ ID NO: 251243 - protein, 355 aa, unidentified
MTQSHYNLLSKDSSNDYIGLDIHKKTISFCAKAQDGTILDQGTIVARRDTLLAWAKARPRPWIGAMEATLFTGWIYDLLKPLAQELKVAHPAMLKAITAAKKKNDQVDARTIADLLRCNLLPECYMAPSAIRDLRRVLRYRNLVVRQATRMKNRIAGLLMETGTPYNKERLHGRAYFSELLGGLREVPRSVVELLQLSRGQLEFFATIQRRLLKGLCQNPDLSERVARLQTIPGVGEIMALSWALEVGEVKRLPSIAQAASYCGLTSAQHNSAGKEQRGPISKQRNKHLQTILIEAAKLAPRHNPQLAVVHERELQRGDRNQATLAVARKLVAYLMAVDKSGKPFAMRASGEEAA

SEQ ID NO: 251244 - protein, 320 aa, unidentified
MPYIGIDVSKDSFIAAYPAKSGYTTKTFKNTTSGVRQFMTSLPKDCHCVMEATGNYSMLLLYLLQQANITVSMENPQKIKHFARAMLSTTKTDEIDAKLIAMYGEKMEPAPYKIPSESIMLLKQKRTVLRQLKKQLTAMINLQHSLSVLPKQDSTAKVATEQTIKFLRKQISKLEDEITHLSNKEFKRQMELLTSIKGIGENIASALIMATGGFTYFSSAKQISRFLGLCPTYQQSGTSVNVKGHINRNGDTHLRSQMYVVACSSIRANAACREMYERLRSNGKSAKVALIAVANKLIRQAFAVVTNNRPYIDGYVSTLA

SEQ ID NO: 251245 - protein, 417 aa, unidentified
MRFRHGLATDGIFESKGEAVYVGWDWASRNHDLTVIDDAGAICARFAIGHDEMSLDKVLQDLASLATPAELPVAIERPDGIVVERLLAAGHPVVPVHPNSFHAARSRWGAGRAKSDPADSYMLADYLRTDGHRLRRLRPLDPATRELQALVRMRDDHVTARTAATNQLHALLEAHRPGANAIFSRLGSTIALAFMADYPTPESAARLGEGRLAMFCRRHSYRGGRTPAELLQRLRGAAVAPVGVDPVVLAELVRAQTALIQTALGTIAQLDAAIGAVLLAHPKAELLSPLPHIGEVNLAQVIAEIGPLLDRCESADQVAAACGVAPVTRQSGKSRNVQFRFSSNARARVALTCFADNARHGSPWAKHLYATARQRGIRHPHAVRIVARAWLRVIWVCWHTNTAYDPARHHAETRHAA

SEQ ID NO: 251246 - protein, 351 aa, unidentified
MPMLAETVDAVVGIDTHRDIHQAEIATPSGTPLATISVGNDSAGFAELLGWIVDHAPGPQVAVAIEGTRSYGIGLTRALAAAGLAVIESEQPSRGQRRGKGKSDPIDAHLAVLAALRLDAARLPTPRTDGDREALRILLGARHELTVASTAQTNRLRALLLGGTDTDRDTARGSLTDTVLARLVRRRPPAQASRHLLVRHAEISRLAAALRQARAELKANRTQLQAIIADLAPALTDRLGIGPVSAAQVIVSYSHPDRWPNEAAFAALAGTNPLPANSGQTVRHRLNRGGDRALNSAIHTIAVTRMRACPRTRAYLTRRTTEGKTPREIRRCLKRYIARELYRTLTSTLTT

SEQ ID NO: 251247 - protein, 348 aa, unidentified
MEWTVAVGVDTHKAAHVAVALDRLGRQLGVCEVEVSEDGYERLLRWARSFGACAFAVEGTGSYGAGLARVLARHGVAVFECERPSRGERRRGKNDTLDALRAARRLVAGEGLSERRGSGVRELLRVLLIERRSADQARTVCLNQLHALIVTAPPSLRSRLAGSTRARLITAAARLRARASDDVEQRALIEVLRRLGSRGQLLGEEVKTVERKIDELVRSLAPELLAECGVGAICAAQLIVSSGEPSRMRSEAAFAALAGTSPVEASSGPTRRHRLNRGGDRQLNCALHRIALTRKRLHAETAAYYERQLASGKSKREALRCLKRMLARRLYRQLRTLPALAFAEGATI

SEQ ID NO: 251248 - protein, 370 aa, unidentified
MPKHSTAFGMDVHLRSTTVCALDADTGEAVTRRFPGNPWGEIAGWMDGFPGPSLAAYESGYLGFAPQRELAGLGVECVVAAVSKIPRSAADSASKNDRNDAARMAKAILAHDISPVWVPSPEVEGIRDLAGAYDGATARLATAKQRLLAFLARRGFVYGGTTPAGNPRKYWTYDFLRWLDKVRPEDDGGVRTLAALRNEVEAAAEARADLLSEYGAAVDASPIAAEVAALQSIKGCAFALAAAFSAEVGDFTRFRSGRQVTAYFGLAPSQRSSGDSVRLGGISGAGNALVRKLAVEGSWCYAAARHQPKLMPRDTGVPLEIRMHGRKGSERLLRRREEMLARGVPAAKATAAELVRWLWALGMMCREGAE

SEQ ID NO: 251249 - protein, 321 aa, unidentified
MKHSFAPSTAFFGVDVAKKTLVVHRHNGSATRTLGNDRSSISAWLAGLPAAAVIACESTASYHRLLLDLAHAQGFRCYLLNPMDVHHYALSLGLRSKTDHVDAQLIARYVANEHSRLHAWQPASVASQALDGLIKRRAQLVRSRTALAASFAGMPEIGSALTLALRQLDALLKVLEARIRAAVKALPEGAATAQRLASIPGVGPLTSSALTNLFTRVPFTGADSTVAFVGMDPRANDSGEKRGRRRLTKRGPSELRRLLYNAAMAAARNPLWKPYFERDRSKGLSSTAAYVALARRLLRLAFTLFRSRSMFDPDKLALKAA

SEQ ID NO: 251250 - protein, 313 aa, unidentified
MATERVHIGVDVSKDTLDVFIPGGKTLRVKNTPAAVRRMVRGISAREPTAMFCCESTGGYERTLLDVCREEGLPVCLMNAQQVRCYAGHLGTLEKTDRIDARLISMAADDKKPAPLAHPTDRQRKLKELWTLRTALITERDRVRNQLEHLSEKETVAAVRRVVASIERQLAALGKRCRELVEEDKDSAAFLGRVQLVKGVGPVTALALAALLPELLVLDDKRLAKLAGLAPIAEQSGTMDGPRHIQKGRGLVRRALYFAALTASRHNKILSAFNERLVKAGKSKKVALVAVMRKLLCLLRRIAQNPDFVPAST

SEQ ID NO: 251251 - protein, 354 aa, unidentified
MLIIGCDFHTRYQQIAMAREGTAGLLLERRLDHESGEAHAFYRSLQSSHEPVRVGIEATGPIHWFERLLAELGHELWIGDSAKIRASEVRKQKTDERDARLILDLLLAKRFPKIWVPTPAERDLRQLLWHRHKLVRLRTMLGNQLHFLAMTQGLCRKQKLFTKKGRAELVGLGLAPWARRRREELLKLLDQLDPPIAELDRAVMEEAQRRDDAVLLMTHPGIGPVTSLAFVLTIGTVTRFCCSRKLVSYLGLNPTEESSGGRRRLGGISKQGNTMVRWLLIETVHHAVRQDPALRQDYQRLKFRRGHAVAKVAIARKLAVRMYWMLRSGADYARLVRRQGSPGATLVDASPSLG

SEQ ID NO: 251252 - protein, 352 aa, unidentified
MRHFIGCDAHKKYSVFVAIDETGNVKPAVRVNHDRELYRGFLRGLPAGSEIAVETIGNWYWIVDEMEEAGHRPRLAHARKAKLMMGEIDKTDKLDGRGLATLLRNGTLPEVWIASREVRDQRELLRLRMTLVGMEIRLKNRVHAILAKYAIQLEEVRDVFSQQGRRLLLGATLENLPPHTAKVIRQHMELLESTEQQRKIAEERLKSIVKERADVNLLMTLPGVGWILGTVIAFEIGDIDRFSRAPEIASYAGTVPRVHSSGGKTRYGRVHPDVNRYLKWAFVEAANVIVMHQKRLGDVHVVRLYKRLRQRKGHGRAVTAVARHLAEAAFWVLKKQQPYQQPQGCRVSSTHR

SEQ ID NO: 251253 - protein, 358 aa, unidentified
MRIIGVDLHVRQQTIAMLDSVTGELVKKTLKHEGEEVREFYSALPHPVQVGIEATGSMYWFLELLEELGIDRQVGHPAEVRAAEPRKQKYDGRDALLLLRLQMENRFPSIWVPSRELRDLHALLRHRHQWVRMRTRVQNALQAIAVSHGLRRGPALWSQVGQHAIASLPLAPHAACRRNELQTLYGTLSTKIGELDEQVKDQALQRSGAKLLLSHPGVGPVTALATDVFLGDPARFDDSKALTSYVGIIPSEYSTGGRQRLGGLSKQGNPLLRFLWCEAGMHAARRDPELKRFYGRKLHQKGLGKVRVAVARKLGIRLWIMLRDQIDYQEFCRRGQLRQKSGAARAGMPEGVHSPAES

SEQ ID NO: 251254 - protein, 344 aa, unidentified
MKQYVGLDVSQRETAVCVVSETGQLIFEGKAKSDPGDLTKLLRKHAPLAERIGFETGAMASWLWHELRRVELPVVCIDARHAHAALSVRMNKSDQNDARGLAELVRVGWYREVKVKSEESQKIRAILVARARLVSMRRDIENQVRSLIKEYGLLFPRAIGQQFRNTVNDLLGEDHQLLIVVAPLLSIHEHICRQQGEFDDEVRRLAKQDETTRRLMTVPGVGVITALTFRHTIDDPSRFRSASLVGAYLGLTPRRKQSGETDTSGKISRWGDRLLRTYFVRGGDRSALSDQKVVLPQSLGDEACQADRHEEGEGRHRAQDRRHSPLHLGRRYIVRLGLRQVSLI

SEQ ID NO: 251255 - protein, 429 aa, unidentified
MEDSPCLPNPIVAWVGLDWADQQHVVCLQSAGSSALEHSTLEQEPEALQLWVAELRRRFPQGRVAVALEQSRGSLFYALMNYDFLLLYPIPPKALADYRKALYPSGAKDDPIDAELLLEFLRKHPDRFRPWVADDAQTRLIGLLGEQRRQLVDDRTALTNRLTALLKGYFPQALEWAGDVAAPLAWDFLAQWPSLAEAKRASRLQMLKVYRAHTRRSATQLEHLLDQIQTARPLTTDSAIIESSTLMVQVLVRQLRALHVGLELLERRLHALFTSHPDYRLFQSFPGAGEVLAPRLLAAWGTDRKRFQGAKEMQDFCGVAPVTERSGKKSWVHWRLACPKFLRQTFHEFAAQSRLKSPWAKAYYEQMRERGLWHQAAVRALAFKWIRILYRCWKSHTPYVEARYQQALRRRGSPLARTLRQLEVQEAHA

SEQ ID NO: 251256 - protein, 405 aa, unidentified
MNAVGIDVSKGKSTVTIRKPGNVVLMAPRVILHTRSDISALIEQIQSLEGDTKVCMEHTGRYYEPVATWLSDAGLFVSAVNPILPKEYNDGTLRSPKTDKADSKKLAKFTLANWENLRQYSVMDKTRNQLKTMNRQFSFYMDQKTAMKNNLIALLDQSYPGANDFFSSPVRSDGSQKWVDFIYTYWHVDCVRTRSLKAFTEHYQNWCKRKGYNFSAEKAQKIYAASLDLIAVFPKNETTKLLIHQAVSMLNAVSQTVEELRIRMDQLAATLPEYPVVMAMEGVGPTLGPQLMAEIGDVIRFTHRGALTAFAGVDPGKNESGKFAQTSVHTSKKGSPHLRKTLFLIMDGLIKRSPVDDPVYAFMDKKRSEGKPYRVYMTAGANKFLRIYYGRVKEYLTSLEESDES

SEQ ID NO: 251257 - protein, 457 aa, unidentified
MGHARARKIPARMVEDEDYQLRHEKVAGIDIAKAKADVCTRLPPAREGGRRASRTEEVPAAAREILELGARLLAGGVELVVMESTSDYRRIWYYLLESLGLAVQLVNPAHARQLAGRPKTDRLDCQWIARLAEMGLLRPSFVPPPEIRALRDLTRTRLQLVRDRTREWQRLEKLLEGALVKLSSVVHSLAGTRSARVILQAIADGETGPGTLAGLAHGNVKGGRAAVRASLEGMQVQGRHRALIRLHLDHITWLDRMIPAVEDQIEAALDAIPAAWGVTADGVPCPGPGPGAAALPAADRLAEVPGVSPALARAIIAETGLDMTRFPTPAHLVSWAGLAPVARQSGPRNRKPKKGQGDAYLRGYCTQAAAGAAATPTFPGERITRLSRRLGPNKAKCAVARSILIIIWHLLADPAARYSDLGPGWHDRKTSRERKIATHLRQLQALGLHVELTDTAA

SEQ ID NO: 251258 - protein, 429 aa, unidentified
MSETKSIELRVSVDVGYRRHSVAIGLPNGEVLEEFEIAHGPEGFQEFFSRIEKHRKEREYGVAVAMEGYNGYARPLDSLVRSRGYRLYNINNLKLARFKEIFPGAAKKDRIDARKGLELFQLSDHLPLAKEVLQEVRGTPKENEVLKRLTRRRRRLVNERVRVVNNLQADLQAVCPGLLEITSEASNQWFLNLLLSADSLSQLARLRKATLLKIPSVGRKYASLIQDWQKRAHFSEEVEWVSEMIQEDAKRCVELEEKIKTLETKITEVAKDSKIAKILLSIPGFGPVCTTELAGEVGTVERFSKEGSLALYLGMSTLDNSSGKYQGSKAPKHVNTRAKAAMMIALDRHRKYVPESQRYYEKKRAQGKKHNQAIRALGRHLCRIIYKMLKEQRDYQLRSEKGDTQARVGSRSCVKTKIRRPKISPSRQK

SEQ ID NO: 251259 - protein, 412 aa, unidentified
MLKIVYPICCGIDVHKTFVVACIASTNDKGVTTYQRKRFSTYTKNLRELAKWLAANNCKDVCMESTGKYWIPVYNILEESCNVVLGHPKYLKALRGKKTDKRDAKWIADVFKHDLVCGSFIPPAKIRELRDLMRYRFKLTNYMTGEKNRAQNSLTVSNIQLDHAFSDVFGKSATRILDYLLEHPDEKNFDVAPFVDRRCKTPIEEIQLSIDGNISYEQTEKLKIIRSHMDSLGFCKLNLESIILTLAEPFMPQINLVSSVPGIRDFSAIAIISEIGTDMSVFSTAKHLCSWAGLAPQCNESGGKKKTTRVSRAGVYIKPLLIQCANAVVTSDKHPEIRNRYLSIKKRRGHKKAIVAIARMLLTAIFHILQKNEPYNPELYRKADVSPANRVEQAIHFLEKQGFFVLQAATAT

SEQ ID NO: 251260 - protein, 407 aa, unidentified
MNQLFVGIDVGSRDNAVYIMLPDGSKHSSFAVQNNLGGAQTLSKRVVAALIEKNLSAVVIGMEATSVYGDNLLCFLREDGALGRFERKLHVLNPRQVNKFKQAYSDLPKNDPVDAFVVADNLRFGRITTPVYMDDYRYKALQNLTRARFYAVQSLTREKQRFMNYLFMKCSGLAQEKTFSDNYGVAALAVFEEFESPDALAEIDIEQLASFIAKKGKNCFPNPVEVAKAVQAAARDSYRLPKTVNDSVNQVLSISISSMRAMKSQIKALDKEIERQFKNIPNTLTSIPGIGPVFSAGLIAEIGDIKRFNGQAGLAKFAGLAWTQHQSGMFEAQHTRLIKSGNRFLKYYLCEAALSLVRCDTEFKRYYNLKFKEVNKYQHKRALALTARKLVRLVFRLLKDNRLYIPA

SEQ ID NO: 251261 - protein, 350 aa, unidentified
MVVVGADVHKRTHTFVAVDQAGRKLGEKVVAATTVGRHKALVWARVEFGNELVWGIEDCRHLSARLVRDLLSAGQQVVRVPPKLMARTRASARTRGKSDPIDALAVARAVLREPDLPVASHDAISRELKLLIDRREDLVAQRTSAINRLLWRVHELHPERAPKPRSLDLAKHRELLRAWLATQPGLVAELARDELADISRLTEAINALAKRITERVRVVSPALLALPGCAELTAAKLIGETAGVSRFKSESAFARHAGVAPIPVWSGNTTGRVRMTRSGNRQLNAALHRIAVTQVRLDGIGRAYYRKRRDAGASKTEALRCLKRRLARVVFHHLHTDHQTRNQPCQTAAA

SEQ ID NO: 251262 - protein, 352 aa, unidentified
MTVTIVETRLQARAITGGVDTHADMHVAAALDPIGGLLGVAEFPATPAGYAQLLGWLGGFGTVCLVGVEGTGSYGAGLARHIAAAGVRVVEVDRSDRQDRRRAGKSDPLDAVSAARAALSGRARGAPKGRDGQVEAIRALMVAKRSARSVRTQTINQARALIVTGPDELRARFARHTPADLVAELASLRPRPGSMIRYHTLLALRELGRRAQYLDDQLARLDQLIVPLVTARAPGLLALYGIGPDTAAMLLVAAGDHPERLRSEAAWAHLCATAPLSASSGKVTRYRLNPGGDRQANHALYRIVITRMSSHPPTRAYAGRRTNEGLSKKEIIRCLKRYVAREVYPHLRPPAG

SEQ ID NO: 251263 - protein, 348 aa, unidentified
MWIIGCDFHPSWQQVSFFDPGTGETGERKLVNGDGEAERFYRALPVPSLIGIEACGNSQWFVDMLQRLGHEVWIGDAAQIRASYVRQQKTDRRDAAHILQLLMEGRFPRLWTPSAEQRDLRQLLIHRHKLVEIRTRVKNGLQHLMLNRGVQKKHKLWSQAGQQALRELPLEGWAMRRRQDLLALLASLEAQIAPLDMAAKQAAEQHEQARLLMTQPGVGPITSLAFALTIGDATRFRRGKQVASYLGLIPREHSSGGRQKLGAISKQGNRFVRMLLVEAAQTVVRKDEGFRKQYQHRCHGMAKGVAKVAAARRLAVRLFWMMRTQTAYPEIVRIESSPRVALVGRHGD

SEQ ID NO: 251264 - protein, 355 aa, unidentified
MNVNVNHYIGFDVHKKSISYCVKLADGRIVEEGKLAARRVTLCQWASKRAEPWHGAMEATLFSGWIYDTLKPFAAKLEMGHPGRMKAIGASKKKNDKLDARTICDLIRANLLPACWVAPSEMRELRRILRYRNLVLEQAVRMKNKISGLLMESGVEYNKKRLHGEKYFHELLENLAAEVPESVKDLLKLSRGWLESFQATQQQLLVKLQKHPILMERLKRLKSIRSVGEVTALTWALEIGDPHRFSSIGDAVSYCGLTSALVESADKQKRGPISKQRNAHLQTVLIEAAKVAPRWNPQLAELHQAEIDSGNHRNRATLEVARKLVAYLLAVDKSGKDFAVRTPSAKPEGEVKPAA

SEQ ID NO: 251265 - protein, 410 aa, unidentified
MSVLEVALDPSTVIVAVDPGKAFNRVWISDGSGLLAGPMSLSVSREGIAQLELALNKHGRDAPVIAIEATGSLHRPWVAELERRHPGCVRLFAPSETKSARTQLGSGRFKTDDRDCAALTYMARQGGGRRYGQESPVEALRAAVRHRRGLVADRKVAQQRLHDQLNALCPGLSAPAGHGRSLALETPTGLAVLACAAVFAGRPPQLRSLMRRAPGRLTTSTAQYWLQRWRGCLPPPADADQRAHRLGRDLARYRRLRTDIDALDVEVVALLAETDGQILTTLPGVASVRAAAFAAHSLPIQRFPDAEHLYSATGLAPALYQSATLNRRGRISRQGLAEHRDALMGIAWGLSQCSPSFIERNAELHARGMAPIQARVALARHACRLSYRLLRTQQPFDEQRYRQGRLSGER

SEQ ID NO: 251266 - protein, 354 aa, unidentified
MKYFVGMDVSLEETAICVVDETGQMIKEARTTSEPDALHALLASFNLPFERVGLEACSLTAWLHGELTSAGWPAICIESRHAKAAMGAMPNKTDRNDARAIAQIMRTGWFKAVHVKTPTCRSWRSLLVARRAVLNQMRTIENVVRAILRETGLKLGTPARKDFIVRAREFVAGEKGLAMMIDPLLEILATMLREFTRLTKQVLVIVRDEPVCRRLMSTPGVGPMTALAFRATIDQPERFKKSRDVGAHLGLTPRRYQSGETDIQGRISRCGDELARTALYEAAHSLLIRSKKWSALRAWGMKIAKRRGMARARVAVARKLATILHRMWVDNTEFRFGREQAANPTIKAITVVAA

SEQ ID NO: 251267 - protein, 344 aa, unidentified
MDHYAGIDVSLEQSSVCVVDATGKIVREAKVANEPDALVRFFADLGFPVVRIGLEAGPLSQWLHAGLNEAGLATVLLETRHVKAALSAMVVKTDRKDARGIAQLLRMGWFRPVHCKSADAQEVRALLVGRKLLQSKLRDVEFSIRGLLRGFGLKVGEVSKGRFAARVQELIEGHAMLEEVIGAMLTARAGLHSEFMRLHRKMLAIVRTDEVCRRLMTVPGVGPLVAVTFTATVDDPARFTSSKAVGAHFGLTPKKYQSGETDVTGGVSKVGDAMVRTALYEAANVLLSRTTRFSTLKRWALEVAKRRGVKRAKVALARKLATVLHRIWVDGSEFRWGKEAPVAA

SEQ ID NO: 251268 - protein, 356 aa, unidentified
MSEGSWVGLDVHARSVVAGVIDQGSGEVRSLRLPPGGEATVAWLLTLPVPVRVVYEAGPTGYRLARACAEAGISCVVAAPSRIRAATDRVKTDRRDAERLARLLRLGEITPTRVPAPEEEAARDLVRAREDARGDLMRARHRLSKLLLRHGLVYDATAWTRTHDAWLRRQRFHGGPLAIVFDECYGRMLDAKSRRDALDKAITELAATPPYVDVVERPVCLRGVSTLTAFALTVELGDWTRFRPESLGPFLGLTPSEHSSGERRRQGGITKTGNSNVRRLLIEAAWHQRRPPRRSVTLERRRTGKPQVVQAQAERSARRLHGRWHALEARGKPRSIVVVAVARELAGHCWALATME

SEQ ID NO: 251269 - protein, 320 aa, unidentified
MSAEPVFVGIDVAKASLEIAVHQSAKRWSVPHTDAGVATLVARLRALAPTLIVLEATGGLERPGVAALAAASLPVAVVNPRQVRDFAKATGQLAKTDAIDAAVLAHFAAAVRPPVRPLPDAATQHLAALVTRRRQLVEMLTAERNRLATAPKALRKELAAHIRWLERRLAGLDTDLDQAIRTSACWRAHEDLLRSVPGVGPIVARTLLAELPELGTLSHKAIATLVGLAPLKRDSGLFRGQRMIWGGRATVRAVLYMGALAGVRFNPVLRAFYERLRAAGKLPKVALTACMHKLLTILNAMAKHQQRWIPNYADTRQECR

SEQ ID NO: 251270 - protein, 358 aa, unidentified
MKTHRVQDFVIKGKEIFVGLEDSKRTWKIAVRCERMLIHEVSMEARYPALIGYLRNKFPECAIHLIYEAGFKGFDLYDRLTGEGIDCVVIPPHMVTEPKVNRVKTDKRDAKRLAYVLENQDYKDACHVPDKERREDRQISRSLIAVQKDIIRTRNRIRGFLKYYGIEVPFAGKENWGRKEFRALREMPISEPLGIGLKVFLSQLEQLWDHQTTLRDYLRDLCRKERYSKAFGIAKSFPGIGWFTAIRLVLELGEDLSRFASGKKIASFVGLTSSEYSTGETERKGRITGMGSGFIRSFLIESSWAGIRKDPALLSKFMRVWRTSGMKKKAIVAVARVLIVRLRACILSGRPYMIGAVR

SEQ ID NO: 251271 - protein, 417 aa, unidentified
MQVESDEPELIERVAALDVGKAEVVCCVRIPGPGGQRMQEVRTVSTMTAALLGLGDWMAGLGVTRVVMEATSDYWRPPFYLLEDRFETWLVNAKDVKHLPGRPKTDRLDAVWLCKVAERQMLRPSFVPPPAIRELRDLTRYRVDLLAERTAEKQRVEKLLEDALVKLSAVVSDLFGVSGRAMMAALIAGERDPAVLANLARGSLRSKTSRLTEALTGRFTDHHAFLLTQMLRRVDAITADVATVQERIDVQIAPFAQAVARLDEIPGVGATAQAILAEVGLDMTRFPTPAHLTSWARFAPGVSESAGRKKGNAGTGHGNRYLARVLGEAAIGAARTDTFLGERYRRIARRRGKNRAIVAVGRSILVIVWALLSDDDAAFVDLGPDHYAARTNPERKVRQHIRELQALGYSVTLNPAA

SEQ ID NO: 251272 - protein, 388 aa, unidentified
MSGGTSRPVPTVPDAPDGGIVGGVDTHKDEHAAAALDALGRVRGRAAFPATPDGYGRLLDWLAGFGPVRRVGVEGTSAWGAGLTRFLRAAGVEVLEVSRPNRQRRRRAGKSDPADAEAAARAVLAGEALGVPKAQDGPVEAIRALRVARRSAEHARTQAANQLRSLLDTAPADLREALRGRTLRRIVDAARRFRPAAALATPAAATKAALRSLARRWLALTEEMAALDQQLAQLVRATAPSRLLDEVGVGPDVAGALLVAAGDNPHRLHTEASFAALCGTSPRDASSGRQRRHRLNRGGNREANAALWRIVMVRLRWSHPATQAYVDRRVGEGKTPREAIRCLMRYLARRVWRLLTQAPPAPLHAWPLAPPNHVSAGDHAGALTHEYV

SEQ ID NO: 251273 - protein, 426 aa, unidentified
MKKYTQNDKIEQVTEKTLVVGVDIGSVKQYARAFDYRGREIDHVYRFMDCRDGYELFLDWMQGLQSANGMDRIIVGAEPTGHYWFGLRDFLDAAGIQLVLVNPLHVCKSKELDDNNQTKNDQKDPKVIARLVMEGRYSIPYIPHGVYAELRGMWILRQRVVDEEVKLRNRIARWFKIYFPEYTQAYSSFAAKSSIALLKAACLPEDILQLGADGIVELWRAMKLRAVGKKKAESLLAAAARSTGQKDGADAARMEMEMLLEDWGVLQKRHEKIDAKLRELCEQIPESKNLLAIKGIGLTTVAGFLAEVGDIQRFDSPKQIVKLAGLALRENSSGKHKGKTTISKRGRARLRRLLFAGAMPLLATNDAFRSLHVYYTTRQQNPLKKKQSVIAICCKLVRIFYALLTKGTAFDSRKMLGDIHRPPLAA

SEQ ID NO: 251274 - protein, 347 aa, unidentified
METAPDTVGYRLFVGVDIAAATAMAAWHAAGGKVGRPVQIAQSPEGHAELHEKLRASGVPAGETLVVMEATGSYWITLATTLAQWGYAVSVINPSQAHDFAKALLKRAKTDAIDAQTLAQLAALLQPERWTPPPAIYMELQQRLAQRDSLLDLRQQVRNQLHALEQGPVVIAVVRQRMETPIATLTVQIKEVEKEITPVLAQDAAWAKAATLLQTIIGVGLVTAAWLVTSTLNFSVCPSPDAAAAYAGLVPYVRESGTSVRGKQAISRSGNKRLRRTLYLATLAATRWNPQIKAFYTRLRAAGKPAKVARCAAARKLLHLAWAVVTKDRAYDPAYPQGSTAQSASAA

SEQ ID NO: 251275 - protein, 445 aa, unidentified
MHYKRLLTLIDSVSSYLSVGLDVGADFTWMSIALPNGSFIGKPFKILHSDPKSRDLAVAKIKEAQETYSLKSRCFLESTGIYHIPLLCFLRDKGFDCSVINPIITKNSTNINIRKLHNDKFDSKKAALVGLNVSLKTSILPDDSVVDLRNLVRDYYYFKDLQSAVALKLTAELKVSFPAYAKVFSKITTQSSLKLLSAYPLAKDMLAASKDDIVEIIRSTARFGEAYALRKYNAIIAAAQDAAVFGRALPSNAVRIRLYIDTYQEYQKHLDALLKALHETVDRLQDTLVYDQICLLQSLRGIGFLSAVVLIAEMGDFKLFSSPKKLYAYFGLDPAVKQSGKLNGDKVHMSKRGSSLARRVLHMAALNNVKVDKRSGTPVNPVVYDYYARKCSGKKKPVAMGAVMHKICNIIFAMLRDNKPFEVIPPEEHCRRFAAEHPDKIRKAA

SEQ ID NO: 251276 - protein, 395 aa, unidentified
MFIVGIDIAKRSHEAIIIAEDGQVVRKAFSFRNNCTGYNLLLEQVRRLTLVKSQIVFAMESTAHYWLALYARLLKDGYAVMVLNPIQSHSLRELYIRKAKTDARDSLIIADLVRFGRCKASNVPQDKILALRELCRSRAYLVDMAADLKRKLIALLDRIFPEYESLFDSVFSKASIAVLSKYSTPQKVKNANLRKLTDILMESSNGHFGEWKAHQLKEAACSSFGINDSGGVYSTLLGMFLEQILSLTAQADSLEKQISVFFQEFNNPLTSIPGVGTVLAATILSEIGDITRFSSAAKLLAYAGLDPSVKQSGEFKSNQNRMSKRGSPYLRRAIWLASTVAVHRDPMFQTYYEKKISEGLHYMNVIGHVSRKMTAVIFAVLRDGQPYQPILQSAG

SEQ ID NO: 251277 - protein, 344 aa, unidentified
MEITAVGFDIAKSVFQVHGADAHGKVVTRKKLKRAQVLAYFATLPPCLVGMEACGGAHYWARKLQQLGHSVRLIAPQYVKAYVKTNKNDAIDAEAIWEALTRPNMRFAAIKSVEQQSVLSLHRARSALMKSRVAQANQIRGLLAEFGIVVPQGICKVFSEVPRLIDEAVDGDLPQPMRALMQRLMDHLRHLERQVGELETQIQLWHRQNAASKKIEAIPGVGVLSASAFVATVGDPKNFHDARQVSAWMGLVPRQRSSGGKQQLLGISKHGEVYLRTLFIHGARSVVKAAQRKTQPDERWRWLLELVKRRGVNIAAVALANKNARIAWALLAHEREFRADYATA

SEQ ID NO: 251278 - protein, 410 aa, unidentified
MEVLYPHCAGLDVHKETVVACVRHMAEGKVTTHVKTFKTTTQELMALSDWLAGEGATHIAMEATGVYWKPVWHILGDGEFRLVLANAAHVKNVPGRKTDVNDAAWLADLMAHGLIKASFVPDEPTQQMRDLLRTRKQLVRERASHIQRVQKALEDANIKLDCVVTDILGLSGRRILEALIAGQTMPQALAALAHRRIHASIDQLQAALRGRVTPHHRFLLQLHLDQIDALAAAIARIDEEVCANVAPFRVAIEQLSAIPGFSPIAAQVLVSEIGMDMSRFETAAHLISWAGLCPRNDQSAGKRRSTRLKKGAPWLKTVLVQCAWAASRTKGSYFQAQFHHIRARRGSKKAVCAVAASLLTTAYHMLKDGTLYQDLGANHFHQNDSARQVIRLINRLDKLGFSVQITPKAA

SEQ ID NO: 251279 - protein, 354 aa, unidentified
MAEALKSSTAVVGIDIGKNSFHVVGLDKSGAIVLRQKWSRGQVEARFANMPPCLIGMEACVGAHHLSRGLQKLGHAARLMPARYVRPYSKGQKNDFRDAEAIVEAVQRPTMKFVATKTADQLDLQGLLRVRERLVSQRTGIINQIRAFLLERGVAVRQGLRFLRNELPSILAAPSDALSPRIVRILEYLAGDWRRLDERVEGLSKEIEAIARRDAGCDRLISVPGIGPIISSAIVAAIGAGDVFAKGRDFAAWLGLVPRQISTGDRTILGKISKRGNRYLRVLFVQAAWVVLIKPKSWERHGLKSWIEAARKRLHHNVLAIALANKLARIAWSVLAHGRSFEASKLAAAVTQPV

SEQ ID NO: 251280 - protein, 307 aa, unidentified
MYVGIDVSQTYLDVAISGRRDVQRLRNDDAGLALLKDQLLELAPENIVMEASGGFERPALEALQAAALPVAVVNPRQVRDFARSLGRLAKTDAIDAQVLARFAEVLKPEPARLSEEAEEQLRALELRRRQLVEMIVAEKNRMRMAPRTAKNIAKHVRWLEGEVKQIEKELHSLVDSDPGLKSKADILQSVPGIGPALTFNLLGNLPELGQLNRKEIAALVGVAPLNWDSGKLRGKRAIWGGREHVRAALYMGALVATRRNPVIQALYQRLCAAGKPKKVALVAAMRKLLIIINCMVKNQSTWLADAR

SEQ ID NO: 251281 - protein, 366 aa, unidentified
MEVTTIGIDLAKSVFAVSGADSRGRVVIRRQLRRAQVLGFMRGLPRCVVGMEATGGAQYWARQFTALGHAVRLMSPALVMPYRKGNKTDRNDADAILEAVSRPSMRFVMVKSVAQQDLLALHKVRAQLVKSRTALCNQLRGLLRERGVAVRMGVAALKRSLPAALADESSELSGEMRELLSEMSQWLGTLEQRIASCEARITQKFKHDERCVRLAEVPGVGPLTATALVAAVGNAQRFKNGRELSAYLGLVPRQHSSGGKTVLLGITKRGDRYLRTLLIHGARSALRQCKLKGDARSDWARRISAARGPNVAAVAMANKNARILWALLSRGDRYRSSRVLTRAVLRPGSPPPVKRARGAKLRVAKD

SEQ ID NO: 251282 - protein, 345 aa, unidentified
MEQLIRIGMDTSKRVFQLHGVNAAEDVVLRKKLRRKEMVALFADLAPSVVGIEACGGAHHWARLLRSFGHEVTLLPPEYVKAYRKRGKNDAADAAALCEAMSRPTMRFVPVKSAEAQAALMLAGLRERLVRQRTQLSNAIRGYAAEFGHVAAKGLDKIEPLLARLAADEDLPELAHELFALHAKEYAELQAKLAAIEAKLMAWHRTNACSQRLDKIPGIGPISAAMLTMKVPQPQLFRSGRDFAAWIGLTPKNHSTAGKTRLGVITRAGDETLRSLLVVGATAVIQQVQRGRGRPSPWLAALLKRKPPKLVAVALANKLARIAWKLMVSGESYRAAPIPAMPVAA

SEQ ID NO: 251283 - protein, 409 aa, unidentified
MPEEKPAPQRFFGLDIHKQYLVAMAVDAAGEKVYGPRRVAWANLESWRSKTLSPQDAVVIEMTTNTWEVYDELSPYVHSVTVVHPPHVRMVTAPQVMNDRIAAFNLAVLLSKGMLKGIWIPPQEVRELRALLAQRNKMTRLATQAKNRLHAVLHRRHFPLCDGNPFLPERRSWWLNLPLSAAEKMRLTCDLETLAFAGQQKGALEAYLNQLALQEPRLTLLLQLPGFGVLNALTVLAAIGDIVRFPDAKHLVGYAGLGSRIHDSGQTTRTGKITKAGRKDLRTALVEAAQAAANFHPYWKAELARLEPSLGHNKTIVAIARKLLIAVWHVLSFQVADIHAEPKRIARKFLQVAYQLRIAKRPDGLSAAAAVRMQLDRLKLGQELSAIPRGTKKKPIPLPPSSQPLSTAR

SEQ ID NO: 251284 - protein, 346 aa, unidentified
MLYAGLDLSRQRLDVHVMDEDGTAVEVTAVRPDADALRTLAALVSRHRQPVIGVIESMNGARFIHDQLERWDWDVEVADAVKVKGLAPLAAKTDKIDAKVLAELARRDLVPGIWLPDPSVREARERARFRLHLVRHRVALKNRIHSTLIAFGHPVPVSDLFSQGGRELLERLDIPEPWTTTLTTSLHMVDDLEREIRGCEAELRRLGADHPYVPHLMTVPGIGWVLGYTIAAELGDIGRFSSPKKLVGYTGLCPRVYQSGEQDRRGSLAKNGPKHLRWALVEAASTAARSPFFRERYLKTKRRLGRQRGPSIARVELARELTTAIWHMLTKDEPFAPAGPACPLAA

SEQ ID NO: 251285 - protein, 339 aa, unidentified
MMIGVDLAKNSFQVHGATMNGQVKFRRKLSRAQFLSFMAAQPPAIVVMEACPGAHHWARELLALGHEAKLIAPIYVKPFVKRQKNDAADAEAIVEAAQRPGKRFVEPKGPEQQARALLFRTREQLVHQRTELVNALRSYLYEFGYALPIGIASLRRIEAIIEDAATDLPEMVREICRDLRQQIAEKTVRIDALMKRIKSTAEDTETARRLQTMPGVGPVTSLAVEAFAPPLETFRCGRDFAAWLGLVPRQNSTGGKQRLGRVTKAGQADIRRLLIVGAMSRLTWLGRKSIREGSWLARMLERKPKMLVAIALANKMARAIWAMLTRNEDYRDPLPVAAT

SEQ ID NO: 251286 - protein, 355 aa, unidentified
MNDAKYIGMDVHTATISAAVRDSSGNLVMEATLETKAETILEFVHGLRGSLHVSFEEGTCAAWLHDLLKPHVTEVLVCDSRKNALLRVGNKNDREDARKLSELLFLNKLHPVYHGETGIRTLKELARSYLTLTRDLTRVMNRLKAIYRGWGIACAGRQVYAPRYRAEWLAKITEVGVRRRAEIYYQQFDALAALRQEVRRELLAESRKHPAMRLLRQIPSIGPIRAALLIALMQTPHRFRTKRQLWAYCGLALRTYDSGEYHFVGGQLKRSKKAVTIRGLNKNHNHDLKNIFKGAATRAAATAGPLQNFYEARIANGMKPPMARLTLARKIAAITLLVWKKGVRFDAEQLKQQAA

SEQ ID NO: 251287 - protein, 509 aa, unidentified
MAKAAKATRQKAIPKKESVSEDRSTPVAAESKAAKPEGKAKPGDRRRRTRKREAIENRPVLEPNAAGIDIGAREVYVAVPPERDEQPVRIFETFTADLQELANWLKACGITTVAMESTGVYWIPVYEILEAHGIRACVVNARHMKNVPGRRTDWHECQWIQFLHAVGLLRPAFRPEAEVCALRAVIRHRGELVQMAAKHVQHMHKALTQMNLQIQHVITDLTGLTGLAIVDAILKGERDPSRLAQLRDPRVKASPEIIEKSLVGHWQPEHLFTLQQSRRLYAGYQREIGECDAEIERLAGTFQPRVDPERKPLPPDQKKRNRNYAKSRKRRARPHSSTREFDLRTEVYKLYGVDVTQIPGLEFLALQLFSEVGRDMSRWPSAACFISWLALCPDNDISGGRVLWRGKRRVHNRAGQLFRMAAYALDRSATPMGAYLRRMKAKLGPQPAHTATAHKIALVFYTMIKNQTEYDETIWEQRDAQRRQKHITGLKRQAQRLGYKLTPIEEQAA

SEQ ID NO: 251288 - protein, 312 aa, unidentified
MKNTTIAIDLAKSVFEVGVSDRPGHVAENHRLSRAQIAAFMADQPASTVVMEACSSAHYWGRRFQSFGHDVKLLPPLYVRPYVQRGKTDRADVKGMLEAWRNSDIRPVPVKSESQQQLTSLHRVRSCWMEARTKRINSARGLLREFGTVFPLGAGALANRVQERIADANSELPMPVRELLHQLVLEIGELEQRIESVEKQLEALAAQTPVVARLRTIPGIGLLTATAMVGFVGDVQRFPSGRHFACYLGLTPREHSSGSRHRLGRISKQGDVYLRTLLIHGARAVLVAAQSKSSPDRFRAWALQLQRRSGNN

SEQ ID NO: 251289 - protein, 320 aa, unidentified
MMAQNDLAVVGIDVAKDKVDVCIRALALRQTCPNTAQGRRKLVVLLRRHQVGKAVMEASGGYEREWRKVLHDAGIAVRIVDPKRVRHFAQSAGRLAKNDTIDAEMIAWFAETFSETPGQTHDAAQEELAALVKARLALVELKIRLQSQSAHAAPRPVQKAQARVLKSLAAEIEKLELAIAAKVKATPHLAERAEIIESVPGFAETTSAILVAGMPELGQVSDKIAAALVGIAPYDDDSGKRRGERHIKGGRRWVRNAIYMPCLGAATQNNPVTKAFYRRLIAKGKEPKVALVACMRKLICILNVMIARRQKWDAARYAPA

SEQ ID NO: 251290 - protein, 409 aa, unidentified
MYFVGIDIAKKTHQAAIICSDGKLIGKPFKFPNTVDGFNLFLEKLTAVNTDLSQFEIGMEATGHYWLNLYTWLSDKSFRLHVINPLQSDALRNLYIRKTKTDSVDAKIIADVIRIGQYSETQLADENIIALRDLNRQRFYLVDMAADLKRKIIAMMDRIFPEYQDFFSDMFGKTSVQIMKEYTSPEQILQIPTERLTQLLKKASRGRFTETKAKELKALAANSFAALLSSEMTTLLIRQMLEQLDLLEKQIADIEHIIVAQFTQFNTKLTTIPGIGTTLGATILSEIGDINRFDKPKQLIAYAGMDPSVKQSGNFVGTQSHMSKRGSPYLRRALWLAAVVAVSHNDLFKYLFQQKMNAGKTYAQAMGYICHKLLNTVFAILKTGEEYKPVYPPQIDVSKFADQPINSQL

SEQ ID NO: 251291 - protein, 350 aa, unidentified
MIVGIDVHKDTHAAALIDDRGGLIDALSTANSPGGYRQLIDWLVDQQAASAVIGVESPGSYGRCLVTALAGAGFTVLQVPAWKTHRERHRRGPGKTDSGDALSIAKVVLTDRDALGPAQEPELVRALGMLELQRRRFVHDRTQAIQRLRSDWTQLDPVAEAAVIRCDRQRELRKLKRITLGESLVQRTAARCIRELARDIDDLNHRIADLDTEIADLLAEHGSPLEDLQGVGNNLAAVIVAQAGDVRRFRDAGAFARFCGAAPIPCGSGRTAGRHRLHRGGNRQLNSALYRIAIVQQRHHPQAKAFLERKIREGKTPREARRALKRHLANVLYRRLTAWADATPAMNLLT

SEQ ID NO: 251292 - protein, 372 aa, unidentified
MEEVITWVGIDAHKKSLQFAVLKGGEFQQQFEIRNEAKAVRRVARKLIRQADGEVRCCYEAGPTGYALKRELEAAAPELVCEVIAPSLIPVKSGERIKTDRRDARKLAEYLSAGLLTQVHPPSEHEESVRDLTRCRRALKTDLLRARHRLSKLLLRRGIRYTAGKMAWTKKHQQWLGTLRFEHSVDQVVFDQYRLGIEQLLERIAHVDIELKRVSESEPYRDAVGRLRCFRGIDVVAAMTLVSEIHDFRRFDSPLQLMSYLGLTPGEHSSGESRRQGGITKTGNTHARRLLVEISWHYRHRASVGKGLRERRVGQPASAIATADKAQHRLCRRYQRLIERGKPSQKATVAVARELVGFIWAVMRESEPHRAA

SEQ ID NO: 251293 - protein, 412 aa, unidentified
METVIERPGALDVHKEQVTACVRTPAGGGGGRREEHVAEFKTTVQGLLGLRDWLTALGVTHVVMEASGVYWKPPWAILEDEFQCMLVNARHVKQVPGRKTDVSDAAWLCQLLEAGLLNASFVPPKPIRTLRNLTRYRKAQIAERQREANRLHKILEDTGIKLDCVATNILGASGRAMLDALVQGTTDPEVLADLARGRLRAKIPALREALEGRFDEEHALVVGAILAHIDFLDEQITLLSGAIGEKIAPFEEAVVLLCTIPGVQRRTAEVMIAEIGIDMSVFPTAGHLASWAGLCPGNDQSAGKRRSGHTRKGSKWLSIALTEAAQANTRSRGTYLSAQYRRLKPRRGHRKAIGALRHSIIVSAWHMLQTGEVYREAGSDYYTRLNPEKHVRRLITQLERLGHTVTLQEAAA

SEQ ID NO: 251294 - protein, 322 aa, unidentified
MKVEYPFSQFVGVDVSKAKLDFALDGIRQTRSIDNAPEQIVREFIGQIKNPESTIVVLEATGGYEELLVTLLHEHNIALAVVNPRRVRDFAAGIGRDAKTDPIDAQVLAFYGQVVKPAAQLAKSEEDRKLKALVERRRQLLDLINQENNRLKQTADREIREYIQQSLETLKTQVKTIDDRLANCVQANTAHARKVEILDSVKGLGPVAISTFLAELPELGELNRGEIAKLVGVAPMNKDSGQASGRRRTFGGRSYVRRVLYMATLVATRFNPRIKTFYQRLLADGKPKKVALTAAMRKLLTILNTLIKNDELWNAEPNKASV

SEQ ID NO: 251295 - protein, 341 aa, unidentified
MQPYFVGLDVHKQVIAYCVKTSAGEIVAEGKIAATRAALNEWVRTLPGPWHGGMEATMFSHWIYRHLEPHAARLEMGHAATMKAISAGKKKSDKIDARTIADLLRCQLFPSCFVISPELGALRQQLRFRRLVVEETVMFKNKTAGLLMGAGVEYERRRLHGKRYFKELVKDNEWIDEQMRPLLAFNREQIETLQGMNERLIRMLERHPRLQARVKALQVIDGVGPVTGLTWALETGTPERFGSIKAAMSYCGLTSALRESAGQQKRGPLSKQRNRHLQSVLIEAAKMAPMLNDKLKEVYTKAKEKEGHRNRATLAVARKLVAYLLAADRAFLAKERERVAA

SEQ ID NO: 251296 - protein, 385 aa, unidentified
MQKLNDLSRSLTPLKPDGTLIAVIEMSLSNWLVAGIVPGVERQPLKKLEADESSLLKLLNRWREEAKKSGHRIERIAVAFEAGRDGFWLARWLRARDIEAHIIHASSVAVSREHRRAKTDRLDTELLKRAFLGWLRGERNHCKMVAIPTIKDEDAKRPNRERESLVGEQSRIVNRMKAALIRLGIRGFNPKLKKAAERLDGLRTPEGEPIPPNTLAELRRDMVRRRLISDQIRQIEDARLERLKQAPSDGPHAMVRLLARVIGVGVETADMLVQEVLSRTMRDRRAVARYAGLTGSPDESGRKRREKGLARSGNARVRRGMIQLAWRFLMFQKDSTLAQWFRARTESARGTRKTMIVALARKLLIALWRLVREGVVPDGVVLRPA

SEQ ID NO: 251297 - protein, 315 aa, unidentified
MDRTASQACFVGIDVGKADVDVAILPLGEALRVPRNGAALEQLAARLRELAPSLIVLEATGGFERVVLATLAGAGLPVVMVNPRQIRDFARAAGRLAKTDRLDAQIIARFAEAVRPEVRPLPDQAAQDFAELAARRRQLVEMISAEGMRAHQAVHKKVRRQLDAHLLWLNQELSALDADLDEAVRGSPLWVERAELLTSVPCVGPAVARTLIADLPELGSLDRRQIAALAGVAPVAHDSGKHHGARHIRGGRTTVRAMLYMAAWVGIRCNPVIKAYYARLTAAGKPRKVALVACMHKLLTILNAMVRTNTAWKTA

SEQ ID NO: 251298 - protein, 413 aa, unidentified
MNEGYRRCCGMDIHKDTIVVCALPPVGRDGQTIRKVYGTFRNDLIRMRVWLKQLKVTEIAMESTGVYWRPVWNVLDEEGFLLLLVNPVQVKALAGRKSDGRDARRIAEYLQDGRLDGSFVPSAEVRQLRMMLRHRISLLEQRNEVHNQIRDLFETANIKLSSVVTDLMGATGRGIVEALIAGEDSPDRLSWKVRGSLRKKEKLVKESLKGYFNDFHRSMLESHYKHYQFLTKEVAAFEGRIAKAMEPYASQVELLTSIPGIDRMVAWHLLAELGIDLKAFPDAAHCCSWAGMVPGENESAGKQKSNRCRKGNKTLRRVLTQAAWAVSHCKAGYLRAFFHRVKARRGWAKAIVATSHKILVVAFQVLKTNTPYVELGSDYFDRLNPARTARKLVQRLEALGLQVQLSPVVGANA

SEQ ID NO: 251299 - protein, 338 aa, unidentified
MEQVTTIGLDLAKSVFQVHGIDAAGEVLVRKQLRRADVLKFFGGLSPCLVGMEACATAHHWARELTKLGHMVRLMPPGYVKPYVKRGKTDAADAEAIAEAVSRPTMRFVAVKTTDQQAVLMLHKVRDLLIRQRTMLINALRGHLAEFGIVSARGPGGVTAAIETLHETQDSLPELARVALHGLIDQLRIVRDEVVKVEKRIVAWHRASDVSRRLATIPGIGPITASAIAAAVPDASLFRSGRQFAAWLGLTPRAHSSGGKERRVGISKQGDGYIRRLLVIGATAVIRLARQGNASKAWAAKLLERKPARLVSVALANKTARIAWAVLARNQSYVAPAV

SEQ ID NO: 251300 - protein, 335 aa, unidentified
MKVFYLGVDVSKKKLDLCLRSNGKDILYDVIPNDLSSIKSWLTRTFEKFFLSEDSLVVCAEHTGQYTYPLVCATKSIGVYLCLEDAAKIKYCYGIPRGKNDKIDACRIAMYAERYNDCLQPYTASELIIQKLKNLSTERSMLVADRAKYQSQLKDQVDYMEHSIYIAKCNRVEGIINTFTDYIAQIDLEIKELINQAPVIAHQMDLLMSVDGVGERVALKMIMETDAFTSFTDPRKFCCHAGVVPFVYVSGSSQRSKNRVSNRADKSIKHLLHMAALSVSQVKNSPLKKYYDRKVEEGKNKMSVLNAVRAKLVTIMFAVIRADAFFSRNYQNSLA

SEQ ID NO: 251301 - protein, 433 aa, unidentified
MHEAEDEPLFAERAAGVDIAKAGIEVTVRVPSETRRGGRQQDTRSFRTTRKDLLALADWLRVWGVAKIGMESTGDYWKPVLFLLESEGFDCVLYHAAQVKALPGRPKTDKLDSAWLAKITERGALPGCFVPPEEIRRLRTHTRYRRHLTQARTAEKSRVEKLLEDAHLKLSSVISDIHGVSGRAMLEAIAAGERNPGTLAQLARGTMRGKIARLVEALDCSFVTEEHAAVLTMMLSTIDYYTAQIGELTAKIAVLCQPYEHQIAQLDAVPGTGVITGQDIIAEIGTDMTVFPTAAHLVSWAKWCPQVAQSGGRRKGANASGRGNRYLSAALGEAAVNAGRTQTFPGAKYRRLVRRMPKKKALVATGNSLLAIYYALLSDPAAAYTDLGADYYERRANIRRQARNHVRGLERLGYKVTIEPADPATGATAEPAA

SEQ ID NO: 251302 - protein, 438 aa, unidentified
MSNKVIFNLDELFISVGIDVGADFSWMSIALPNQQFVGKPYKILHNSIDSLTTAVSKIKEAEELYSLESRIFLESTGIYHYPLFCYLRDKGFNCSVINPIITKNSTNINIRKVHNDCFDSKKAALVGLKPDLKVSLMPSDLALNCRNLCREYYDLMDNRSAYVNKLQGELRMAFPQYLGIFSKVTINTSLALLETYTSPSAFINADKQEILDTIRSTARFGLTYAQNKYNAIIQAANEASEFGYIIDSNIKRIRLYISFIRKYDEEINNILDALHELVDANEDTDFVKQIHLIETFKGAGFLSAVSLMGEIGDFSAFGKPKQLFAYFGLDPAVKQSGKFEGTKVQMSKRGSAIARRVIHTLTLQSISTSRTGEAKNPVLRKYYLKKCESKPKLVAMGAVSHKVCNMIFAILRDNKPFVIITPQEHNKQYNAAKCDLVA

SEQ ID NO: 251303 - protein, 346 aa, unidentified
MHLNAAGIDVGATEHWVAVPEDRDEEPVRRFGAFTAALYVLAEWLRQCQIETVVMESTGVYWIALFEVLEERGCDVKLVDAHDARQVPGRKTDVKDCQWLQELHTYGLLRGAFRPEDQICVLRSSLRQRSMLVAMASRAVQHMQKALEQMNLKLPEVVSDMNGKTGMEIIHAILAGERDPQRLASHRDRRCTHDQATIAKALEGHWRAEHLFALQQALEQYEFLQQQLQACETQIEGCLQTFVTHVEVAPPQPTPARQRRARPRQAPSFDVHGYLHAMTGVDLTQIDGIDALTALKVSSEIGLDMTRWPTGKHCASWLGLCPGNKLSGGKRYRMRSKPTANRAASA

SEQ ID NO: 251304 - protein, 421 aa, unidentified
MSKLIERCAGIDIGKRFLMCCVMTGAAHEESRSETRRFDTTVPCLERLRNWLNEERVTDVVMESTGSYWVPVFNLLEGHVTVVLANPEEVKNRKGHKTDRKDAEHLADLLRHNHVKPSYIPAQPVRQLRDLTRRRVQLTQDATRERNRVQKLLEQVNVKIGSVLTDVFGVSGLHMLLALLNGRTAPEEIAGLARGSAKRKTPQLIEAIEGNRMSDHVRFLIRGCLRHLACLEEEVEELDAEILRRMQLSTFQKAFTLLQTIPGVGQLSAATILAETGPDLDSFPTIEQMASWAGLCPGNRESAGIQKGPQTTHGNPYLCTALVQCAWAATRKRDSVFRSRFQRLAPRRGEKRAIIAVAHHMLVILYCMLKRGVPFLGAEHAPKQRRRERRAHHHLRCLRRLGFSVDIRLSSESTPPDTISR

SEQ ID NO: 251305 - protein, 365 aa, unidentified
MNATAALPVVGVDLAKSVFQLAIADGNWRIVEQQRLSRTQFERWFANRAVGLVVMEACGSAHYWARWLNALGIEVRLLPAPYVRAYVKRNKTDAADACALLEAARCAEITPVRVKSVEQQALQGLHRTRSLWMATRTSRINALRGFCREFGIVIAQGARLGVEQIGRVLADPRSAVPELIRQTMKLLVEEIRLLEARVSQLERELTLLARRSPACTTLLSIPGVGLLTATAMVAATSGNVSHFRNARHFASWFGLTPKEYSSGGTRRLGRISKRGDRYLRMLLTHGARSVLRVATTGAQAGRSLDPLRQWAVSVQGRSNHNKATCALANKLARICYATLRDQQPYGRPAPRPNKKIERTAFALAA

SEQ ID NO: 251306 - protein, 353 aa, unidentified
MKYTPVGVDIAKYLIQVHFINEHTGEVVDKQLRSRDFLEYFSNREPCLIGMEACGGSQLWARELTKLGHKVRLLQARFVKAFVMGNKNDVMDARAIWMAVQQPGKEIVVKTEEQQSVLILHRTRMQLVKFRTAQINALHGTFLEFGETIHKGRAAMEREFPVALERMKERLPPYLITVLENQYNRLNELDSLIEDIEKQLTSVAKQNETCKRLLDIPGVGPLIATAAVATMGEASAFKSGREFAAYVGLVPRQTGSGGKIRLLGISKRGDIYLRTLFIHGANVTNGAIVIHKSFSQPSQQIAFQHYCQSLEQIEDRILQLNQEISRLLPEWSLCNLVCQLQALKGVAQLTVMN

SEQ ID NO: 251307 - protein, 339 aa, unidentified
MKYIPVGVDIAKHLIQVHFINEHTGEVVDKQLRSRDFLTFFSNREPCLIGMEACGGSQYWARELEKLGHKVRLMQGRFVKAFVMGNKNDVMDARAIWMAVQQPGKEIAVKTEEQQSVLVLHRSRRQLVKFRTAQINALHGTLLEFGETIHKGRAAMDRELPAALERMRVKLPPYLIALLEDQYNRLSELDSLIDGIEKQLISVAKQNATCKRLVEIPGVGPLIATAAVATMGEASAFKSGREFAAYVGLVPKQTGSGGKVRLLGISKRGDTYLRTLFIHGARAAALLTKEPGPWITELKKRRPTSVAIVAMANKLARTVWAIAAHDRKYDKNHVSIRPY

SEQ ID NO: 251308 - protein, 438 aa, unidentified
MSRPGSGARFLEFLCTEPHADDAMEEEKMELMHRRCCGLDVHKETVVACLRLVADGKVTTEVRTFQTTTADLLRLSAWLAANECTHVAMEATGVYWKPVWHILDDGEFALLLANAAHVKNVPGRKTDVNDATWLAELLAHGLLRASFVPDTQTQEMRTLLRTRKQLVREQSSHVLRVQKTLEDANIKLDSVLSDVMGKSGRAMIEALIAGETNPTKLASLADRRVKGSQDELREALRGRVTKHHRFLLRLHLNQIDALAAAMATIDAQVEESLEPFRTAVELITSIPGIKNLSAHVIVSEIGIDMSRFPSAAHLISWACLCPRNDESAGKRRSNRVRKGAVWLKTTLVQCAWAAVKKKDSYLQAQFFRIRARRGQKKAILAVAASMLTAIYHMLKDGTLYQDLGRNYLDRRSTDQQKKRLVKRLADLGYAVALTPLAA

SEQ ID NO: 251309 - protein, 414 aa, unidentified
MEKQWNIVCGADIHKTFLIATILSRDGTKITKRFGMTSNDLLNFKNWVIENGCEQVAVESTGTYWVPIHTILEGSVGLIVGNAYKIKHTPGNKNDLADADWIAELCLNGMIEPSRIFPRAERDLRRLTRIREGYVNDMTREKNRIHHALDSCGIKLSSVLSDIFGKAGQTILNGLLEGRTIDDILKGINLKSIKATTDEIREAIKGSLDFTQILLIRGSLEQMEAIQSRIDEIRKEIKGRIADRKEDLKIAMSIPGVGFTSASTLLAEIGDVTDFKKPEQLAAWAGLVPSVYQSAGKLITGSITKHGSRHIRWILVQVARVIARGRNSKLKRFFLRVKSKKGSNVAVVALARKVLCILHHLLTNREIYQEKGINKKVKIDVRKEFSPHEMGLEEMIAYLVRAGYVVRKGSEGGG

SEQ ID NO: 251310 - protein, 392 aa, unidentified
MRINVGIDIAKEVHWVSAIDADGVIHIDRKLLNTPAAIAGLVEELKDLGPPVRVGLDVIGGIAGLAEAMLAEAGFVLVHVPGLAVNRARQGSVGGENKSDPRDARTIAEQVRTRTDLRAIEPGTELDIEIRLLVGRRRDLVQAQTQRLSRLHDLLVSIFPGLERSLDLTTKGPLHLLTKFVTPAELRAAGKKRLIRHLQAAGGLPKVEDLADRVLAAAAEQPIVLPAERMTARLIRELAAEALVSRAKLIDLDRELQALLDRHPDAALIRSLPGMGAVLTAELIAEAGSLSRFRSADALAAAAGIAPVLRQSGRTRFLRRPSGGNKGLKRVFYQSAFCSLAHDDSRSFYARKRCEGKRHHQAVIALARRRVNVLWAIVHNRTPFQSGFKTPA

SEQ ID NO: 251311 - protein, 343 aa, unidentified
MDHFAGLDVSVKETSVCVVDDTGGLVREVKVASEPEALLAVLANPTYHFKRIGLEAGPLSQWLFSALAEAGLPVICVETRHMRAVLQAQINKTDRNDARGMAQMMRAGLYRPVHVKTLRSQKLRMLLTHRKLLQSKAVAIENDLRGTLRNFGLKVGVVGKVRFEARIRELVENLPDLAVLVEPMLIVRRVLREQIGILHRRLLAIVRDDDVCRRLMTIPGVGPVVALTYRATVDVPARFKNSKAVGAVLGLTPSKYQSGEINRSGAISKCGDEMMRVMLYEAAQVMLTRTNKWSWLKAWAMKIARHRGMKKAIVALARRLAVIMHRIWVDGTEFQWTREAAVA

SEQ ID NO: 251312 - protein, 422 aa, unidentified
MSYCPVAGIDVSKRFSDMCILSPDNKIFAQEKIYHDETSINRANALLQKAERLFFSKPVIVMESTSHYHLILFQFFSEHGYDVIVVNPLQSNSMKDFSIRKRKTDRVDAFKLAMMYRTKTLRPSQIPQTATRALRQLCRHRAELLNDVSSYKNRLTALLDQTFPGYDKVFSDVGGVTSCTVLVRFPTPTILLMEEESELVEVIAAASKSSYSFAKKKAGLLISAAQKAQTLGIHSCADETLIVCTIQMLRTLSESVLQIETAIDDLLAQIKEMRNNVSLLQSIPGIGSHSAALLLGEIGDISLFKKPKQLAAYFGLDPTERQSGSFRGTKNKLSKRGSPYARAALHMGVVNSICKRGKDSAANPVLLSYYEKKCKNKPAKVAQAASMHKLVFIVFAVLRDQKPFELKTPEQHAVEQGFVKAA

SEQ ID NO: 251313 - protein, 383 aa, unidentified
MSATTRFTDPTLPEAPALYLALELSNRSWKLAFSTGHGQKPRFRNVPARDLDALTREIALARTRFGLPDSVPLISCFEAGRDGFWIHRFLVSQPGRHNIVVDSASIEVNRRRRRLKTDRIDARKLLSMLIRYHNGEFRVWSVVHVPSPQAEDARHLHRELLTLKSNRTRVTNRIKGLLAAQGLSVSSLGRGFLDKLDDLRLWDGSALYPQLRQRLEREWIHRCDISHRIRLIEKLQNQQLEASAPDPALELVRQLMTLKGIGLQSAWLFTFEFFAWRNFQNRREVGALAGFAPTPYQSGDDSFDQGISKAGSAITRAMAIQIAWGWLHFQPNSALTLWYQRRFASGGRRMRNIGIVAVARRLLIELWRFSETGVLPDGAITSS

SEQ ID NO: 251314 - protein, 365 aa, unidentified
MGVPTMAQARTFVGLDVHVSGTVAAVIDRDSGELRRRRLSGSASEVAEFVSGLSGPVRATYEAGPTGFALARRLEALGVDCLVCAPGLIPRGPSDRVKTDQRDAERLVRLLIAGELHRVEVPTLEAESLRDLVRAREDLRGDLMSARHRVSKLLLRHDMRFEGTERNWTLPHLRWLATVRFEQPGTQAAFDDYRGAVEALIVRRAELEREIAEQLPVSPWAQTARRLMCLRGIDTLTAAGLCAEIGDFTRFRHPEQLMSYLGVVPSEHSSGTRRRQGSITKSGSQHARRLLVEAAWHYRQPPRVSEPLRRRQAGADPKVVVLSWKTQRRLHRVWSRMEQRGKRRTIIAVAAARELAGFCWAVATD

SEQ ID NO: 251315 - protein, 316 aa, unidentified
MSQSERVIGIDVSKKLLDVAVVPENDTWSVDNDEEGIRTLIKDAKRLRPRLIVLEATGGLETAVVALLAAARLPVVVVNPRQVRDFAKSLGKLAKTDKIDALVLAHFGEATKPEIRSLKDQQAQQLSALVARRKQLVEMLTAEKNRLMTAPEPVDSDIKAHIAWLEQRLDDINKDLRKAIKASAVWRAKEKLLRTVPGVGPVLSVSLLAGLPELGKLNRKQIAALVGVAPFNRDSGKFRGRRSIWGGRAHVRAVLYMGTLTAIRFNPVISAFYQRLCAAGKAHKVALTACMRKLLTILNAMMKNHAPWQPYFRETA

SEQ ID NO: 251316 - protein, 366 aa, unidentified
MDAIYIGVDFHSRQQTICYLKTETGELVITELKHQDKERVRAFYQQFQEPVIVGLEASGYSPWFEAMLEALGREVWLGDATEIRRRARWRYKDDRRDAELIWDLMVHQEFPRLHQPSPQSRDILRMLRYRQKLIKVRTMTKNSLQAIAMQAGLAKGRQLFTAAGQAEFKAVAISPVLQYQRDHWCELLKPLNQELLETMKWFKAAAKGEVAIARLRTHPGIGLLTALCLQHTLQPVSRFRNQRKVVAYAGFDPMVRRSADSAIQLGISKAGSRMLRYLLVEAVHTAVRYDPDLDRFYKRVAERRGRPKAKVAAARKLLIRAYIMMRDEIDYAEFRRRAVAARLARRSQGPPSVPEVLIGQSASPGA

SEQ ID NO: 251317 - protein, 361 aa, unidentified
MENTIICGIDAHEKTLVTRIGVNQEAAETKRFSNTRSGRDALYGYLKKLSGEYAGGQMVMAYEASTLGYGIYDESVAAGIECHILAPGKMPSARKDRKKKTDERDAQRIFEIVRAYALAGNELPGIWIPDHQTRDDREVVRGRLDAAQKLTGLKCQVQTLLKRNGVVKPAEAGDSWTQRYRLWLKGLCIKPGAQIALQSLLRQIEGIEAEIKLLDQAVEQLAEGERYKAVAGALVRKVKGVGLLTAMVYVTELGDLSRFNNRKQVGSYLGLVPSSNESGEVADHKGHITREGSARVRKVLCQATWARVAHDKEEAVVYQRLVKKNPKHKKIAVVASMRRLGVLLWHIGLAAQKAAVQEQAA

SEQ ID NO: 251318 - protein, 394 aa, unidentified
MSATHGTDSTTATSPVLYVAFELSWTSWKLAFTVGAGQKPRLRSIPARDTDALLLEIHKAKHRFGLPEATPVISCYEAGRDGFWLDRFLEHHGIENLVVDAASIEVNRRKRRAKSDNLDATKLVAMLIRWHLGEKKLWGVVHVPTAADEDRRQLHRELIELKAQRTEHTNRIKGLLAGLGLSVRIDAEFPRRLEGLRQWDGTGVPDGLRQRILREFERWQLVGRQIHDLEAQRTQQIRDPETAQGEQVRLLLSLKGIGENTAWLLVREFFGWRRIRNRRELASLAGLAPTPYDSGEVRREQGISKAGNRRVRWMMIELAWGWLRYQPSSELSQWYQRRFGVGNTRARKVGIVAVARKLLVALWKYLETGEVPAGAEVFEKKKFRGAGGGQRLAS

SEQ ID NO: 251319 - protein, 391 aa, unidentified
MVCVGIDVAKDKHDCCILDSDGTIRADCITIPNNMDGFKQLLQTIRDCTKKSDKIKVGLEATGHYSYNILGFLLDKDLAVYVMNPLHTNLYRKSLSLRKTKTDRVDARTIATMLLSDVDLKSYTDTAYHNEELKSLTRYRFDKVRERAKLKQSVSRLVTILFPELEKLVTSLHIASVYALLSEYPGAKQISEIHLTKLTNLLATASKGRYEKEKAIQIREAARTSIGSVMSAKSLELKHTIKLIKELTSEIDEIEDSIQQIMDELHPPILSIPGMGVHSAAMILAEIGDFSNFDSPDKVLAYAGCSPSTYQSGKLTNCYAHMEKRGSRYLRYALYNATKYVCHWNPVFAEYLAKKRSEGKHYNVALSHAMKKLVRLIYALQKSGKAYLTAA

SEQ ID NO: 251320 - protein, 339 aa, unidentified
MKVTTFGLDLAKHVFQLHWVEPETGEVRRKALKRDQMMKFFVQRAPSVVAMEACGSAHYWARKLIGLGHEVRLIAAQFVRPYVKRNKTDAADAQAIWEAVQRPEMRFVAVKDEHQQAVLTLHRMREQLVKMRTMQINQLRGLLYEFGANLPKGRQQGMAQVGAQLAQLEDTLPAMVIDALRGQLQRVQALSRDIEDIECKLALWKKEDAAAKRLMAIPGVGLLTATAAVATIGDAKVFKNGRQFAAFLGLVPRQAGTGGKVRLFGISKRGDTYLRKLLIHGARSVITHQKARAPWLEQLLARRPFNAAVVALANKMARTIWALLAHDRTYQNGVTAQAA

SEQ ID NO: 251321 - protein, 442 aa, unidentified
MKEEITMPVVNARAAGIDIGSKSHFVAVGQGVDEIREFDVNTEGYGKSIAFLKEHGITSIAMESTGSYWQSFYAVLERAGFEVLLVPGSQTKNLRKKTDVKDAQWIQKLHSLGLLSGSFLPDDQTLRLRTISRHRASLVGTCAKYTNKIQKSLRLMNIRLDVCIRDIVGKSGRAIIEDILKGERDPGNLVCHIDRRVKKSQEEIALHLEGQWNEELLYELKDSYELLQIHESRIKDCDVQIERILSAHQRQEEIDHNRQLAKKQVKGKHACTVDLSRQCYEIFGVDIFSVNGIGPGSALTFVSEMGMNIYKFPTAKHFSSWLRLAPNNRISGGKVITSRTEKSRNQLTKAFRDAANAVGLSKGGDFLSHFFRRIAFKKGRGAAITATARKISVIIWNMIVKKQDYNPISVADFTESIKQKKINQINKDVKKFGIIIEELSVA

SEQ ID NO: 251322 - protein, 399 aa, unidentified
MTASRRVVIGADTHLDTNHLAVLTDTGKPLADDEFPTSPAGYAAAMRWAQSFGVIAIAGVEGTSSYGAGLTRVLQAAGIEVAEVSRPDRAARRRRGKSDPLDAYAAARAALAGDRLAVPKDEHTTALRALLSARRSAVKAHTAATNQIHALLVTAPAELRERYRRHHSPALVKALARCRPATHRDPTTVAVLTAAQALAQRAEFLEHQKQDLTAQLDVLVSQINPALRAAYGVGPHTAAQLLVTAGANPHRLRSEASLAALCGAAPVPASSGTISRHRLSRGGDRAANNALYRIALVRMSSHSQTRDYVERQVAKGRTKKEILRLLKRAIAREVFRLLTRPGPVDDYRDLRPARQAKNLTLAAVAQHFGVPIITVSRLERGHQRNDTLANNYRQWLTAA

SEQ ID NO: 251323 - protein, 346 aa, unidentified
MSQSTLIAVDLAKEVFQVALARPQGKAFSHQRLNRRKFEEFLARSERAIVLFEACGSAHFWCRQAASHGHEPIMLPAQFVRKYRLRNKTDQTDTEALLDAYRSGRVHPVPVRSIEQQQIQQLHRVREQWKSTRVARINGLRGCLRELGHAIPTGPNAAKRHAVRIIDQDDFPAGLRVAFSELLQEIADLEDRIKLAEHQIAALTRNNEDVALLGQIPGIGLLTSTALVACAGSPDHFKSGRHFASWLGITPLECSSGHRRWLGRITKRGDKYLRMLIIHGARSALCRAKTLAKADKPLNRVQRWALRLERRVGYNKATVALANKMARMCWAVWKHRTPFNPGPALS

SEQ ID NO: 251324 - protein, 452 aa, unidentified
MAKRLKKRCEELPILHPDAAGIDVGASELFVAVSADRDHQPVRSFPTFTRDLNALADWLQRCGIRSVAMELTSVYWIPVYQILESRGLEVCLVNAQHVKNVPGRKTDVSDCQWLQYLHSVGLLRASFRPPGFICAIRSLWRHRSSLIQMAAEHVLHMQKALDQMNLQIHRVLSDITGLSGLRILDAILTGERDPVNLARLCHAGVKNSQDTIAKSLEGDYRPEHLFALRQSLAAFHYYQQLVVEVDQEIQRQLGSLETATTAKPTVPKRTQASAYQRRRYEPKTFDLRSELYRILGVDLTNVPGISALTAQTILCEIGTDVSRFRNASAFASWLGLCPENKISGGKVLYTKSRRVRSRVATALRMAANSLHHAKDYLGEFFRRITRKLGKPQAITATAHKLARIVYHLLSTKEAYNETVFHRCDEEALRRAQFRLRRKAAQLGFQLIPVQNG

SEQ ID NO: 251325 - protein, 356 aa, unidentified
MQAKIKALVDDYDRFIGIDHHKRTSYLTVKDREGNTLKRGNIPTSKNALSLFLDDGENENGSASIAVFEAGRCYRPMYRWLSEMVETVVLAHPGGLKIVSDTVYKDDKLDSEKLADLLMLGMVPEAHVASDEAWDRRRVIRHRVLMVQMQTKVKNRIHSTIDLYPDAKPTRPEVSDIFGKLGMHWLHQLELPLQERRRLDELLDILDFFKKKVSASDALVRKIVREDKRCQLLKTIPGIGDFFAALIAAEVDDINRFPSSKHFVSSIGLVPGRDDSGDRERPGRMHKKGNSYLRWAVVEAAIPATRSNLALKNHYDRILARKGRKAGPNIAKVAVARKLAEIIYRILKDERPYEHR

SEQ ID NO: 251326 - protein, 392 aa, unidentified
MSQHFRFDASRSLTALEQDSTIVAVIEMSQTKWLVAALVPGIERQPLKKFDAQEEMLLKLLHRWRCEAGQAGHNIKRIVVAFEAGRDGFWLARWLRARDVEAHVIHPTSIAVSREHRRAKTDRLDTELLMRVFLGWLRGEKRHCSMVAIPTIEEEDARRPNRERQNLVTEQTRIINQIKAIFSRFGIRSLRPTKRKLAEGLEELRTAEGTPLPQNTLSELRRHLARLRFVRDQIRAVEQERLRKLAVAPAAETKSPDAMVRLIARVFGAGIETADMLVNEIFSRHWRDRKAVARYAGLTGSPDESGSRRRERGLARAGNVRVRSGMIQLAWRFVRFQKNSALAQWFAARTADGRASTRKTMIVALARKLLIALWRLVTRGEVPQGIVLRPAS

SEQ ID NO: 251327 - protein, 379 aa, unidentified
MKKNSKQTASVETVKKNSQGTTNVETTQANRWGEKPKVTVGLDLGDRYSYYCMLNEEGEVFEEGRIQTNEEGLRRHFQTEGRWRIALEAGVHSPWVSRKLREWGHQGIVANPRQIPALTETDSRNDRNDAENLARFAYCDPRLLKPIAHRSVERQRDLNRLKVRDTLVRARTMMINCLRGLVKSEGHCLPKCDADNFVSRAELFIPAGLRPVSQPMLEQIQQLTQHIQDLEKQIKKLAEQYPEIELLQTAQGVGPIIAAAYVLTLDRPEAFPSSRQAGAFLGLRPRQKQSGNSDVQCRISKRGNQYLRRLLVQGAQRILGPKGEDSALRRWGLKLASTGGKRGKKRAVVAVARKLAVILHSMWKNNQPFRPFPKTAVAA

SEQ ID NO: 251328 - protein, 370 aa, unidentified
MKEPITSYVGLDIHKDSIAIAIAKAGRDAPQFIGTTVAQLAQVRKVLTRQKCIPSKTLVVYEAGPCGYGWARYLNTHGWRCEVISPAHVVRSAAGKAIKTDRRDALLLARESRAGNLTPIAVPDERDEAIRDLSRAREDAIAARLRARQQLKAMMLRHGRTYSSNAWTLAHERSLATVRFEHPAQQIAFDEYRQSVKDAHERCERLTQALREQCTGWRMGRVVDALMCLRGFDFIAAVTIIAELGDLNRFSHPRALMSYLGLVPSEHSSGNSRRQGAITRTGNRHARRILVESAWTYRYGAHVGREHQIRQQGQPKAIRDIAWKAQLRLTQRYRKLSLGRKMKSTKVCVAVARELCGFIWDLARHVPACT

SEQ ID NO: 251329 - protein, 342 aa, unidentified
MKLTTIGIDLAKNVFQVHGADEKGKAVLKKQLKRTQMLPFFANLTPCRIGMEACGSAHYWARKLQALGHTVQLIAPQYVKPFVKRNKNDAADAEAICEAMTRPNMPAVPIKNASQQAILSVHRARQGFVKARTAQANQIRGLLAEYGIAIAQGIGHIPKRVPEILEDGENDLPGSFRLLIERLLDHLKELDRQVGELEVQIQLWHRDNSASQKLAKIPGVGPITASAMAASIGDARNFKSGRQLAAWLGIVPRQHSTGGKSTLLGISKRGDTYLRTLLIHGARAVVRVTERKPNADPWLKNLLARRNKNVAAVALANKNVRTIWALLAHDRHYERGYARAAA

SEQ ID NO: 251330 - protein, 350 aa, unidentified
MDRYIGLDAHTSSCTVAVVGPSGRQLTSQVVETNARALVSAIEAIPKSRHLCLEEGALAGWLYEMLAPHVQEIIVTAIPQSRGPKSDRRDAFGLAEMLRIGAIPRKVYKQRGRFTQLAYLAKAYQMLVSDDVRVQNRIKSLLRSRGIQVAGSAVYTTTGRSTYTDRLPAEAMTMADLLYQQHDHLSDLRKQAQKEMIAEARKHPEYRCVKSCPGLGEVRAALLLPVIVTPYRFANKRQFWAYCGLAVISRSSSDWVRTRTGEWVKAPVQQTRGLNKNFNHTLKTVYKGAATTVVGQARDEPFYQHYQRLLDGGTKPNLAKLTIARQIAAISLALWRNQEDYDQSKFKQPT

SEQ ID NO: 251331 - protein, 338 aa, unidentified
MQITTLGIDLAKNIFQLHGINERGKVVLSRKVTRTKLLEVITKLPCCLIGIEACSSSNYWAREFEKLGHTVRLMSAKFVKPYVKTNKNDMRDAEAICEAVTRPTMRFVPIKTVEQEDIQGLHRSRSLLMKNRTALINQIRGLLGEYGLVIPKSSARVRPILIRLLDKQDARLTPFAKETFSDLYDQLVDLDQRIEKMDQRLERLFKKHPVCQKIAAIPGVGILTATAILAAVSSPQVFKNGRHMAAWLGLVPKQHSSGGKTQLGRLSKWGNRYLRTLLIHGGRAVVHHAEKKKDAQSLWTTQLRNRKGNNIAAVAVANKNARVIWALLAHDDVYRKAT

SEQ ID NO: 251332 - protein, 313 aa, unidentified
MADLTTPARFIGCDVGKDTIVVFDSCDGGLTSIPNQPEALKAFAARLSPASLVICEATGGYEAALLDALVQAGRAVHRADPRRVKAFIRSLGTLGKTDAIDAQALACYGRERHHRLPLWQPREEARAQLHTLVTTRRDLVAQRVACRNRLQAPGSAPVARRLERLLGALDNEIAGLEADIDALIARSAPLARSRNVLQAIAGIGPTTAATLLALMPELGTLPRRQAAALAGLAPHPRQSGKHDAYRKTRGGRPDIKRTLFMAALAARSHNKSLKPFYDRLIATGKKPLVALTALMRKLLVIANARLRDANQAI

SEQ ID NO: 251333 - protein, 319 aa, unidentified
MEAPEVTFKQVVSRGCGLDVHKKVVVATIDGEGIKKQTREFSTITSSLKELRDWLLEHGISHVAMESTGVFWKPVYNILEPAGLIVWIVNAAHVKYVPGHKTDKKDSAWLCKLLLAGLLKPSYIPAKEQRELRDLTRYRTTLIQSNASNKNRIIRILEDANIKLSSVLSSTSGAVGTKLINKLCDGMEVTMQDIEEVYHKKLEASKEEIYEACQGFITEHHVYMLQLIRKEIADTEQTVESLSKRIKEVLSPYDNALELLKKVPGISSKSVEDLVAEIGLDMSVFPTEKHLASWAGMAPGNNESAGKKKAEEPHKETSK

SEQ ID NO: 251334 - protein, 315 aa, unidentified
MEAMIERCAGLDVHQETVVACVLFGPLDKKPNTSIETFSTTTTGLLALSDWLTTLQVSDVVMESTGVYWKPIWNILEDSFHLVLANARHVKNVPGRKTDVKDAEWLAKLLRCGLIESNFVPPEDIRDLRDLTRYRKKLIHHRTSEQNRIHKILQDANIKLTSVLSDIFGVSGRRILEAILNGEKIETDGLRKMVDWRTKASITDIASAINGRIRRHHRDMLRYHWEHMSYLEKAIEELEKQIDQLLSPYRKEVELLDGIPGVNKAAAATFIAEMGVDMSVFKSAKHLASWAGVSPGNYESAGKKKRVKPHKVTKL

SEQ ID NO: 251335 - protein, 410 aa, unidentified
MERVIERCCGLDVHKKTVVAGVRVPGGTGGRDQHVRTFGTTTAELLALRDWLDAYGVTHVAMESTGVYWKPIFYVLEDAFTCVLANAAQIAQVPGRKTDVRDCVWIAQLREHGLVRGSFVPPVPIRELRDLTRYRKALIHEHTREANRLQKGLEDAGIKLASVASDVLGVSGRAMLDALLRGTTDPDVLADLARGKLRKKLPALRQALAGRFRPHHAFLVSQLLAHLDYLDEVIETLSTHIAEVIAPFAEEVSRLDTIPGVNRRTAEVLIAEIGVDMGVFPTAAHLASWAGLCPGNNESAGKHKSGKTRKGNRWLRGALIQAALAAGTRSTKGAFAARYRRVMRHRGHQKAVVAVAHAMLVTAYHLLARKTTYHDPGADYYEHRHAERVRHRAVQLLERQGYRVILEPAA

SEQ ID NO: 251336 - protein, 372 aa, unidentified
MEERWGVVGCDAHKQTLTLAAVDAAGSDVKVASFSNDPDGFGAIVAWLRGLGIEVIRVGVEGSSSWGRHLSVSLAAAGYDVREVPPTRTTDRRHRRRRPKTDREDALAVARETLADSTLPPAKPTLDVSEAQAELTVVCERRRSLIRRRQRLLNEAEGLLNKLPPELIAGMPKQVAPRLRKVARLDRTLLAPSPSLAEMLDWLAELAADLDQWEARIEELEDRLPPLLDSCGSTLAEEFGIGVVSASELVAAVGKPSRFKTEGGFARWCGVAPVAVSSGEGDGQPIRHRLDLLGNRQVNRILYTMSVTQARHLPSAKEFLARKRAEGKSKKEARRAHKRQLAKRVIRRMWADQRRLGALSQSIQPTPSIRVA

SEQ ID NO: 251337 - protein, 346 aa, unidentified
MTTVDATRPLTGGVDTHLDVNVAAALDPLGGLLGLAEFATTKQGHVELLGFLERFGPVARVGVEGTSSYGAGIARFLRRSGVEVVEVDRPNRQARRRTGKSDPADAVEAARAALSGRAQGAGKTKDGNVEAIRALVVAKRSCRSTKIKTLNQIRQLSFTAPEELRERLKGVSRQHLGATAAALRPRAGTDPVTFATKTALSTLGRRVLVLDEEKDRLDLLLAELVEATAPSLLEVFGVGVDTAATLLTTVGDNPGRIASEAAFAHLCGVAPIPASSGKVNRVRLNRGGDRQANSALWGVVITRMRNDPRTKAYVERRLEEGRSKSEIIRVLKRYVAREVYKHLTFD

SEQ ID NO: 251338 - protein, 358 aa, unidentified
MSAPGIAVIGGVDTHTDIHQAAVIDSVGRHLDTQSFETTSAGYGQLLAWLRAQGEVIAVGMEGTGAYGAELARFLTASGITVVEVDRPDRRARRAHGKSDPIDAYAAATAVLSGRASGTPKSRDGIVEAIRALRVVRKSAVKARTQTINQIRSLMVTAPSALRDKLRGLPTSVLIDTLARTRPTADLTDPACAAKTALRRLARRYQALQQEIKEADADLAPLVTRAAPSLVALPGVGTETAGQLLITAGDNPDRLRSEASFAHLCGAAPIPASSGRTHRHRINRGGDRNANSALYTIVLVRMRHDRRTRDYVARRTAEGMSTKDIMRCLKRFVAREIYRHLRSTSILNTDPADQLDDL

SEQ ID NO: 251339 - protein, 343 aa, unidentified
MKRISIIGVDLAKNVFQLHGAAADGTVLFRKKLSRPQFQRYMAEHAQCLVVMEACGGAHHWARELERVGHEVRLIAPRYVKPFIKRQKNDAADAEAIVEAALRPTMRYVEPKTGEQQARSILFRTREQFVKQRTEAVNALRSHLYEFGFTAPEGIGYLPRLGAVLEDPSSNLPPLAREICREMLEQIANLSDRINAMKKRLDAIAREGETSRRLQTMPGVGPISALAVETFAPPMEQFKRGRDFAAWLGLVPRQASTGGKQRLGKTSKMGQRDIRRLLVTGAMAVIRWALRRGAPGNPWLARLLERKPPMVAAFALANKMVRGIWAMMTRGEDYRGPEIGSAA

SEQ ID NO: 251340 - protein, 468 aa, unidentified
MFRYSITSGSLIVALDIGKNVHWFGCYHYEGWLVELIPPRKVRSDTGGFAHFTATVDPLLASGRFPAAVIGNEHTGVYHEPWAWLIQEHYRSYLQPGAACPVAYRWLNPLLTKKRQEEISVRQHTSDRTAVAAIAACLADGLGHPAHLLSDSTAQLRELVRSYEQIDAQLHHLERQILAQVDRLWPGAIADVKQFQKAHPDLEPPTPIVETHALDRDRLAALLLYCPNPHEALALGAPGLIRLFHDHGYRAGPKTAEAILTALRRSPLPPKSVAAFYAARLQADYQSYLALAQRSQNLQAQIAELVPNTPACFVDSVPGISPLLAARYLAPIGDASYFATASQIWALAGYDLITTESGDTKQVGHITKRGSPALRDALYQIGFHTARQCPPIGETYLAARERGLDEKAAVIHAAHKANRLCFTLLREQRTYQPASPEEETRFRQHWQRFQLQLTRRRQRQQANQRLAA

SEQ ID NO: 251341 - protein, 343 aa, unidentified
MKIAILGIDLGKNSCSLVGLDGQGKVVKRRRMRPASIVGFTKSLPPCIIAMEACCGAHHLGRLLKAQGHEVRLMSPEYVRPYVKAQKNDDRDAEAIAEAATRPTMRFVELKSEEQLDMQTLHRARDRLVGERTALINQLRAILLERGIVIAQGRRNLERELDAMLCEEQGLAVSPRLRKLIEGIREEWRGLDRRIAAFDDEFAARAKTDEAARRLATIPGIGVLNATALAAAIGEGQTFARGRDLAAWLGLVPRQITTGGKPRLVGITKRGNCYLRKLLIHGARAVLPTLCKSETPLGGWLRALLARVHKNAVVVALANKLARIAWAVLRRKETFNPSATALA

SEQ ID NO: 251342 - protein, 310 aa, unidentified
MFSYPAGIDVSSGSLEIRVDQLDVAMSCSNSQSDFPGLIGWLTLHRVGRVLLEATGGYERKVMKALQAAGFEVIRINPGRAKSFARAMGQQAKTDPIDARLLAQFAAVIKSPDSRVTSAEQDDLRALVQQREHFVQQRDDDKRRLKTASSDVVKPALQSHIDYLQKVLKELESLIRQSTERLDRKKVALLCSVKGIGLVTAASLMSYLPELGEVGRHQIAALSGTAPYNDDSGKHKGKRHISGGRFAARRSLYMACWSVIRFQPEFAARYKALREKGKCAKVALIACMRVLLVRLNAMIRDGSEWKEQAA

SEQ ID NO: 251343 - protein, 386 aa, unidentified
MGVITGMDPHKRSATIEVVDERAAVLAGGRFGTDKAGYAQMLAAGRKFRGRLRAVEGCNGIGKHIAHRLVHDGETVAGVPPRLSARVRVFATGNGRKTGPAGARPVAMVALRSPGLVRVQVDDDLVVMGMLADRRDELGRARTQTINRLHRLLPGLFPGGAKQFLSAQQARAMLVTIRPGDLPGKTRRRLAAELISELEVIDKKIKAIRKELTALVIARGSTLLELHGIGPSSAARLLADVGDIHRFADRGKFASRDGTAPLDASSGNQERHRLSRAGNRRTSRALHIMAVVQLRNQTQGRAYYDARKAGGMPSMMAMRALRRRLSNVVFARMLADQKRREAAGPGGQPGTTTDSSVTDLTPDIGSSEKPRPGPATQSRTILQAVP

SEQ ID NO: 251344 - protein, 426 aa, unidentified
MNYTQNERIAQVGDNTLVVGIDIGSDKHYARAFTERGMEISRKAFVFENTESGFGLLDAWMEKLAGENGKAKIMVGFEPTGHYWFPLGRHFEERGTAFVVVAPQHVKHSKELDDNTQRKDDRKDPRVIAKLVMEGRYSIAYMPEGKFAELRIVYNRRCELVEQQTRIMNRITRWFDVYFPEYRTVYGKVDAISGMMILKGAPLPKDILELGVEGVNAIWRDAKLKGAGMKRAQTLVAAAEHSIGLDGGYAAKLDLWQLLEEYELVANQLAKVMEAIEDLLAEIPEAGRIMEIKGVGVVIAAGLLAEIGDIRRFNSPKQIQKLAGLAIVENSSGKHKGRSGISRRGRKRLRKVLFLAAMALVGHNDEFRQLHQYYTTRKDNPLKKMQSLMALAAKLIRVVFGIIRTGKSYDPTKMLNDIRRVEHAAA

SEQ ID NO: 251345 - protein, 341 aa, unidentified
MDHYAGIDVSMEYSSVCVVDGSGKIVREGKVASEVGALIGWLRTLGLNLVRIGLEAGPLSQWLFAGMRDGGLAVELLETRHVRNAFKTMPVKTDRKDARGIAELMRLGWFRPVHCKSMEAQETRAILTARKQMQSKLHDVEMSLRGILRGFGLKVGKTTPKTFEGRIRELVAGHPTLETVAAGMLSARAALLLAFNGFEKRVRVMARQDARARLLMTTPSVGAITALTFASAIDDPARFKSSKSVGAHFGMTPKKYQSGETDYSGRISKAGDGSVRTCLYEAAHVMLTRPVKGSALKSWAMRLAKRAGMQKAKVALARKLAVIMHRMLVEGKPFNLAAATA

SEQ ID NO: 251346 - protein, 351 aa, unidentified
MNIKHYIGFDVHKKSISYCVKTADGKIIEEGKLRATHQALREWAQKRTEPWHGAMEATLFSSWIYDVLKPFAAELQMGNPSMMKAIGAAKKKNDKLDARKIADLVRCNLLPVCYVAPPEMRDLRRLLRYRNLVVGQAVQMKNRMSGLLMEVGAEYSKQRLHGAKYFSELLDQLEEVPESVKDLLRLSRGALETFAATQRQLLDRLQKDPLLVKRVNLLKSIRGVGDVTALTWALEICDPRRFHSIGDAESYCGLTSALKSSADKQQRGPISKQRNAHLQTVLIEAAKLAPRWNKPLAELHERELKRGDRNRATLAVARKLVAYLLAVDKSGKRFEVRNPPAREMQEVKQVA

SEQ ID NO: 251347 - protein, 417 aa, unidentified
MKKHNNSAKKSEPTLKRTKSRGPVQRDTKEVMAELVGKLTEKLHAKAVAASAGEEHRRGELRPNLDRLTVGVDLGDQWSHYCILGLEGETLAEGQLRTTPQEVAEFFEALNAARVIVEVGTHSAWVQEVICGYGHEVLVANPRLMEGSKRRKRKSDRIDANKLARLGRVDPESLHPIQHRSREVRQDLVVLRARDALVAARTELINATRGLGKSMGRRLPECSSPSFAQKVEEAVPVEIREALLPLVRMTAALSDGIQEYDKKIEKLGSEKYGHTALLRQVKGVGPITALAYVLTLENPERFVKSRDVGPYLGLVPKQEDSGESQPQLGISKAGDTMVRRLLVGSAHYILGPFGPDTDLRRYGLRLCERGGKNAKKRAAVAVARKLAVLLHCLWVSGEVYEPLRNAMAVAIAPAAAA

SEQ ID NO: 251348 - protein, 416 aa, unidentified
MEQIFMIKENYIYVGIDLHKETHTAVMIDCYNQKLGEITFPNRPADFPKLVAKVKKCNTDGKTIVFGLENAYGYGRALAVWLIDKGYLVKDVNTAISHRQAKHRGAMYRKSDSDDAEAIALATLNMLDKLPDAYPNDAYWSLGQLVHRRDNIMKQRTRLVNQLHEQLCIAYPSYKQFFNDISRPTALYFWEHYPSRKYLKGKSVEDLRAELVPVSHNKCSTKTCEKILDAVASDKVKNNAYQDARDMVTLSIVSDLQHYDIQLAEVDKMLEQMYKMLGCTLTTIPGVNVITAVKILAEIGDIKRFSNANKLAQFAGIAPLHLSSSGKGKDVATKQGNRRLQATIYFLAIQMVQVSSKGTPRNSVVRAYYEKRKAEGKTSQQTLICISRRLISIIYGMLKNGTEYRMPVVENVGENR

SEQ ID NO: 251349 - protein, 317 aa, unidentified
MIVLGVDIAKRKFDCALLTGERFRTKVFENNASGIEACLNWTARHAGEPVHACLEATGPYAQALAAALFDAGHTVSLINPARSRAFAESLGLRTKTDAVDARMLARLCQALAPEPWVPAPKSVRELQEFVRRLDALIEMHTQETNRLAVAHEAVRASIEEAIAFLDRAIAEIKEAIAQHIDHHPDLKAQRDLLDSIPGLGPATCAWLIAELGAKRFACARSAAAFVGLTPAHRLSGTSVHGKPRLSKRGNAQLRKALYWPAITALRCNPIVHALGERLRARGKHPMAIIAAAMRKLVHIAFGVLKSGKPFNPNLAGA

SEQ ID NO: 251350 - protein, 276 aa, unidentified
MSDTSLRPMYVGLDVHKDTIAVAVADGDGREARTFGTIDNNTAALERLLRRLTAAHPGRRWIFCYEAGPCGYPLARRLRRLGHVCHVIAPSLIPRRAGDRVKTDRRDALQLARLLRAGLAALRGIDELASSMLLAELGELTRFPRPTQLSAFVGLIPSEASSGSRRRLGAITKTGNAHVRRLLIECAQSYQYPAKLTPRIRRRYERCSPQVQAIDWKAQTRLCPRFRRLLQKGRPRNLVVTAIARELCGFIWAIGQAVAQARDRPGAMADAIANAA

SEQ ID NO: 251351 - protein, 346 aa, unidentified
MKKFFVGIDFSKRKMDVSIVEKDFPERAIAYKQFINNTEGAKKMCEWVEYTTNTSTKLEGEVLFCCEHTGSYCLEVCDYLSENGKYIWLGNPLDIKRSMGLVRGKDDVIDSRRIATFAAEKHHKAILYMRPEDSTRALKYLLSIRNTLVGQKKALACQIKENFPKLHNITLLCKIEEKLKQMLDSIINEIKKIEKMMLDIILSNKEYKNTFDILTSMKGVALINAAAIIVFTDNFKRFSFNSRKICTYWGITPFKNESGDSIRRGTHTSPIRNNWLKAILSEAVLCAIRYEKRMKEYYSRLMTKGKHRNVALNNTKNKLLKTLVAMVRDGKKFDENYVSIPQACAV

SEQ ID NO: 251352 - protein, 316 aa, unidentified
MENIALIGIDLGKNSFHIHCQDRHGKAVYRKKYTRPKLIEFLATCPATTIAMEACGGSHFMARKLTELGHIPKLISPQFVRPFVKTNKNDFVAAEAICETASRPSMRFVQPRSESQQAMRALHRVRESLVQDKVKTTNQMHAFLLEFGISVPRGGAVISRLSTILGDSDLPQYLSQLLLKLQQHYHYLVEQIKDLESQLKRKLDEDEVGKRLLSIPCVGTLTASTISTEIGDGKQYGSSRDFAAATGLVPRQYSTGGRTTLLGISKRGNKKIRTLLVQCARVFIQKLEHQSGKLADWVRELLGSVALMAKGRQKLH

SEQ ID NO: 251353 - protein, 422 aa, unidentified
MLAKTQDNEEIIERVAALDIGKAELMCCVRVPDEDRPGMRLQEVASHSTMTRPLLSMADRLACLGVTRVVMEATSDYWKPVFYLLEAAGFEAWLVNAKDVKHLPGRPKTDKLDCIWLCKVAERQMIRPSFVPPPPIRRLRDLTRYRADLVAARTAEKNRVEKLLEDAQIKLSVVVSDIFGASGRDMLAALVAGERNPTVLAQLARHTMRKKITVLEEAFTGYFTDHHAFLLGAMLARVDAITADIAALDTRIEEQIAPFAAAVAKLDEVTGISLAAAHAIIAEIGLDMARFPTAGHLVSWAKYAPGVKESAGKKKGKNSTGHGNSYLARILGNAAAAAGRTDTFLGERYRRIARRRGAKKANVAIGRSILVIIWHLLSDPDARYTDLGAGFYATRIDPERRRRNHVRQLEALGYTVTLERAA

SEQ ID NO: 251354 - protein, 411 aa, unidentified
MLDYDFFVGVDWATQAHEICVLNDAGVIVDAGSVAHSGAGMAELRTRLSRLTADPSRIAVAIETPRAAVVDTLLAHGSHVFAVNPKQLDRFRDRHTVAGAKDDRRDAFVAADAVRTDRWAFRRLQPEDPRLLELREISRAYEELVTEQVRLAHRLREQLQRFYPQVLTLCPAADEPWVWTLVDRLPTPAAAAGRARGRVVRALLAQHRIRRITAEEVHHVLTAAALPVAPGVTEAATAHIALLVPRLRLVHEQRTHCERRLDVLLTALATPAADSEQPEHRDVTILRSLPGVGRVVAATMLAEATRPLAARDYQTLRAHAGVAPVTRQSGKTRLVAMRHSCNSRLRTAVFHWASNSIRLDDRCRQHYDHLRQRHNHARALRGVADRLLRILIVMLTEGAVYDPGRPRMRAA

SEQ ID NO: 251355 - protein, 428 aa, unidentified
MNTSPLKYAAFIGIDWADQKHDLWVQPADGSTSEHSPLEQTPAAIQNWLSQLRQRFGGQTIAIGIELSRGPLIYALMHCEFLVIYPINPKSLARYRQAFRPSGAKDDRSDAYLLCLFVQTHYRDLTAWKPDDVQTRTLAGLVERRRHWVDQATGLQLRLRAVLKAYYPVMLELFGDHLATVMACHFLQKWPDPQTLQKARPATLRQFFHVHHSRSEQRIQERLVTIQQAQPLTRDEGVIVPHRMDALIATKLLLTLHNQIGELEQQIAQVFAAHPDAFIFEGLPGAGPTLAPRLLAAFGSDREKFPDAKSVQQLSGIAPITVKSGQSECHYFRMSAPKFLHQTFWEFAKCSLVSCPWAQAVVTHLMKEKGLSFNAAVRALAFKWIRILWRLWKNRQRYQEDIYLESLRRKKSRYLPSPSMVNNFLPNT

SEQ ID NO: 251356 - protein, 352 aa, unidentified
MPIVADNYEIVIGVDTHAAAHALCVVAAVTGAVQDKASFPASPAGLDRARTWIAHRAGQQAALVVIEGIGSYGAGLSDRVLAAGFPVAEPSVMGSADRRGVGKTDDLDAARIARSVLSVDVDRLRRPRADGSRVAMRVLVVAREQMTCERTRAVNALTALVRTVELGVDARKSLAYSQIKEIATWRSRSEDATTATCRAEAVRLAKRIGALDSELIDNRKSLEALVKTNAPELTAAVGVGAVVAATVLIAWSHAGRVRSEAAFASLAGTCPVPASSGNTVRYRLNRGGDRRLNRALTTIVIVRMRVDPETRTYVERRRGEGRTTKEIMRSIKRYVTRQLFRTLATAHPILVS

SEQ ID NO: 251357 - protein, 427 aa, unidentified
MGRLKIVYPVCCGMDVHRDFVIACIASTNGQGVTSYDSKRFSTYSGGLRDLAAWLAEHNCKDVCMESTGKYWFPVHNMLEKDFNVVVSHPKFVKAIKGKKTDKKDAMWIADLFKHDLVRGSFIPPDNIRQLRDLCRYWQKLTWCATGEKNRAQNCLTVSNYKLDSVFSNVFGKSASAIISYMLEHPGEQFDVAPFIHHRCKASVEEVQAAIDGLFSPWQAEKLKIIRSHIGDLSLRKRMIEELVKQLAAPYKRQIDLLLTVPGISDPMTAIRIIGEIGVNMRQFESSKHLCSWAGLTPQNNESAGKKKTTRIGKAGQYIKPLLLQCAIAASNYRSKRYPEVLGKYQQLKKRRGTKKARVAIARRLLTAIYQMLLKDEPYKPYVAPLQDFAPINRILTEVQALALLRRRGYVIVEPSPAAFVEPASSG

SEQ ID NO: 251358 - protein, 439 aa, unidentified
MQVVHTRCAGLDVHKKSVVAAARLLSADGTLTTHVRTFGTTTAALLELVAWLLSLEITHVAMESTGEFWKPIYNLVEGSFTVLVVNAAHIKYVPGRKTDVKDAEWIAELLAHGLLRPSFVPPPPQRALRDLTRQRTHLIRERASEVNRMQKVLEWANIKLSSVVTDITGVSARAMLEALVAGQSDVTALAQLAKGRLRTKLTELEQALRGTLEPHHAFMIGQHLALLDVFDEQIAAFDDRISAAIEATGAANPPDGDTTAAGSDADAPSAPTGAWTAQAILDAIPGIGLRVAEIILAELGTDMSRFVDAAHVSSWAGLAPGQHESAGKRKATRIRDGNKYLRATLVQAAWAAVKQRDTFLAAFFRRLAARRGKQKAIIAVAHKILVIVYSLLKTGQVYEERGAAAVDEQQKERIVHRLERRIAQLGYKVNLEPISAAAS

SEQ ID NO: 251359 - protein, 426 aa, unidentified
MRFIGLDVHKDFCEVAVVEEDACWSGPRVHSTPEDLEVFGQSLGPDDQVVLEATGGALAIARILEPHVGRVVMANPMAVRAIASAKAKTDRLDARTLAKLLAAGFLPVVWMGDERTRLLRRVVSRHAQLIRQRTRAKNQVHAVLQRTLKGRPPASDLFGKRGRAWLDDQDLPADERETVQASLRHVDFLDGELRLVDRTIAQQVLGWPEVRRIMTIPGMGAMAAAGVMAAIGDIRRFPTPRHLVGYLGLDARVRQSGSAPARHGGISKHGSSEARHLLVEAAWAAIRTPGPLRAFGERIRARRGANIATVAVARKLALLSWHLLTREEDYAFARPSLVRQKVRLLELTAGDVRRIGYRNPVRVFATPAQHRLEREVGAQAEKAYRRFVKDFQATGKKGAGAITGARISVPRKGQAPRQEQAPDPAL

SEQ ID NO: 251360 - protein, 394 aa, unidentified
MIYAGVDIAKTDHVIGAVDERGAEMCPPMPFKNTEAGLERAVAWLEGLAGSPSDVVVGMEATGHYWMACYSFLVARGYSVAVINPMQVKAVRKLKGFDKVKNDRVDAGLIAEALRIGQYDETRLATDEMASLRSLSRYLQSLRGMVAELKTQCICLMDAHFPEYAGIFSDMFGAGSRAVLSKSPLPFELARRRADSLARDIAEASRRGGKSSGYAAKIKAAAKSSIGVRLGQEAASFQVKSLIRQIEFADSECAGVEARLRSLLDEVEPLVLTIPGVSYVTGAQIVSEIGDVSRFRNAPALVSYAGLNSSVSQSGQFDSGGGPITKHGSPYLRRALWLAANRARQYDPGLRAFYDRKRAEGKPHRVAVTAVARKLCHIVFAVMRDQVPYDPGRE

SEQ ID NO: 251361 - protein, 349 aa, unidentified
MSHQLNSAIAVIGIDIGKNSFHVVGQDKRGAIMLRQKWSRGQLETRLANLPPCLIGMEACVGAHHLGRKLRMLGHDARLMPAKYVRPYSKGQKNDFRDAEAIAEAVQRPTMKFVATKTAEQLELQALHRVRERLVSQRTGIINQIRAFLLERGVAVRQGLRFLRAELPRILATTCDALSPRMLRVIEGLAGDWRRLDERIESLSSEIEVLARRDVGCERLMSVPGIGPIISSAMVAAIGAGDAFSKGRDFAAWLGLVPKQISTGDRTILGKISKRGNRYLRVLFVQAAWAVLIKPRSWDRHGLKPWLEAAKKRLHHNVLAIALANKLARIAWSVLAHGRAFEASNIRAG

SEQ ID NO: 251362 - protein, 339 aa, unidentified
MKNKKYFIGLDVHKERTTFIVRDRIGNILVEGETATLYQELFPRLKPYLTSSMIGLEASTSYYTLYQQFLEHGYTVKVANTIQLRQLITKNDTLDAQRLSEMLRLGTFPSSYIPNEKIQRIRSLIQIRHSLMEEKVRCNNRIQAFLDRNGVMMPSYKAFTKKWRYALMQHMGSGRVSIELRHEYDHYVFLEKKLEQVEQEIQGYAQKHWTTEYELLQSITGIGPIIACYAIAHILPIERFSSCKKLRRYAGVVPTCKESGNKRSHGHIPKTSSRRLLRWALIQAANTIGKTNTNFGRYYRRKKRQKKKAGIAKVAVASILIDILYKVLTNKQPYKPKNC

SEQ ID NO: 251363 - protein, 424 aa, unidentified
MKHQLFIGIDRSDQCLDSCILDTDNNIISQKNVSTNPKDLTPWCEEILKFRDPKNPETIAICIEQPCQNLTHFFKRYEEFTLYLINPIILKRYRETFNLSRSKDDKKDALHLALLISDHHRKLTPWKASEPSYRKLSMLSEKRRQLVNARTAISNRLTQNLKEYYPQALELLGRHLSTPISVAFLRKWTSLQSLQKSKLSTIKKFYYLNHCRSNKAIDKRLEIIVQAIPLCTDEVIIEVHSAMTIAYIDQLAVLEKNIQRLDDMIEETHKQCEKHQIIESLPGAGQHLAPRITAFMGLHNASWDKAEDLQCQSGVAPVTKQSGKTHFIHKRYACNAFFRQTFVEFAGHSYKYSAWANAYYEQQKSKGKTHQIILRGLAYKWQRIIFKCWKTGKLYNESQYLKSLEQSSSPLVKIINNQSKIKCA

SEQ ID NO: 251364 - protein, 357 aa, unidentified
MTPVHYDPTNYDLFIGIDTDKRSFAFTVRERNQKKHRKMPSNPDQFYQYIQNHYPQRKVVCAYEAGPTGFGLYDYLLQKEVTCFVTSPASIPKAPNERVKTNRIDSGKIAEYLMSGDFKPIRVPTGFYRDLRDLVKIRERYTYERKAAKQRIKSLLLYKNLHNAIPSVDSRWSKAYLRELERLECAPAERERLNMLLSDLTYARKNLAVIHRKLRQFCREHQEIHEYMGYLESIPGIGFIIAVTILGTIGDPAHLTNPREIAAFLGLAPSEHSTGDTVNKGSITHLGNKVLRSLLVEAAWATVRKDTQLRQFYYRIRHKHHDQAASKIAITAVARKMTQIIYRILKDKRPYVNYSDL

SEQ ID NO: 251365 - protein, 427 aa, unidentified
MAYRIAGVDVHKRMLAVVIGDIAVEGDLQFQQRKFGANPSDLRRLAEWLVAEQVEEVVMESTAQYWRPVWATLERLWGPKWREREGAGAMAGKLHLAQAQSNRGAPGRKKDFPDAERLVKRLIAQELTLSFVPDNEQRLWRTVMRRKYQLTCNRVQFRNRLECLLEECHIKLSGLVSDLLGLSGRRMLQALADGVTDPNAIVALGSPRLHAKPEQLSDALGACVDMHPVHRRILKMALEELKVIEEHIQSLDQELAALLSAHQDAVQRLAEVPGLGVDSAQQIIAEVGARAGTFPSAKHLASWVGVCPGAEESAGVNYSHRSPNGNSQMRRLLNQASNAAVKTKGSIFEFIYKRLVPRLGHAQAIGAVAHRICRLIWLILHQGIRYEERGPAVTRDRAQRRVAKMIRDLRNLGYLVQPIIPTSNGQT

SEQ ID NO: 251366 - protein, 350 aa, unidentified
MIIIGCDYHPGVQQIAFVDTETGEFQETRLQHREPAEQFYRELALRGMQVRLGMEASGQARWFERLLAELQMELWIGDAAEIRARRVRKKKTDREDARHILRLLMEDRFPRIWVPSWENRDVRQLLWHRHRMVQMRTRVMNQLQAVALNEGMRCKKRLGGERGRQQLESFPLAMWGSRRRHDLLELLDQLNPTIAELTQAIEAEVANYPAAQRLMTHPGVGALTALAFVLIIGETERFQVGKQIAAYLGLVPEENSSGESRRLGHISKQGSGFMRFLLVEAAQVTVRSDGQWRSRYFHLAMRRGRKIANVAMARRLAVRLYWMWRKQWDYEQWKEFGPHAGQPGMSDGVK

SEQ ID NO: 251367 - protein, 432 aa, unidentified
MPTEFAALVAIDWADERHAWALQAGTSKVESGAIDHTPEAIDVWAAELRMRFGGQVVAVALEQSRGSLVFMLTKYEHLVIFPVHPTVLVNYRKSFRPSGAKDDPSDARLLLDILMLHRDKLRRFNPDTAETRTLQFLVEERRKFVHEKTRYSNRLIAHLKMYFPQVLDWFDEIGSNIAAGFLERWPSLEKLQRARPATIERFFIDHNSRDPDRIKERLEQIRKAVPATTDVAVVTSSSAAVLGWAAMLKQVLAAISAFDRQIDELAQAHPDYALVKSFPGAGPAMAPRLIAAVGSQRQRYQSAAEIQQYSGIAPVVASSGKLRWVHWRWACPKFLRQTFHEWALHSIAYSDWAREYYEQQRAKGKRRNTAIRSLAFKWIRILFRCWKSRIPYDEGIYQRALDARRAQQSPSQIVEPQWKNVTGFSKLGIANA

SEQ ID NO: 251368 - protein, 332 aa, unidentified
MENFYFIGVDVSKKKLDFCVMFEGKVVHEEETANHQSAIMSLLHHLEEDYGIDNTRMLVCAEHTGQYTFPLACACKTVECKLWLENAAEIKYSSGVQRGKNDKVDAKRIAIYASRFQDKVRYYEHPTEDIERLKQLESERTLYVTDLAKYKGQMKDQKDYMPKALYERKMKRLQALMDDLEEAIQAITDEMDEVIASCPVLFRQQELLMSIDGVGRVVATNMIIATEAFTRFDDPRKFNCYAGVAPFSYSSGSSQHSKARVSHRADKVMKRLLHLAAVAVTHRVGGELKKYYERKVAEGKNKMSVINALRAKIVARMFAVIKRNEKYKPILS

SEQ ID NO: 251369 - protein, 360 aa, unidentified
MQRNKISFKGQKIFVGIDVHKDSWRVAIAPEVGVIKGHSQKPSAQELSDFLNKHYPDGDYLAVYESGFSGFSTYYALEAVGIACIVIHAADVPTSQYDEVMKTDKVDAAKLVKSLKSGLLKGIYIHKKEDLDARAVIRLRKTIQKQLGGYKSRVKHLLYNNGVQLPEKYSKPGTCWSRAFIKWLKEDVVLLSSTRDSLDLLIDQVESIRNVSLNATRKVRKLSNTERYRTNMELLTSIPGIGVNIAMGLLTEIGDVKRFHKETEFASYLGLIPTSHSSGDKIVYGEKTFRGNKDMGPQIIEAAWVAISRDRGLGCAYTHYKKKMIPQKAIIRVARKLSNIILAVLKTGKKYETYQWNEIQ

SEQ ID NO: 251370 - protein, 412 aa, unidentified
MSQRSKVCGVDVHKQFFVAALLSQSGGSTLKRFQSDKPGLLEFKEWLLNEHCELVALESTGIYWYSIYSTLEDHIEVIVANPYLIKNIPGRKTDIADAQWIAQLALNDLIKPSRIFPKKQREIRNLTRSREHLVNNRTMLKNRVHRVLESASIKLSSVLADIFGKSGLHIVQGLVAGIDLDTILASIPHEKVRGKEPELRNAIQRNLESSQILIINQCLSLIEQITRRIDELDDEIGAHMNDRENDLKIAMSMPGIGKVSAMTILAELGNYEEFGTPEKLAAWSGLIPSVYQSADHLKTGPITKRGSPHLRRIMVEVAQAAVKTKNSRLRSFFLRLKLKKGYNKAIVAVARKILCILWAILRKRELYREENIPKKKVSIILKSSPSPRSIQEAIDILGRAGYMIQKLDSPGG

SEQ ID NO: 251371 - protein, 319 aa, unidentified
MTLKRTFERVIGVDVSKNTLAVADSHNAINGPCDNNRVAIMRELIAKIDNRQVTLVVCEATGGCERTLVSVLHDAGVAVAVANPRQVRDFASGLGVLEKTDPIDASVLVRFGQVVEVSLASPRDEKEEHHRAMARRRSQLQGLITQEKNRLQQTIDAAVAGMIEEMLKSLEKQLKEVGKQLAKIIQRPEVSRRAEILASAPGVGAVTVSTILCEVPEIGQLNRGQIAKLIGVAPMADQSGKRDGKRRIVGGRSTVRRVLYMATLVATRCNSKIKKFYQRLVAKGKPKKVALVAAMRKLLIILNEMVRTDTFWEEDHSAA

SEQ ID NO: 251372 - protein, 363 aa, unidentified
MNATAALPVVGVDLAKSVFQLAVADGAWRVVEQQRLTRLQFERWFVNRAVGLVVMEACGSAHHWARWLNDLGIEVRLLPAAYVRAYVKRNKTDAADACALLEAARCADIAPVRVKSVEQQALQAMHRTRSLWMATRTSRINALRGFCREFGIVIAQGSRLGVEQIGRVLADPHSAVPLLIRRSMSLLVEEVRLLEARIGQLERELTALARQSPACTTLLSIPGVGLLTATAMVAATSGEVSHFHDARHFASWFGLAPKEHSSGGTRHLGRISKRGDRYLRMLLTHGARSVLRAAGVAVRAGKTVDGLRHWALAVQARSNHNKATCALANKLARICYATLRDGEPHGAARLNRKLTRTAFAQPA

SEQ ID NO: 251373 - protein, 317 aa, unidentified
MDSKTQPDRFVGIDVAKGHVTVHVRPDAIAFNCKTDAQGLANLLDRLRPLTPKLIVLEATGGYEAVVAAALAEADLPVAVVNPRQTRKFAGALGRLAKSDTIDAADIAHFAEAIRPEPRPMPDEQTVQLRALLARRHQLVVMAGAEQQRHDRAETPLARRSCAAMLRSLTAETTRIERAIDKLITASPIFCAKQDLLKTIPGVGDVVARTFIAELPELGTVDRHKIAALVGLAPMNRDSGKMRGERHISGGRPQIRSPLFAACLSVIQHNPPLRGFYQRLLKAGKPKRLAIVAVMRKLVCIANAMLRNQQPWAHAQS

SEQ ID NO: 251374 - protein, 353 aa, unidentified
MTSLTDLSDLVDVVIGVDTHVDTHAAAAIDVRTGGVLDEITVEANAEGYAQLVEFADQHAVLRAWAIEGTGCHGAGLAHHLARGEELVIELDRPERAQRRNGEKSDPLDAVRAAREALARPRWGTPRQGGDRQALSVLLAARRSAVQAGTDAQRQVFSLVIAAPEQIRDRFRGQRLPAMIKTAAALRTQASWDTETTTTVTALRSLARRAQALAQEAADHQKAIKTIVRRWRPDLLAQPGIGPIVAATVLCAWSHPGRIHSEAAFAKLAGVAPIKANSGKITTRHRLNRYGDRQLNRALHTIALSRIRYDQDTRDYVARRTTEGKTPREIKRCLKRYIARDLYRLLENRPITT

SEQ ID NO: 251375 - protein, 347 aa, unidentified
MDHVGLDLGKRESQIAILAEDGELINMRIRTERRRLVEMFGRRPKARILMEASTESEWVARCLEDLGHEVIVADPNYAPMYAQRTRRVKTDRRDAHALAHACRAGTYRPAHRTSTERRELRARLAVREAVVRTRAAWITRIQSLVRREGCRFRTGAPETFLTRVEELALPPALTTVIAPLVELLGPINKQIAVLDEELERIVAADEVARHLTTVPGVGPVTATAYVATVDDVTRFRGAHQVEAYLGLVPSEWSSSEVQRRGHITKAGNSRMRWLLVQAAWCILRRRKRPQTAALRDWAERIAGRRGRSIAVVALARRLAGILFAIWRDGTVYDATKVRGPLPARRAA

SEQ ID NO: 251376 - protein, 468 aa, unidentified
MQLCLGIDIACRAAHQATLADERGEFVWSGRRFRTTSADLDELWALLPSGTEPGAVTVVMEPTRNAWVPLAAWFRRRGATVVVVPSERCADLRDYYNKHTKSDRLDSRVLARLPLLHPEGLHREDGLGPADALKRAAKHRSTLVKRRSQCLARLDALLELLGPGWDAALGGDLANVTPLRFLAAGYADPYVVRRLGRARLSRFIYRHSRGAWGEERAIELLEAADATLALWDGELDYTELAEDIAIEARLALQLTTEVKELDERVTALMTKLDPNRILTSAPGVGDITAAAILGRLGDPNRFRSLRGARAFSGLVPSLDASGIAGAHGGPTKRGDAVLREALFLAADHARRQDPTLAARYHRLMTVTGKHHNSALCHIAMALLTRIIACWRNGEPYQLRDVDGRVVDVAEARAIIAERYCIPEDVRRKKRSVTHTQHVKRGRADRVKESLGAPSADPPTRRLEAPARG

SEQ ID NO: 251377 - protein, 365 aa, unidentified
MNSVITNTELSSHEGTRCQFNGSTGAIKLGIDVHQDFYVVVMQEGGANPKPPQRFSKQAFVHWASKLKSRGAEVYAVYEACGFGFWLQRQLSSLGVQCHVVCPQKLDEQNRRVKTDELDAKALCLKLDRFVEGNRCALALVRVPSEGEEQNRAIHRQREQLVKARKQLEAQGRSLMVNHGMEPVQNWWKPRTFGALPAPHWMKALLANSQSILVALQQKIVALTAQLQSAASPDQPCGLGKMTSVIIDREIGDWNRFSNRRQIASYTGLCPGEYSSGNTRLQSWVTKHGNPRLRAALVELSWRLVRFQPNYKPIIKWRAILAKGALATGAARKKAIVAVACQLAVDLWRIKTGRLRAEELGLINY

SEQ ID NO: 251378 - protein, 339 aa, unidentified
MSKLFKNFVGIDISKTWFDAALIRSADPGKIVHQQFFQTLDGYKKMKQWLHDHNVCLDDDTLFCMEFTGIYNTGLVTYLVAQQAHLWVEMPLRIKRAGGLERGSDDRSAACKIAWYALRYHDGAKLWKPADTSIERIKHLITQRERIITSIKHLTVPAEELKQCGCLADAKMMEKLQQPAIKALQKTKQGIEALITKTIKLDEALYNKVQLMQSVNGIGTVTATALLVYTKGFTAFNNAKELACYCGVVPFNKTSGSSVKYKPSVSPFANMKLKKLLHLCAMSAIQNDREMKAYFQRKTAEGKNKMSVINAVRNKLIHRVFAVVRDERMFEDNYVRQCA

SEQ ID NO: 251379 - protein, 368 aa, unidentified
MSKTENGRLCVGVDLHKTQFTVCAINEDGEYLLERKYPTTEEGYEEFSQEMHGREEEGYSIELAVETTGNARYFKNRMEKEYFAVKVVNTNRFKVITMSTKKTDANDAATLAYYLMKEMLPEANLCSQTSEEIRRMLKTRTILVQSTVKIKNQIHGMMLGYGIETKAAQFQSKKKRQELMNDLADHEYSAFTASSLKVMLQIIDDLSEEIKRVEVQLAEMVKENEDVELLMSIPGVGINTATTIAAYTENLERFDGNYKRFASYIGIVPSVHNSNETKHLGRITKHGPQELRTAFVQAALGMVRLTKVTSEWRLIKDYHRKKDDKGSGRAIIALARKISRIVFVMLSKRETFNPDLMRINEQHFQQTA

SEQ ID NO: 251380 - protein, 355 aa, unidentified
MNDAKYIGLDVHQATISVAVLDSAGKLVMEAVLETKAETILQFIHGLRGSLHVTFEEGTCAAWLHDLLKPHVAQVLVCDRRKNALIKSGNKSDRIDAHKLADLLYLNKLTAVYHGETGIRALKELARSYLALTRDTTRVMNRLKALYRSWAIPCAGQRVYAPRDRSEWLAKITEAGVRRRAEIYYQQLDALRSLREHVRRDLLAEGRKHSAMKLLRQIPSIGPIRAVLLIALMQTPHRFRTKRQLWAYCGLALKTSTSGEYRIVEGQLKRSRKFLAIRGLNANHNHDLKNIFKGAATRAAAVPGPFQEFHAALVARGMKPTMAHLTLARKIAAITLIVWKKGVGFDAEHLKQQAA

SEQ ID NO: 251381 - protein, 415 aa, unidentified
MERIFEVSAGIDVHRDKVLVSVRRVRNTKEEVKTKTFETFHDALAAMAQWLLAEQVEVVGMESTGVYWHPVVRAVQSALPKAVIWVVNPAHVKKVPGRKTDVTDSQWLAKLVMYGLVSPSFLAPAELQELRKLTRHRTKLTADQARYKNRILKELESSGIKVATVCTDVFGKTGRALLDAMVDGKVLSEPQIAKLARGRLRDKVPLLARAVQSPLTPSTVVVLRQLLRRFDDLTGDISSLESEIRQRMQPMNAELQRLIKIPGIDEVAAAAVLAETGPDMSVFPSAKHISSWSGLSPGSEESAGKSKKAPTRKGNKYLRTILVQAAMCAKNAKGTFWQRKFRRLARLGPKKAAVALARGLLGVIFHMLTDGSDYREPDAIPPPPHRLRARVDNLTNQLKALGFAVALSKATVPVS

SEQ ID NO: 251382 - protein, 334 aa, unidentified
MENIALIGIDLGKNSFHIHCQDRRGKAVYRKKFTRPKLIEFLATCPATTIAMEACGGSHFMARKLEELGHSPKLISPQFVRPFVKSNKNDFVDAEAICEAASRPSMRFVQPRTEYQQAMRALHRVRESLVQDKVKTTNQMHAFLLEFGISVPRGAAVISRLSTILEDNSLPLYLSQLLLKLQQHYHYLVEQIKDLESQLKRKLDEDEVGQRLLSIPCVGTLTASTISTEIGDGKQYASSRDFAAATGLVPRQYSTGGRTTLLGISKRGNKKIRTLLVQCARVFIQKLEHQSGKLADWVRDLLCRKSNFVVTCALANKLARIAWALTARQQTYVA

SEQ ID NO: 251383 - protein, 344 aa, unidentified
MEYFAGIDVSLRSCALCIVDGKGNVLLERELPCEVSDIAECLRAFPYPIERVGFEAGTMSQHLFFGLTKVGFDVVCMEARQVNAALSAMRNKTDKNDARGIAQVLRTGWFSPVHMKSREAHGVRALLSTRKALLKKTMDLANEVRGLLKVFGIRLPMTVKHGSFDGVVRPLIEMDEVLVHALVPLLDARVALYEHFLELDRRVKRAASQDEVCMRMMTVPGVGPIASLTFAAAVDDPTRFKRSRTVGAHFGLTPRRYQSGEHDNPGRISKAGDRDVRATLYAAANALLMRTMAGSQIKSWGMRLVRTKGRRRAVVAVARKLAVLLHRMWTDGTEFRQENVGGMA

SEQ ID NO: 251384 - protein, 322 aa, unidentified
METSSVIFDQVVERGCGIDIHKKTAVATIDGNGIKRTTREYGTVTSSLTELRDWLLENKITHVVMESTGVYWKPVYHVLEPSGITVWIVNARHVKNVPGQKTDKKDSVWLCKLLLAGILKPSYIPPKEQRQLRDLTRYRKKLIQDVASNKNRTIRILEDCNVKLSSVLSDTSGVTATKLIDKLCEGKPVTMQDIEAVYHKKIEATKEELWEACNGCVEKHHVYLLQTIRQNTQHLEDQISGLNQKIKELLNPYENTLELLRQIPGLSTKTVEDLVAEIGLDMSVFPTEDHLCSWVGVAPGNNESAGKKKADALRMATNMQKP

SEQ ID NO: 251385 - protein, 316 aa, unidentified
MPNVLYTEFVGIDVSKLKLDVYDTKNNKYFSVSNDKSGIKSLLKQIKPAACQLVLIDLTGGYEAQVTKAFALNGYNVHKAEGRKVRQFIRSFGQKAKNDKIDAKMLTVYGAKMQETLRLHQHQDNQLQELVSRREDIKAMLKQERCRKERFTDIAARRSLSKVIGVLQEQLEAIEQEIKERTNKDEELKEKAKVIKSVKSVGEKTTMTLLASMPELGKANRKQIAALAGLAPYANDSGQTSFKRRTTAGRPVVKQMLFMCAMVAIKNNKDLKAFYERLVSNGKMKMVAIVAVMRKLLIIINHRCKLFYAQRAVSLT

SEQ ID NO: 251386 - protein, 335 aa, unidentified
MDRQYVGIDFHRRRSVIVRLSGSGERLAVHRIANDPFELAAVIADAGVAPQVVIEATYGWYWIVDWLQVQGATVHLANPSGLNWGARRVKNDERDASDLVDMLRLGRLPEAWIAPPATRELRELVRYRAKLVALRSGLKAQVHAVLAKEGVLPSVRDMFCGSGNAQLDALELGDAYTTRVESLRDLIERYDREVGMLERTIYQRVRDDRGYRAIQRIHGIGPTMAAILVAEIGDVSRFRSAEALCSWAGLTPKHRESDTKVHRGAVTKQGSRLVRWAVIEGTVRYHGGGKLAADWHRIAERRGKHKATVAVARKVLTLVYYGLRDGEIRCLAKAS

SEQ ID NO: 251387 - protein, 446 aa, unidentified
MKKSSRMSVIHPHAAGVDIGAEFHVVAVPPDADAAPVRTFQRFTGDLHRMSDWLKTCHITTIAMESTGVYWLPAFEIPEAAGFNVILVNARDAKNVPGRKTDVNDAQWLQKLHSFGLLRASFRPEHDISVLRSYLRQRERLTEYRAAHIQHMQKALMQMNVQLHHAVSDITGVTGLSIVRAIVSGERAPSVLIQYRDVRCKKTPEVLQQALTGNWQPEHLFAPEQSVAFFDFYQEKIRECDDQIETSLLQLSTGTEEPEGVLPSARHRTKQPNQLSFDVRPLLWKITGADLTQIHGFGPYLALKFVAECGTDMNRWPDASHFTSWLCLSPGNKISGGKVLSPKTRRSSSRIAAALRLAATTIGRSDTALGAFYRRLSSRIGKAKAVTATARKLAILFYNALKYGQKYVDPGADYYEERYRNRVLDGLKRRAKSLGYSLQQDPELCV

SEQ ID NO: 251388 - protein, 318 aa, unidentified
MLNESFVGIDVSKDWLDVGWEPAQQTERLVHDEVAMVGLCERLVQERPCLIVLEATGGLETHLASALAAAGLPVAVVNPRQVRDYARACGRLAKTDRIDALVLAAFARAIRPQVRAPKDDETLELGALLARRRQLIDMRVQEKLRLERASPVQRDSIKEHIAWLTERIARLDTDLTHRLRNSSLWRDQEDLLKAIPGVGTITRVTLIALLPELGKLNRREIAALVGLAPFNRDSGQHRGERVIWGGRAQVRRVLYMASVAAIRSNPVIRAFYQRLRAQGKPGKVALVACMRKLLTIMNAMLKHNTPWNPNALDLEHSC

SEQ ID NO: 251389 - protein, 415 aa, unidentified
MALKIVYKICCGIDVHKTFVVACIASTNDKGITSYESHRFSTYTSGLKTLLQWLLDRDCKDVCMESTGKYWIPVYNILESDCSIILAHPKYVKAIRGKKTDKKDAKWIADLFKHDLVAGSFMPPADIRQLRDLMRYRFKLTCFKSSEKNRLQNCLTVSNIQLGNVVSDTFGKSAQAILDKLLENPADTSFDLEPLVYKSLKKKLPELRDAIDGYITPEQAGKLKVIKAHYENLESRKAELEELILALAAPYQQELTILQTAPGISSPFTAIGIISEIGTNMEAFPSAKHLCSWAGLTPTNNESAGKKKSVRVSKAGCYIKPLLVQCANAVVASKKHPEIRNRYLRLKKRRGHKKAIIAIARMLLTALYHMLKSGENYNAELYRKSDLPPVNREITVEQALMIARNQGYKIKSATA

SEQ ID NO: 251390 - protein, 329 aa, unidentified
MMNASELIFVGVDVSKDTLELALNDKGKTQNLSNDEGGIKSLLEIIKAAQSEPGVVGAVVFEATGGFEREAAVALCSAGLPVMIVNPRQARDFAKAMGYLAKTDAIDARVLSHFARTLHQSERREQLLMRLPDAQQAILQALIVRRSQLIQMRVAEDNRRSMSHPTQRKSIDTVRKVLNKQIAAIDQDIDTQLKDHFAAKLALLKNFKGIGTGTQACLMAALPELGELGHEQISKLVGVAPLNCDSGKHKGKRFTWGGRAEVRCALYMAALSSVRYNPVIKVFYDRLLSKGKPKKVALVACMHKLLIILNAIIKSAVPWDENHFVPQIA

SEQ ID NO: 251391 - protein, 321 aa, unidentified
MAKRTTICAGIDTGKRKLDVALDGNSSQLQVENTAEGHKVLLEWLRRHKVKRIGIEASGGYEQPVVAELRRKRFVVVVFQPAQVRAYAKFHLQRAKNDKIDAALIAACTAAVKKIHPAPDPRLQPFAEHLTMIEQIGEDIKLYKNRLETCRDPRIQKVWKEEIARLAKRERAELKALVAAIREHRDLAQRLDLIYSVGGAGLPTAVAILVRMPEIGQLSREQVAALAGLAPYDDDSGEQVGARHIHGGRKRLRRALYAAALPASFRWNPQLIALYTRLKAAGKEHKRCLIACARKLLIFVNTVVARGTPWQDEPLPTAATG

SEQ ID NO: 251392 - protein, 348 aa, unidentified
MEILAMDLGKSNTVVCFYDSDSAKHKFGKVKTAPQQIHDLIAEHSPDRVVFEMGSATGWIYDIAMASGVEVQVANANHYAWRWKNVKKKNDRADALKLAQLSAMNQLPLVHVPKRSIRQKRSLIRYRQNLVKRRTQIKNNIRAILDKEGCSMAQGKSGWSKGTLEELRKMALPIDKCDVDNLWRGQLSVELELLESVGSYIRKIETCLDGQGKTDKQIQRLQTATGIGPRLAEAVVAFLDEPNRFKNGKQVGSYVGLTPRQYQSGEMNHQGKISGQGNKLLRALLVEVSWLGLRHNPWMLKTYERILRGSASRKKIAITAVARKLLVRCWAMMRDEQDWRDEKAKQVA

SEQ ID NO: 251393 - protein, 380 aa, unidentified
MERVCGLDVHKDSVFACILDEQGKKILEQRFGTLTPELDKLRDTLVAHNCCRVALESTSIYWMPIWRILDSDFSLKLANPYFIKQLPGRKSDTKDAAWIAECLQKDLIKDSFVASEELQQMRQYTRQHRRLTKSRVRLEQQLDNQLQRCNIRISNYVSNQGKNKSIRKVINKMIDGERDSVKLCGLIHGRTKNKHGKQVIADSLDGFVGKADVEMLKQCMDQIELIEKQQATCFNLLEELANEHFAKEITLLCTIPGIQKFSALCILAEIGNDMSVFPKATDLVGWAGFRPRNDETAEKVKCRKILHGNKYLRQILVEISWSAARSNKSFLGKKFKVLSKRMKPQKALIAITRKILVITYNVLKTEQPFDPKKNVQADKA

SEQ ID NO: 251394 - protein, 345 aa, unidentified
MTYYTGIDVSLRSVSICVVDDKGEVCLEAKVAAEIDAIVDRLRRFSGDVKSVGFEAGTLTQYLTYGLQAAGFEVICLEARQVSVTLAAMRNKTDRNDARGLAQILRTGWYSRVHVKSLHSHQVRALLASRKAILKKCVDLENELRGLLKVFGIRLPSRVGHGSFDAELRETVCSDEMLACALVPLLDARTVLYKTYLKLDNAVKGRVRLDPICRRLMSIPGVGPVTALTFKAAVDDPNRFKSSRTVAAHFGLTPRRFQSGEVDNPGHISRAGDADVRSALYVAAHSLLTRNAQWSTLKAWGVRLAKIRGHRRAVIAVARKLAVILHRMWIDGSEFRWGSPAQTVA

SEQ ID NO: 251395 - protein, 412 aa, unidentified
MRVMIERCAGLDVHQATVVACVLIYEGRRKPRKEVRSFGTMTQELEALRDWLAAEGVTHVGMESTGVYWQPVYTVLEGRFELIVGNARHIRNVPGRKTDVKDAEWIAELVCCGLIRSSFVPPKPLRELRALIRYRRKLVENQSAERNRLRKVLETANIKLGSVATDVLGVSGRAILRALIDGTASAEEMADLARGLLRRKRAELILALDGRVEEYHRFLLAMQLRRVEAIEQDIEQLDQRIAEKLAPYDIEVGLLEQIPGTDWVTAASLIAEIGTDMSVFASAHHLAAWAGVCPGNHESAGKHKAARARKGNVHLRTALVAAARSAARTKGSYLKDKYHRLKARRGPMRAALAIAHKILVAAYHMLARGVGYRELGEAYLDQIDQTRTAANLKRRLERLGYVVAIQPKEAAA

SEQ ID NO: 251396 - protein, 463 aa, unidentified
MKGKKEINAVGKRKRLSKHLEQVNLYAAGIDIGSQMHYVAVPEGLDTESVRSFSCFTGDLKKMAAWLVEMGIETVAMESTGIYWIPAYEILEESGLEVLLVNARSVKNVSGRKSDVLDCQWLQQLHTYGLLQGAFRPSENIVSFRAYMRQRDTLIKYASSHIQHMQKALRQMNLLLDNVVSSVTGKTGMTIIQSILAGERDPSKLAVHRDPRCKKSEEEISESLHGHYRDEYVLALRQSVHLYETYQDQIRECDLAIEKLLEKFESNGDPDSLSPSKDRKSASAPSFNAREELFRITGVDLTSIPGISEVTALKVISEIGTDMSRWKSAKHFASWLGLSPGTNVSGGKVLSKKTKRTANRASSALRMAAFAVTNSKSAIGAYHRRMRARHGSPKAITATAHKLARLIYSMLKNGAEFVDEGMDYYENQYKDRILKNLKRTASQMGFELIPCQINENLTVSGAL

SEQ ID NO: 251397 - protein, 459 aa, unidentified
MTKHRQKKMKAGKVDALDQINHNAAGIDIGAGEVYVAVPPDRDEDNVRSFPTFTADLQCLADWLNACRIDTVAMESTGVYWIPLYEILEARGFQVCLVNARHLKNVSGRKTDVLDCQWIQQLHTYGLLSPSFRPSEQIVAIRSLVRHREMLVQYRSAHIQHMQKALTLMNLRLCNVLSDITGVTGLKIIRAIVAGERNPQVLAGFREAGCKKSAEEIAKSLEGHYKREHLFALKQALELYDFYDLELHECDAELEALYQQFDPPDDPGTPPPTPRRSKPRKNQAHFDLASALYRMSGVDLTQIDGLDALTVQKVLSETGTDMSKWPTEKHFASWLRLCPNNQITGGKVKQTGVQPTTNRASTALRLAASSLTHSDSALGAFYRRMRTRHGAPSAITSTAHKLARIIYFMLKENKPYHDIGVDYYEQQYRTRVLRNLTRQASRFGFRLLPLDQLPVQEVS

SEQ ID NO: 251398 - protein, 415 aa, unidentified
MALKIVYKICCGIDVHKTFVVACIASTNDKGITSYESHRFSTYTSGLKTLLQWLLDRNCKDVCMESTGKYWIPVYNILESDCSIVLAHPKYVKAIRGKKTDKKDAKWIADLFKHDLVAGSFMPPADIRQLRDLMRYRFKLTCFKSSEKNRLQNCLTVSNIQLGNVVSDTFGKSAQAILDKILENPEDTSFDLEPLVYKSLKKKLPELRDAIDGYITPEQAGKLKVIKAHYENLESRKAELEELILALAAPYQQELTILQTAPGISSPFTAIGIISEIGTNMEAFPSAKHLCSWAGLTPTNNESAGKKKSVRVSKAGCYIKPLLVQCANAVVKSTKHPEMRNRYLRLKKRRGHKKAIIAIARMLLTALYHMLKNGENYNAELYQKSDLLPVDREITVEQALMIARNQGYKIKSATA

SEQ ID NO: 251399 - protein, 369 aa, unidentified
MAVAKRIKKERSSKTMAEGVAAAGLDLSDRRARFHAIDDEGETVETGTVAMEAPHLQRWASNIAPTVIAIEAGTHSPWVSRLLTACGHEVIVANPVKVALITRNIRKSDAVDAEYLARLARFDRKLLHPIQHRGEQAQLDLQVIRTREIMVQSRTKLIGHVRGAVKSFGARLPKCATEAFVNKTRKVIPEQLRSALDPVYAQIEHLSTTIAGYDRQIETTARERYPEVERVAQIKGVGTLTGLTFVLVLEDASRFRRSRSVGAFLGLTSKREQSGEEDPQRRITKAGDRLMRRLLVQSAHYILGAFGEDCDLRRHGMRIAERGGKRAKKRAAVAVARKLSVLMHRLWISGETYDPLRNGGKLAELPSAA

SEQ ID NO: 251400 - protein, 349 aa, unidentified
MDRYIGLDVHAASTTVAVVGPSGKRVKELVVETNGKALIEALKLIPGQRHVCLEEGTQAEWLHEILKPHAEEIVVAKVESSRGPKSDRRDAFALADLLRTDGVTTRVFKDIGSFGALREACRVHCMVTSDVVRTKNRIKSMFRSRGISADSSVYAKRERSTWMKQLPTNKRVPAQALYDELDHQEELKKRCEEHLVCEARRHSFARKLETCPGFGPIRAAQLMAITVTPHRFRTKRQYWSYCGLGIVMRSSSDWVQGKDKSWTRAQVVTTRGLNFNHNHLAKHVLKAAATTVVAQKTSPLHADYQRLLDAGTKPNLAKLTIARRIAAIALAMWKRGEEYDPKKNSKLVS

SEQ ID NO: 251401 - protein, 374 aa, unidentified
MSSNVCHQIIYLAIELSSSSWVIAYRVPRNDKAKLHRLEAGDSAGLLAFIAGLRHRLDPPDDASTLVVSCFEAGRDGFWLHRLLTAHGVINHVVEPTSILVTRGARRAKTDRLDAVGLLRVLAAKFAGDPGACRTVVVPSVEEEDAKRPHREREFLVQERVRIENRIAALLATQGVRERPSLRSWDADMRALRTGDGRPLPTHLVAELNRLRRRLSLTLEMIRELDAVREQALEAQHDSASRMVKALCTIRGIGVNFASVLTREVFYRTFDNRRQIASYLGLAPTPFQSGGMDRDRRINRAGNSRARKTLVQLAWLWLRYQPESSHAAWFRDRVGSLQGRIRRITIVALARKLLIAIWRFVTLGLAPEGAIIAA

SEQ ID NO: 251402 - protein, 513 aa, unidentified
MFTTRVPFWLRCKKPLVRNHQRLVLKSVVLPQRKARSEYLQLKDTSPLVFIHQSKKIIMKKKTSMEIIHPYAAGIDVGSRSHFVAIGQSKEEVQEFGVYNEDLMSLTQWLLDNDITHVAMESTGTYWQSLFSILQEAGLVVTLCNGKFTKNIKGRKTDVIDCQWIQKLHTLGLLSGSFLPDAITEQLRTYCRHRLNLVDAAADSTRKMQKYLRLLNIRLDIVVRDITGLTGLSIESICKGETNAEKLAALRNGNCKKSEAEIAKALQSNKRPDYLFALQQELHLYKQYQQQITACDIEIEKAIRQSINQDEDKKHLKTTDKPHKRINKNAPKNFDLNQLAYQYFNGIDLMAIEGVSHSTVIALMSEIGYEGIKKFETAKQFSNWLRLSPNTKKTGGKVISSHLPKGSNRLKIALRNAANSIGNLKDTHLSDFFRRISFRRGRGAAVSATARKLAVIIWNMIVKNIPYKPPTDYLFLDQRRKLKLVARIRKSITKFELKPDDFGFANASLTTNS

SEQ ID NO: 251403 - protein, 433 aa, unidentified
MAVSLVTRGAAVAGPQGGYAMEDTLIECCCGLDVHQGSIMACLLTGPANSKPRKQLRRFGTMPAELVELRQWLLAAGCTAVAMESSGVYWIPVYAALEADFELFVANPLRIKQIPGRKTDVKDCEWLARLLRQGMMPKSFVPPKPIRRLRELLRFRRKMVERAASQRNRVIKVLEVAGIKLASVASDVFGVSGHAMLKALAEGSASPAQMAALAKGVLRRRLTDLEQALSVPLEEHQRMMLALSLDSLDYDEAQLAQLEAEIDRHLQPYRAQQQLLMRIPGVDRIIAASIIAEIGVDMSVFQDVAHLVSWAGICPGNNQSADKRFSTRIAHGNPFLKTVLVQAAVSAARKQGSYLKDKFFRLKARRGFRRAAVAMAHKILVIVYHMLKFGRPYQDLGDAYLDQLSRSRTKRNLVRRLERLGYTVVLQPIPARP

SEQ ID NO: 251404 - protein, 444 aa, unidentified
MKNSAARKLKQVPAEYLVLGIDPHKKKHAAVAITEDLMVRARFKFANSGAGFEQALENARAEMIKSSCRGVFFAIETGGHYWRNFAYFLEERGIPFRLISQLTLKRMRDGRDINRRKNDFRDAEMAANVFRTGDFTETKLPQGVYADLRNSYSAYFRLVKERTRITNLLKGLLDGLFPEFTQVFKDPCGRTALTVLSVWPSPAAIASMSEEVFVAAIRSVRQGRLMVGKLKALRETAQTSIGIKPGADAVAMEISLLVNRYCLIEQQVDGLVKSLILQVDRTEEGKYLLSIPGINYLSTAALLAELGSLSSYSNAKQLVKMAGTNPIEAESGGKRLGKTPMSKKGRPRLRYSAWSAVIPLFRHNPDFRAWAKRLRERPAHANPLNGKEVVGAALNRLLRLVYVLVKKQEFYRSPQIALLVNQEVDNICIRAGGETPLSVMGAHI

SEQ ID NO: 251405 - protein, 410 aa, unidentified
MEVLYERVAGLDIGKKTLTVCVRTPGARGGRRAETRTFSTMTRSLQVMRDWLLDRGVTIAAMESTSTYWKGAFYCLEEVMEVWLVNAAHIKSISRRKTDVKDAEWIAQPLECGLLRPSFVPPPDIRRLRMLTRYRVQLMADRTREITRLELMLEDASVKLSSVAASLTSVSARAMLGALIAGESDPRVLAELAKGKMRRKIPALTEALTGHFDAQHAQLARSMLARIEAIETALAELNTVIAAAFEPWAHQLELLQTIPGVGEKVAQVIIAETGADMSRFPTPEHLASWAGVAPGTRESAGKRYPVRPPHGNKWLTAMLVEAAGSVGRMKGANYLAAQHARLTSRRGMARAQLAVGHSILVSAYWMLTRDEPYQDLGPEWLARRNDEAHARRLVAQLERLGHTVVLDPAA

SEQ ID NO: 251406 - protein, 312 aa, unidentified
MKNICGVDISKARLDACIEPGSIRGSFKNDATGIAELVALCQQHRVELVAMEATAGYERRAFLQLWEQGLPCAVTNARHVRLYAEAMGVLEKTDAIDAHIIARFTQAKNLKPTPLPSLPQQRLKALVARLRQVTDDLTVQKQRRSSLLDNAEMLASIDEVIALLKRQSRTLEGEIGSMIDDDPLWARLSDTFRSIKGVADRTVAWLMADLPEIGTYSNKAIAKLVGVAPIANDSGKRRGKRPVRGGRAGVRSILFLVAAIAARYDQNLREFRNRLVAAGKEKMIVRIALARKLLVRLNAKARDTRAHYAYAT

SEQ ID NO: 251407 - protein, 427 aa, unidentified
MKKAAVTHEAFESPAPIAPSVLVGIDWADKEHAFAIRTPDGKLHIGSFKHSPAAIREWIEAWNNRYPNLAIEICIEASRGSLINALREFPYVKIYPVNPKALANYRGAFAHGGGKNDPVDARLILKFIEQNREHLRPLQQDSPETRELYALTIHRRQLVEERVALANRIGTLWKQYFPAILELKPARTYSEFVIKLALKYPTLEDVQKAGKTKLRKFFYSIGTKEKMEHRLDLLMEAKPLTTDPTLLRTCARQCQAIGLQIDVLNQVIKGYNSEIKSLVRKHKDYGFVSTLPGASDNTHARIIAALGDDRNRYENAESLQAAAGIAPITTQSGKSRYVNARWACTKFLKQTFHEYAGLSVAKCTWAKRYYEQLQAKGKSKQMAKRALAYKWLRIIYRCWKTGQPYNEAHYMERLRKTGSKLGVASEA

SEQ ID NO: 251408 - protein, 354 aa, unidentified
MSKERTDAALVFIKPERLQAPIASAHAQAGDAKTMSESLVVVGIDVAKAHVDCAVLGADFGARQFANDIDGHSVLAAALQPLAVALVVMEATGGYESALACALQAAGLAVAVVNPKRARDFAKGIGRLAKTDRIDAEALAELAATLARRRDLARFIRPLPDAQQQELAALVTRRRQLLTMLGAERLRLQLATVKVRPSIDALIEAIRAQLEDIDAQMQAHLQEHFAALDDLLRSARGIGPIASATLIATLPELGRLSRREISALVGVAPMANDSGTSHGRRRITGGRFQVRRVLYMATLTATMHNPTIKAHYQRLLAAGKLPKVALVACMRKLLTMLNAMVRTQRPWSDEFHRA

SEQ ID NO: 251409 - protein, 412 aa, unidentified
MRASKLAKSKKMKLPKHLQHINPYAAGIDVGCRSHFVAVPEGSCEQPVREFSSFTDDLHQMADWLLSCGVTSVVMESTGIYWIPVFEILESRGLEVRLVNARHVKNVPGRKSDVLDCQWLQRLHSYGLLEGAFRPAEHVCTLRAYVRQRMTLVRYAASHIQHMQKALAQMNLQLANVVADITGATGMRIIRAVLDGERDPLVLARLRDRRCKNSEQTIARSLNGNFRPEHLFSLKQAVDLYEFYQGQIAECDRQILDQLTRFDAADPSDSGPDAEPPASLGEALQRMSGVDLTRIDGIDTNSALKIIAEIGIDMSRWKSAKNFASWLGLCPGTKVSGGKVLSAKSKPVANRAAAALRMAAFTLFKSKSALGAYLRRQRSRLGAPKAITATAHKLARLVYTMLKHGTAYVDAG

SEQ ID NO: 251410 - protein, 339 aa, unidentified
MQLYTGIDLHANNSYLAIIEETGKRIFHQKLPNDPVAINQALAPYEGTLAGLVVESTYNWYWLVDALMTAGYHVHLANPSAIQKYSGLKHADDKHDAFWLAEMLRLNILPEGYIYPKEERPLRDLLRKRGHLVNLRTSLLISLKNIISRNCGQTLTANEVKKIREDLVAPFLAANEDLALAGQVSKEAIDFLTQKIRKIETFIENKVKLQEPYTYLLGLPGVGKILAFTIKLESGPIARFPQVGNYASYCRKVCAQWSSNGKAKSGGNKKNGNKYLAWAFSEAAELARRFDPQARAYYNRKLQKTNFMVAHGALSHKLARAAYHIMRDNVPFLPEKLFG

SEQ ID NO: 251411 - protein, 334 aa, unidentified
MDKVTTVGIDLAKRVFALHGVDASGRVVLRKTIRREQFVETVAKLPPCLIGMEACSGSHEWARRFQALGHTVRLMAPVFVAPYRKSGKNDGNDAEAICEAVSRPNMRFVPVKSAEQQALLALHRVRQGFIEERTATINRLRAVLTEFGVVLPNRTQWVRRDAVIVAESLPVLARQAVEDLRAHLTKLDERIGAYDRQIEAQARVSESAQRLMQVRGIGPLTAVAIVATVGNARDFKSGRQFAAWLGLVPRQNSSGGKARLGHISRRGDAYLRMLLVQGARSVLYTAARHTDRLSLWALSLQARRGMHKALVGIATKNARIAWALLSKDQTLRTV

SEQ ID NO: 251412 - protein, 346 aa, unidentified
MKILALDLGKFKTVGCAYEAETARHRFATVATTPQALHDLIVALEPDRVVIEICSIAGWVCDLVGTLGIEIQVANTSEEVWRWRKVRRKNDRRDALKAAQLSAVNQLREVYVPEKEMRQWRALITYRQRLVQRRTKIKNHIRDLLQREGEMMARRQGAWTLRGLAQLEELVQPLSSVETDELWRGELALELTQLRAVQRQLDTVEEKLNALGAADARVQLLRTIPGVGPRLAEAIVTLLVDPHRFGKAGEVSAYIGMVPKELDSGETERRGRITRQGNRVVRSLLVEVTWLGLRHNPWVRENYQRISGGKKSRKKIAVVAVGRKLLVRCWAMLRDGTPWHWQPSST

SEQ ID NO: 251413 - protein, 333 aa, unidentified
MGFEPEPSKEGSWMMAQNGLVVAGIDVAKGKVDACIRALSQRRTFESTAEGRRQLISWLRKHKATKVVMEASGGYEREWAKALREKEMAVRIVDPKRVRHFAQSAGRLAKNDAIDADTIAWFAETFGEAPGQAYDAEREKLLQIVNARRGLLETETMLANQGEHSVPDVVRKMQARLLKKIALEVAKLDAAIAAMIKATPHFAKLAEIIESVPGLGEGTSAGLIAGMPELGQVSNKVAAALLGVAPYDDDSGKRRGERQIKGGRRRIRNLFYMPCMGAATRHNPVLKAFYDRLIAKGKEKKVAIVACMRKLIVILNIMIARGEKWDAKRYAVG

SEQ ID NO: 251414 - protein, 406 aa, unidentified
MNAVGIDVSKGKSTVAVLRPGGEIVFSPFEVSHNPKELSELVTLLKTLDGETKVVMEYTGNYYLSIALFLQNNHLFVSVVNPILVKDYSPKSLTVRKGKTDKKDSLKLASFALDRWNYLPAFSNQSETRLLLKSFCRQYNQYLKLKVSLKNNLISILDQTFPNANSLFTTPKRKYDGHEKWIDFVLKFPHSNCISDKPFSSFRKSYLLWCRKFGYNFSELKAKQIFDFACNCSPSLPLCPATSVLVVNVVSQLNALNETLASISEQMNSLSSSLPEYDTVMSFYGVGSVLGSQLIAEIGDVSRFKNKKALVGFAGIDAPPCQSGNYDPLSRSISKRGPALLRKVLFQIMSVILQNSPSDDPVFQFMDKKRTEGKHYYVYMMAAANKFLRIYFARVTEHLNSLNAAA

SEQ ID NO: 251415 - protein, 426 aa, unidentified
MRKTYQICCGVDVHKTFLVATIVKTTNNIPHYEKKRFSTFAKDLRLLKHWLLNNNCFDLCMESTGKYWIPVWNMLEDKINVTIANPKWVSAVKGNKDDTKDSKWIADLFRMGIVPGSYIPCRAIRILREFTRYRYKLVCMRSSEKNRYQNAFTVSNCNLDAIVSDMFGKSAMDIENYLLEIDMENFDPEYCKSLLQRSLKKKADSVIESVESFNMIVEQKERIKIIQEHFNDLDARINRIDEQIEKLIVTNKWQSAISLICSIPGIDRHMAITIISEIGTDMTPFSSSKRLCCWAGLTPGNNQSAGKKKSVKITRAGIYLKPALVQAAHAAVKSTTNPYFKNKYERIYKRRGKKRAIIAIARKILTAIYHMFKNGELFNPCDIYKENIPETVQLHQKKKAAKQAIKLLVNLGLIAEDTVPLELLAS

SEQ ID NO: 251416 - protein, 341 aa, unidentified
MADLDLVGIDLAKNVFQPHGCSSTGEAVFRKQLRRNKLLSFIAELLACTIAIEACSGSHCRGREFEALGQTVRLIAHKYVKPFVKRSKSDLIDAEALCEAALRPTMRFVQVRSEDNQAAALAFKARDLLVQQRTQIINALRGHLSEFGFVVAKGPTHVRKLVSVVEDGSIKLPEMSRPLLNIFVDTLEALNVRIRQLEAQIAQRAKEDETCQRLTAIPGVGPIIATAIVALAPPPSTFRRGRDFAAWVGLTPLQHSIGGKQRLRHTSKMGNRTLRRLLIIGASAVVRWAEHNGAAPGSWLARMLERKPPMLVRVALANKMARIVWALMAHGEEYRVQVVTR

SEQ ID NO: 251417 - protein, 468 aa, unidentified
MTVKQEGEVGVGKDRKSRKGKKKRKIAKLDSLKQLNLNAGGLDIGAAEIYAAVPEGRDEVSVRQFETFTVDLNSLADWLEACGVDTVAMESTSVYWIPIYEILEKRGFDLYLVNARQVKNVTGRKTDVLDCQWLQQLHTYGLLRESFRPSQEICELRTLLRHRGNLIRWRAAHIQHMQKALNLMNLHLTNVISDITGVTGMKIVRAIVAGARNPKVLAQYRDPNCKNSEEVIAKSLEGNYSSEHLFVLQQALELYDIYTVKIRTCDVEVEKLYSTFESQVDLAEEPLKPSKKNRRKNKNVPEYDLRTYLYQMTGVDLTAIDGLDVLTVQTIISEVGTDMSKWKSVKHFTSWLGLAPENDISGGKVLRRGTKKVKSRANLAFRQGAMGASRGQSVLGAFYRRIRAKHGPGVANVATAHKIARIFYVMLKEQQEYISPDTADYTAKQKERAIKHLRRKAARLGLQVVPAA

SEQ ID NO: 251418 - protein, 340 aa, unidentified
MNEITTVGLDLAKHVFQVHAVDAEGDTVLRKQLRRGQVLAFFSRLPRCLVGMEACATAHYWARELRALGHEVRLMPAQYVKAYVKRNKNDAADAEAICEAVGRPTMRFVPVKTAEQQAAVLLHRGRERLVRQRTMLVNALRAHLAEFGVIAPQGLRNVGRLIAIIRDDDDARLPGLARQVLQVLAVQIEQLEAAIAALEKRLMGWHKSNPVSQRLATVPGIGPIIATAIAAMVAEPSGFRSGREFAAWLGLVPRQNSTGGKNRLGGISKRGNQYLRRLLINGASANLLRSKATNADPWVIGLRRRRPSLVVAVALANKTARIAWAVMHRQENYQRMATAA

SEQ ID NO: 251419 - protein, 320 aa, unidentified
MMAQNDQIVVGIDVAKDKVDACIRSLSQRHTFPNTAQGHRKMIAWLHKHKVNKAVMEASGGYERDWARVLRLAGIGVRIVDPKRVRSFALSAGRLAKNDTIDAEMIAWFAETFSAAPGQPHDAAREELRALVKARKHLLDLQTRLKSQNEHAAPEAVQKAHARILKSLATEIARLEAAISAKVKATPNFAERAEIIESVPGFAETTSANLIAGMPELGQVSDEIAAALIGLAPYDDDSGKRRGERHIKGGRRWVRNAIYMPCLGAATQNNPVLKVFYQRLIAKGKEPKVALVACMRKLIIILNTMIARRQKWDPSRYALS

SEQ ID NO: 251420 - protein, 380 aa, unidentified
MLKQAIGWDLHRKFSKVSVMRREDDGEPYVVERARLDHADPEAMRRWLSRQPPGTPVAMEGAFGWQWVADFLTEAGLTPLLGHPPEIKALSKNEAKCDRRDADRCARLQLKGTFPKCYLAPPEVRQIRERTRYRQALVATRTELKNRVQAILHRLGLLHNFSDLFGKGGRQWLKDLTLSDAFRNELDGWLSVIDVLGEQIREVEAWMNANLLEDIVVRHLRSIPGIGLILAHVIRAEIGELTRFVDRLKLTAYAGLAPLSDDSADRHGRRHISRFCNHTLRWAFIEAAGITVQSKKCPENLRRLHNRLTGGNKFNKNAAKVAVARELCELVYVIWKKGTPYLENPPSRPGTAGGQSSLRSEQPRRPMVRRQANRRGQTPK

SEQ ID NO: 251421 - protein, 347 aa, unidentified
MLYAGLDLSRHKLDVHVMTEAGEPVQVTTAPPDADGLRGLARQTAGYGEPVAAAIESMNGARFGHDQLELAGWQVQVADAQKVKGLAPLACKTDRIDAWVLAELARRELVPAIWLPTPEVRAERERARWRLHLVRHRVALKNRVHATLLAFGRPCPTSDLFGSGGRQLLDRLRLPEPWAGTTAAAVALIDDLDEQVHGCERELRHLGADHAYVPLLMTAPGIAWVLGYTIAAELGDIARFPSPKKLCGYTGLCPRVYQSGTRDHRGPLAKNGPKYLRWALIEAATHAARHPCYHDHYQATKRRLGRQRGPAVARVEIARKLAEAIWHMLTTQAPFRPARPHAKALAA

SEQ ID NO: 251422 - protein, 457 aa, unidentified
MRQRGRRTKGMEEAHPFAGMSQVNQDAAGVDIGAEEIVVCVAGAESTQIVKAFGNYTVDLQNIGRWLQEHQVKTVAMESTGVYWIPLFEELERQGLECLLISSRSLRRVSGRKSDIQDAQWIQTLHRYGLLESSFRPQGELVALRTLLRHRAQLLEHRSPHIQHIQKALLQMNVQLSQALSDVTGETGLAIIRAIVAGERDPHKLAGLRDRNCKKSAEEIGKALTGTWRAEHLFVLKQALELYDFYTQQVEACDAEVDRMYAMTRPDWEAGELKALPQKKRNSHSKNAPQKQAEIRKHLQRISGVDLSVVDGFGVSLAQTVIMEVGTEMGKFPSEKHFCSWLGLAPKHEISGAKVLKNKTLKTKNRAGQAFRMAAQSVKRADCVFGSLYRRLKSRLDKAQATVATAHAIARVVYRMLKYKVEYEKINVEEYEQKYKDQQIKYMKKKAEKLGFQLVPA

SEQ ID NO: 251423 - protein, 337 aa, unidentified
MKRYLGVDLHRRQFVVCTRLENGEQEIRQWRIGELPKFVKQLHKEDQIAVEAMGTTARFYDAVVGRVARVAVVNPHQFKVISESVKKTDRNDAQALALYLEKDLLPEVRMKPKQNRELMHLAETRDLLVKQRSALKGKINNLLAMQGIELKREALSSKIALERVLALPVSGMVQLELRILVEQIRSLSESIAELEERLEEEGQQLPGYENLISIKGIGGLSATVLLTVIGKISDFADENKLAAYLGLVPRIANSNESERSGRITKQGNKLARTALVQCGLVAKRYSPYLSRFYQRIKQRRGGGKAKIALARKLVKIVYDTLKNQWVFEDFPSFTLAA

SEQ ID NO: 251424 - protein, 375 aa, unidentified
MTIQTDVSRFVPRDFDVFAGLDVDKKSMSVVFTDHQGTMRALRMSGKATPLVNYVRKHFPGQRVAFAYEAGPTGFGLHDELAQQAYTCVVVAPSKVPRVPGERVKTNRLDSRKLAESLRGGQLHSIHVPTPGYRDLRHLVQLRDTHVRQLTASKLRIKSLLLYEGIPFPEPSEKWTARAMRELPTLPCSETVRFKLDDLLDTLHFHFQAAARATKQIRQFCLHDPELQQSINLLLSLPGIGWIVASHLVARLGDPQQIKNGKQIAGFLGIVSSEHSTGEKENRGPITRSGDSRLRNKLIQSAWTAIKKDPELRAFYRRIYQRQPKKVAARKAVVAVARKLTTRIYVVLKEQRPYVMRPVSSIAPLTVEETVGPRD

SEQ ID NO: 251425 - protein, 313 aa, unidentified
MSESFVGIDVSKNVLDVAFSDGRVLQVSNDEAGFVALRQELAGKVPGLVLMEATGGLERSIAAELSAAGIPLRIMNARQVRHFAKATGALAKTDRLDAQALVQFAQALRPEPRSIQPEHMQALQALIVRRRQLLEMLMMEKNRLHTAHRGVRADLRSSIRGLEKRLKGVDEDIDGALQGCGALREKIELLESVPGIARVTAVNLVATLPELGTLNRREISALAGVAPFNRDSGQSHGRRSIWGGRALARSALYMAALVGARHNPVLRTFYQRLRQAGKPSKVALVACMRKLLVILNTMLKQQRPWSPQFTHPA

SEQ ID NO: 251426 - protein, 496 aa, unidentified
MLESLIWAVKADKFMGRLIPRLKPANIPRIRDCVIERVWEIIPYKGMIICPYQAETYMKKRRERVCGADVHKDLIVATITGDEVPSIRENFGTTKSELDRFRNWLADNKCEQVAFEATGVYWIPIYDVLSRTIDTIVANPLQIKSIPNDKSDSKDSKRIATLCLNNQIKRSRVFSDEDRELRNLTRARSGYVKTRTQFKNRIHKYLSSNGIKLSSSMDDIFCKSGTHIIRGLAEDKPVEEILKGIPSGKIRKKQDEIRSALANELSETNRMLISDSLEIMDNVESKIEKTSLNILKKIQNKSKDLAIVMSIPGIAFISGSVILSEIGNYRDFQTPEQLAKWCGLNPGENESAGKKRKCGITKRGSKYIRVVLVEAAQTIANMKNTGLSRFYKRLSKKKEHNVAIVAVARKLICLIYHLLINQEFYQEVDCRKRKKGRNESCHEPSLKDEHLTDKVAAIVDAFYGMSDSSRKKALLRALEDISVNKPDQKRSSDGGG

SEQ ID NO: 251427 - protein, 330 aa, unidentified
MFNYIGIDVSKATLQVYIPISDENISIENSKKSLISLYSKLKKYYKKEIKDLVIIFEPTGSYSALLKRFCFEKDIYAFIINPRQSSNFAKALENRSKSDIIDAKMLYKFHVMLSDNDIAVPIIDSVQEELSETLTYYKFIQKQRVSFSNHLEALEAKDGSIIIVKKLKKEIKHLKDEEIKVVSIMKSLVISDDSMKQKFDNITSIVGIGDKAAIVLMHLFITYPESNRQEIVALSGLDTIENTSGTSIQRRTRISKKGNSIYRSVLFMPVLSAIQHNQYMRRFYDRLKENGKHSTVAQIAVMRKMILIAHSLYKNNVKFNDLTYEKSIGI

SEQ ID NO: 251428 - protein, 349 aa, unidentified
MSIIGGLDVYRGQITFDWVDADSGEARRGRIMPATRARLGEWLAGLPGDGGAFAVEACTGWRFVVEELQRAGLAAHLAEPADTASLRGRKRRAKTDRADARLLRELLTQGRLPTAWIGPGWILDLRTTVRLRKTLVDQRTAWQQRIHAVLFHHGLPRPSAELLCAPTRSWLEQVTLPPASRQLLQIALRQADQIDAELDPIDRWLGALARRQPGCRALQRTHFGIGAVTAPTILAELGDARRFPSGDQVVRYTGLDITVYASDDKRSPGHLSRQGPEVLRWALFEAAKAAARPSSPDYDLYQQVKARQGGNRATLTVARKLARRVRHTLLALGDQALAPVTDLPLPTAA

SEQ ID NO: 251429 - protein, 346 aa, unidentified
MAYYVGLDVSVKETSICIMDDKGVVAARTDVSTDPDLIAHFISKHASEVERVVHESGILAIWLTRELEKRGVPIICIDARLAHKALSGRINKSDQGDAEGLAQLARTGWFTQVHIRSEASERMRVLIGARERLIRMRKDLEGHVRGVLKVFGVCMNSVQTGKLRKGFRDQLAAAADKDPAIAMMAEMFIPLHKTLCIARDALDDEVRLMARESDLARRLMTVPGVGPIVALAYIATLDDEKRFRKSIDVGAFLGLTPKRHQSGEVDWSGKISKCGDCDMRRLLYSAASTLISCTRKPSRLKEWATKLAERKGHKKAAVAASRKIAVILHCLWRNETMFEPGMEGTS

SEQ ID NO: 251430 - protein, 386 aa, unidentified
MKKNTTTKKSSKKAQTKEKNQIHRMAAKQKLTIGIDLGDQTSRYCIFADGKDPVSEDQLPTTKAGLDSLFAKMPASRIAIEVGTHSPWVSRHLRSLGHEVIVANARQVQLITHSVHKNDRVDARQLARLARADPGLLSPIQHRGEEAQLDLAVIRARAELMEARTKLINSARGLVKPLGERLKKCDADQVSAGLGKGLSEGAQAIIEPVLKAVEAISEQIGKYDEQLERMEKRYPEVKLLQQVYGVGPVISLTFVLTLDDGQRFAHSRDVGPYLGLTPKQRDSGESQPELGISKAGDGLLRSLLVQGAHCILRKGAAESDLRAWGLGKIGNGGKRAKKCAVVAVARKLAVLLHHLWVTGEVYDPHYNSKAAEAAAAKAKSKAKVAA

SEQ ID NO: 251431 - protein, 316 aa, unidentified
MSEQTCAIGIDVAKATLDIAVRPSGERWQVGNEPAGHGAVVERLRALAPTVIVLEATGGYEAPVVAALAAAGLPVVVVNPRQVRDFGRASGKLAKTDALSAALLAHFGEVMRPPVRPLPDAVTQELQQWLARRRQLVEMLTAEQNRRPSAPAPVQKQILAHIGGLRRQLKSVERRLRELIQRSPVWQEQQQLLVSVPGVGPVLATTLLADVPELGHLNRKQIAALVGVAPLNRDSGTLCGQRVIWGGRAPVRAVLYMAALVASKSNPLIRGFYDRLVAKGKPKKVALTACMRKLLTILNAMLKHGTVWNPKLTCDA

SEQ ID NO: 251432 - protein, 475 aa, unidentified
MNLKGKKTKNQVVTANIFEQQELLKKAEVIREKLTASTWHELETNGKFDKNAKLSFISDDMLILGCDVGSETHYLRAIDPRGRELSKSAYSFRNNCEGFQSAKEWAVELAAKNEKKQIVLGLEPTGHYWFCLATWMIANGISVVQVNPYAVKQTKEVEDNSQLKDDTKDPKLIANLVKDGNFGMPYLPEKVYAELRRLSMFREQLNEDRIRAINRMHREMKIYFPEYKEALGRVEGAFSLELLKQTPFPEEIQTLGEEGIRQIWHDAKLRGRGYSRVREIVGYAKTSVGMKDGAEASAMAVKWFVKEIRELDEKLAEIEKLMREKYQEIPYAKNILEISGIGENTLSGILAEMGDISRFDDVKEIQKLSGLGLVACSSGKHKGETKISHRGRKRLRYWLFQAAKSAVAHAEEFKELHVYYTTRADNPLKKMQSLIVIACKLLRIIYGILKNGTVYDPKKMLRDIRRPEKKEVIAA

SEQ ID NO: 251433 - protein, 331 aa, unidentified
MDIKEVIGIDVGKQKNEALIHTKQKVLEFDNNAAGFRKMERWVLKNTAYQKQQLMFAFEHTGLYSYPLSLFLTEKQYLYIVLPGLELKRSMGITRGKTDKIDAKRIALYTYEKREKLKPFELPQKEIIQIRRLISLREKLVKQRAGYKGTLGEYKHFLKKKDNEMLFIVHEKMIKELSKQIEKVEEKLDEIVKHNDQLKQMYNLITSVKSVGKQTALFMIAFTNGFTLFKNWRKFATYSGIAPFPYSSGTSVRGRTRVSNLANKRIKSLLDLCAKNSIQYNQEMKLYYQKRLEEGKSKMGTINIIRNKLLSRIFAVVERGTPYVNTMKYVN

SEQ ID NO: 251434 - protein, 332 aa, unidentified
MENFYFIGVDVSKKKLDFCVMFEGKVVHEEETANHQSAIMSLLHHFEEDYGIDNTRMLVCAEHTGQYTFPLACACKTVECKLWLENAAEIKYSSGVQRGKNDKVDARRIAIYASRFQDKVRYYEHPTEDIERLKQLESERTLYVTDLVKYKGQMKDQKDYMPKALYERKMKRLQALMDDLKEAIQAITDEMDEVIASCPVLFRQQELLMSIDGVGRVVATNMIIATEAFTRFDDPRKFNCYAGVAPCSYSSGSSQHSKARVSHRADKVMKRLLHLAAVAVTHRVGGELKKYYERKVAEGKNKMSVINALRVKIVARMFAVIKRNEKYKPILS

SEQ ID NO: 251435 - protein, 421 aa, unidentified
MTQPYGNTGDVALVAIDIAKRQNAVLIQPPGGVRKKLTVTNDLAGYRELAQYLKKLKRPCKIGFEATGNYHRTLAFYLRQQGFELELISSVAASRMREAMYNSWDKNDPKDAQVILHMLQTGLTQTYHDPLEHRINDIQELSQTYCQVSLRKTRVQHSIMTHYLPLYFPEAAKYYHTSRAAWFTSLLMTFPNPAAVLKYSREDFIKAAQAVSGRKVNKAAWLRDFYETARESISLPVPEDSEAIRMFRLVLQEHQDLCRMRRAIEERAELYLKDNADYLRLRTIPGIGAVIALIILAEAGDLRRFSHYKKFLKYCGLNLSTQQSGAFRGLSKLSKYGNSRLRYAFWIAGTSAIRMRENTFRKKYENYVKSDPQNPDLKRKAYTAVAAKIARVAYGLVKSGREYRCYHESSVPSGIILSTGR

SEQ ID NO: 251436 - protein, 354 aa, unidentified
MTSTKYIGMDVHKESISIAVMNAAGKIVMECVIETKANMILQCIDGLRGDLHVTFEEGTSAAWLYDLLKPHVTELIVCDPRKNASMREDNQNDKIDARRLAELLRIDHLSPVYHGEHGLRTLKELVRSYLTVTKDLVRVKTRVKAIYRSWAIPCNGKEVYAACHRAEWLEKIKELGVRRRAEFYYQQLDALRVLRQGVRRELLAESKKQKAWKRLCQIPAIGPIRAAVLLGILQTPHRFRTKRPLWKYSGLAIETCSSADHRSIHGQLQRSKKNSVRGLNQNCNHDLKNLFKGAAIVASSKPGPFQKFYAALLAKGMRPEMARLTLARKIATIVLIVWKKGVCFDAQHLKPQTA

SEQ ID NO: 251437 - protein, 345 aa, unidentified
MPIVGGLDIHRKQITFDYLDTVTGEVRRGQITPADRAHLRAWLARFAGRDDVAFAMEGCTGWRYVAGELAAASIAAHVGEPADTAFARGRKRHAKTDKTDSRHLRQLLADGRLPECWIPPAQILECRALLETYHDLRREHTAWIQRIHAVFFHQGAPALGEGALRTEQDLAALRAAATAHLSPAGQLQIATALDMLAAVEGRMDMLRQQLLHTARHLTGAKVLTARLYGVGPLAALAMTCWLGGAGRFSSSRKAVRFAGLDVTVYSSDGKRSPGHLSRQGPEILRWVVYEAGKTHARASAPGHDYYAAVKDRTDGKLAALSQARKILRQACHILTELGDDALTAA

SEQ ID NO: 251438 - protein, 411 aa, unidentified
MDIIHERSAGIDISKRDAKVAVRTPGKRKGTFETSVTTWGSTMSQVLDLIDYLVRLRVTTVAMEATSDYWKPFYYVMENDLPVMLVNAKHARNIPGRKTDVSDAAWLAQLAAHGLLRASFVPPEPIRELRDLTRARSVAARDRGRQMQRLEKHLESSGIKLSSVASNLIGKSGRLMLEALCDGERDPVVLADLAQRTMRHKIPQLVDALAGRFTEHHAFMVRQYLAQIDAHQQMIDALTARIEEKIEPFRPARDALITIPGISTTVAEIIIAETGADMTVFETAAHLASWAGVCPGMNESAGKVKSSATTHGNAYLKGALGVAAMSASRSKGTYLGARYRRLVARRGPARAIVAIEHTILTAVWHMLRNGEVYADLGPDHFSRLNPDRARNKAVRDLENLGYQVVITPTAA

SEQ ID NO: 251439 - protein, 356 aa, unidentified
MSREVKYIGMDVHKEAIVIAVLNTRGHLVMESIVETKASRILQFIHGLQGELHVTWEEGTWAAWLYDLLKPHVDQVLVCNPRRNALLKEGSKNDKVDARKLADLLRTGMLRPVYHGEHGLRTLRELARTYQTLSQDLNRVMNRLKALYRGWGIACGGPQVYAPRYREEWLGKIEHVGVRRRAELLYEQLDGLQSLRRTLRSELLAESRKHQAAKLLRQIPCIGPIRAARLIALMQTPHRFRSKRQLWSYSGLGIETRDSAQYRFVRGVLQRAKKPQQICGLNRNHNHEMKDIFKGAANRASCGMGPLRDFYVALLDKGMKPEMARLTLARKIAAIALTLWKKEERFDAEHLKMQAA

SEQ ID NO: 251440 - protein, 325 aa, unidentified
MKKHKLVCGADVSKATLDLFFNDDAGKEHYLQVSNNQKGYDLTLEKLGSDRTYVMESSGPYYLWFAFVLKQRGADVRVENPITVKRFIQMHLERNKSDKKDARWLYRYGIEREGALWQPPCEESLKCNQILGLIDMYTRQLTQLSNQLHSLQQLPVMEKELIKSIEKMRNSLSREIGKLESRLQNLLNTWQGTQLQNLTSIPGLGKRAVSLLIVYTNGFKKIKNHRQLIALAGLAPREYSSGSSVRGRKGICKMGNGHLRNVLYMCSLSAIKCNKACKELYERLKAKGKKGKVALIAVCNKLLKQAFAIATKGEVYQPDHKSSLT

SEQ ID NO: 251441 - protein, 326 aa, unidentified
MNLPAIVLGVDIAKLKFDVCLIKENQRVKHKVFVNARHGFEQLVAWLASHGVGSLHVCLEATGSYGEALAAHLHEVGYRVSIVNPAAVKAFAASRLTRTKTDKVDAELIARFSLAHEPQAWQPPLPEVRHLQALVRRLESLVEMRVAEENRLSSGVAVDAVRHSLAEHIAYLVEEIKQTEQMIREHINNHPDLKEQSDLLDSIPGIGQTTAVLLLAEIVNIKQYKSARQVAAYAGLVPRERRSGSSVRGRVQLSKIGNARLRKALYFPAITALRCSDFFKAWADGLQARGKCKMSIIGAAMRKLIHLAFGVLKTGKPFDPNWAKTS

SEQ ID NO: 251442 - protein, 395 aa, unidentified
MFIVGIDVAKRSHEVCMITSDGQTVQRPFSIRNNCTGYNLMLEKIRKHTNIKSQIVFAMESTAHYWLALFTRLRKDGYHVILLNPIQTSAMRDMFIRKIKTDAKDSFIIAELIRFGRYAESNVAQDRLLALKELCRNRFYLVDMAGDLKRKLIALIDRVFPEYEAQFDTIFCKSSVALLKKYPTPQKLSNAHLDKLTELLWNSSNGHFGEWKARELRELARNSFGVEDCDGAYSTLILLMLDQIQSLSGKADALEKEISRLFQSFDTTVTTIPGVGPIIGAVILSEVGDISRFSSADKLAAYIGVDPSVNQSGEFQAAHAHMSKRGSPYLRRCIWMASQVAVQRDPMFRAYYEKKAAEGLKYMTIIGHVTRKMTAVVFAILRDHKVYEPILPTAA

SEQ ID NO: 251443 - protein, 444 aa, unidentified
MASTVEEIDADEHEERLERVAAIDVAKASGKVCVRIPGKQRRVTRVWDVSATTNAIAGLADELAEMGIERVVLESTSDYWRPFFYLLEARGLVVWLVNAREVKSVPGRPKTDKLDSIWLARLNERGMLRPSFVPPAEIRELRDYTRLRTDLVRERTRHKQRVEKLLEDALVKISTVASDIFGVSGRAMLAALIAGERDPEVLAEMAKGRMRPKKPQLREALTCRFDEHHAELLRLLLRQVDQLSAEIDLLTARIEELIAQIPAAQAPADPETGEIGGPVDAPLPVIERLDEITGIGRPAAQAILAEVGLDMGQFPTPGHLVSWAKVTPRTIQSGSRSRGGKTGKGNPYLKGVLGEAAAAAAGTDTFLGARYRRLVKRTGKLKAIVAIERSILVIVWHLLSDPSARFVDLGADFYERRIDTERKTRDLVRQLIALGHEVTLSPAA

SEQ ID NO: 251444 - protein, 359 aa, unidentified
MNVEEGTGRRVVGGVDTHKDLHVAAVVDERDRVLGTRCFVTTRQGYRQMLAWMRSFGEVQRVGIESTGSYGAGLLRFTQQAGIEVLEVTTPDKHDRRRRGKNDDLDAQNAAHAAFAGKRTVTPKSRDGMVESLRVLKACRKTAVAARRIALQMIQNTIVCAPDGLRDVLRTMTRMQLVRTLAAWRPDLTAYRDVESAYRISLKSLGRRYLELHDEITDLDAMIGAIVDELAPNLVARNSIGHTSAAQLLLTAGDNPERLRSEASFAALCGVSPVPASSGKTIRHRLNRGGDRAANSALHIIAIGRLRTDPKTKAYVAKRIAEGHSKLDAIRALKRYLAREVFTLIAQRQKEINQARIAA

SEQ ID NO: 251445 - protein, 411 aa, unidentified
MSGSDKPAAGPYDVFCGVDVGKSEHHACALDPAGRRLFDKPLPNDQGALAAALSRLAGHGKVLVVVDQPAAIGALVIAVARSLGIDVGYLPGLAMRRIAELYPGEGKTDPRDAYIIADAARTMPHTLRRVGTEEETLAGLGVLVGYDDDLAAQSTRCDRPAARGPLHIHPALERLLGKHVERGGVLQLLAAAPTPDALRALGEAGMAQVMRVRSPRLAKTLPARILAALDAQTVVVPGTRDFGRVITGVATQLRDVHLERTDLATDLQTRLEAHPLAAAGTSMPVVGLRTALKIRTIVGDGSAFPTAGHLAAYAGLAPVTRRSGSSIKGETRSQRGNHALKSALFLSAFASLHDPTCRDHYDRKRAQGKRHNAALICLARRRVDVIFAMLRDRKPYQQPASGEPTPTAAAA

SEQ ID NO: 251446 - protein, 343 aa, unidentified
MNAFYYIGLDIHKKVISYCIKALDGRLIGQGKIDADRKALGEWVQGLPGPWIGAMEATIFTGWIYDFLKPYAVDLKVAHPAMLKAITAAKKKNDRADAEMIADLLRVNLLPECHMLSEEIRELRRILRYRNHVVRTAVKMQNKMSGLLMEVGASYSKKRLHGKKYFNSLLERVEEIPHSVKELLKLSRASFEMFRAVQKRLIEALRTNSLIRDRVQRLMTIQGIGEVTALTWALEIGDPERFGSIRKAISYCGLCSAQKESAGKEQRGPISKKRNKHLQTMLIEAAKIAPIWNPQLAAVHERELKKGNRNRATLAVARRLVAYMMAVDKNETDFMLRKEEKAA

SEQ ID NO: 251447 - protein, 415 aa, unidentified
MALKIVYKICCGIDVHKTFVVACIASTNDKGVTSYESHRFSTYTSGLKTLLQWLIDRNCKDVCMESTGKYWIPVYNILEKGCSIVLAHPKYVKAIRGKKTDKKDAKWIADLFKHNLVAGSFMPPSDIRQLRDLMRYRFKLTCFQSSEKNRLQNCLTVSNIQLGNVVSDTFGKSAQAILDKILENPEDTSFDLEPFVYRSLKKKLPELRDAIDGYITPEQAGKLKVIKAHYESLESRKAELEELILALAAPYQQELAILQTSPGISSDFTAIGIISEIGTNMEAFPSAKHLCSWAGLTPTNNESAGKKKSVRVSKAGCYIKPLLVQCANAVIKSTKHPEMRNRYLRLKKRRGHKKAIIAIARMLLTALYHMLKNGENYNPELYRKTDLPPAGREITIEQALMLIRNQGYKIKSATT

SEQ ID NO: 251448 - protein, 341 aa, unidentified
MEWTVAIGVDTHKRAHTAVALDRVGVQVASCEVEATSAGYAQLLAWASELGEPAFALEGTGSYGAGLASLLLAVGLPVCEVERPRRRDRRRGKNDLIDAARAAGRLLSGEGLSALRGGNPAREDLRLLLLERRSAVRARTAALNQVHAVLLTAPARLRERLDALRGEKLADRCARLRPRDESERVLVSVLNRLAVRARLLARELAQLESELERIVSTLVPELLAECGVGPVCAAQLVVSSGDPERMRNDASFAALAGTSPVEASSGASRRHRLNRGGDRQLNAALHVIARTRLRCHPETRAYRDRLLARGKSKREAMRCVKRQLARHCYRLLVANPALAGP

SEQ ID NO: 251449 - protein, 355 aa, unidentified
MTSAKYIGMDVHKESISIAVRNAAGKIVMECVIETKASTILQFFDGLRGDVHVTFEEGTWAAWLYDLLKPRVTKLVVCDPRRNALLQEGNQNDRVDARKLAELLHHNQLRSVYHGDHGLRTLKELVRSYLTITKDLSRVMTRVKAIYRSWAIPCTGKQVYASRHRAEWLGKISEPGVHRRAEFYYQQLDALRCLRQQVRRDLLAESKKHQAWKLLCQIPSIGPIRAAVLLGILQTPHRFRAKRQLWTYGGVGIETSSSADHRVVKGQLERKKKPVEIRGLNENCNHDLKNLLKGAAIVAATKPGPFAEFYAELVAKGMRPEMARLTLAKKIATIVLIVWKRGVCFDAQHLKPQTA

SEQ ID NO: 251450 - protein, 454 aa, unidentified
MIAAVVERCAGIDVGKRFLKVCVMVGPLSEEPRFEIRKVDCTSTALEGLRQWLKAEGVTHVVMESTGPYWVPVFNVLEADVKVVLANPVEVKNRKGHKTDAQDSWWLAHLLRHGMIRASFIPEKATRDLRELTRRRKKLVEQAAQERNRVQKQLEYGNVKLGNELSDVFGLSGQLMLKALVDEKRTAEQIAELAQGSLKKKKAAIAEAVRGQRLSETQKEMIRSSMRHMTFVELEIEQLDGLVAGLIRESGQQKQHELLQTIPGIKAEAAGNLLAETGPDMKQFPDAGHLSSWGGVCPGNNESAGKHKSRHTTHGNPWFRAALTECAWSASRTKGSAFETKYESLKPKIGHKRALVAVAHLLSHAIYNVLSRGEAYRETKPKELNEIQRQRLIRHHTRRLRRLGFWLPAEKLTPLQQWYATHCIPNMDPPQPKRRGRKKGQLQDGASERGVVNG

SEQ ID NO: 251451 - protein, 418 aa, unidentified
MKVVYPICCGVDVHKTFLVATIITSEGITPHYSKKRFSTFNNSIRQFKQWLIDNNCYDVCMESTGKYYVPVYNILEDTIRVTVANPKWVKAVKGNKDDVKDSKWIGDLFRLGLVPGSYIPDKPIRILREYTRYRSKLVSCKSSEKNRFQNSLTVCNVALDAVVSDMFGKSAYSITDYLISSEDFDPTHCTSLLHWSMKEKADSVVESIEGYQMTREQKERMVMIRSHLEFVQQSIAKLDEKLDKIVAPYESAISLLCTIPGVDRTSAITIISEIGTDMSQFTNSKRLCCWAGLSPGNNESAGKKKSVRISRAGVYLKPALVQIAHASVKSSKSPYYKNKYERICKRRGKKRAIIAIARMILTAIYHMFVTGEEWNPSDLYKIDIPHEMMEKQKEKAVKQAIKLLVSQGLIKDTDISVA

SEQ ID NO: 251452 - protein, 432 aa, unidentified
MKRRIYGAVGVNDVDGVRLAQGHPGLNASVGIDVGKYELLAVCRWADGRFERPWRIVNPTEIADLVRRIEPLRAGRQLVVALEPSGTYGDALRQALSDVGLEVRRVSAKAAHDYAEVLDGVPSQHDGKDAAVVAELAAMGKSRAWPYQAASEWEQELRYWVEWMVAQRGLLALWQGRLEGLLSRYWPEATRTLKLTSVTLLRVLERYGSAQALLGDPKAAERIQRWGGKLLEAKKVNRFMQEARITSGVRPGAWEVRRIQECARQALQALRQGRVGEKRLRQLGRGHGVLEAQAAVVGLPTACVLWVSSGDPRNFDSAGAYRKAMGLNLVERSSGTYQGQLHLSKRGSARSRQWLYFAALRLVQRCGIRRWYEAKKAQDASSATRVLVALMRKLALALYQVGVGGQKFDERRLAVRLVRGRQDVPKTATKEG

SEQ ID NO: 251453 - protein, 356 aa, unidentified
MTTQSTKPDFTGQELFVGIDVSKNSWKVCILTQHVEHKTFTQPPKPEVLVGYLQRHFPGATCHCAYEAGYCGFWIHDHLKALGVDCIVVNPADVPTNHKERTFKTDRIDARKLARALRNGELTPIYVPNRAALEDRSLIRTRHNLVKKQTRCKNQIKGLLGFYGVPLPLEPGTKNWSRRFILWLDQLAMQSPSGTQALKALIQELKYLRQMIAETTKQIRTLAKELPYCSYTVPLLTIPGISTLAAMIFLTELVTLSRFRTLDQLSSYVGLVPGEYSSGEREITTGISQRRNPFLRGLIIECAWVAVRKDPALVLAFNKLCTRMPKHQAIIRIAHKLLNRIRFVLKHQTSYVHAVV

SEQ ID NO: 251454 - protein, 312 aa, unidentified
MCIVTPQVGIDVAKDELVVSINQGKAHAFPNVQTQIASMIRSFPKGAEVHLEASGGYERLVRQMLEEAGIKVLVHNALKAKRMAQAKGRKAKTDAVDAQGLSQWGALLPEGSVRCLERQKLADLSRAIHTLKQTAAEYKKRMDMPELDAQAVQVFQEIRADIQKRGQAAEKQLAKRLKEGAFADWYKWLLSVPSIGKVSAAILVCELPEDVVDRSSGQICSYAGLAPIDDSSGQRTGKANIGFGNARLKACLYMPALNAIKSYEWARQLYAKLRAKGKSHQTAIVAVMRRLLVRAHAVLKRGSSWQEEPLKA

SEQ ID NO: 251455 - protein, 405 aa, unidentified
MVTSIDRYDEVDVFVGLDVGKGEHHAVALDREAKRLFDRALPNDERQLRAVIDQLASHGVVLLVVDQPATIGALPVAVAQAAGALVGYLPGLAMRRIADLHPGEAKTDARDAAIIAETARTMPHTLRSIQVADEKVAELSMLCGFDDDLAGQIVQVSNRIRGLLTQIHPALERVLGPRLDHPAILDLLQRYPSPAAMKTAGEKRLGNRLLKNAPRKGRVWAAEIMTALGEQTVVVTGTDAAALVLPRLAEQLQALRRQRDEIAIEVEKIVDAHPLQPVLTSMPGVGVRTAARLLTEVTTKTFATAGHLAAYAGLAPVTRRSGTSIRGEHPSRRGNKILKRTMFLSAFAALRDPESRAYYDRKIAQGKRHNQALIALARRRSDVLYAMLRDGTLYQPRPAEPALAA

SEQ ID NO: 251456 - protein, 295 aa, unidentified
MLIIGCDFHPGFQQVAMLDSTTAEISQRRLRHPEEARAFYAALPAPVLVGLEACGSTQWFEQLLAELGHELWIGDAAQIRALCVRRQKTDRRDAEHILQLLLTERFPRLWVPTPAERDVRQLLVHRHQRVRMRTQVKNQLQAIALNQGLQKKRQLWTQAGRAALEALPLLPFAAQRRQQLLATLDRLNQEIGELDRQVAEQAEQRPEAVRLMSHPGVGPNTALAFVLTIGPVSRFRRARQVASYLGLIPREHSSGGRQRLGGISKQGSPFLRFLLVEAGQSARAAIASWHGCIAA

SEQ ID NO: 251457 - protein, 366 aa, unidentified
MGKSSTAFVGMDVHKDSIEIAIADAKEARLFGRIGGEAAALDRAIRKLRSVHRDPVVVYEAGPCGFWIYRRLRAQGLSCMVVSPSMTPRRAGDRVKTDRRDALQLARLARAGELEPIYVPDSRDEAIRDLVRAREDAVNVQPQARQRLQALLLRNEIRYVGKSSWTAAHRRWIAHLKLPDAAQQIAFEEYVAALEEAGARLERLAGAIAAQLEHWRWRPLVHALQALRGVSAIHAVRIVAELGDLTRFASPRKLMGYLGMIPSEDSSGRRRRQGSITKAGNSSARRAFIEAAWAYAHPARVSWVIARRQTGLARSVTDLAWRAQLRLCARFRKLSARGLNRNKIVVAVARELSGFVWALAQNVKPV

SEQ ID NO: 251458 - protein, 353 aa, unidentified
MKTKTTEWQNIQLFAGIDLHKNKWVVTVRTATTHLVTFVAPPMKEKLAQTLKKRWPSAKINAVYEAGCFGYHLADYLNSKGIVTIIVAAHTIPTPRGSFVKTDRIDSRKLALELSKGSLESIYLRSREELFNRNLIRKRIQLVKRKRQLIVRIKADITFYDIKFDFQVREYLSKKVIKKLREFEYENEFFSYLFKQYVDEYEVVMENIKKIDIWLEEVTSSAQHQEKYALLRTVPGIGKLAASSLLLEIGDIDRFSSKGKFVSYLGLTPSEYSSGEKVRNGSLSGMGHNCLRTLLVECAWQAIKIDPVLLKKFYSLSEKKGKLRAIIAVTRKLATRIHYVLKTSQPYVVGVVK

SEQ ID NO: 251459 - protein, 448 aa, unidentified
MKILALDLGKFNTMCCFFDTKTRKHSFLNAPTDRDYLTTVFKKHKIDLVVMEACGPSGWITDLAKGLELETVVCSTNEDAWKWANVKRKTDKDDALKLARMASMDELKAVHMPSEAHREFRSLVKYRKTLDCRICKMKCTIRAWFVNHGISIDTGEKAWHTGRERINSFRKPLAECKPNELWKGELDLELTQLDALTIQLQCVVKKLEELGKNDPRIVRLRTIPGIGPRTAEILVACIDDPHRFENGRQVAAYFGLVPRQFQSGETDRNGRITKRGNPLARTILVECAWASLKYNPWAKGIYDRICGKQKTRKKKAAVALARKIAVLAWAMLRDEKDWDPKTMIDITETYGRMSPSLKESLQSMKPKENSDQRKSRLRREAKKAKEAEANTEAKPTTKANASRKAKKAVRSPQAKAKPSSSKLKPTPEKTLTKKTTKPRRARKPVSAA

SEQ ID NO: 251460 - protein, 408 aa, unidentified
MARYYLGVDWADQSHQLYVSDESGRKIRELEVQQTADGLAELGRWLEESRGQGIELWAAIEKPEGRVVDFLLDHGVVVYPVNPKALDRARDRFRMSPSKSDGFDAYVLAEFLRTDHAHLRALEPNSAEGQELKMLTRDHQRLGRQKTRLLNQIGITLKEYYPVPLEVFESLDTKIALDFLKAYPTPQALSKLTRRGWKRFAKRDHHLSEARCSELWDKLNKPQLAVPTHVVRAKAKLLAALVMQLEASVKAVDSYSQEVQSFFAAMPAAEIAKTLPGGKSGTTVASIWAELGDAPKRWNSFRHLQAEGGAVPVTKASGKSRMVQFRFACNKHLRQAMYWFSFNSLQRSEWAKKYYRNQRAKGHSKHESLRVLGAKWLKIIFVMWRDHKPYDENYHLANIARQMMRQAA

SEQ ID NO: 251461 - protein, 422 aa, unidentified
MPQPEFSAYVAIDWADRQHCWRLADAEGTYLDQGELRNTPEAIDTWVAGLLARFPEGFVAVCLEQSRGGLVFQLSKYARLVLFPVHPATIASFRQAFYPSGAKDDPGDTALLLELLTKHRPHLRRLEPDTVETRLLGMLVELRRRLVDERTRQSNRLTAWLKMYFPQPLQWIDNIDAPMGCDFLERWPTLQQLQRAKPETVERFFREHNSRSETRIQERTEAIRSAVAAVEDTALLEAGAAATASLVALLKTLNDSIASFDRQIAELFPKHPEADLFAGLPGAGPVLLPRLLVAFGTRRERFQSASELAAYSGIAPVTKQSGKSKSIHFRRACSAFLRQTFHQFAAHSVAKSQWARQFYDQQRDKGKRHHAVVRSLAFKWIRVLFRCWQDRTPYDEARYLEALQRRRGPDEQDQIAKTDGRD

SEQ ID NO: 251462 - protein, 407 aa, unidentified
MRIIGMDIHRVAAEVVSLLDGEIVKLGRVQMLRNKLEEFARRELTHDDHVVIEATGNAAAVAEVLSPYVNRIVIANPKQVHMIAHAKVKTDTIDASVLAKLYASGFLPEVWVPDPETLALRRQVTRRTQLVRQRSRLKNLIQSILHAHLIPPCPHGNLVGISGRKWLAKQTLPEDERVAIDRHLALIGQITEALTVVEADIAAQALHDPTIRRLMTLPGIDVTVAASVAAAIGDIRRFSDPQKLVAYLGLNPSVRQSGEGPAYHGRITKQGRGHTRGMLVEAAWAAARSPGPLRAFYRRIASRRGKYIAAVATARKLAMIIWHMLSKDADYIWARPALLARKFRTAELRAGLPTRHARRGTAYDYNIPAKRAEERSRVERAEAAYTDLTSRWRPRPKGRKAVEKPAP

SEQ ID NO: 251463 - protein, 338 aa, unidentified
MDTETGDYGEQRLEHSEGAEKFYRDLAAQGKKVRVGMEASGHARWFERLLAELTFELWIGDATEIARKRERKQKTDRQDAQHILQLLMENRFPKIWVPSGENRDLRQLLWHRHRMVQMRTRIMNQLQAVALNEGLRCKKRLWREHGRAQLESFRLAPWASRRREDLLQLLDRLNPTIADLTQRIEQEVEKCPEARRLRTHPGVGALTALAFVLIIGRRERFQCGKQIASYLGLVPLEDSSGNRRRLGHITKQGSSMLRFLLVEAAQVTARSIPEWRNKYFHLVMRRGRKIAKVAMARRLALALYWMWRQGWNYEQLESSVRTRASSEQARVCSRTPRN

SEQ ID NO: 251464 - protein, 369 aa, unidentified
MKDVERRFVGIDLAKRSYVAKVLQPGTDKGRILKGSTSPEGLKKLYHSLNSQDRVSLEACAQGFWLARRLIETVGCEVVVLNAGDLAIIYRSTKKTDLNDAEKLAWIIKRLPLKELPVVALPTEEEESRRSMVSELHFEKRLRTMQINRLHSIFTRVGQTEIRKKHLATIEARKESIQSLPGRAHREALRLLEVICLIENHIQLIEEEMAVSLSGEELAEHLLSMPGVGVQTAMAFLAHVGDGSRFSKGRQVSNYVGMTPRIYSSGETERMGHISKHGCLALRSIIVQSAWSAVHTRRSNVFKTKYEELVPRIGKKRAIVAIARRMLETMWILVTRKEDFRGYDEFSKRLKLRKIQIKVERLEKTGLVA

SEQ ID NO: 251465 - protein, 369 aa, unidentified
MKTFAHSAGPIHVGLDVHKLTITAGVLEPASSTPVMTKISSDDASVRKLLDRVGDPKQLRVCYEAGPTGFNLARTLEGWGISCDVVAPGKIPKSPTDRVKTDKRDAAQLATLHRAGLLTAIHIPGPEIEAVRDLARARHDLDDDLKRVRRRLLAFLLRHGHVWRKPSTWTVEHRQWLRSLTFEQPAEKQTFDYYLSVMTIREQELAAISDDLRLWLDKPPLADSAHRLAAYHAVGYLGGLTIAAEVAQEWDRFPTARSFMAFTGLVPSEYSSGEKYRRNSITKTGNAVIRTQLIESAWHFNSRPVAGRTLTERQSHVGLDTIGRANVAHKRLAGRYRRLTARQLPPNVVNVAVARELAGFLWAEMTAPA

SEQ ID NO: 251466 - protein, 425 aa, unidentified
MNYKQNEKINQVKESTLVVGIDIGSTTQYARAFDWRGIELGKVFTFSNSREGFESFKAWMQHLQDKYKKLDAIVGIEPTGHYWFDLGAYLEDEGILLVMVNPYAVKQTKELDDNSQGKNDRKDPKVIAKLVTEGRYSAPYTPDGVYADLRIMVANRKRLIREMTQIKNRFARWFAIYFPEYTDVFGDYEAQSSMLLLKKVCTPEAIVELGAEKINQIWRDAKLRAVGMKRATTLCETAKRSIGLKKGSSAARYEMKLLLEDYEYKKAQLDAVMEEIEKLCRKIPESEQMLAIKGIGVITVAGFLAEVGDVRRFESPRQIQKLAGLSLRENSSGKHKGQTTISKRGRSKLRAVLFNAAIPLIAKNPEFKSLHEYYTTRANNPLKKKQSVIAISCKLIRVFYAILANGVTYDAQKMLSDIHRQPQAA

SEQ ID NO: 251467 - protein, 413 aa, unidentified
MDKIYDICCGIDVHKKLIVACLNHKRKKELREFGATTRELMELAEWLQKNECEIVAMESTGSYWKPLYNIMESYGLHAIVVNPAHMKAVPGRKTDVKDAEWIAELLQHGLLQPSYIPSKDQRELRELVQYRKSLVGERTRELNRLQKMLEGANIKLSGTVTNINGKSARKILEYILSGNEIDEKKYDEMYEEKLIAHNLKASKEQILDDLKGFMSPLQRRMLKELLQHLDELNVHIENLNDEIDNFMKPEEKQASQVIQDVTGIGNTSAQTIIAVIGTDMERFPSDRHISSWAGLCPGDNVSAKKRKSGKIRKGNALLKSALVLCAHAAVRHKSSYFHAQFKRISTHRGKKRAYVAVAHSILIAIYHILKDGVKYQDLGAEYYNQFNAERKIHAYLKKLKALGWEPPKEAVPA

SEQ ID NO: 251468 - protein, 419 aa, unidentified
MSFKILKNNCCGLDVHKTWIFACIGITDSNKRTVYKQARFSSFTKGLQELCHWLAKYDCTDVCMESTGKYWIPVFNILEKNNIWVTLSHPKYTKPQKGNKTDRKDAKWICDLYMCGMVKPSFIPPADIRELRDLVRYRFKLTCMITGEKNRAHNCLTVSNLKLDDVFSDIFGRSSRSITEQILQHPGETFDVAPFVHGRCKTPIEEIQAAVDGAVSKEQAVKLRQCLNHIDELEMHKSEIEREIFRLSDKYEDILTLIRTVPGFDKNPMTAIQVLSEIGGDMSVFPTAKNLVSWAGCCPHNDQSNHKIKSTRISRAGSYFKPVLVQVANALIKSKKHPEFSTRYRRIKARRGHKKAIIAICRMILTAIWHILTDLKPYTAKGFLEPRPVSKEKVLTASQALNLLKQRGYVIKDEPIFIS

SEQ ID NO: 251469 - protein, 362 aa, unidentified
MNVGVDLHKSQFTVHVYEGKDEKENRQYPTSKAGYAEFLEKVQAWQRSGESIRVGVESTGNTRYFQNQMEAAGCEVKVINTLKFKVVNESVKKTDKHDAATIAEFLAKDMLPESRLCTEESEQIRRLLKSRQTLVRAGVTIKNQIHALLTGIGMEDKKASLQSKRGCQRVLDALKEAGNALVAQPLIDTINNLEENVKVIEKEIEQLTKGDKVVELLMTIPGRGPIGAWTIRAHTDDIKRFSSAKKYSSYAGLAPWAQNSNERVCHGRITKRGPEALRTALVQLVLGMRRIKKQTLGWRLMTRHEMMKKSKGSGKSIIATARKVSRIIWTMLTNETEFDCSLMLDKNISKTADSMKKLAIIA

SEQ ID NO: 251470 - protein, 347 aa, unidentified
MRIIGCDLHSRQQTLAMLNLETGEVEECVLLHEGDKVRDFYGALPRPVQVGIEATGSMQWFLELMEELQIECLVGHPAKIGAQEPRKQKHDRRDAQLLLRLLVERRFPAIWMPTAQQRDLRALLRHRHLWVRMRVRIQNALQAIALSHGLRPGAKLWNQEGQQSLRELRLAPHTRARRNELLRLYRHLQKKIERLDRQVAEVAEKRPLSRLLMTHPGVGPITALATEVYLGDATRFPDGKALSSYVGMIPAENSSGEKRRLGRLTKQGNAMLRFLGCEAVGHAVRQDVELKRFYTRKLAQKGLGKAKWRPVASWGFGCGSCCATRLITRPSRTAVRGSPCGEACERT

SEQ ID NO: 251471 - protein, 468 aa, unidentified
MSKLSQSPKRRKSHQRKELPQDIPKVDVLKQININAAGLDIGDDEIYAAVPEGRDKESVRVFGTFTVNLNSLADWLEACEVTTVAMESTGIYWISIYEILEARGFQVYLVNAKHIKNVTGKKTDILDCQWIQQLHTYGLLRASFRPPDDIAALRSLVRHRANLIRSVSAEIQHMQKALQLMNLKLTNVVSDITGLTGMCIIRDIISGVHDPETLAKHRDSRCAKGRDEIALSLQGNYKAEHLFELKQSLEAYDFYQGQIRRCDEQIEGIYNAFQPQVNINERPLPSSRKKRRKPKDNEPDFDLRSYLYQIAGVDLTEIDGVNSLTAQVVLSEIGTDMSKWATVKHFTSWLGLCPHNDKTGGKVIRTCTHKTQNRASAALRMAASALSHSHSALGGYYRRMRAKLGSPEAVTATAHKLARIIYAMLKDQTEYHDPGEGHYEEQARQRAIKNLKHKANQLGFRLIEVTAP

SEQ ID NO: 251472 - protein, 385 aa, unidentified
MNIVRPNLSVEVANQTTCFLAIELSKTSWVVGMLTPLSNKISLRSIPCGAVEKLMAIVDQTTNRVMQATGGPVQVVSCYEAGYDGFWLHRFLAAHRIINHVLDAASLLVNRKARRAKTDRLDAEKLVRVLMAYWRGEPKVCSIVRPPSVEDEDAKRLHRERQFLMKERVQHIGRIKGLLAAQGVYDFRPERKDWRNRLAEIRTGDGRPLPSRLKAEIDRQCQRLALVDTMLKEIDQQRDAAVESKSAPSETVVRIQRLTHLKGIGPQIATVLGTEIFYREFANRRSLGSYLGLTPSPFKSGGMDRDLGISKAGNPRGRTTMIELAWLWLRYQPGSKLARWFEQRTNGLKGRVRRIAIVAVAHKLAIALWRYVETGLIPADAELKA

SEQ ID NO: 251473 - protein, 406 aa, unidentified
MRTIIGIDVSKNKANVAVATDLIVAKELTVPLDALGFNELKHVVLQFGGKAEIVFEATGVYSRRLEYFLQQENLNYHILNPLAAKNRIATGTRMRKNDQRDARRLAITEFTEQLEPYLLAYKQDPIYRELTDMNRYYDQLNEDKKRARNRAHRVLQLVFASFGASKGGFNFDTKLAWKILTLFPHAQIVREIGDLNALEARISAAHFKGMNARRIHDAARKLWKLAAQNGDAVPVTSDNTRQMKALAEQVLTLEAAQDQQVVRMMALGKSLSEFTLLQTIPGIGGSTAIRLISELGDIRRFNTRQQLNSYVGLDTTEVDSGDHQSARHITKHGNPHARRILYWTVVLMLNPKMGDNHIRDAYEKRREASSSKKKLIVRQMDCLIKTILYLIKTNQPYSYELSPQSK

SEQ ID NO: 251474 - protein, 349 aa, unidentified
MILVGCDLHTRKQQVALLNTDTGELWDQELSHDGDAIERFYATLPPPVTVGIESTGYSLWFHALLQRLGHTLLVGEAAKIRAMVVRKIKTDRRDARHLRDLLKDDRFPVVWIPDPATRDLRALIKHRLRLVRIRTMVKNGLHAIALNQRLALGPSLWSRAGLAQLHALVLPPHTRRRRDDSLELLQWLTGHIDELDLHVATAAAADPNARRLMTHPGVGPLTALATVLVLGPVGRFPGSKHVVSYIGLAPAVSASADKYRLGHISKQGSALLRWVLGQAAPLATRGDAALKRIYFAVLRRRGRPKAKVALARRLLVRLYVMLRDQIDYDEFCRRGRTQRPGLEPVRIPV

SEQ ID NO: 251475 - protein, 316 aa, unidentified
MADITQQIILGIDVAKRELVIFNWINEQQTTLANDAGSIKAFLRSLSGAVSIGLEPTSHYHREIAEQAAALGHRVYLVNPRQLVHYREGINRRNKTDAEDAYLLARFVAKEASELRAFTPQCAQAQQLWALLKRRAGVVAARKQLQQSLSDLKMSAKAVFTQFAALLQRIDKRLDALTRALGWNDDVTRCRSIPGIGPLNAVALVAAFHRGAFASSDAFVAFIGLDVRVRESGTYKGKRRLSKRGDAELRRLLYCAAIPARTHSPFADYHQMQLDKGLSKIAANVILSRKLARIAFAIISHKSTFRLSPKKAGYEP

SEQ ID NO: 251476 - protein, 422 aa, unidentified
MAPREQVEYAALIGLDWADQKHDYCLGVVGTDPVEVGVFGAQPEAVAEWINELRKRFPEQKVAICLEQYRGGLMHQLMPVEFIDLYPLNPQALANFRKAFAVSRAKDDPTDAHLMWEYLLKHRDRLRGWTPEDVDTRRLALLVEDRRKTVDLRTQLSNKLTATLKGYFPQALELIGAQVTSPMAADFLERWTSLGAIKKCRAATIQKFYTQHQVRDARLCEARLALIRDSLPLVEDPAIVEASILKAQALSRQIVCLNEDLNAYGQRIATLFAAHPERALFEALPGAGPALAPRLLVAMGTDRQRFASAEEVASYSGIAPVTERSGKHTWIHWRLSCCKFLRQTFHEYANRSRQKSRWAAAYYDSQRARGKSHHAAVRALAYKWIRIIYRCWEQREVYDEARYLASLERRNSPLTKVMAEAA

SEQ ID NO: 251477 - protein, 411 aa, unidentified
MEAIIERCAGLDVHQATVVACVLIGEADRKPHKEIRTFSTMTRDLEAMRDWLKGHGVTHVGMESTGIYWKPVHTILEGHFELIVANAHHIKNVPGRKTDVKDAEWTADLVRHGLVKPSFVPPPPIRDLRDLVRLRRSLAEALATEQNRTLKLLESANIKLASVVSQVFGVSGRAMLKALIENTATPQEMADLAKRSLRRKLEPLALALDGRLTEHHRYLLAFHLRRVEAIEADLRALDERIEEKAQPYAAQRRLLRQIPGVDDRIAVAIIAEIGIDMTVFGNARRLAAWAGVCPGNHESAGKKKSTAARKGNIHLKTTLVQAAVCAARTKGSYYKDKYHRLKARRGSQRAAMAIAHKILVAVFHMLARIVPFKELGEAFLDQQARTRTTTNLVRRLNNLGYDVLLRPKVAA

SEQ ID NO: 251478 - protein, 353 aa, unidentified
MRAVFGIDVSKASSEVVILVNGEKGHGYPITKDVIGFNQLLGDLKTVHHPKTTGVYSRRPQAFLDDHGYAYTRLNPLEAKKQLDSLRVRKTDKIDAEKLAQPQFVLNRKTTYVQEEVYQNLRDLSRFYQNLTEDIVCTKNRLHKVLQVTFPELENILSASTGEQYWSLVMAFLFKELVLRLTQSELMAIIFRFTSKRISDKRATYLADKLRELAKQSYCAVKKTSPILEEVRYYAQELLRLSERRQAVLNEMVFLAQPLPEYNILLSIPGIAETTATSLIGELGDIRRFQSANQINAFIGIDLRHYESGNFLAKERISKRGNPYTRKILFKCIHNIASASHTKPCHIADFYEK

SEQ ID NO: 251479 - protein, 351 aa, unidentified
MNYIGVDYHKKYSYIVVKNEDGRVEGRGTVNNTKEEIQQFLESYRSGMAVVEATRNWGLIYDWLDEVLDDVALAHPLKVKAIAEARIKTDKISADILADLLRADLLPRAYAPGKQTREIKNILRQRMFFVRVQTMVKNRIHDILDRHPEVLSQTPEASDLFGAAGMQWLGQKVLPGEDNRLLTSELELFKFLKEKISQSNGTVKKLAKGDARARLLQSIPGIGPFFSVLILYEIDDISRFRDEKKLCAYAGLVPSTHASGGKVFHGRITKTGSKWLRWAAIEAAQTAVRSDSEFHAYYQRIRIRKGTNAAKVATARRLLTIVYRLLRQGRFYERRTTNMRKIVTPAALVTD

SEQ ID NO: 251480 - protein, 411 aa, unidentified
MRIVGLDVSRSVAEIAYLEDGTLHAGGRTGLRRDELERFAAKLRATDHVVLEATGNTTAIVNVLRAHVARVAIANPLQVRLIAEARVKTDKIDAAVLAQLYASGFLPEVWMPDEHTLALRRQIARRSQLVRQRTRLKNEIHAVLIAHLIERCPATDLFGKKGRAWLGVQPLPLDERLGVEQRLRELDRLGDDLREVEQALAQATIDDARLRVMLTITGVNTTVAIGLLSAIGDIARFPNPEKLVSYFGLNPSVYQSGPAPARHGHITKRGRSYARAMLVEAAWGATQAPGPLRAFFLRVRDRRGQQIAAVATARKLAVIVWYVLTRGEPFAWDRPALTAHKLRALELQAGMPAQHGPRKGSAAAYSLKSVRQQERAVAEQSERTYQRLFNRWRQSRPKSDSAPIRWPQART

SEQ ID NO: 251481 - protein, 384 aa, unidentified
MQAPHVSTPIKSNVSTIFVAIELSQRSWLVTMHCPDKDKISHHKLEGGDHAGLLTLIERMRERAARTLGAVPAAVSCYEAGYDGFWLHRLLMAAGITNHVFDPASIAVDQRARRVKTDRIDGERMLRTLMAYLRGEPRVVRIVRVPSPEQEDARRASRERGRLVKEQTGHTNRIKALLRLVGMAVGNPRRGDWLTWLVKQRDWQGQAVPPQIMAEIKREHARLMLVREQLDALAQAPADLTPAAAQMAQRSELLLRLKSLGPAFATTLTNEVFYKDFRNRREVASYFGLTPSPWQSGGIDRDQGISKAGNPRARCAAIEMAWLWLRHQPDSKLTQEYRRRTLNASKRIKRVAIVALARKLIVALWRYLTTGLVPEGAMLKTAEV

SEQ ID NO: 251482 - protein, 406 aa, unidentified
MDEIIIDKGCGLDVHKETVVACVMGSGIKKDIRTFSTMTNDLLRLKTWLSRLGITHVAMESTGPYWKPVFNVLEDGFTLILANARHIKNVPGRKTDVKDSEWICRLLRSGLLSASFVPSQGIRELRDLTRYRRKLTQALSAEKNRIQKVLEDANVKISSVLSDTFGVSGSQMIEAIMEGKLREEEIADLAKGRLKSKKEEIREALVGYFHDHHRFMIKASLEHIKYLEKLISDLDRATKEKLEQYQKEYELLQTIPGVKEQGAAAIIAEIGADMDVFPSEGHLSTWAGMSPGNNESAGKKKSGKTTHGNKNLRAALTQCAWAASKTKNTYLSAKYHSLVGRRGKKRSLIAVGHKILVMAYHIIKNGVPYKELGKNYLLHRREDKIVKNHIKRLRDLGYEVELKKAA

SEQ ID NO: 251483 - protein, 417 aa, unidentified
MFSTTDLLVGVDIHRRTNVVQVMAGHGQVLTSTMRVPNNRPGTETLTAYLSQIAGAGGFDHIHIAAEATGNYWLPFFCALEQSPDLADCSVTLYPFNPKVIHNFRKSLGDWNKTDNLDTTVISERLRFGRELPYPFHMEDRYLPLRTLTRYRYHLIGELVRVKAHALSLVYLQASEYTAHPAFSNIFGRTSQAVLKEFPSLETVAAMPFDELVEWLDVKGKRRFAHPEDNAQRLHQIANDSYRLPDDWLDSVNTSLTLSLRHITVLQQLLTRINTAIADQMENYPNSLTTIPGIGPVFAAGILAEIGDIARFDYRHAKVASYAGLKWSKHQSADFIAEETRLKRTGSQFLRYYLCEAAQLVRMNDAEYAAFYQKKYDEVRHHRHKRAIVLTARKLVRLVVRLLTTNEPFRARQVSSG

SEQ ID NO: 251484 - protein, 413 aa, unidentified
MYYVGIDIAKRTHVAVIMNEDNTLRVKPFSFNNDQTGFKKLLIHLQTLCCDLSDIVIGMEATGLLFENLYRHLQSLEYNVVLLNPYQTAKFREMDTMKRVKNDNIDSVMIAALLKSGRFSEGYVSQEQLQSLRELYRHRASIEDQIKSLKRQTSAILTVVFPELETVIRDPFNITGLALLDKYPTAKHFHHASVERILKTFRGIKGNNFNRVKAQALLDASRRSIYSGIASDARALNIRMNIAQIRLLQEQLEETLTVMQSLFSDHNEVKQEDREVMESLIDNLRTIPGVADKTILALLAECGNLDRFYAPKALIGFLGLYPTLSQSGDSTRNGRLAKRGASLAKKAIYLASISAIRHNDEMRTIYMNYRSKGRAKKEAIIIVARKLLTIIYTIYTRNIPYDPQRVFVAKPNQ

SEQ ID NO: 251485 - protein, 386 aa, unidentified
MSLDHHREEPSVIQTNLGAIFVSLELSRSIWLITSLSPGGGEKMSKHSVPAGDIAALLARFSEIKRKAGARTGRSFPIIVIQEAGLDGFWIHRVLQSEQIESHIVDAASIATSRRRRRAKTDRIDGEALVRALLAYKRGEPRVCAMVRAPTPEDEDSRRLCRERKALMVERVQHVNRIKGLLFSQGVSDYEPLRRNRRQRLDELRTGDGRPLPPHLKAHIGRELDRLELLLEQIKTVEAERDAWLAPVVKTEGTPAPPAMLMGLKGIGPEFAAVLWSEGLFRSFANRKQVAAYAGLAPTPWQSGAVAHEQGVSKAGNPRLRTTMIQLAWLWVRHQPASALTRWFHERVKRNSGRLRKTMIVALARKLLVALWKYVNSGIVIEGAIA

SEQ ID NO: 251486 - protein, 338 aa, unidentified
MKTYAEIDLHSSNNYIGVIDAKDKRLYSKRHANRIEDVLKVLGKFKASLQGVVVESTYNWYWLVDGLMDQGYRVHLANPNAIKAYDGLKHTDDKWDSFWLAHMLRLGILPEGYIYPKHQRSIRDLLRRRLMFVRQRTSQILSLQSMATRNRGLNFSGAQVKRFRDEFIEKMFADPHLVFTAKRNIETIRFLDRIVGEIELEVASQIKLKKEFIKLLSTPGIGNILGLTIMLEVGDIRRFDKVGNYSSYCRCVESKKISNGKKKGENNQKNGNRYLAWAYVEAANHAIRCCPKAQRFFQRKMAKSKRVLATKALANKLTKATYYVMRDQVAFDEDKLFG

SEQ ID NO: 251487 - protein, 387 aa, unidentified
MHAALAFTHGFMFIFGPVVHFLHKDSITVAYALGTGEVELLGKIGTTKTDIDRLCKRLQSKARRVCVVYEAGPCGYGLYRQLTEKGFDCMVCAPSLIPKKPGERVKTDRRDAIKLVRALRAGDLSAVYVPGVEDEAFRDLARAWAAAKDDLKQARQRLKSFLLLHGVRYTGSANWGPAHQRWLSTHSFANEWQQFAFEEHRRTIEDRLTQCERLEKALREAAVNWRFYPAILGLQAMRGIQFTTAVGMIAELGDLSRFEHPRQLMAWLGVTPSEHSSGNKRRQGSITKNGNSYARKLLVEAAWSYRHLARVSPEIQRRHEGIPKPIVDRAWDAQVRLCRRYRKLVARGKDRNIAVIAVARELSGFIWDISQLAMSLAIPTPNKVLTA

SEQ ID NO: 251488 - protein, 433 aa, unidentified
MLKLNYMSTLFVGIDVSSKTNAVYAMDFEENKYISSSFGNNQPGADQLVNMIAECMQKHKNLDTVLIVLESTSVYSVHISNFLSASEVLMPYRPYVFCVNPKAASNYRKSYIGMEKTDPTDAYLIADFGRVGRTKKLEPWRGGQFISLKRLTRHRMHLSECITREKTYMVSNLYLKFSELQLLEGDDKPFGSLYGATSSAVLTEFLSPQEIIDMPEEDLLTFLAGKSRNRISDLSKTSELLRKAARDSYRLDKCMYEPLSISLASSFNCIHAYQKEIKLIEQAIEKCINGMNPNALLILQSIPGIGPIWASGILSEIGDITVFHSSDALAKYAGLYWPKGDSGDFTSEDNKMSKAGNPYLRYYLGEAANSVRKHIPEYADFYARKYAEVTKHQHKRALALTSRKLVRLVFGLLVKNQLYTGEKLDAEYNIESN

SEQ ID NO: 251489 - protein, 343 aa, unidentified
MQVVRIGLDLAKYVFAVHGVDERGKIALRKTLRRDSVARFFANLPPCMVGMEASNGAHYWARVLTDLGHQVRLISPHFVTPYVKSNKNDRNDAEAICEAISRPSMRFVPPKSTEQLAVQAIHRIRRRLVSDRVKLVNQVRGLLAEHGIVIPRDITQLRRGLAELIARCDDDLSELVRSLMTELREELAELDRRITSYDRRIREIFRNSEPCQRLGKIEGIGPITATALIAAVGDRTCFKNGRQFAAWLGLVPKQRSSGGRARLVGISKRGDRYLRTLMIHGARAALARAGGKQDPRSLWLGKLRNRRHPNVAAVALANKNARIVWAMLAGNAAYQPELSMKTA

SEQ ID NO: 251490 - protein, 430 aa, unidentified
MHNKNYISVGIDVGSAFSFMTILAPDETVILKPFKITHNNKDSLERTVSEIKKAEELYSLESRTFLESTGIYHFPLFCYLVDCGFNASIINPIITHSTKNGNIRKVKNDKIDSKGIAKLGLSKDIPVSQFPAKLVLELRSLTRKYYDLTDERSAHINKLKGDLHTVFPQYLDVFCDVTGKTSTMILRQYGTPDKILRGHKKTMIEKISKASRKGLAKASERYEKLCAAANAAKTFGCQIDSIYFNIFLTLDLVEKLDSALDSILNRIRQLITFNKNEKFIQQIKLLNTIPGVGFLTAVTIMCEIGDFSAFRNPKQLFAYFGLDPEVNESGKFVGTQLHMSKRGSRIACRAIFAVALASIRTKRNGEGINPYLRKYYELKSGQKPKMVAIGAVMHKVCNIVFAVLRDEKAFELRSPEEHCKQYQRPALAAA

SEQ ID NO: 251491 - protein, 343 aa, unidentified
MLTSNVIAIDLAKNVLQACHISIHGELLSNKPLSRQKMKEFLAKAKPSIVAMEGCCGCHYWGQLAEKFGHEVRIINPKKVKGYLEGHKTDHNDALAIANAAIQIGIKYSRPKSLEQQSMQSMESSRRFLSRSVVSLGQHIRGTILGYGIANPKGEKGLKTSVQTVLDGETSIPANVVSVLSTLWDQYKELKAKLIVFEKEKNALTRQIEPCQRLMEIEGVGETTAAMLYTTLGDGKQFKNGRQASAFVGLTPKQHSSGGKVFMIGIDKCGGVKELRSLLYLGAMSYVGRLPEKPKTQKDAWLRSIIDRIGFKKACIALANKVVRTAWAMLRYETEYKPVLLTN

SEQ ID NO: 251492 - protein, 378 aa, unidentified
MLGADPGDPIGALPSTVTVLSAPCSRLVVRSSREAERWQCSASTPTKTSTSRLFLDQLGRLPVAESFGTTDRDIRLLLAWAQRHGPISRAGVEGTGSYGYRLARTLTDAGIEVTEACRPDRARRRRRGKNDLVDAEAAARAGLANDAAAIPKDRRGTVGQLRRLVIARRSAANARAQATKQLKALLVDCDDQLRGRLHHPRTRELVARCARLHATDGHKTALRSVARRRHAPTVEISEPDRQVTALVESTAPALLARPGIGVHCAAQLLITAGDNPDRLRSEVAFAALCGVSPVEASSGKTVHHRVNRGGARQANTAVWMIAHVRLVHDVRTHGYAAKRTALGDNRKEIIRRLKRYIAREVYPLILDTLVDAETRRLI

SEQ ID NO: 251493 - protein, 346 aa, unidentified
MEQIIRIGMDTSKHVFELHGVDAAEEPVLRRRLRRKQMIEFFEKMPPTVIGIEACAGSHHWARLLGSFGHEVKLIPPQHAKRYVKRGKNDAADARALCEAMSRPDMQFVPVKSQDQQAVLMLLVVRDRLVRSRTQLTNAIRGHAAEFGLIAPKGLCRIELLLERIAGDETLPELARELFALQGQHYARLEAELEQVETKLMKWHRADECSRRLAKIPGVGPIVATMLVTKTQAPELFRSGRDFGAWIGLTPKDHSTAGKVRLGGITRAGDEALRAALVTGATAVVQQARRGRGTISPWLAELTKRKPPKLAAVALANKIARIVWKMMVTGEHYKARTAAPALVHTA

SEQ ID NO: 251494 - protein, 400 aa, unidentified
MLSIGIDVSKGKSTVCGMKPGGEIVYTPFEVQHTREGMSELVSLLRSSGEEVRAVLESTGSYHCPVVAALLENGIFVSVVNSLRMKRFCSQSIRKVKTDRIDAMQIALYGLAYWQELQPARLPEDTYRELQLLARQYYQMTSLLIKAKVDFNAICDQVLPGMQELMSDHAGRHKLSDFVLRYRHTTHILEMGETRFRKDYCKWAEKKGYRNCERMAALIFATAQNGIPVLPNAPSTQIVITEAIRVLHTVEASRDAILTQMQALAKTLPEYSLVREMPCIGDTLAPRLIAEIGDVRRFHSKRALIAYAGIDAPPYQSGKFCANNRHISKRGNRYLRKTGYEVMQSYVMHKPANDPIFTFIEKKRGEGKSGKLAMVAGLNKFLRVYYGKVTELYRSLPAIE

SEQ ID NO: 251495 - protein, 338 aa, unidentified
MEYGAIDLHARYSQIRIIDGEGRVRRERRVVTRPEPLVDAFKGFGPMRILLEAGTESAWVAEALEGVGHQVIIADPNYAPMYGEIRRKVKTDRRDVAALAEANRREWYRATHRVSAAQRAMRQQLRSRRQLVAMRSGTIALMRALLRQRGYRLPSGSAAQVPRRLAGLPVPTALTETLAPLARMVETLTQEIAGVDARLDTAAAADPVVQRLQSVPGVGTVIALTFRAFVDDITRFATAAQVSAAIGLVPREDSSAERRHRGHITKAGPSALRSLLVQGAWACWRSRRSASLRAWVEGVAARRGRRIAVVALARRLSRILFAIWRDGTVFAPATVAAA

SEQ ID NO: 251496 - protein, 425 aa, unidentified
MREHDTRAEAGTVNTPGRGTMFEIEDVGAFLGLDVGKSNHHGHGLTPAGKKVFDKPLPNSEPKLRAVFDKLTAKFGTVLVIVDQPASIGALPLTVARDAGCRVAYLPGLAMRRIADLYPGEAKTDAKDAAVIADAARTMPHTLRSLELTDEITAELTVLVGFDQDLAAEATRTSNRIRGLLTQFHPSLERVLGPRLDHQAITWLLERYGSPAALRKAGRRRLVELIRPKAPRMAARLIDDVFDALDEQTVVVPGTGTLDIVVPSLAASLTAVHTQRRAMEAQINTLLEAHPLSPVLTSMPGVGVRTAAVLLVTVGDGTSYPTAAHLASYAGLAPTTKQSGTSIHGEHAPRGGNRQLKRAMFLSAFACMNADPASRAYYDKQRARGKTHTQALLRLARQRVSVLFAMLRDGTFYESRTPNDVELAA

SEQ ID NO: 251497 - protein, 342 aa, unidentified
MDQVTTIGLDIAKTVFQVHGIDGDGDVVIRRQLRRGQVLPFFAKQPRCLVGIEACATAHHWAREIAALGHEIKLMPAKYVKAYVKRNKNDAADAEAICEAVTRPTMRFVPIKTPEQQALLMLHRTRKLLVRQRVRLVNAMRAHLAEFGIVAGVGRNGVDRLLKLIEAGDARISAPARDCLLVLRDQLALARHQIIEADKRILDYHRGNEQSRRLEEIPGVGPLIATALVASVPDPHAFKSARDLPAWIGLVPKQSSTGGKERLGHISKAGNRYLRSLLMIGAFSLIKRAKLGKGKHRPWLIDLMARRPTKVAAIALANKIARIAWALRIRGTRYREPLAQAA

SEQ ID NO: 251498 - protein, 440 aa, unidentified
MNQEDRSRLEDFRQFRKEIRGSSEYLLVGIDVAKDKHHAFFGTATGKTLFKRLVFENNLEGFQKLLAQAEAMKGQGGLTKVVFGMEPTGNYHKPLGEHLIRCGHGVVLVSGVAAHENRKTLDGRWDTNDSRDAANVADLVSQGKCLFYEFPVGALQDLRNLLSLKRRLKRMEHGHRVRIRNHLVAKYFPELDRYYEQSESTALAIVRWCLDPSEVAGLEYQRFVQMVSSVRGRSSQEKRLQTIWKMAVDSVGCEAGPTVEFEAQVMVEGLKQIRESIRQIDEKIQEVCSRFPEYEFLLSIPGFGPDVSAKVLGAIGDPFRFQNGRQVLKMAGLDLSAERSGKTSQSAIPVISKRGKADLRYALYQAALIASIRNQDFIVYYTDKLRGREREPGIRTKMRVKLAAKLLLIAWTLMKKKEPFHPSYLRAACQSFSTGAGRER

SEQ ID NO: 251499 - protein, 351 aa, unidentified
MLIIGCDFHTRFQQIAMAEDSTGELLLERRLDHESGEAHAFYRNLHGAVRVGIEATGPMHWFERLLAELGHELWIGDAAKIRASEVRKQKTDERDALLILDLLLAKRFPKIWVPTPAERDLRQLLWHRHKLVCLRTMLGNQLHFLAMSQGLCRKKKLFTKKGRGELAGLALAPWARRRREELLKLLDQLDPPIAELDRAVLEEAQRRDDAVLLMTHPGIGPVTSLAFVLAIGPVSRFCCSRKLVSYLGLNPTEESSGGRRRLGAISKQGNTMVRWLLIEAVYPAVRKDLALRQDYQRLKFRRGHAVAKVAIARKLAVRMYWMLRSGADYAQLVRRQGSPGGTLMNASSSLA

SEQ ID NO: 251500 - protein, 458 aa, unidentified
MKPYFLGGDTSKGYCDFILLDERKRTVEENFQLDDCYDGHWALFGFLRRFFSNHKDAAIYAGFESTGGYETNWYQFLWKLQKNFNIQVARVNPFGVKHHKKASLERIETDKISARAIAEYLINYPHKVEYSKDDCFAGLRRHWKYIRMLKKQKSQLQTTLKAQLYVAHPQLLTYCKEGMNDWTLHLLTKYPTASLLAAAEAKTVSDIPYISKERANELISDAKKSIASMQDSSMEDLIQSAAHQILHLKKSIDQQVKAMTSTYDFPEIEIMVSFIGIDHYSAFGLLLNIGAIEQYDSVKPLASFFGMHPIYRESGDGKGGIHMSKKGRKEPRWILFNVAKSAVVHNEMIKQLYEEYQAKGKCKMSALGIIMHKILRILYGMLKHNKKYDPTVDMANRKKTIRKKEALTFKPNKNRRYQDYSQKAPISRRQTKKRKKYKQEEVAWQTTIGGKENQNLRQ

SEQ ID NO: 251501 - protein, 394 aa, unidentified
MFFLGIDIGKRSHVASVMNEEGKVILKGFSFPNSTEGGEKLLQKIISLSPIDQYKVGMEATGHYWLSLFSFLDEHDFLIHVINPIQTDGWRKGTEIRKRKNDIIDSVLIADLMRYGTFVETSLSDENIFSLKQLSRYRTYLVGTASDFKRKIIAVLDQVFPEYDTLFSKVGIFGKASKEVLLELSSPDAINHISAGTLADLLGEASRNRLGMKKAEELKTAASHSFGVKFAQETFTFQLRSMIEQLKFLEKQITDTEKEIKKIMDDIDSVIETIPGIGPINGATILGEIGDINKFSSPAKLVAYAGIDASVTQSGEFEGTHNVMSKRGSPYLRKALFSAALVASRHDPVLKAFYEKKISEGKHHLTALGAVSRKLCYIIYAILKKNEPYEVRLK

SEQ ID NO: 251502 - protein, 418 aa, unidentified
MSYKVAGIDIHKKVLMVVVASAAEEVADVAGEALEFECRRFGAGAGERKHLVAWLQERTVKEVVMESTAQYWKPVWLDLEPHFGKLHLAQAHSNRAPKGRKNDFPDAKRLTRRLLAGELMLSFVPDAVQRTWRIVTRGKLQLVRDRVRLQNQLEALLEEARIKLSSVVSDLLGMSGRRILQAMADGETDPDRLAELGDDRLRCTKTELADALNGSLEPIQRELLKLHLKRLALLDEQIGKLDQMIADALKQHQDAVVRLAEVPGFGVDSAQQLIAEIGVDAEAFRSAGEFASWAGMCPGSNVSAEENHSSRSPKGNPFVRRILDQAAHAAVKKKGSHFQSLFRRFLPRLGYNGAIWLVAHRLARLAWKILHDGVRYVEHGQPTDPRNRKRRAQKLVQSLRKLGYAVALTTIQPEPGPA

SEQ ID NO: 251503 - protein, 343 aa, unidentified
MQTITTIGLDIAKSVFQVHGVDAGGQIVIRRQLKRRFVLAFFEKLPPCLVGIEACASSHHWSRELQALGHTVRLMPPAYVKPYVKRQKNDSTDAEAICEAVRRPNMRFVPTKTVEQQSCLMLHRARHLFIRQQTAVINSIRAYLAEFGIVAPVGRRGVEQLLEVVADTADRRLPEVARACLAALGVQLRALKVQIREFDRRIIAWHRSNATSKRLDAIPGVGPALATALVASVADARAFRSGRDFSAWVGLVPKQNSSGGKDRLGSISKQGDRYLRSLFTAGALAVIRYARIHGTGHRPWLAGLLVRRPAKVAAIALANKLARMAWAMMARGERYNEPAALAA

SEQ ID NO: 251504 - protein, 321 aa, unidentified
MKNFTDSVPVGIDVAKASLEVSLGTDRSTQSFANDVEGHDALLARLQGTPISLIVLEATGGYEAAIAGALQAAGLPVAVVNPRQARDFAKAMGILAKTDSIDARVLARFAQALLQRGDLQRLIKPLADEALKALQAQLLRRRQLCGMLIAERQRLSTCHRSTRADIEASIRFLKNRLDKADAELARMIQQDHAALNDLLRGVKGVGPNTLATLIAELPELGHMTRREIGALVGVVPLNRDSGQFRGRQRTWGGRATVRRTLYMAALVASRHNPAIRRFYAHLIEQGKAPKLALTACMRKLLTILNAMARDHVPFNPALHQC

SEQ ID NO: 251505 - protein, 406 aa, unidentified
MNKLFVGIDVSTQNNVSYLMESDGTKYSSFSVQNNLGGAKLLTEKIVSAMETLKLSDVVIGMESTSIYGNHLVHSLREDGTLGRYQRKIHVLNPKQVNRFKESYPDLPKNDWVDAFVIADCLRFGRIRSEVYMDDYRYEALKTLTRARFYAVQNLAREKQRFANLLFLKCSGLAQSTDIKNTSSTVLSLMEEYETVDDLANADLEDLTAFVTAAGRGRFADPENTAKTLQAAARGSYRLPKTINDSVNQAMSVSIATMRSMKEQIKVLEKAIEQQFEIIPNTLTSIPGIGKVYSAGIIAEIGDINRFQSQASVAKYAGLVWTQHQSGNFEAENTRMIKSGNRFLRYYLLEAANSVRGCDPEFQRYYDLKYHEVNRGQHKRALALTARKLVRLVFRLLKDNRLYNRW

SEQ ID NO: 251506 - protein, 430 aa, unidentified
MEVVHPQVAGIDVHKKVIWVAVRLPGQGRGQRAVTVRRFKAFWRSLQKMAGWLAELGVKDAAMESTGVYWWPVYHALAGAGIEVCVCNAAHMRNVPGRKTDLADCQWIAELHEYGLLRPSFIPGAQVAALRQRTRYRKKLIEQRTSEGQRLAKVLEDAGIKIDSVASDMLGKSGRAMIEALIAGERDPARLAGLALGVLRRKTEELAMACDGRFTAGHSQMCRLHLDAYDHLTAKIAELDALVAEAAAPFTALIARLITIPGIGQRTAEVIIAETGGDMTRFATAARLAAWAGLAPGDNESAGKRKKAPARNGNPHLRTAMVEAAWATWRTATRPGARFRRLARRFGKGNERKAAIAVAHTLLSIAWAVMRYDSDYIDAGADYYERRDQRNREHLIRYHQNALARLGLQVTITQPGDGTPPPPDNPGQAA

SEQ ID NO: 251507 - protein, 317 aa, unidentified
MTDQLCVAGIDVSKARLDVFVLPNRERMDFANVARGIGALSQKLRRRGVQRVVLEATGGLEYPAARALADAGFCVARVQPGRVRAYRRFLGRHAKTDALDAELMARFALAMPEEDIRPLPSQKAETVRSLAARRRQLVDLVAQEKTRLKMTRDLAVLQSLKIVVAALNAERGRIEEALENAIAGDEALRRRNELLRSIPGFGPVTASVLITDMPELGSLNRRQVASLAGLAPHPNQSGTSSHGDHIGGGRACVRTALYMAAVSAIRCNPRYKADYQHLLEAGKPSKVAVVAAARKLAVLANTIIKANSPWSPIQSLD

SEQ ID NO: 251508 - protein, 387 aa, unidentified
MQNPHDDSKACDAAFVQDSTLVVVIEMGLSSWLVAGMIPGVNREPLKKIDPKAEELLQLLYRWRDEAIAAGKEITRIAVAYETGRDSFWLARWLRKRGIDAHVIHATSVAISREHRRAKTDRIDTAMLRRGFLGWLRREPGHCSMAIVPTVAEEDAKRPHRERDSLVHERTSTINRMKSILIQFGVRNFNPVLRKAREKLDAVRTPEGIPLPPNTVAALRRHMERFCVINEQIKAIEQTRLQHLERDPADRFNAMVFLLVRIIGLGVETAEQLVREILSRQLRDRKAVARYSGLTGSPDESGSKRREKGLSRSGNGRVRKALIQLSWRMLQFQPESALVLWFKKRTENVQGSRKPMIVALARKLIIALWRYVKTGVVPEGFELRRAA

SEQ ID NO: 251509 - protein, 366 aa, unidentified
MQKISTMRASGRKIFKGQLTIGLDLGDRSSSCCVLDAAGEIILEQKLPTTPEGMKQTFAKMPRCRIAMETGTHSPWVSRLLTALEHEVIVAHAQNVRLIARSRRKDDRMDARTLARLARIDPELLSPVQHRSAQAQLHLTEIRARAVLVSARTALVNAARGLVKSYGERLRKCGTFQFRQETATGLSAGLREALQPLLREVESLNERIKEYDRRIGTMSQQTYPETTLLKQVKGVGGLIATTYVLTIEDPHRFRKSRDAGCFVGLQPGRRNSGESEPQMHISKEGDRYLRTLLVQGAHYILGPFGEDSDLRRWGQKLAARGGKNGKKRAVVAVARKLAVLLHRLWVSGEVYEPLRNSQKAMSAVAA

SEQ ID NO: 251510 - protein, 410 aa, unidentified
MIVIGADTHKSTHTLAAVQAETGRIVATKTVKADMPGMLGAWRWSHTLDDGQRVWALEDCRHVSGRLERCLVGQGEQVVRVAPRLMGATRRAERRPGKSDEIDAVAVARAAIKEGIGELPVAFLDEPSFEIRLLSDHRDDLVAERTRHQNRLRWHLVELDPDLEAKLPARALDRECWCDRVARRLARLEQSARVRVARDELRRIRELTRAERALERELRDAITELRADVLAEDGIGTITAATLIGHTAGAARFPTDGHFARLAGAAPIPASSGRTKRVRLNRGGDRQLNCALHRIAVTRARTCPHTRAYLDRKLAEGKTNAEAYRCLKRHIARRVWHLLSHTPDPRPAPTMTIHCNTPATTLALTYRYENSGREALGMFGPAAWLASGSRRPGALWENADRAGRDLLLGP

SEQ ID NO: 251511 - protein, 532 aa, unidentified
MKGQRAKRNQKSQKTSKTTSDKATPGKWDEMNRKQRREMMRQMQSGDLSLEVIHPDASGIDIGNESHYVAVPPSRDSQPVRCFGCTTAELKKMAEWLTQCGIRTVAMQSTGVYWIAVYDILEAAGMEVYLVNARETKNLPGRKTDVQESQWLMKLHTYGLLRNSFRPSQEIRILRTYWRQRHDLVRSAGRHIQRMQKALTQMNIRLANVISEISGMTGQAILKAILDGQRDPRELAAYRDHRVEASEEEIAQALEGNWQEDQLFVLRQEQAGYEFCQQHITECDQPLEKYLARLEDRTQGATLPKETRKGRLNKKKKRNPQFNLREELFRMTGTDLTQIDGIDVTVAMTVVSEVGWDMSKWKTENHFVSWLKLAPDNKISGGKVIGKGRTPTNNRATTVLRMAATTLRASDTYLGAQFRRLRTRLGPPVATKAMAAKLARLLYRMLRYGMKYVDKGAELYEAQHRKQQVIHLKRKAAQLGFLKTTTESFGRRVPGEEWQNRIPQAQSADHRSLEGDPHDVDGEIEVRSRVHP

SEQ ID NO: 251512 - protein, 403 aa, unidentified
MNAVGIDVSKGKSMVSVLRPFGEVVAKPFEVCHTAGELRALADYLKSLDGETKVILEYTGRYYEPVAQLLHDAGLFVSAVNPKLIKDYGNNSLRKVKTDKADSRKIARYGLDNWVELRQHTPMDTIRYQLKTMNRQYGLYSKTKVSMKNNLISLLDQTFPCVNTLFSSPAREDGSQKWVDFAASFWHLDCVRGLNLAAFTQRYQKWCKRHGYNFSSGKAAEIHEGAKNQIALLPKDAMTKMLIHQAIEQLNATSKTVELLRTEMNRLAQQLPEYPVVMAMGGVGKSLGPQLMAEIGDVTRFAHKGSLAAYAGVDPGANQSGTREAKSTPSSKSGSPELRRTLFLVMSALLQTSLADDPVFQFLDKKRAEGKPYYVYMTAGANKFLRVYYGRVKEYLLSLEPTD

SEQ ID NO: 251513 - protein, 351 aa, unidentified
MPSKTDAVVARTIGIDTGKNTLHLIGLDEKGAIVLREKVSRGRIAARLANTPRCLIGIEAGMATHYVARELIALGHEVKQVPPAYAKPFRQGHKNDFRDAHAVAEAVQRPSTLCVPVKTDDQLDLQALHRIRSRLIGERTAVTNQIRSFLLERGIPVRQGLRFLRQQLPDILAKRIDVLSPRMIRIIEDLIGEWRRLDERIDHVTTEIEVLAQSNEGCRQLMTVPGIGPIIASAMVAAIGNGAAFATGRDFAAWLGLVPKQMSTGDRTILGRITKRGNRYLRTLFMQGARVILLRPANWAKHSFGPWLTAAAKRLHHNVLATALANKLARIALTVLVQGRGYETRVTSEAT

SEQ ID NO: 251514 - protein, 316 aa, unidentified
MKKARAEIFVGIDVSKSWLDVAVHEREEEGLRTSNDESGIASLGKRLKKLKPTLIVLEPTGGFEMLVVAELTHAGLPVVTISARRVRDFARATGRLAKTDKLDAKVLAHFAAAIRPPVRSLRNEEEEQLTALLTRRKQVLDMITIEKNRLVTVRAKMRLDLEAHLHWLSNSLKKLDQEIEAFVETSPVWKEKDALLQSVPGVGPVTSATMLGRMPELGQLNRQAIAALVGVAPVNKDSGTKHGKRKVFGGRADVRSVLYMAALAAKKFNPVLRKFYERLLKHGKQKKVALTACMRKLLVILNAMMRTNQPWRTQAA

SEQ ID NO: 251515 - protein, 338 aa, unidentified
MNTTTVGIDLAKTSFSVHGVDNRGKVTLRKTVSRAKLLSTLAKLPPCLVGMEACSGAHHWARELRSFGHEVRLMAPKFVIPYRKGGKNDNNDAAAICEAVARPDMRFVPVKSTEQQAVLCLHRIRQNQIRERTGMMNQLRGLLSEFGLVMPKGRYQGQQRIPDILEDAENGLPDLARRLIFDLWQRYRDICDQVLAADRELSALARQSAAAKRLMTIPGVGEQISTALVASISPQQFDNGRQLAAWLGLTPRQYTTGGHIRLGRITKRGDKYLRMCLIHGARAVIANLRDKQDKTSCWLRELIARRGYKRAIVALAARNARLVWTLLTKQEDYRAMPA

SEQ ID NO: 251516 - protein, 400 aa, unidentified
MKVYIGIDWSENKHEICFMHETGEVLLVREIPHTIAGFQQLDQARQSLGVGRQEVIIGLETAHNLLVDYLWDQGYEQIYVLPPSAVKSAQKRYRQSGAKDDAWDAHLIADLLRTDRQRYAAWKPDQPLTRQIRAEVRFAQQLGHELVRDGNRLRSILLRYYPSALEAFPHLDSVVFLAFFQTYPTFQQAQALSFAQLKVFLREHHHTQTRFWPTIYAGLHSEPPPSNPEVEAAYAPLALAQARILETLVRSRSECLARLGKLYLLHPDREIYDSLPKAGTLLSKLGDDRTRYPSPAILQAVAGTCPVTNRSGKHSRVYFRSACDHEFCHIVQQWARLTLEASPWAATYYRTVRPHCKTDSDAIRRLANRWLEVLWRLWVDRKPYDEAFHLKQHVLRMQVH

SEQ ID NO: 251517 - protein, 360 aa, unidentified
MNSTQNKKIEQVKETTMIVGIDVGSEKHYFRAFNWRGIELTRKPVAFSNSMEGFSSFYNTIVELMQKSELEEALVGIEPTGHYWFDLGQFMGEKDIKFVMVNPHHVHKTKELDDNSPSKNDRKDPRVIAGLVRDGRYFYSYMPTGAYAELRNASNRRFVLVEEQTRAKNRLQKWIAVYFPEYKGIYTHIDAKGGMLVLKKAPTPEEIVRLGVEGIIKIWKDAKLRGNGHKKAMLILAAAMRSIGLKAGLTEARMEIQDLIEDYELQTKRLERVNDLIKGLCQQVRYADKLLEIKGIEITTVAGFIAEVGDITRFDITKELQKLAGLELVADSSSKHNGKTKISKRGASVFVIFFLKHRYR

SEQ ID NO: 251518 - protein, 385 aa, unidentified
MNQTSSCAISTNTLHCALELSKNSWLLAIQFPDREQPSLYPIEGGNTEKLMAKLAAARDCWAKVSGSPPAITVCYEVGYDAFWLARFLMGRSIECLVIDPGSLQVNRRGRRVKTDRVDVKMLLRTLIAWCRGERHVWSLVRIPSIDEEDLRRSHRERGRLVRERTAHINRIKGLLFGQGIRGINVKSQYKTLAVDNLVTGDGHRLPPRLACEIAREIQRLAMVQEQIAKIERERDTAPTGCEATERKRHLLLQLKSIGPAISALLSREVYYRQFANRRQVGSFLGLAPSPYNSGAEERCQGISRAGSGHVRAIMIETAWLWIRHQPKSALTRWFVERTAGQSTRVRKILIVAVARKLAIALWRYVEHGMVPQGAILNPPTTGNAR

SEQ ID NO: 251519 - protein, 339 aa, unidentified
MANVAVLGIDIAKNVFQLHGIDADGQAVLKRRVMRDQLLQVTEAMPPCLIGIEACTGAFHWQRHFEAQGHTVKIIAPQYVKPFLKGQKNDGNDAQAICIAVQQPHMRFVPKKSIIQQDIQGLHRARQRLVNHRVALISQMRGLLLERGVAIAKSASVAQRTIPEIINNPMIDITELTRDIIGTLYAFLLQINEKIRYFDKQIDAVFRESDVCQRIAKIRGVGPKTATAVVAAVGDGADFKNGRHLAAWMGLVPRQHSSGDRRVLLGISKRGSQHLRTLLVHGGRSVVRTAQRKSDPASEWVNELRERRGYNRAAVAVANKNARVIWALLQHGGEYRANP

SEQ ID NO: 251520 - protein, 411 aa, unidentified
MKILYERCCGIDVHKRIVVACLKCGKKQEIREFGTTTGELRALTKWLLDKNCQMIAMESTGSYWKPLYNLFELSTLDTMVVNARDMRNVPGRKTDVKDAEWIADLLQHGLLRASYIPPREQRELRELSRYRKSLIEERAREINRLQKMLEGGNIKLASVVSDINGRSARNLLMYLLQHNKGLTKDKISGMLHGRLRHKIEAIMKALDGFLTPLQKQLMLKVVDHIDDMTKRIGEMDDLMNQYLMEYQEAIHALDEMPGIGRQSAETILAEIGLDMNRFPTEKHLSNWAGLAPGNNESAGKRRYGRTTKGNITLKTTLVQCAKSAVKKTDSFLAAQYQRLVVRRGANRATVAVAHTMLIAIYHMLKEHVPFLDLGAAYYNQFNAQSKINHYLKKLKQLGWAPNDATTLTSAT

SEQ ID NO: 251521 - protein, 311 aa, unidentified
MTSQYAGIDVGKAELHANVYGQEKVRVFANTHIGNKQLGNWLKQNKVGLAVMEASGGYERQAAEELRRTGIPVSVVNPTHVRRFCQGMGTLAKTDVKDARMIAYYASVKQPKAQAAKSEAETQLAELVERREQLTEMLGMEKNRSSNATVSSLKSIEKHIIYLAEEIKAIETQIEKLTESNSEWQLRLVIMQSFNGIGKVIATTLLAELPELGHESREVIAALAGVAPINRDSGKMRGRRSVFGGRARVRRVLYLAAMVGVRFNPVIKPFYERLLEAGKPKKVALVACMHKILTILNAMLKKGELFSPVYP

SEQ ID NO: 251522 - protein, 344 aa, unidentified
MDHFGGLDVSVKETSICIVEDTGRIVKEVKVASDPAALLKVLGNPTYRFKRIGLEAGPLSQWLFSVLAEAELPVICVETRHMQAVLKAQINKTDRNDARGIAQMIRAGLYRPVHVKTLRSQKLRMLLTHRKLLQSKAIAIENDLRGTLRNFGLKVGMVGKVKFEARIQELVENFPDLAVLVEPLLIVRRVLREQIVILHRRLLAIVREDEVCRRLMTTPGVGPVVALTYRATVDVPARFRKSKSVGAVFGLTCSRYQSGEVDWSGEISRCGDEMMRTMLYEAAQSMMYSKKWSWLKAWAMQIARRRGMKKAIVALARRLAVIMHRIWIDGTEFRWTREQVVAAA

SEQ ID NO: 251523 - protein, 309 aa, unidentified
MSFYCGIDLGARKSHLCLINENDKRLLDKKMDNDLDEMESKLYPYKGSLKIVAESTFNWEWLVYGLQNRNYNVKLAHTLALKAISWSKKKTDKWDAFTLARLLRVNMIPQAYIYPYELCPIRDLLRERIRLVTKRATEYGAISRMLLRYNIQGYNRNMIKHFTGKDIHQLYHHPFIRSKVTMELERIDLLTKQIDSIDKKILERAKEEETFYLLKTIPGIGDILGFTILYEVGDISRFTNARAFCSYCRVVPGIHQSSDKTHRSPNSKQGNHYLKWAFSQAAIMAIRYYPKIRRLYDKLSAKRKKQLDW

SEQ ID NO: 251524 - protein, 347 aa, unidentified
MKILALDLGKFKTVGCVYDTDSQAADYATIKMVPFAMHNLIATHAPDRVVLETGPSSGWVHDVALEGSRAVQVANPTTEGWRWRNVKAKTDRLDALKLARLSAAGELPQVHMPPSVVRQRRGLIGYRHALVARRTRIKNRIRSLLQCQGLSMPHGARGWTSASLGTLMKLSCPADEVQPETLWRCELHEELDGLGAIELRIRRIEKCLDALNRHDAQVARLQTIPGIGPRTAEVLVAVIDDPHRFHHANELGSYAGLVPRQFESGQMSRQGRITKRGNGLLRHMLVEAAWQSVRYNPEMRAVYERIRGGSKTRRKIAIVAVARRLLVTAWAMLRDESSWRAPRVATT

SEQ ID NO: 251525 - protein, 413 aa, unidentified
MELVVERCAGVDIGKDEVVACVRGPGPGGRGRSKETRTFRSFTAELEAMAEWFAAQGVTEVVMEATGSYWKPVWYVLEERGFELKLVNARHVKILPGRKTDVADAEWLAELLEHGLLRGSFVPPPAIRQLRDLTRYRKRLVQAHTAECQRIHKTLEDAGIKLDSVASDVLGVSGRAMLGALIAGERDPQVLAELAKGALRKKLPELRHALRGRFGAHHALLIGLCLDHITHLEAAVARLDTEIDTVIAPFAEARDRLDTITGVGKRAAECIVAEIGADMSRFPSAAHLASWAGMAPGNNVTGGKRRSGRTTKGDVWLRDILTECAWAAARTRNTYLGAQFWRLARRIGKKRAAIAVGHSILVISWHLLHENRDYDDLGGDYFTRRGDHNRHQQHLVRQLMDLGYRVTLERTAA

SEQ ID NO: 251526 - protein, 416 aa, unidentified
MNAVGIDVSSRKSTVAVLRPFGEVVRLPFDVAHNTEGLASLAEQLKALDGETRVVMEHTGRYYESVAKALHEAGLYVSAVNPLLIKEYGANSLRRVKTDKADAVKIARYALDNWADLRDYTPMDTIRYDLKTLNRQFQLASKQRTACSNNLIALLEQSFPGIRKCFDSPVRSDGTQKWVDFAHTFWHVDCVRKQSFNAFSERYRKWCKRHGYFFKQSNAEEVYALAKNAVVLVPKSEVTKVLVQEAANQLTSISRSVETYRSEMERLASMLPEYPVVMEMYGVGKSFGPQLMAEIGDVRRFERKQALVAFAGIDPMPNQSGDKNARSNKSSKRGSPYLRKTLFNVMGIYLKCAPQDEPVFQFLDRKRSEGKPFCVYMTAASNKFLRRYYAKVRDYLATLENLPPVDMDSTGLQGNN

SEQ ID NO: 251527 - protein, 408 aa, unidentified
MDTLHERCAGLDVHKDTVVACTRFSTGRTTEREVRTFTTTTTGLLELHDWLEGLAVTHVAMEATGVYWKPVWHLLESSFELVLANASHIKAVPGRKTDTNDATWIADLLAHGLIRPSFVPPTPIQELRDLTRTRKQLVNEMGRHLQRIQKVLQDANLKIDSFITDLLGKSGRAILDALVEGHTNPEVLVSLTTGRLKASKAELIEALRGRVTRHHRFLIKLHLRQIDQIQRSIAELEAQARDAIEPFRHLVEQLKAMPGISDTAALVILAEIGTNMTAFPSAAHLVSWAGLCPRSDESAGKRRSTRIRHGAPWLKATLVQAAWPATRKKNSYWGALFHRIRSRSGAKKAIIAVAASMLTTAYHLLRDGTAYQDLGPHHFDKARADRTAKSLVRRLEALGFEVELRKAA

SEQ ID NO: 251528 - protein, 394 aa, unidentified
MSLCVGIDVSKEKFDACGIGEGGKKMFSVSCPMDRSGFDKLVVQLPTDKTSFLLGMESTACYHMPLFSYLTTHGYQVVISNPLLIAQYANRSLRKTKTDKRDALTIAQFLMQEKESLSVETCSPLIGELRDLARRREKLTDQVTALKSDMKRILSVTFPELEHLTGVFTKSTLRLLADFPSAHALRQANYSAIAAIVIPRSRGRKSHASVHALMTAAASSVGVTSPAKEMILKQEACLLLEVEEQIRETTKLLMSLRNERIRDDTEILCSMRGIGENTAVNFLVEMGGAIGIYKNDKKLIAAAGLDPSTYQSGKYAGRSKISKRGNRHLRRVIWLMTTRTITNNAIFRAYFFKRRTEGLPYTKAVLATAHKLIRVMYSMLTHRTCFVEGGINYS

SEQ ID NO: 251529 - protein, 338 aa, unidentified
MKVTTVGVDLAKSVFSIHGVDERGNAVLKKSVRRAKLLELFAQLPPCVVGMESCSGAQHWARELLKLGHDPKIMAAEFVAPYRMSGKNDANDAEAICEAVGRPQMRFVPLKSIEQQAVLAVHRMRQGLVEERTALANRLRGLLTENGIVFAKGIDQLRRAMPVILEDSHNRLPELAREVLADANRHLAELDARIAEYDRRLAALARSSEPAKRLMKIEGVGALTATAILATVGDAKAFKNGRQFAAWLGLTPLQRSTGGRQRLGQITKHGDVYLRTMLIHGSRSVMRLTPQRADAKSRWVESLRARRPDNIAAVALAAKHARIIWALLARPQDYRPAQ

SEQ ID NO: 251530 - protein, 319 aa, unidentified
MHCIGVDVSKQELVTYDGEKERIFPNDPKISQFRRFIKATPDPLIVFEPTSTYSRRLETFCRTEKIVCCQLNPRVVPHYRQVGRGRSKTDKTDAELLYRYGVERGPAEAVQLTYDALAQAVATHLACYRVVQKARVAYQGLAEALMQDPATSKSLLRGLLHEIRELKKKEALHLTHAQAVVATDEEAAKRFEAVLTIPGIGPITALTLQTLFRKSPQADRRQIVALAGLDPIQYRSGTSVHRKTRISKRGNREVRKRLFEATLSAARFNPAIRVMYQRLKEEGKPDKVARVAVARKLLLIAHAIYKTGEPFCPPALKEA

SEQ ID NO: 251531 - protein, 325 aa, unidentified
MTMPEMTQYVGIDVSKAHLDVAVLPAGAHVRVTNDAAGWAAVTTQVGTAVPTCVVLEATSTYHVGAWLALHAAGMAVTVVNPARPHAFAKSEGMRAKTDHHDARLLARFGQQKQPRPTTVPSATVRRLQALVGCREDVTRALITAKNQRSIADDATVIAVHQRRVDQLETEQRQLEATIDQLLATDAELIERRRLVRSVPGAGPVISAALVAGLPELGVFDRRAIASLAGVAPHPHDSGTTTGPRACVGGRRHVTKVRYQLAVTAVRCDPVMRAHYQQLRSRCRYKVAIIACARRLLGILTAMLRDGLTWQETEVGQGHFLPETA

SEQ ID NO: 251532 - protein, 394 aa, unidentified
MKLVGIDVGKNSHHFCVMDKETGEFNVTPTSFSNNKEGFDFLINSLKPYSKKSVLIGMEDTGHYHVALLKFLLNNGYTVALINPKTTDLTRKMEGGITKNDKLDTITICDVLDTPERKKQYRITKVDRFDLYEQRQLTRHHHNLKEELNLYCNRLQKSIDLVFPEFNTLFSSKYGVVYMNLLKTFGSAEAIASTDIRTIRKCFEIKGRGGRISLTAEKLKECAKNSIGISSEVETIQIKHLVSQITLIKEQIAEIDKKIEEFSITNNSPILSIPGISHFSGTSILAELGDIGNYSKPSQIIKFAGVAPYHYESSQYNAQHTAITKKGSKYLRKTLYQIILPVINNNPVFKKYYRLKISQGKGHRCAQGHCIRKLLRIIYHLLETGQSFDPALLR

SEQ ID NO: 251533 - protein, 343 aa, unidentified
MEHYAGIDVSLERSSVCVVDSSGRIIREAKVASEPEALVRFFRELGVPLTRVGLEAGPLSQWLHAGLTGAGFAAVLLETRHVKAALSAMVVKTDRKDARGIAQLLRMGWYRSVHRKSPDAQEVRALLVGRKLLQAKLRDVELSVRGILRGFGLKVGEVSKGRFAARVEELVAGHEMLETVIGAMLQAREGLRAEFARLHRRMLAIVRNDTVCRRLMTVPGVGALVAITFKTAVDDPGRFRTAKAVGAHFGLTPKRYQSGETDVSGGISKVGDAMVRTALYEAANAMLTRTSRVSALKRWALEVARRRGMKRAKVALARKLAGVLQRMWANATDFRWGKEAAIA

SEQ ID NO: 251534 - protein, 396 aa, unidentified
MAQIWAGTDIGKTHHHCVVLDTDGKRLLSRRVLNDEPELLALLADVMTINEDVVWAVDVADGMAALWINLLLNHGQQLVYIPGLAVNRASAGYRGTGKTDAKDATVIADQARMRRDLTTLRPDDENAIELRVLTGRRADINADRTRRINRLRGQLTSIFPALERELDLSNIGPLVLLSGYQTPAALRRTGRRRLETWLRNRKVRGAEALAEAALEAADRQHTALPGERITAHVIHTLAKEVMGLNEQLAEIDKLIAARFREHDLAEVIESMPGIGPLMGAEFLAATAGDMNRYGTADRLASMAGVAPTPRDSGSVNGNLHRPRRYHRGLQRVFYTSALISIRNCDASRRFYERKRAEGKRHVQAVLALARRRVNVLWALIRDGRCYQDGLPVTAAA

SEQ ID NO: 251535 - protein, 358 aa, unidentified
MRIIGCDLHARQQTVAMLDTDSGELVEKTLQHDGEELRKFYSGLSRPVLVGIEATGSMQWFLELMEELGIECRVGDPAKIRAAEPRKQKNDRRDAQLLLKLLVENRFPTIWMPSTEQRDLRALLRHRHQWVRLRSRVQHTLQSMALNHGLRRGHALWNQAGQHALWTLPLAPHASERRKALMKLYPCLQESIDELDRQVSRQVDQHPPARRLMTHPGVGPVTALATEVFLGDPLRFTDGKAVASYMGMIPREHSSGGRQRLGAMSKQGNTLLRYLWCEAAMHAVERDPELKRFYRRKLVQKGPGKARVASARKLGIRLWIMLREQIDYEEFCRRGKARRESGSVRAGMPDRNSGPGEA

SEQ ID NO: 251536 - protein, 360 aa, unidentified
MNNQSLSNYQTIVGGVDTHKDLHFVAIVDAYDRVLSSNSFPTTRQGYKSMLDWMQSFGEVKRIGIECTGTYGVGLLRYLQQFDIEILEVTAPDKTIRRKRGKDDTIDAENAAHAAFAGIRTVTPKTRDGMVESLRVLKMCRKTAIAARRIALQMIQMNIISAPEAIRESLRTMTRMQLIRTLAAWRPDLSGYRDISTAYKIALKSLARRYLELHDEIADLDVMISVIVDELAPELITGKAIGYESAAQLLITIGDNPERLKSEASFAALCGVNPIPASSGKVNRHRLNRGGDRAANSALHIIAIGRLRIDARTKEYVEKRLTQGHTKLEALRCLKRYIAREVYYTLRKRNNLINSAQIAA

SEQ ID NO: 251537 - protein, 340 aa, unidentified
MGEQYVGIDLHRRRSVIVRLTGQGEVLETVRIDNDPVALSLELAKAGSDPEVVLEATYGWYWAADLLQACGAKVHLAHPLGVKMFGYQRVKTDARDSRNLAELLRMGRLPEAWLAPPQVWELRELVRYRAKLVALRSGLKAQVHAVLAKEGVRVPMSDLFGVAGTRLLDQLHLGHAYALRVASLRTLVAVYDQEIAMLGREISTALAGDVGYLAIQAIPGVGPVLAAVFVAEIGDVHRFAAAPQLCSWAGLTPRHRESDTTVRRGPITKQGPRLVRWAAVEAVQRLPGGSKQAADFHRIADRRGTGIGRVAAARKLLTLVYYGLRDGQVRCLASAPAEAA

SEQ ID NO: 251538 - protein, 445 aa, unidentified
MHYKRLLTFIDGVSSYLSVGLDVGADFTWMSIALPNGSFVGKPFKIIHSDSRSRDLAVTKIKEAQETYSLKSRCFLESTGIYHIPLLCFLRDKGFDCSVINPIITKNSTNINIRKLHNDKFDSKKAALVGLNVSLKTSILPDDSVVDLRNLVRDYYYFKDLQSAVSLKLTAELKVSFPAYAKVFSKVTTQSSLKLLSSYPLPADMLAASKEDIVDIIRSTARFGEAYALRKYDAIIAAAQDAAVFGRALPSNAVRIRLYIDTYQEYQKHLDALLKALHETVEKLQDTLIYDQICLLQSLRGIGFLSAVVLIAEMGDFKLFSSPKKLYAYFGLDPAVKQSGKLNGDKVHMSKRGSSLARRVLHMAALNNVKVDKGSGTPVNPVIYDYYTRKCSGKKKPVAMGAVMHKICNIIFAMLRDNKPFEIITPEEHCRRFATEHPDKIRKAA

SEQ ID NO: 251539 - protein, 318 aa, unidentified
MTSTKAIEYVGIDVSKARLDVAVESTGECWNVANDETEVSGLVTRLSRMALGRVVVEATGGQERRLVECLSAAGLPVSLVNPQQVRHFARGLGRRAKTDRIDALVLARFGQVTQPLLYVRPSDQEEALAALVERRQQLVNDLTAEKNRLATARPAARESLEAHIRWLEQETESLRRQIETLLQQTADLKSKDEILQSTPGVGLITSVTFLAGLPELGRLNRKQAAALVGVAPFSHDSGSTRGTRYCSGGRALVRTALYMATLSAIRCNPLIRDFYTQLKNRGKPSKVALVACMRKLLTILNAMIRDNKRWMNQAVAPV

SEQ ID NO: 251540 - protein, 338 aa, unidentified
MNVNYLNTATFIGIDAHQEEHTACAISRFEEEKGTLQFKNSKKDINKFLKWISATQQSKDKVIIGIEGGGNARHALVSRLLDRHQHVYEVNPLFTKQRRAFGTKGDKSDIIDAKAIAQVLSRKVKQLPKLGQQQYSANRLCLRKTVWFYEKITFQGASLKTQLKQLEREKKLSLTVEERDILKLIIRERKGELKRIQKLQNQLKGKLSIFLEDQGKNLTSIKGIDTVLAAKIVAHANGIERFSKVSSFIRYAGIAPLERSSGKTKRHTRNRKGNRKLNSALYLVAVGQLKWNPKAKEYLDKKLKEGKTKKHAIRCLMKRISCIIYGMLKSGEEYIDQN

SEQ ID NO: 251541 - protein, 361 aa, unidentified
MKVQRTSVGLDVHARSIVACGLDADTGEVFERRLCPNHREVLEWIVGLPAPVAVTYEAGPTGFVLARALTTAGIDCRVAAPSKLQRPPGDRVKTDVRDAAHLARLLHLGQIVEVAVPTVDQEAARDVVRAREDCRRDLLAARQRVSKLLLRQGIVYSGGQAWTGKHQLWLQAQRFEAAPLQWAYDSALDTLLGTLDRRKRLDARIGEMAAQGDYAPVVGRLMCLRGVSTLTAFALAVEIGDWSRLTGRSIGAYVGLVPTESSSGATRSQGSITKTGNGHVRRLLVEAAWHHRKPYQPWSPTLRRRWDAASPVARARGQLGNRRLYDRWRRFDARGKRPAVANTAIARELAGWCWSLAVLDN

SEQ ID NO: 251542 - protein, 343 aa, unidentified
MSIVILGVDLGKNACSVVGVDAAGAVVVRRSMRRQTLVDYVAKLPVCVVAMEACCGAHYLGRLFAAHGHEIRLMSPEYVRPYVKAQKNDDRDAEGIAEAASRPTMRFVELKTQEQLDIQTLHRVRSRLVAERRSLTNQLRAILLERGTIFPVGRRKLELGIDALLADEDTTLSPRLRQLVAELRAEWRELDTRVEALNGEFVELARNDAAARRLTSIPGVGVLNATALIAAVGDASSFAKARDLGAWLGLVPRQHTTGGKPRLLGISKRGNTYLRTLLIHGARAALPSLARSETPLGRWLTGMIERGVHRNAIVVALANKLARIAWAALRKDATFERGYQVAA

SEQ ID NO: 251543 - protein, 349 aa, unidentified
MTEQRRSYAGECVYVGVDVHKETYTVTCVCHKQIVKPATVQAEPGGLAVSLPRGFPGATLYSVYEAGFSAFVLHRVLTKAGITTMIVNPASIAVAANDKVKTDRRDSKKLAIDLADGRLRGIYVPTEAAELARLLPRTRAQIFEHRATIARQINAKLHQFGLIAPSSRRMISNRYLREMATWTLPPELSVSLTLLAEQWRFATRQLIEMRRLLRDQAKAQEEIEKVYQSVPGIGEVVARTFATELGDMTRFANERALFSYTGLTPSEHSSGTAVRRGSISRQGSSRVRHLLVETAWRAIPRDKALKEIFDRIAATRGKKRAIVAIARRLTGRIRACFRQGTTYAVGTAA

SEQ ID NO: 251544 - protein, 410 aa, unidentified
MIIIGDDWAEGHHDIEMMSPHGEVLTRFRVTEDVDGLEELLSEVHKYTTDDEVVVGIERDNGPWVTALRGYGFTVFAINPVQSARCRTRFSLAGAKSDIGDAHVLADMVRTDRQHLRQVAEDTLEAEGLKILTRTHKSLIWEHNRHLNRLRYNLIQYFPAALEAFPDLSSPESVELLTKAPTPSRAADLTITQIKAALRRAHRRSIDERAPKIRATLHAPGKLGLLGSLEAGHAAATVATLAVLATLTTQIEALKEQVTTAFADHPHAAIITSLPGMGPVLGARVLAEFGDAADRYRSGKARRNFAGTSPITKASGKKTVVSRRYVHNDRLLDALTRQAFTAIRVSPGARAYYDRQRRRGVEHNAALRHVANRFVGILHGCLKSGVLYDESVAWGAPARVDAMTERVDAA

SEQ ID NO: 251545 - protein, 374 aa, unidentified
MKVYVGIDAHTTNFTLATSVALDEDPVNVNTYPAKVSNIAAYCKNLRKKYGEELEIVTGYEAGTLGFSLKRELDEKGIACIVIAPSTIAGTNLNRKRKKKTDKRDAMAIAKCLMTHDYSEVYMPDEEDEAVRDLIRMRQDLKKFQKSTKQQIGALCHRHGYHFNDGKYWTKKHLKWLRDLPIEGILKDSLEGYLRTLDYLTDRVTEIDSRIDEISEQDKYRESVHKLTCLKGIKTFTALAVIVEIGDFSRFIKAKNFAAFLGLVSGENSSSDGQTLLGITKQGNRFLRRLLTEAAKRFSVASTKKSKELLRRQKGNSEHIIAYADKANDRLRKRYYHLVMHNKKCANKATTAVARELACFIWGMMTDNTQTVLS

SEQ ID NO: 251546 - protein, 363 aa, unidentified
MGDARAVAVGLDVHKSSVRLAAVRAGEVVRELSLPFDHERVERELRAWPGARVVYEAGPTGFGLYRHLVGAGVDCEIVAPGLVPSRPGDRIKTDRRDARKLAALHASGLLTAIFVPSPELEALRDLVRAREDARLDRMRARHRLGKFVLRHDRRMPTTCWGVTRRGWLGRQVFELPGQQQAFDDYLFAVDQIDRRIDALESELDRLAHAGPHAELIARLRCIRGIDTLTALGLVCEVGDFSRFRTAEQFMSFVGLVASEHSSGQGRRQGSITKAGSTHARRLLVESAWHARRRPTVGYELARRHRGQDPGVLERSWRCQQRLHHRWRRMSGRGKPHQKIVVACARELAGFVWAIATDQPMRTT

SEQ ID NO: 251547 - protein, 407 aa, unidentified
MLFLGDDWAEAHHDVELQDDQGGVLKRRRLPEGVAGLTQLHELIADHLDDEDEPESVLVGIETDRGGWVHALVAAGYTVYAMNPKQVARYRERHSTSGAKSDPGDAHVLAEIVRKDRDHHRVVAGDSEQAEVVKTVARTHQTMIWTRQRQANQLRSMLREFYPAALEAFGEDLAGRDALAVLAIAPTPDAGRTLTRSRVVSVLRKAGRQRNLQKRAEQISTILGAEHLGLSDALAEGYGISVRSLVAVLTTMVEQAAALEGEVERCFGQHPDAEIITSQPGLGVVLGARVLAEFGDDKDRYAHAKARRNYAGTSPITKTSGKQRVVLARYARNKRLADALHQQAFAALTASPGARAFYDHHRARGATHHQALRTLSNRLVGILDGCLRHRAVYDEDIAWAHRTPAAA

SEQ ID NO: 251548 - protein, 463 aa, unidentified
MPELTKPLNAMAKVARKIKTSKGLRLKIVNPDAAGIDVADGEMQVCVPEDRDGENNRRFDSFTCDLREICAWLKACRITTVAMEATGVYWLNIFLMLQEEGFDVVLANPLQVKNLMDEKTDEADAEWLMLLHSYGMVKPCFQPDNVARRIRNLTRHRSNLIATAGREVQHMQKAMEQMNVKLSTVISDILGKSGQAIIRAIVAGDHDPKSLAQLADGRCRKPKEVIAKSLEGTWDEDLLFILTQSVELYDTCQEKVAACEQEIEKLMMQYAAQVDMDGAGELVRTNKRSNYKNAPDIDTEKYAHALWGVNLMAVPGVAAGSLLQLVGELGHDFASKFDTCSKFCKWCNLSPNNKITGGKLISSRIPRRKNPVGQILRQCANTVKDEKGELGTYFRRMKSRNGHMQAIVATAHKIARIIYTMVKYKREYDPRMVGCDERELLERRIARTQRQLQKLNERLAKAG

SEQ ID NO: 251549 - protein, 355 aa, unidentified
MSQEKYIGLDVHQATISAAVMDGNGKLLMECLLETKAATILEFIQGLRGTLSLTFEEGTSAAWLHDLLKPHVSRLVVCDPRKAALLQDGNKSDRIDARKLAELLRNNQLNPVYHGEHGIRTLKELARSYGTITKDLTRVMNRIKALYRSWGIACPGSSVYAPRHRAEWLAKIVEPGVRVRAERLYQQLDNLRPVHLEARRELLRESHRHAAVKLFRQIPSIGPIRAALLVALLQTPHRFRSKRQLWAYSGFAVQTHDSGEYRYVRGNLQRNRERISVRGLNENHNKELKNLFKSAAISASTRPGPLRDFYTARVESGMRPTMARLTLARKIASITLTMWKKGASFDPKQLQRQAA

SEQ ID NO: 251550 - protein, 413 aa, unidentified
MNIVYERCAGLDVHKRTVVACVIIPDDKGQRSKERQTFSTMTPDLLRMREWLTTFRVTHVAMESTGVFWKPIYNILEGHFELLVVNAQHIKTVPGRKTDVKDAEWIADLLQHGLLRSSLIPPPSQREVRELTRYRTSLVEERSRAINRLQKALEDTNIKLASVVSDLMGASARDMLTALLEGETDVTVLSQLARGNMRSKREVVEQDLQGHLTAHHRFLLKEQLAHIDELDNAIECISTEIAERLRPFEEQLKRLETIPGIKRRLAEIILAEIGPDMSRFPSSRHLASWAGMCPGNNESAGKRLSGRTRKGSPWPRTALVEAAQAANHCKNSYLSAQYHRLAIRRGGKKATIAVGHSLLVIVYHILTEKKDYEELGGNYFDEWDRRTVQKRLVHRLEKLGWEVSLCDLKVFLS

SEQ ID NO: 251551 - protein, 339 aa, unidentified
MEITTVGVDIAKNVFQLHYVDQESGEIVNKPIRRAKFLESFVNREPCLIGMEACSGAHHWARQLARMGHEVRLMPAEFVKAFNIRNKNDAADARAIWLATQQPGKPVAVKTEIQQAMLALHRMRQQLVKFRTMQINNLRGLLAEYGEVMARSREALDSAIPAVLARLSERLPAVLIDTFREQWNGLTKLDEQIATIERRMREWKKQDPAVAAISEIPGVGLLTATAAVAMMGDAKAFQSGREFAAWVGLVPRQTGSGGIVNLHGISKRGDKYLRTLLIHGARSVLFNAKAPTPWIEQMKKRRPINVVIVALANKIARVIWAVLAHQCRYQAGYDSAKPT

SEQ ID NO: 251552 - protein, 346 aa, unidentified
MPIVGGLDIHRKQLTFDYLDTVTGEVKRGQVAPADRAHLRAWLARFAGRDDVAFALEGCTGWRYVAEELAAAGIAAHLAEPADTAAARGRKRRAKTDKTDSRHLRELLAEGRLPECWIPPSRILECRALLETYHDLRAEHTAWVQRIHAVFFCQGAPALADGALRAGRCDLEALRAAAATHLSPAGQLQVATALAVLAALEAQLGVLRHRLVDAARHLAGAKVLAERLYGVGPATALAMTCWLGGADRFSSARKAVRFAGLDITVYSSDGKRSPGRLSRQGPPVLRWAVYEAGKVHARGTAPDHGYYAQVKDRKDGKRAALSEARKILRQACHILAELGDDALSAT

SEQ ID NO: 251553 - protein, 272 aa, unidentified
MQTITTIGLDIAKSVFQVHGVDGAGQVVIRRQLKRRSVLVFFQKLPPCLVGIEACASSHHWSRQLQALGHTVRLMPPAYVKPYVKRQKNDMADAEAICEAVTRASMRFVPTKTPEQQSCLMLHRTRHLFIRQQTAVINSIRAHLAEFGIVAPVGRKGVTELLHIVADPSEKRVPEVARACLAALGDQLLSVKEQILQFDRMIMTWHRSNQTSKRLHYIPGVGPMLATALVASVADPRTFRSGRNFSAWRACAINEIAPGNWRDVKVERANST

SEQ ID NO: 251554 - protein, 422 aa, unidentified
MLQETADREEIIERVAALDIGKAELVCCVRVPHEGRPGRRLQEVQAYPTMTGSLLRLADRLRCLGVTRVVMEATSDYWKPVFYVLEAHGLETWLVNARDVKHLPGRPKTDKLDAVWLCKVAERQMIRPSFVPPPPIRRLRDVTRYRIDLVGVRTAEKSRVEKLLEDAQIKLSVVASDIFGASGRAMMGALVAGERNPKALAQLARSSMRRKIGVLEEAFTGHFTDHHAFLLAKMLARIDAIDADIAELDAKIEAMTAPFASAVERLDEIPGIGPTAAAIIIAEVGLDMTRFPTAAHLASWAKFAPGVKESAGKKKGKGSTGHGDAYLARVLGEAAVGASKTDSFLGERYRRIARRRGAKKAIVAVGRSILVIVWHLLSDPQTRYTDLGSNYFDQRINPERRKRAHIHQLEALGYKVTLEPAA

SEQ ID NO: 251555 - protein, 347 aa, unidentified
MVTIGIDTHKATLAVSAIDRTGRETGARTFPNDRQGHVGLLRWAQAHGSERRFGIEGSGSFGAALARLLVAAGEAVVEVPAILTERERRHLRRAGKSDPGDALAIARVALREAGLGPIPMPGITEDLKLLVDARDQRVGERTRIANRLHAHLVVLAPGYKREIRNLTAARHLAAVADLLDRLGGVRAELARAELARLRELEAESVVLEGRIRSLVRLTGSSLPTITGVAAITAAKLLGETGDPRRIHSTPAFALMSGTAPIPASSGQTSRHRLNRGGNRQLNRALHTIALVQARTDPRAQAYMARRMAEGKSWLEALRCLKRHLADVVLRTMLADLERSAKPAAMGA

SEQ ID NO: 251556 - protein, 400 aa, unidentified
MSTAHGRIWVGIDAGKGHHWAVAVNTDGETVFSTKVVNDESQILTLIAAAREKAGEVRWAVDISGRASALLLALLVAHGQQVVYVPGRTVNRMTGAYRGEGKTDAKDALVIADQARVRRDFAPIETPPELVSTLQLLTGYRRDLIADRVRLINRLRDLLVGICPALERAFDYSAVKGPVVMLTEYQTPAALRRIGVKRLTTWLERRKVRGADTIAAKAVEAAQSQMTALPGESRAAKLVRDLAHQLLALDERIKDNDREIHETFRTDDRAEIIESMPGMGPILGAEFVAIVGDLSGYRDADRLASHAGLAPVPRDSGRRTGNYHRPKHYSRRLRWLFYMSAQSAMMRPGPSRDYYLKKRAEGMVHTQAFLSLARRRVNVLWAMPRDKRLFTPVPPVTQAA

SEQ ID NO: 251557 - protein, 450 aa, unidentified
MMREPQEIQDEAHEQVAERVAAVDVAKASGMVCTRVPHPSQPGRRLTKVWEVAATTGAIIELGDHLAGLGVELVTLESTSDYWRGFFYLLEAAGLEVQLVNARDVKNVPGRPKTDKLDAVWLAKLTERGMLRPSFVPPAEIRQLRDYTRLRIDLTRDRSRHVQRLEKLLEDALIKLSTVATDIIGKSGRAMLEALISGQRDPKVLAGLARGRMKAKHAALVQALTGRFDDHHAELARLLLDQYDALTAQIDRLTARIQELLAAIPAAQGVDTDGTTGPDAGTGPDAAVLPAVARLDAVPGIGVKAAQVLLAELGLDMGIFPTPAHLVSWAKLCPRTIQSGAKHRAGTTGKGNPYLKGILGEIAAAAAKTDTFLGERYRRIVKRRGKRKALVAIARSILVIVWHLLADPAARYHDLGAGYYASRIDTARKARNHIRQLEALGFTVTLAPAA

SEQ ID NO: 251558 - protein, 369 aa, unidentified
MTDLTLFVGLDVHKKTISVAMVEAAAGAAVGFYGTIANTPDSVRTLCRKLMRGGQQLHFVYEAGPCGYGVQRLLTRLGYRCEVVAPALIPRKVGDKVKTDRRDAMMLAQTLRAGQLTAVWVPDEAHEAMRDLVRLRMQAMRDLRKSRQQLLSFLLRHGRNSPYRHWTKMYRRWLGELVFAHPAQHLALEEMLQRIERAEALCDRLKAAIIALVPQWSLAPVVQAIQALRGVSLLVAAVIVAEIGCFGRFASPRTLMAYLGLNPSEHSSGATVRRGAITKTGNTLARTCLVEAAWTYRFPARVTQIIRDRLVGLPEPIRAIAWKAQVRLSARYRRLVAAGKPAPKVAVAIARELAGFIWAIARLVEPKFV

SEQ ID NO: 251559 - protein, 351 aa, unidentified
MRTSQYSLETISTIGIDVGKNTFHLVGLDKRGAIVLQQKLTRHQLGRRLSNIPRCLIGMETCSGTHFIARQLATLGHDVRLIPAQYVKPFLKGHKNDYRDAEAIAEAVQRPTMHFVSIKTPEQMDLLALHRVRSRLVRQRTGVANQIRGFLLERGITVRQGLVPLRKALPEILSTKSDVLSGRMINLIGELSQDWHRLDERIASVSTEIEALAKQDESCQRLMSVPGIGPIISSAVVAAIGNGAGFKQGRDFAAWLGLIPKQESTGDRTILGKISKRGNKYVRTLFVQAAHVVLERRPRTARQGLWPWIEQASKRLHRNMLAIALANKLARIAWAVLARGHAYQPRINANA

SEQ ID NO: 251560 - protein, 351 aa, unidentified
MKSINKQIQGEELFVGIDLHKHRWHVTIRTADVGIFSNSIAGRWQELKKVLNRYNGCRIHAVYEAGCFGFWLFDHLTNFGVDCIVTPPSLIPQEHGNRVKTDRLDSRKLARLLAKGLLKSIWVPSAQERFHRQVIRRRRQLVGDRVRTQNRIKSELCFYGIDLPTPRSKWSQVYFANLQRIKFKNHWMQKSFNQLLEQYEFLSVQIDKQTQLLKQLAKLPLYCDRVKILCSIPGIGILTAMEILLELQDFSRFRRAQQLAAYVGLTPSQYSSADKIRMGRITGAGKNTVRSALVESCWHLIRKDKAMRRKYEQIKARAGGKRAIVAIARKLILCIRRLLLDNRPYEYEPVN

SEQ ID NO: 251561 - protein, 389 aa, unidentified
MTSKKITRRTELPVATTTPAVQGRNVFGADPHKRTLTATVLDERGGVLGTSVFKVSGDGHRAMETWALSFGPVATWGIEGASGIGRHTAVYLVRQGHDVRDVCPNRTNERSRGRCQGKSDALDSVRIARETQADPETPVAFKRAGPDRGPDEKTELMALWHKVRRSVLKSRQHLLNEAEAMLMDLPEELRVELPDTPDVQSRLRHLVARDHSKSSDAVTELRLRLLEEMTMTLSGLEAKEKEATAALATLIQAARSTLDGLCGLSTRSVAELLVEVGDPRRMTEGGFAKFNGTAPLPASSAEGDGEPLRHRLNRGGNRRVNSVLHLMAITQLRCEPRARHLYDHARQRGHTKKEAMRILKRHLSNLVYRRMTTDINARDSSEGSHQIAA

SEQ ID NO: 251562 - protein, 342 aa, unidentified
MYYIGLDVHKKTISFCVKDAAGHVHREGKIGSTRRELDAWIGTLPQPRMIAMEATIFTGWIYDHLLPHASAIKVAHPLMLRAIALAKKLSDRIDASKIADCLRCDFLPECHMASTEIRNRRRVLRYRHLLVRQMVQTKNRVSGLLLETGVEHNKSRLHKVGYFRRLLATNSDIDDSIRPLLRLSRETIERCQKTEYALVSSLERDPFLKERIKRLRTVPGVGPITALNWALEMGDISRFRTIKQAVSYCRLCGDERSSADKVMRMPLSKQRNKHIQHVLVEAAKLAPRQSAELALIHHKAMEKGNRNRATLAVARKIVAWLLAVDRENREFIPAQQRETRAA

SEQ ID NO: 251563 - protein, 455 aa, unidentified
MSTVSGLHGEFEQININAAGIDIGAQKHYVAVPKGRDPQGKDVRHFETFTVDLYALADWLKQCGIDTVAMESTGIYWIPLFEILEQKEFEVRLVNPRSIKHAPGRKSDVVDCQWIQQLHAYGLLTSAFRPDEQVGVLRAYHRQRTMLVNHASTHIQHMQKALEQMNLKLTNVLSDITGTTGMKIVRSILAGERNPKKLARHRDPRCKKSEKEIAKSLHGNWRNEHLFALQQAVELYDFYQTRIQACDRQIQDQLCRFEDRSNDSDLPSPTGKFKGAGKKLTFDATKHLYRMTGVDLTRIVGLDAPTVLTIIAEVGLDMSRWPTSKHFSSWLGLCPGSKISGGKNFSSKSKPSANRAAHAFRMAAYSLHRSQTGIGAFLRRKKAQLGAPKAITATAHKIARIFYEMLKTRTEYKDLGVDYYQNRYKERMLRNLKRKAKAFGLDLVNSKQDQLVMTA

SEQ ID NO: 251564 - protein, 324 aa, unidentified
MDARGKVTFHRNLPNIFTLFQQVAEPYCHSIAVGVESTFNWYWLADGCKKANIPFFLGHALYMKAIHGGKKKDDRIDSKKIADLLRCNLFPLAYPYPEEMRATRDLLRRRHRFVALRAEGYTHIQNTFSQHAINVVSSSDVKKKDSRRNLCALLPHPDLAMSVDCDIDMINALDTIIHKIEKEIYAQAKYHDRNALSILLTVPGIGKMLGLTILYETHTIKRFPSAQKFSSYSRLVKCQRTSNGKSTGDGNNKIGNPHLKWAFSEIIIHAQKESERIKRYYERLKSKHGKGKKASAKLLSKTTLNGKKKPKVPKGLVWYTHEQA

SEQ ID NO: 251565 - protein, 350 aa, unidentified
MLIIGCDYHPGFQQIAFVDTQTGECSERRLAHREEAEQFYRDLKQQNTTVRLGMESSGHSRWFERLLRDLQFELWIGDAAEIRTKRVRKQKTDRQDAQLLLRLMLEDRFPRIWVPDAANRDLRQLLWHRHRLVQMRTRVMNQLHVVALNEGLRRKKALWRPAGRSELESLQLAPWASRRRQDLLDLLDRLTPKIQDLTRQLEQEVERRPVTRRLITHPGVGPLTALAYELVIGTPERFHCGKQIASYVGLVPTEESSGDRRRLGHISKQGNVLLRFLLVEAAQVTVRSHPEWRSTFFHLAMRRGRKIAKVAMARKLAVHLYWMWRQGLDYGQLHKLGSHAGEPGNPHGVQ

SEQ ID NO: 251566 - protein, 344 aa, unidentified
MTYYAGIDVSLRSVNICVVGDDGELVAETKLSSDVQEIIAYLDELEYSIDIVGLEAGTLAQYLTYGLQSAGYDVVCMEARQVKAALSAMRNKTDKHDARGIAQLLRSGWYSQVHVKSMESHHIRMLLTSRRAVLDKCIDLEQEIRGLFKIFGIKLPPKLGHGSFDRTVRAVIEADEKLSHALLPLLDARLVLYKTFRVLDNRTRHLAQGDPLCERLMTAPGVGYVTALTFKAGVDDPSRFRRSRTVAAHFGLTPRRLQSGEMDIEGRISKSGDAEVRRSLYVAANSVLTRSSRWSSLKAWGMKLKKNRGHKKAVVAVARKLAVILHRMWIEETQFQWGMEGVRS

SEQ ID NO: 251567 - protein, 340 aa, unidentified
MTMFAGLDVGFKRTAVCVIDDTGAMIWRGMVDTHPEMIAAALRRWRKELSKVGLESGSLSPWLSRELVGRGLPVVCMDARRAADAVKARRMKTDKADALALAEMLRTGFYSTVHVKSEESHRLKALLGARDQLVRTKRSLGSQVRGLLRPFGIRLPSRQGTKKFDAAAHEAVRHDPALSASVTALLEALVAVESQIARLDERLKELARRSQVCWRLMSVPGVGPIVALAFMAAIEDVGRFRRMRDIGVYLGLTPKRYQSGETDVVLGISRQCDAMARHYLYEAANVLLTTVRRASPLKSWGLKLLKRRGPKRARVAVARKLAALLGRIWKDGTHFDAVPA

SEQ ID NO: 251568 - protein, 387 aa, unidentified
MSKKIVAPAYVAAMARAEADPASARFWVGLDIGFKSTAVCVVDVDGAVVHQVSMKSHATEIGRYLRRNFKSHVTLIGMETGGLSPHLAGKLREQGFQVTVLDALQVHRVLSVKRNKTDANDARGIAEITRSGRDYLTEVYVKSNLCFEVRASLIMRDRLVKQRRETEAMIRGLVRVYGGRIEPGSDSPATFRERAIDQLCLIADTEGVDLRPRVIPLLDLCERFYIEAGRIERELDLLAASNPVCKRFMEIPGIGTITALSFYSAIEDPTRFRHVDDVAAYLGLTPRVYQSGESLTHGGISKMGNQLTRTHLVGAATVMLANTKSFSTLKDWGMKLSKRVGFNKAKVALARKLAIVMFSLWRDGTHFMAKAADVGPHRDLMQARATA

SEQ ID NO: 251569 - protein, 332 aa, unidentified
MRYVGIDLHKLDLVVAVEDENGPVGKPRRIRCEDEGVIVELFEKLRPFRAVIEASASYRWLYDLLSPLGTVVLAHPLRLRAIVTSRAKTDKLDARVLAKLLRLDEIPMAYVPPKPYQELRDLTRARGRLSQAATAAKCQLHALLGSANVHPPYRAPFGKRGRRWLASLDLGLAANMQRDELLLRLEHYEREAAKLDAGLARMAEAFPEAEALTALHGIGLYSALLIIAELGEVDRFRTDRQVGAYAGLTARVHQSGGHDYHGHITHQGSGWLRWILVQAAIKVIRRDKKLRNFYTRIRKRSSKHIARVAVARKLAGICWVRLRRWHREHAAA

SEQ ID NO: 251570 - protein, 351 aa, unidentified
MVVIGADVHKETHTFVAVDAAGRKLGQVTVKAVTAGHGEAFGWAVREFGPDLTWAIEDCRHLSARLERDLLTMGQKVVRVPPKMMAEQRRIARTRGKSDPIDALAVARACLREPDLPVASHDEASRELKLLVDRRETLVRQRTATINSLLWRVDELDPGHAPAARSLDRKNTQQQLHSWLNSLSGVVAELALEELDDIITLTSRAAVLERRIAKLATAQAPALLALPGCGPLTAAKLVGETAGVARFAAEAKFARHAGIAPIPVWSGRTEGRVRMTRSGNRQLNCAIHRIAITQIRLTDSLGKAYYDKKKDQGMSTTEALRCLKRRLARIVFNTLRTDTQRQATTALAAAA

SEQ ID NO: 251571 - protein, 315 aa, unidentified
MFLGIDVGAKHLDAAATPAVASLPVRVPNTADGIATLVAMLTGLTPQLIVLEATGSYHQPLLAALLLAALPVAVVNPAQIAAFRTTRLGRHKTDRADAQLLARFADMHQEDLRRATPDEPDLARLRHLVGYRDDLVAQRTAMRNRLHAARWSGASAVVTWLEADLAGMETRLREVEQAIAAVLATRPETTVLTTQVGVGLLTAAAVLAYLPAGVLGNPKAAAAYAGLHPRHEQSGQRDRSRLSKQGCPALRRYLYLAALSAIRFDPDMATWHQSLLQRGKAPRSAACAVAHKLLRRMMGKLREARHPSLILPAAA

SEQ ID NO: 251572 - protein, 365 aa, unidentified
MSSMPSAGLIHLGMDTSMNTIVVGVLGPGEEMPVVDRVFNDEESVRRLIGRFADRRVLSACYEAGPGGYELYRLLSSMGVGCEVVAPSLIPKGSSGRVKTDKRDAIRLARLHRAGELTAIRVPTPAEEAVRDLIRARADVLDDRKRMQQRVNAVLMRHGRIWRGGSKWTLAHRQWIARQVFDEPALNQVLATYRGGLAAREAELAAVEAELATWAAAPPLADTVARLGAYRGLAMLTGLMLAAEVVDWRRFATARAFMGFSGLIPSEYSSGGYSRRGHITKAGPVGVRTALIEAAWAYQHRPGIGVTLSRRQAGANAQTLARSWIAQQRLHAKYQKMTGRGKPPGVAVVALARELAGFVWAEMTS

SEQ ID NO: 251573 - protein, 376 aa, unidentified
MKNVRFIGLDVHAETISVAVAEPGGEVRSLGTIPNRPESVGRLIRKLGKPEQLKACYEAGPTGYVLYWQLSELGVKCEVVAPTLVPVKAGDRVKTDRRDAQKLARCYRAGDLTAVWVPDAAHEALRDLVRARLAAKRDQLRARHRLSKFLLRHGRRATEGVGAWTERYLEWVKTLHFEHAAQQMTLQDYLHEVEHAGERIVRLERSIDTAIETLPVKMRAVIEALQSLRGIAQISAVSIMAEIGELSRFEHPRQLMGYSGAVSREHSSGERINRGPISKAGNAHLRRIAVEAAWAYRHRPAVGKTLAVRQRRSSAAVTALAWKAQNRLHQRYTRLMARGKCKQQVVTAVGRELLGFIWAIGVHVEREENAPLRRVA

SEQ ID NO: 251574 - protein, 339 aa, unidentified
MKYIPVGVDIAKHLMQVHFVDEHTGEIIDKQVKREKFLEYFSNREPCLIGMEACGGSHHWARELQKLGHKVRLLKGWFVKAFVMGNKNDVMDARAIWLAVQQPVKSVAVKSEEQQATLGLHRMRQQLVKFRTAQINALHGLLLEFGETTHKGRAALAKEVPEALERLKERLPLYLINMLDEQYQRITELDEHLDHIEKQLQAVARQNETCQRLLNIPGVGPLIATAAVATMGDASAFKSGREFAAFIGLVPRQTGSGGKIRLLGISKRGDKYLRTLFIHGARAAALLTKEPGPWITELKKRRSASVAIVAMANKLARTVWAIAAHGRKYDKNHVSIRPD

SEQ ID NO: 251575 - protein, 346 aa, unidentified
MIGIDLAKNVFQLHGASMTGEVKFRKKIGRGQFLRFMEAQPPCIAVMESCGSAHFWARELVKFGHAVKLIAPQYVRPFVKRQKNDAADAEAIVAAAQRPEMRFVEPKTEAQQARAILFRARERIVHQGTELVNALRAALYEFGHVVPLGISHVKRIEAILDEAGNELPRLVQEECRDLLAQIAEKTARIDDKTKKIGEMAKQTDIARRLQTMPGVGPMTAMAIEAFAPAMQSFRCGRDFAAWLGLVPRQFSSGGKERLGRVSKAGQADIRRLLIIGAMSRIIWMGRKRIVDDSWLARMLAKKPRMLVAIALANKMARAIWAMLAKGENYRVPALPWLYELLQTMPE

SEQ ID NO: 251576 - protein, 345 aa, unidentified
MEHISRIGMDTSKHIFQLHGVTAAEEPVLRKKLRRKAMVRFFEKLAPTVIAIEACGASHHWARLLQSFGHVVKLIAPQLVKPYVKRGKNDAADAEALCEAASRPTMRFVPVKTAEQQAALMLVGVRDRLIRNRTRLANAIRGYAAEFGLTAAKGRSHLEPLLERIQADASLPALARALFADQAKEYARLHRQIDAVDAKLMAWHRADACSRRLAKIPGVGPIGAVLLTMKTPEPGLFGSGRQFAAWIGLTPKDHSTAGKVSLGAITRAGDEGLRSVLVVGATAVIQHVRRGGMSSPWLTELLKRKPPKLAAVALANKTARIAWKLMVTGDDYVAKSAPATLAGTA

SEQ ID NO: 251577 - protein, 408 aa, unidentified
METLHRRCAGLDVHQKEIVACRRMVSGRKVRSELGRFATTTAGLLALSAWLAEAKVTHVAMEATGVYWKPVWHVLCHDFSLVLANASHIRNVPGRKSDANDAAWIADLLAHGLIRASFVPPQPIQELRDLTRTRRELTREIVRHTQRIQATLEEANIKLASVISDILGFSGRRILKAIVAGESDAQRLAELGHSRLACPRGELAAALEGRLRDHHRFLIGQHLKTIEQIEATIGEFDARLEAALAPFLDAAERLKAIPGFGGNVAQTVIAEIGADMSAFPTDDHLVSWAGMCSRLDESAGRKRSKRLRKGAPWLKPVLVQAALSAIKVKNSSLRARYFSLKPRLGHKKAIIAVAAAMLRIAYHMLKDGTFYQDLGPDYRGRRNPQRAAQNLAKRIRALGFEVELKRAA

SEQ ID NO: 251578 - protein, 383 aa, unidentified
MLYSPSADASFSHSTRTIYLALELSRRSWLVALHAPDAAKIELHRLPAGDGQAVLDLLARIRTRVERRTGVRPQVSCCYEAGRDGFWLHRLLEAHGVSSHVMDPSSLQVDRRARRVKTDRLDAQALLRALMAWSRGEPKVCSMVRPPSPDEEDARRPSRERATLLQERIRLVNRIQGLCATQGIDDYEPLRPDRRPRLTQLVTGDGRPVPPRLAAEIARQLDWLELVLRQLAEVETRRDAEAAVAKAAPSSKLGALLHVKSIGPELATVLAKEVFYRCFASRRHVAAYVGLTPSPFASGRRSREQGITKAGNARARKALIELAWLWVRNQPDSALAVWFRSRVGSATGRVRRIAIVALARKLLILLWRYVETGALPADVVVKP

SEQ ID NO: 251579 - protein, 383 aa, unidentified
MRIVCGLDVHKDSVFVCILNEKGEKFEAKYGVLTPELEELHQLLLTHEVKEVTMESTSIYWHPIWRILGDIECLKLVNPYFIKQLPGRKSDVRDAAWIAECTMKDLIRGSFVPDATVQRMRQYNRRIFDLNKEKVYKLTKLDALLHRCNIRISNYVSSIDSKSYKEVVRLLSEGIVDAERLMEAIHGRTVNRVGKDVIRAALTGVVNEVDIDLIRQYREELLIDDKHLKECQNKLTEICRNEFPKEFENLQTIPGVKERSATSILSELGADMKMFLTASALVSWCGLKPRNEESAGKIKSRRITHGNKYIRKTMIECAWGASRTQDCFYSNFSYIQTVVRRKNAMKVKVAIARKMLVAIWHVLSENVPYNDYKKPKAIADGNS

SEQ ID NO: 251580 - protein, 392 aa, unidentified
MFFVGIDIGKNNHVASMMDDTGKVVFKAFSFPNTSDGGNALFSKLASYSLNPSDFEIGMEATGHYWLSVYSFLFEKSFLLHVINPIQTDGWRRGTEIRKRKNDIIDSLLIADLIRYGQFVETRLADEDLFSLRTLTRFRTYLVESISDLKRKVVCVLDQVFPEYQSIFSDIFGKTSKEILLQFSSPIDFESVSSETLAELLAQLSRQKVGAAKAEQLKAAASSSFGVTFAKNSFTFQLKSLIEQISFIEKQVTETETEISSIMEKLESPITTITGIGTVTGATILSEIGDISKFDSPRKLVAFAGLDATVTQSGEFEAAHNVMSKRGSPYLRKAIFQSALIASFRDPVLSVYYQKKRAEGKHHLTCVGAVARKMCNIIYAVLKNNRPYVPKV

SEQ ID NO: 251581 - protein, 401 aa, unidentified
MEGPIVSIDVSNGNSHYMCFIKNNKRFGKVKKIDHDIEGFKRLLEDIQKLEAETNEKVCAVFEATGVYTKPLERFLSKNSIKTYMINPLESARKRKEEIHNKKTDKLDPISISKVYYDKEEMMELKKKDETYNWLRKKNRLYEDQLNHLRKYKVTFQNQLSICFPGYLDLFKDGYSDIPMTILKKYPHPDLLKNKKAETVARYLEKNTCHNHKVSLEYALKIIEFAKKTYPGCEKDDVEVEIFKILLDKVIETQRECEKTLNEMITVASTLEEYRYILSIDGIGTNLAARIIAEIGDIEEFKSREALVAYAGLDPHIYQSGDQDGKHLKISKKGNKYLRCLLFLAVGCSIRGAKDNPVNRFYQKKKQQSNPLNSKAAKTACTAKLLKIIYGICKNKTTYEG

SEQ ID NO: 251582 - protein, 485 aa, unidentified
MHKASVTACVRIWCERQLEEQIAEFSTTVHGLLALRDWLEALGVTQVAMEATGVYWRPVWAVLEDNFELMLVNARHVKQCPGRKTDVLDAQWLCQLLEAGLLKPSFVPPKPIRTLRNLTRYRKPQIADRQREAARLHKLLEDTGIKLGCVASDILGKSGRDMLDALVAGTTDPAILADLSRGVLRKKIPALREALEGRFDSEHTLIVGQILAHIDFLDEAINRLSVEIEERIRPFAAQRDLLMRIPGVKQRTAEVLIAEIGVDMTTFPTPKHLASWAGVCPGQNESGGKKRSGKTRKGLQMAPSDVDRSRTRRHQDQGLLPRRPIPAAPRAARPLQSRHRGRPLDPHRRMAHAHQRRALHRPRWRLLHPSGPRPGHTTARAPTPSARPRRDHPTPGRCYLTGFRYRTTACCSVPGAGPLEEPAKPATRIIRYAERASPSTLARCRLVRRGAVYVGGGVHTSGKRPNLRPAFRAHDLICEGVGGVM

SEQ ID NO: 251583 - protein, 416 aa, unidentified
MSTMDWSRRLLFVGDDWAEEHHDVELQNESGRVLGRAKLPEGVAGVARLHAMIGEHLGESDEAIVVVGIETDRGPWVQALVAAGYQIYAINPLQVARYRERHGVSGAKSDTGDAHALADMVRTDRHQLRPVAGDSVEAEAVKVLTRAHKTLIWERTRHLLRLRHALREFFPAALVAFDDLDAKDALELLGAAPDPASAAALPIERITAALKRARRHHAVAKAEAIAAALRAEHLGQPPVVTSAYAAMVRAQVAILTVLNAEVRTMEEQVEAHFGKHPDAEIYLSQPGLGVVLGARVLAEFGDDKDRYADARARKNYAGTSPITRQSGKRKLVLARYVHNDRLIDALGLQAFAALRASPGARAYYDQLRARGTGHRAALRQLGNRLVGILHGCLKTSTNYDEDKAWTPTQQDQQLAA

SEQ ID NO: 251584 - protein, 376 aa, unidentified
MGVANGMDTPHPYHTGLATLYKHGLFVGWEAQMGTIIRVGVDLAKNVFHIHAVDENEKTTWQGKYARNTWLKAIMKRVPFTAIIGMEACGSSHYWARELIKAGYTVKLVAGQFVKPYVKTNKNDKVDAEAICEAINRPNMRFVSVKTSEQQDIQSMHRVREELIAQRTARANQIRGLTAEYGIVAPVGISNLRKHIPYWLEDVENSLSFQFRELLQVLYEDLITLDERIDKVTNKIKLSLSDNPVAQRLMKIIGIGPLVCSALLIDLGDGMSFKRGRDFSASLGLVPRQYSTGGRERLLGISKRGNGYLRKLLVHGARAAFRYVKDKTDALSLWIKKLSITKHPNVAIIALANKLARISWAIVAKDVEYDASRAAA

SEQ ID NO: 251585 - protein, 339 aa, unidentified
MQTHVGVDLHQRFCYLTAVDARGKRLKQSQVVNEGSALRAWLRQVPGPRQVVVEASGFWPAFARAVQPEAERLVMVHPQRMKAIASARLKNDKVDSETLAHLSRADLLPEAWMANERTQQVRLLTRLRITLGQQRAKAKNQLQAVLHQEGFLKPVADVFGKRGRAWLAELALSPAARVVVQVWLQVVDQMNAAILEQETALKKMAQEDARARWLQSMPGIGAYSAMVILGEIGEIERFHTKRALASYAGLTPSVRESAGKRKRGGIGHHGSATLRWIMLQVAQVAARHSPAAGAWLKKLKQRKPAQVALIALARKLLTAVWALLRHGLCFDEAIFARQD

SEQ ID NO: 251586 - protein, 344 aa, unidentified
MERYIGLDVHAASCTLAVISQAGRRLKDFPVETNGQALVEAIRMIPGHKQLVFEEGLQSAWLYETLSPHVDEIVVAGVTESRGQKDDKRDAYGLAEKLRRGTLEKRIFKAPRQFTILRELCRTHMTITRDLVRVQARIKSLYRSRGIPTPGGWVYSPRRRGEWEEQLPASARRRAERLYQHFDFCFEQKKQAEADLLRESRKHRIVRILETAPGFGPVRSARLVPIVVTPHRFRTKRQFWSYCGLGIVTRSSSDWVQTSDGDWIRARVPQTRGLSRQHNRVLKEIFKGAATTAITQRNKDPIYARYERMLDSGTKPTLAKLSLARIIAATVLRMWKDEEEYRPQ

SEQ ID NO: 251587 - protein, 463 aa, unidentified
MQERGEKSSQQNSEGEVEGLPVIRPHVAGIDLGSNEHWVCAPQVDGSGREVEKFGATTPELERMVEWLKQRRVESVAMESTGVYWIAPHEILERHGLEVVLVNTRELARVPGRKKTDRVDCKWIQRLHSCGLLTGSFRPAEQICMLRTLVRDKGNLVAEAGDWVRRMQKSLDQMNVRVHRAVSDLDGATGMAILRAIVKGERDARQLAKLRDRRCQKSEEEIAEQLSGHWREDHLFSLQQALRMYDAVQERIADYEREILRKLAEMERDECRGQRPPTSNHPQKAKAIRKRGEEPLRQALYRMSGVDLTAIDAIGVGTVEVVLSEYGADLSRFATEKQFVSHITLAPRQAVSGGKPVKKKKRGSASTRVAAALRMAALSLRHSQTALGAYYRQIARRIGGDVAVFATARKLATLIYRLLKWGQPYVDEGAQAYEKRYQEQRLKRLTAMARDLGYQLTPKAAQA

SEQ ID NO: 251588 - protein, 343 aa, unidentified
MGKRSCSACILSSDGSIAEETKYNNTLSEAEIFACSMVKKYGKCVAVCESTANLWLKTYQAFEKYNIGVKLANPLKTKAIAEAKIKTDTLDARTLAHLLRSDLVAECYIASREIREDRSLLRLRTNLVQDRTRVMNRVHSVLDKYDLKCDYDNIFGVKGTRWLKSLKLSDNDEILLHEYVMQIEFLNTEIKNIESKITCEASKNESVKILMSMTGIDYFSAMLIASEIGDITRFSTPEKLVSWSGLCPSIHQSGNSLYMGRMKDGNKKIRWILIQAANTAARKDYRLRKFYLRIAKRHGHHVAITHVANKMITIIWHMLVNKKLYNERKQSLYETKLKRIQKT

SEQ ID NO: 251589 - protein, 413 aa, unidentified
MNEKQFAAHIGLDWADEKHDYCLQDAASQKLEYGSFKHTPLLIDQWVSGLRKRFNHRPVAICLELKSGPIVSCLSKYDFITLFFVAPQALASYRKVFTQSGGKDDPTDAFLQFDYLTKHFSNLQEVTLDSQDSRMLDELTVHRKSFVDEKVKLTNKITATLKAYYPLALDIFSDLDTLIFCDFVQRWPNLSKLKGARRETLEKFFKSHRCGRVDLINRRIELISTAISLTDDDAIIKPYQRRMLGLVSSLKPMLETIKAYDTEITTVFEQHQDRDIFASFPGAGDILAPRLLAAFGSDRNAFSSADEVNRCVGIAPVVERSGKKTWIHWRFKCSRFLRQTFVEWANQTIKYSFWARAFYDEKRAQGKSHQATIRALAFKWIRIMFRCWKSHTPYDEAKYLFALKKAGNKINAG

SEQ ID NO: 251590 - protein, 476 aa, unidentified
MVVPNQEPKKPAKRKKSTKPDKSPQRSIPVPVPASTAALNVINPDAAGIDVHSNMHMVCVPADRDANPVRQFGANTADLHEIAAWLKKCRVRTVALESTGVYWIPLFELLESEGFEVKLVEPGQLSRCGARPKTDVLDAQWIQRLHSYGLLRGSFRPPDSILALRAYWRQRQMQVRYAASHVQHMQKAMEQMNVKLAEVVTDITGLTGMSIIEAILGGERDPVKLAKLRDERCHSSADQIALALQGTWRPEHLFELRQAYELYQFHHKQITECDNQVQAELAQFPNRAGEKTRTHKPRKRGRKSNDLRFDATGPLFKALGVDLTLIDGIDVGTALVILGEIGVDVSRFPTEKHFASWLRLCPPQDESNNTKKRRRRRKNTSRVATALRLAARSVGKTMTPLGLFYRRIRSRIGALGAVKATAHKLACLIYRMLKYGHEYVVQSLEEYEAKTKANMFKVLQRKAMAMGFQLTPIPTQ

SEQ ID NO: 251591 - protein, 391 aa, unidentified
MIYVGIDAAKDKHDCCILGGNGQTVQEAFTFRNNHEGFEQLKDAILRSSEAEGSRQIKAGLESTGHYSSNLETFLRDSGVELVVFNPLQVNLYRKSQTLRKTKTDKVDAKCIAQLLMTAESNPVSVSYQIQELKALTRHRSRLVSQRTKLKISISRLVVILFPELPAVCNSVTQAAIMALLLELPSARQIAACRIDRLTNLLRTASKGRYGRAKAEEIKSLAQQSIGANSPAAALELQLTLQHLDFLQKQVNELDKAIRTAVVQTQSPILSIPGIGPTLAGIILAEIGDIHRFSSPDKLQAFAGLDPSTYQSGNFKADRTPMVKHGSTYLRWALMQAARLAAVHCETFGRYLATKQAQGKHYFVALGHTAKKLIRVIFRILSANEVFVPQT

SEQ ID NO: 251592 - protein, 419 aa, unidentified
MVQKNGSTSVSVCHPVCCGLDIHKDLIVACLIKEKADGTEWSELREFRAFREDLIKMRDWLVEQACPIVAMESTGIYWRPVYNILEETVQVILVNARHVKNVPGRKTDMADSKWLAGLLRHGLLQGSFIPPAHVRDWRDLMRMRRGLIEHAGDYKRRIHKVLESANVKLGSVLVNIFGATGRRLLDLLMERETEITVDEVEVCMRGILKHTKEEIWEALQGNIRDQHRYMVRKYLQLLDSIEREIADLDNQVQALMTPYNPLILRLKAMPGIGDTAACQILAEIGHTLEQFPSSAALASWAGLCPGNNQSAGKRRSGKSPVRRHYLKTIMVEVAWAAIRKKGSYYRDKFYRLRVRLGPRKALVAVAHRLLNAVYHVIKEEKEFRDLGENYLLLRNQSRKLSALKRQAKLLGYELNPIAE

SEQ ID NO: 251593 - protein, 397 aa, unidentified
MSMVFVGIDVSKDYSSAQGLDREGKKVFYLEFAMDGEGFSQFLKTLKVHCEDFSRVTVGMESTGCYHINLFAFLCSEGMVCVVINPLLISNFARLSLRKTKTDKKDALTIAQFLLVHRSELSQVSYSQSSQDLKDLARERESLAVMIAGLKNDVRRLLQMTFPELEHRCKLFTETMLRFLMKFPSARTIRTAKPKEISKALIHAEGKRKRVLINAEEIIRLAKDSVASDSVAKELILSEKIETLLYLEEKKGRITEALVQACRSMRVDELEIITSVDGISAITGSTFLAELGDIETFRSYKHVIAFAGLDPSTHQSGQYEGISRLSKRGNRHLRRVIFLMTLCAVRSQNVFRDYFLKRKGEGLPPKKAILATAHKLLRVLYAMLTSKSYFRKEVLEV

SEQ ID NO: 251594 - protein, 428 aa, unidentified
MAVSVHTDPSNEHTDHALPYQWFVGIDWGSQTHQVCVLDRERHRVGERSVEHEGIALAECAAWLTTLAAGDVHRVAVAIEIPRGAIVELLVERGFHVFAINPKQLDRFRDRHTVAGAKDDRRDAFVLADSLRTDRPSFRQVHVEEPHLLMLRELSRTEEALLTECRRATNQLREQLHRFYAPLLQLCPAADEPWLWDLLELAPMPAHAAGLTEAQVAGVLKTHRIRRVSAGDVLKVVQAPALPVAPGTAEAASAHCALLLPCIRVLAAQLQTCARQVESLLTALGTVEAPTAPPSDVAIIRSLPGVGRKITAWLFAEAAQPLAERDYQILRTQGGVAPVTKQSGKRRQVVMRRGCNPRLRNALYHMAHCVAQRDAYFASVYAALKIKGQSHGRAIRSIGDRLLRMLVAMLRNHTLYDPSWRQPVRMER

SEQ ID NO: 251595 - protein, 390 aa, unidentified
MSQQYFDASRSLTALEQDSTIIAVIEMSQSKWLVAGLVPGVERHPLKKLDAQEEGLLKLLHRWRNEAGQASREIKRIVVAYEAGRDGFWLARWLRARDVEAYVIHPTSIAVSREHRRAKTDRLDTELLMRAFLGWLRGEKRHCSMVAIPTIEEEDARRPNRERQNLVTEQTRIVNQMKATFVRLGIRAFRPSLHKVEGKLKGLRTAEGTPLPENTRAELCRHLARLRVVREQIRAVEQERLRKLAAAPSAAKGPHAMVRLIARVLGVGIETADMLVNEVLSRRWRDHKAIARYAGLTGSPDESGKRRRERGLARAGSARVRCGMIQFAWRFVRFQKGSALAQWFAARTADSRASTRKTMIVALARKLLIALWRLARRGEVPQGVILRPAS

SEQ ID NO: 251596 - protein, 425 aa, unidentified
MKKIDYLSTLFVGIDIGSRTNVISALNFHQEFIIKMVPIPNVQHGAEQLEGMIADALNGHREFKALIIGLESTGFYGVHIANYLSTCEKLAPFNTKVFCLNPNEVKQYKKSFNSLDKNDGIDSFVIADFARVGRIRIEPWRGSQYLALQRLTRHRLHITQCIAREKTYMLNNIFLKFSEFALLEKSQHPFSDKYGATAESILTEYKSTEDLVNASVEELVEFVDSKSRGRITDPVRTVELLQAAARNSYRLDQCLYEPLTISISCSFNCIKAFEKELKAIDDAILKTVKGLNPVEYQVLNSIPGIGKVYASGILAEIGSIRCFKNHDALAKYCGIVWRENQSGNFEADDTRMNKAGNRYLRYYMIEAAGSVATFCPEYRAFYSKKYAEVRTHQHKRALALTSRKLIRMIFGLLDKSQLYSQGKSR

SEQ ID NO: 251597 - protein, 387 aa, unidentified
MARVIIGMDPHKRSATIEVVNDREKVLAQGRFGTDTDGYQAMLALGRQYKERLWAVEGCNGIGRHIAQRLVADGETVVDVPAKLSARARMFATGQGRKTDPVDAHSVAVVALRTEGLRQVTVDDAGVALRLLVDRRDNLGRSRTDTINRLHQLLLELLPGGAKKFLSAPQARALLNTVRPRDIVGRTRRQLASELITELASIDKKIKAANTQLTELVEATGSNLLGLNGIGPSGAARLIGDVGDIHRFASRGHFASWNGTAPIDASSGDQQRHRLSRAGNRRINRVLHIMAIVQLRNDTEGRDYYRRKLAAGKTSMEAMRALKRRLSDLVYKQMIKDAGAGETGPGGQVGATLQSSAASSIPTAGTSEQSLPGPANTQPRTPFLAAS

SEQ ID NO: 251598 - protein, 385 aa, unidentified
MSKLNHTDTPAAAEYATVYVAFELSKAKWHLGVILPGSQKLSRFTIDGGDLAALSAHFAKWRAKAAVTGKPVRIISCYEAGYDAHWLHRWLSDQGVINHEIDPASIQVNRRARRPKTDRLDLEQLMNTLLRYLRGEPKVCSIVRVPSPGDEDRRRVTRERHRLQQERTAHTNRITGLLHAQGIRDAKPFARGFIRSLDTMRTGDGRALLPRLKEEIVREHQRLCVVQQQFVALEKKSQAELRTPAPGSVEAKINDLVDFKGIGLTSGRELMYEAFYRSFDNRRQVGGFFGLGDSAYDSGDSRRHQGISKAGNPRARRLAIEVAWLWLKHQPQSELSLWFKTRVGELKGRIRRITIVALARKLMIALWRYVTTGVVPTGAICRQGI

SEQ ID NO: 251599 - protein, 369 aa, unidentified
MQKIIKNIGLDVHKNSISIAIADDGRDGEVRYYGEIDNDMNQLDKVIRKLISKGAVLRFVYEAGPCGYGIYRYLTKNDIDCVVVAPSKIPQQTGNRLKNDRRDSLSLARLHRAGELTPVYVPTEEDEALRDLVRAREDSTCALRTAKQRLGAFLLRHDIIYSGKTKWAKPHFNWLATIAMPHPAQQIVFQEYIDTVTDCSNRVERLTEQIRQQSQQSGLHELIKALQSMRGISLIVAATIAAELGDLTRFEDPGKLMAFLGLIPSEHSTGERVKKGPITKTGNGHVRRALVEAAHAYRFPARKSKDIRKRQEELPKEVLDISWNAQCRLCSRYQYLTTKGKKSNVAKTAIAREIAGFAWAIAKTLPKAA

SEQ ID NO: 251600 - protein, 378 aa, unidentified
MTFGNTVYIAVELSVSSWLVAARLPGVERQRQQRLEGGDTVALLALIAELRSLASSKLGGAAEVACCFEAGRDGFWLHRLLTAHGIAAYVLEPTSILVNRRARRAKTDRLDAEGMLRVLAAWLGGDRHVCSVVRVPTPEEEDAKRPHREREHLVQEKLRIENRIQALLFTQGIRGRPSLRSWERDLAELRTGDGRMLPPLLRAELDRLRRRLVLVLHLIRELEAERAKALEAAADEAIVQKIAALLCIRGIGANFAAVLVREVFYRVFANRRQLASYVGITPMPYQSGRMDRGRSISRTGNPRARTTLIQLAWLWLRYQPGSALATWFRERVGTLRGRTRRIAIVAMARKLLIALWRYVEAGVMPDGVIIREQTAVTA

SEQ ID NO: 251601 - protein, 343 aa, unidentified
MKIIRVGVDLAKNVFHIHGVDRHGKAIFKRRLRRHNWLAVLLDNAAPGCEIGMEACTGAHHWARLLQARGFTVKLIAPQFVKPYVKSNKNDAKDAEAICEAMSRPNMRYVGVKTVEQQDIQAMHRIRSGLIGQRTAKANQIRGLVAEYGLVAPPQLGRLRAAIPGWLEDAENGLTMQFRELLQGLWNDLLTLDERVGELDREINRIAQSDPVAKRLQQLRGVGPMVATALVSAVGNARHYDKGRQMAASLGLTPRQHSTGGKDRLFGISKRGDAYLRSILIHGARAVVSQARHKDDRLSRWVTAIAQRRHPNVAAVALANKTVRMAWAMIRKEKDYDPGFVVT

SEQ ID NO: 251602 - protein, 405 aa, unidentified
MPKNMQYERAFGLDLSKKTFHGCMLDGPDLGNRHFFTGEMGPQGKAKLAGRLCKGDLVLMEAGTASFSLARFLLENTESEVVVLNPAKLYNIFNSTLKTDKADSEKIAKIARTMPRDEWPTVSIPTREEQAERSVVSLEVFLAQEITMLVNRLYALFNSMGHPFVKKSDLKTEEARLSLANRLLCEDSLAIEQAIILSDQIGHVTEQLEQCKQRLRDICLSHPKEALSLLSIPGIGLMTAASQIAFLGDGSRFDSPDSYVNYVGLSERRFDSGTKVSKGHISHMGNKCIRRNIIQAAWVASTTSSTNPLSERYEHLRLRGKSKPVAAVAVAKKMIQLSYILVKSNGIYEFTKQQGLAAFRRRLRCHKLVELLDYLPEPIRMEMEEIDRNKRKEAAATTSRQKKLA

SEQ ID NO: 251603 - protein, 406 aa, unidentified
MEVVHPRCAGLDVHKKSVVACVMVPGRKEVRTFGTMTDDLLHLADWLQEEQVSHVAMESTGVYWKPIYNVLESTGLELLVVNAQHIKAVPGRKTDVKDAEWIADLLKHGLVRASFIPSRPQRELRELVRYRTGLVEQRGHVVQRIQKLLEGANIKLSDVASDVVGVSGLAMLRALASGEQDSSRLAEMGKSQLRNKREELKRALRGSFGEHQRFMLKNQIGLLEFLDGQIAELNQEVERRLRPFETLLQRMQAIPGVGPRNSEQILVEIGTDMSRFPTDSHFASWAKLCPGNDESAGKRMSGRTGQSSRWLRATMVEAAWSAARVKNSYFAAQYHRLVPRRGKRRAAVAVAHSMLVVIYHLIKDGTVYQDLGPQHFDELDRRRAVRRAVHRLQAFGYEVSIRMPSA

SEQ ID NO: 251604 - protein, 482 aa, unidentified
MKPKPQEKTKKATDHPRQQHWREMNRQQRREMMRNIQSEDISLEVVHPDAAGIDIGNESHYVAVPPSRNSQPVRRFGCTTAELKAMADWLEQCGIRTVAMQSTGVYWIAVYDVLEQAGLEVYLVNARETKNLPGRKTDVQESQWLMKLHTYGLLRNSFRPSQEIRMMRTYWRQRNDLVQSAGRHIQRMQKALTQMNIQLANVLSDVSGVTGQAIIKAILGGERDPHKLAAFRNPRVKASEEQIARSLEGNWQEDLLFVLKQEQDGYEFCEKQMAECDRQLNHYLKQRADRSHGAPLPEEKRKGRLKKKSGNKPQFDLRTGLFRMSGTDLTRVDGIDVITATTILSEAGWDMSKWVTEDHFVSWLRLCPDNRISGNKVIGKGRLPTNNRVTIALKMAASTLRLSDTYLGAQFRRFRTRLGAPVAIKAMAAKLARLVYRMLRYGMKYVDKGAALYQAQHRHLQIKQLNRKAASLGYQLIPVPAA

SEQ ID NO: 251605 - protein, 417 aa, unidentified
MLSTVDRRMGLLFVGDDWAEEHHDVELQDQTGRVLGRARLPEGVAGIARLHALVGEYLGEDDEVTVVVGIETERGPWVQALIAAGYQIYAINPLQVARYRERHGVSGAKSDTGDAHVLADMVRTDRHQLRPVAGDSVQAEAIKVLTRAHKTLIWERTRHLLRLRHALREFFPAALVAFDDLTAADALELLGVAPDPASAAALPTDRITDALKRARRRGRAGKAEAIAAALRAEHLGQPALVTAAYAATVRAQVAILTVLNAEIKTMEEQVEAHFGQHPDAEIYLSQPGLGVVLGARVLAEFGDDKTRYADARARKNYAGTSPITRQSGKRKIVLARYVHNDRLVDALGLQAFTALRASPGARAYYDRLRARGAGHRAALRQLGNRLVGILHGCLKTGTTYDENTAWPHTEEDLQTAA

SEQ ID NO: 251606 - protein, 353 aa, unidentified
MIVIGVDPHKSTHTATAVDPVTNTNLGSLRVDATVAEYRRLVAWAKSWPQRQWAIENAEGLGHHLAQWLLARDEVVLDVPTTATARVRELSRGARRKNDRIDAAAAACVAAAQGDARPVVAEDHVDALALLSERRNNLSQNRTRAINQLHSLLRELLAGGVPTDLTVAKAAAALRACQPRSTPERVRVQLCRELIADVRRLDQRLADNQAEATRLLDEHGTRLCEIDGVGPVLAARILGRTRHVRRFATAAAYATYNGTAPVEVASAEHECHRLNRYGDRQLNSAIHTIAVVQVRMPHSAGRRYYDRKIADGKTPRAALRCLKRHLSNQLWRTMLVDERRRRHIPDDQSAKAS

SEQ ID NO: 251607 - protein, 425 aa, unidentified
MNSNTNHKINQVSENTLVIGIDIAKHKHFACAIDDRGRVLQKSFPIAQSRFGFEGFHERLLTLKATHEKQEILVGFEPTGHYWMNLAAFLTSYGIPFVMVNPMHVNRSKELDDNLQTKNDQKDALVIARLMRDGRFSYPRTLEGIEAELRNGATLRSKIQEDLNALQNRMIRWLDRFFPEFTQVFKSFGKMAYAVLEMTPLPSDIKWKTPEELLFLYRQVDGMKSPQLPKAKQLVEVAQDSIGLTEGLMMAKLEIATLLSQVKLMQAQLEELTAQLIEHAKQMTDYEYLASVPGIGDITIVDLLSEVGSLTQYAHPRQLIKLAGLTLRENSSGQQKGQKRISKRGRRKLRALLFRVMMPLILHNPAFKQLHDYYTTRTQNPLRKKQSIVLLCGKLLKVLHALCKKKTIFNEHQMITDFASLQTAA

SEQ ID NO: 251608 - protein, 457 aa, unidentified
MGRRKPGRLSARMVEDEEYQLRYERCAGIDVAKASGVVCVRLPPQRPGGRRVAVLETVEATVAAIAALAGRLLAHGAEMVSMESTSDYWRIWYYVLEAHGVGVQLVNSAQARQLAGRPKTDDKDAQWLARLTEMGLLRPSFVPPAEIRALRDCARTRLGLVRDRTREYQRLEKLLEGALVKLSAQVSLTTASAKAMIEAMIAGQRDPHALADLATGRMRAKKDQLARALDGMMFDDHHAGLARLHLDHITFLDRKIAVLEDAIGACLQEIPASWGIGAGGETGPDAGTGPDAAVLPAVARLAEIPGVSPDLAMAIIAETGLDMTRFPDAAHLASWAGLAPVAQQSGPRNRKPKKGQGNSYLRGLCTQAANGTARTDTFLGERLRRIAKRRGGARARVAVARSILTIIWHLLNDPAARFTDLGADWHDRKTDTDKKIQGHIRQLQALGLDVTITPRAA

SEQ ID NO: 251609 - protein, 394 aa, unidentified
MKLVGIDVGKNSHHFCVMDKETGEFNVTPSSFSNNKEGFDFLINSLKPYSKKSILLGMEDTGHYHVALLKFLLSNGYTVALINPKTTDLTRKMEGGITKNDKLDTITICDVLDTPERKKQYRITKVDRFDLYEQRQLTRHHHNLKEELNIYCNRLQKSIDLVFPEFNTLFGSKYGVVYMNLLKTFGSAEAIASTDIRTIRKCFEIKGRGGRISLTAEKLKECAKNSIGISSEVETIQIKHLVSQITLIKEQIAEIDKKIEEFSIKNNSPILSIPGISHFSGTSILAELGDIGNYSKPSRIIKFAGVAPYHYESSQYNAQHTAITKKGSKYLRKTLYQVILPVINNNPVFQKYYRLKISQGKGHRCAQGHCIRKLLRVIYHLLETGQSFDPALLR

SEQ ID NO: 251610 - protein, 351 aa, unidentified
MLIIGVDYHPSFQEIAFLNQETGEYGEQQLKHSDGGAEKFYRELKQRGASVRVGMEATGYARWFERLLAELGFELWIGDPAVIKTKRVRKKKTDREDARLLLRLQLEKHFPIIWVPTPENRDLRQLLWHRHRLVQMRTRIMNQLQAVAMNEGKRWKKKLFSEPGRAQLEELQLAPWASRRRKELLELFNRLNPTIEELTAAVEQEAKKRPEVLRLMTHPGVGPITGLALVLIIGTWERFHCGKQIGSYVGLIPCEDSSAGRQRLGHISKQGNTLLRFLLVEAAQAAVRWDPDWRRRYLHLAMRRDRRIAKVAMARRLGVRLYWMWRNGREYSQSVEFGSHAGQPVIVHGVQ

SEQ ID NO: 251611 - protein, 369 aa, unidentified
MREVSTYVGLDVHKESIDVTIAEEGPGGEVRHFGAIGGEVDAVAKLARRLRRRGRELRFVYEAGPCGFEIYRFLREHGLVCAVVSPSQIPRRASDRVKTDRRDSESLARLYRAGELRPIYVPEPEDEAIRDLARAREDVRRARQKARQQVRALLLRHGRRYPGKCAWTQAHRRWLCDLKLDYPAQRIALEESLAAIDEATGRLERIEGALVEQASAWRFASVIAALQALRGIDEIAAVILITELGDLTRFGSPRELMAYLGLVPSEHSSGGRRRLGAITKSGNTHARRLLVEAAWAYRHPARIGHRLQVRSQALAPRVREIAWKAQLRLCSRYRKLVARAKPHPVIVTALARELVGFVWAIARAQSLAE

SEQ ID NO: 251612 - protein, 341 aa, unidentified
MKKFIRIGVDLAKNYFQVHALESEDGRAVTRKLKRSKMHEFFSRIEPCVIGMEACGSAHYWGRELKAMGHEVLLMPPAYTKPYVKRGKNDAVDADAICEAMSRPGMRFVPIKSPEQQAMLMLHKTRELLTKQRTMSVNALRGHLSEFGIVAAKGIGRVDELLDLADSDATLPVAAKAGVNVLAQALEGLDTAINALENEIANADAQNEMVRLLDKVPGVRKLIASVIAASVPDPSVFKSGRDFAAWLGLTPRQNSSGGKQTLGSITKQGNRYIRKMLVLGATSLLNVVGKRKGALHDWIVGLLAKKPARLVTVALANKLARILWAMMKTGECFRTEMFAKA

SEQ ID NO: 251613 - protein, 343 aa, unidentified
MQTTTTIGLDIAKSVFQVHGVDAAGQVVIRRQLKRRYVVSFFQKLPQCLIGIEACASSHHWSRELQALGHTVRLMPPAYVKPYVKRQKNDATDAEAICEAVTRANMRFVPTKTPEQQSGLVLHRTRHLFIRQQTSVINAIRAHLAEFGIVAPVGRRGVEELLTVVADPNDKRVPEIARACLSAFGAQLRRIKEQVLEFDRLITAWHRSNEMSMRLDEAPGVGPVLATAVVATVADPKVFRSGRNFSAWIGLVPKQHSSGGKDRLGSISKQGDRYLRGLFVAGALAVIRYAKFHGTKHRPWLTALLARRPTKIAAVALANKIARMVWAMMAKGERYKEPVALAA

SEQ ID NO: 251614 - protein, 414 aa, unidentified
MVEIIHKSCGLDIHKHFFIATILCRSGEKQQQRFERNDDGILAFKKWVILEKCDVVACESTSDFWVPIYDSLIKHLPFIVGNARDMKALTHKKTDKLDSEFISHLALNNMIQSSRVFSKDHREFRSYVRLRLTLVQKRTDLKNEAHSILSSEMFNLKDVLTDIFGKNGRIILSGIISGMTVDQIVESLSPKFRKKNDQIRDILNREISQNTAIRLQTCLKLIGHLDDEIRTLETEILNYVYKNHKREMEILMSVPGIGEISAAILIAEIENFKDFSSGDKLASWLGIVPNVYQSADKFYNGRITKRGSKVARWILTQIAQAASRKKNSKMKEFFNRKKKSIGHSKSIIALARKITTIIWHLIINDEMYEDDTGYKKEEFQKRRISENVIISVDERIKIISGIFAIVEKEDKEST

SEQ ID NO: 251615 - protein, 363 aa, unidentified
MIHEIVPELGRLASAVPSPDSCQSHADGELVSARSGRVRNFRRTGSIVSGQDQASVGIDVSKATLDVAIEPSREQWQVANDERGIQQLVERLGQLHPERIVLEATGGYELPALAALGCAELPAVAVNPRQVRAFAKAIGRLAKTDALDAQVLAQFAAVVKPALRPLPDAATRELAGLLARRRQLVEMRAAEATRLQQAVEPVRLEIREHLRWLDKRIAQLDRDLHDRLRASPLWREKEDLLRSIPGVGPVFSVTLLADVPELGSISHRHLSALVGVAPFNCESGKWKGTRRIWGGRAAVRAVLYMATCSAVRHNPVIRAVYQRLVAAGKPKKRALVACMRKLLTICNAVIAHRTPWRYQPLDS

SEQ ID NO: 251616 - protein, 422 aa, unidentified
MSYCPVAGIDVSKRFSDMCILSPGNKIFAQEKIYHDETSINRANALLQKVEQLFFSKPVIVMESTSHYHLILFQFFSEHGYDVVVVNPLQSNSTKDFSIRKRKTDRVDAFKLAMMYRTKTLRPSQIPQTATRALRQLCRHRAELLNDVSSYKNRLTALLDQTFPGYDKVFSDVGGVTSCAVLARFPTPTILLVEKESELVEVIAAASKSSYSFAKKKAGLLISAAQKAQTLGIHSCADETLIVCTIQMLRTLSESVLQIETAIDNLLAQIKEMRNNVSLLQSIPGVGSHSAALLLGEIGDISLFKKPKQLAAYFGLDPTERQSGSFRGTRNKLSKRGSPHARAALHMGVVNSICKRGKDSAANPVLLSYYEKKCKNKPAKVAQAASMHKLVFIVFAVLRDQKPFELKTPEQHAVEQGFVKAA

SEQ ID NO: 251617 - protein, 375 aa, unidentified
MHIASIGIDLGKTTFHLVAVGEQSKVVVRKKFSRKQLLAYTANLQSSLIGIEACSGAHFIGAALRSQGHDVRLIPAQFVKPYLKSNKNDFLDAEAIAEAVARQNMRFVPIKTEDQLDLQALHRVRDRLVHRRTSIINQIRGFLMERGITFAKGPANLRNQMPAMLEDAELKISPRMRTLLARVWQEWKQLEIDIADASDEIERISSEDAGCKRLRQIPGIGPLVSTATVAAIGNGAAFRKGRDFAAWLGLVPRQHSTGGKAKLYGISKRGNIYLRRMFIHGARAVLLRVKYDTGGFGQWVHQLEARAPRNKVVVAIANKLARIAWAVLFREEDYRHMAVCTGVNLAVEKTLRLESADALPTFPPPLRPRISNQVC

SEQ ID NO: 251618 - protein, 341 aa, unidentified
MQITTIGLDIAKNVFQVHGIDAAEKVVVRKQLRRGQVMAFFEALAPCLIGMEACATAHYWARELTKLGHEVRLMPAKDVKAYVKRNKNDAADAEAICEAVRRPTMRFVAVKSAEQQGRLMQHRVRDLLMRQRTQLINALRAHLAELGIAAAQGREGIKELLAIVAQDGDSRLPVDAHASLIVLAAQLQTVQTMIGSIEKRIVSQHRSNEASKRLETIPGIGVIGATTIAAMVPDPKVFRSGRDFAAWIGLVPRQDSTGGKQKLGPISKQGDQYLRRILVVGAHAVLKRARQQPEKYPWLTQLLARRPFKVVAVALANKMARIAWALLAKGGTYRAPQLAAA

SEQ ID NO: 251619 - protein, 354 aa, unidentified
MNNLSFKNNTFFVGIDTHLKSWKVTIRNSGLELKTFSMNPSPVELFIHLTKHYPGAIFNIVYEAGFCGFWPQRKFIELGLTCIVVNPADIPSSNKEKVVKTDPTDSRKLARELENNSLKPIYIPDVYAEQLRSLMRLRFQLVQNQTRIKNRIKMLLYNYGIIIPKEHLNNSRWSGFFINWLHSVKLSCNAGQLTLNNHLLQLKQCRENLNAVLHQLRAEAKNKSIEPIINSLVSVPGVAFITAMSLFTEIIDINRFKSFDHLASFVGLVPSLYSSGETEYSRGISFRHNKFLRPIIIEAAWTAIRKDPAITLVYSQLIRQMSKQKAVIKIAKKLLSRIRHVWIRQEQYQFALVA

SEQ ID NO: 251620 - protein, 321 aa, unidentified
MKRHWKPQRVVGVDVSKTELECFVLPTEERIHSSQAPKDVEELADRIAAFKPDLVVIEATGGYEQALLNALLARAVPVNRVNPRRVRRFAQAVGVAAKNDPNDAEMNAHLGATGKLWPMRFPEQAVQHLEEWVQRRQQLLELITMERNRLASVADPALKALLRRHVASLVREQKRVEARIAEHIQASPELAAKDARLQTVTAVGPVTAAVLLSKLPELGTLTRRKVAAIAGLAPYDDDSGKHHGRRFIRYGRVEVRCALYMAALVGMTHNPVLRALYLRLRAKGKAAKVALVACMRKLLVILNMMVRANTPWRQTSPAAEG

SEQ ID NO: 251621 - protein, 349 aa, unidentified
MEFYAGLDVSLETTSVCVVDREGKVIREGKLASDPDAIEMFLAEWGIHLKRIGLEAFSFSGWLFTGLEEKGLPVVCIETRHAKAAMNAMLNKTDKNDARGIAQMMRTGWFRAVHVKSGEAQTLRALLVGRKAMLGKVIDMENMIRGLLRPFGLKVGPISTGQFDARIRDLVAGMAKLEAIIAPLLDARYEMRLQLAKLHGLAVVAAREDKAVRRMMTVPGVGAVVALTFRATVDDPTRFKKSANVGAHFGLTPRRYQSGETDYTGRISKCGDEMTRTMLYEAAIAILTRIPRNFKLRLWGLRLMKKRGLKRAATAVARKLAVLLHKVWVDGTVFRYGAGMKRGRIAAAS

SEQ ID NO: 251622 - protein, 380 aa, unidentified
MEYCTTIGVDVSDRTTKICVMTKAEGGERRIVVETTCATTKAGFEEAFAKFDRSWPVALETGTHCRWMDRLFKKMGFRTIVGNPGKIPSITKSNTKNDRNDARELARLAIADPAMLHPVFLRGEVYQQMLRFHHARNVLISQRTQAINQIRGFAKSMGHRIKCSSTEKFHEQAKADWPKELEECAWPLMGVLKTINLKIKAYDRLIAKLAERPEFKPMVERARVVYGVGIIGSTVFVAAIGGRPDRFGHTRDIGAYLGMIPKQDQSGDGDKQLHITHAGADIVRAALVECAGVVMLEKAKDTDLKLKGLRIAMHGGRIARKKAKVAVARGLAVTMLALLQHPEREYVPLSEEGRKGFERYRAEMEYLAMQKASRKEKKVA

SEQ ID NO: 251623 - protein, 326 aa, unidentified
MTLSHLTDKTFVGIDVGGAGLDVAWHRGDSAHYANRPDAIATLVERLRTGPDVTRIVVEPTGGYEKALVKALRQAQLPVEIIHTSRFKAYRDLLGVKAKSDTSDARLLAAYAAAPDEIRGRKAGHVELPEDAIREALSELAGRRVQLKHMIHAETCRLGTVRMDELRQAIVTHLEALRAEDKQVHRMMLELVRQRLDLKRDRNLLVTIKGIGAKSALSLLASVPELGRIDNKAAAALIGVAPFVRKSGTMVAPARIHGGRAAVRSILYMAAVTASRHNPVLRPFYERLIAKGKPPKLALIAVLRRLVVFANAVLRSGQPWKGAAVA

SEQ ID NO: 251624 - protein, 315 aa, unidentified
MHFVAVPNEAAEQTVRQFGVYTRDLQAMADWLQECGVKIVAMESTGVYWIPLYELLERRGFEVMLVDARQVKNVSGRKSDVQDCQWIQQLLSYGLLKAAFRPQDQFCELREFNRLRTRLLADQGRSVQHMQKAMTLMNIQLSQAISDVAGVTGQKIVRAIVEGERDAQVLAAYRDSRIKASEEEIAASLQGTWRAEHLLALKQALGRFDFYAQQLQECETEIQRVMAKLEVHTKELGKGKKRSKAKNAPKFNVRERLLKMCGVDVTKVDGIDETTALNIVAEVGTDLSRFPSDKHFASWLGLCPGTRISGGKVLV

SEQ ID NO: 251625 - protein, 407 aa, unidentified
MTMWYAGIDWADQHHDAVVIDEAGKRVGTTRVAHSAEGLDTLVAFLKGLGDIADHPDHLACIVETNRGLLIAALLDAGLPVYPVNPKTVDRHRKPAGAKTDAIDAYLLARTGRSDVADLRRLTPDSPLIAELKALTRDQDTLIQSQTRLVNQLTACLKAYYPVALELFGKLQQPTTLAFLQAFPTPEQAQDASVEQIAAVLKAAGHPTAATKAPQVRQRLHQPQLRADPVVTRTKTRLMLTLAAQLRVLLPEIAAYDDEITRLFRLHSDSRAFASLPRAGQRLAPRLLAEWGDDRGRYTDAASVQALAGTSPVPFQSGNFAKAHRRYACNKPLRNALQQFAWQSTQKEAWALAYYQRKRREGKSHSMAVRALANQWVRLIYAVWSKRETYDPATFLTAQQAHAPRAA

SEQ ID NO: 251626 - protein, 477 aa, unidentified
MNVKTSKAKKQVNLDNQAINLLSKEELGKKIEVVEKELKSYIWRELETNGKFAKNDKLSFITDDMLIVGCDVGSETHYIRAIDVRGREVSRGAFEFSNTEEGFENARTWMLILAAENGKKQIVLGLEPTGHYWFALAAWMISNGISVVQVNPYAVKQSKEIEDNSQCKDDRKDPKLIANPVKDGNYGMPYLPEKIYADMRRLSMFRDQLTEDRIRNINRLHRELKIYFPEYMDAFGKIDGAFTLEVLKVSAIPTDIVALGTDDLRNIWHNAKLRGRGYSRAHEIVSCAEKSVGLTDGIDAGCEAMKWYAGQILKLDVQLAAIESTLHKKCREIPYAENILAINGVGENILSGILAEMGDISRFDDVKEIQKLSGMGLVACSSGKHKGQTKISHRGRKRLRYWLFQAAKSAVSHADEFKQLHEYYTTRADNPLKKMQSLIVIACKILRIVYTILKTGTTYDRQKMLKDIKRPVSSQAA

SEQ ID NO: 251627 - protein, 482 aa, unidentified
MKKRNIYQNQSQELLHLFEGAGSSEKVMCVPMDYAKKDHLVMFCNGHGDILRKPFSVKNTPEGIAYIADQVTRSCRRRGIKKKHVFFGGEDANSFAKNFVSTLRSKGFLVANVNAHDAKKQRGNVQASTDRIDLMGIATMLLNCRANCGPAQSGIYRNLRTLVRHRRKLVQMLTEVKNRVHGIVDELFPGFLNEKNSGIIPFTQSSLYLMEDRFSPKQIRRRRRQKLIEILKRFGTSKAERTAVKLQQYAAKVLHAPVEYVDTMQLSLAQHVKHIRCLKESVAQMDKEIALNLAQTQGAFLTSVRGIGLVLAAGVTAEIGDLNEQKPLNNLASYSGIIPRVKQTGGSDGKTYTGPVAKRCNRILKDYVVKSAYHLGLHGPQDLMADYKRRDASGQHADFGMGRRYLRMAINLMRTSQVYLPPNLRRDDYTLEERAGYYLTSWPYLKEKWKKVGALEAAFAKDRPLGLWRQIVQELYDIKLKL

SEQ ID NO: 251628 - protein, 359 aa, unidentified
MRIIGCDLHARQQTIAMLDTTTGEVSTLTLMHEGNQVREFYSQLPRPVLVGIEATGSMHWFLNLMDELGIECQVGHPATIRAAEPRKQKHDRRDAELILKLLVEKRFPAIWLPGKELLDLRALLLHRHQWVRIRTRIQNALQAIALANGLRRGPSLWSYDGQAKIAFLPLLPHASYRRSALQGLYRKMEEEIENLTQQVAEQAEQRCRSRLLMTHPGVGPVTALATEVFLGDARRFVDGKALASYVGLIPGERSSGRRQRLGKITKQGSPLLRFLWGEAGTHAVRRDPDLKRFYRRKLVQKGLGKTRVAVARKLGIRLWIMLRDEIDYEEFCRRGQKQSGEACAGMPETRMVNDRRPID

SEQ ID NO: 251629 - protein, 288 aa, unidentified
MTITTIGIDLAKNVFAVHGVDQNGKTVLVKSRVTRAALPGLIAGLPPCVIGMEACFGAHYWARLFRQYGHEPRLMAAKFVSPYRMAGKSGKNDAADAQAICEAVRRPHMRFVPVKDESQQAMQCLHRTRQGFIEEKTATYNRLRGLISEFGVIAPQSTDALRHMVSAQKNSLPLQVQQCVDDLLEHVDRIEANITEYDRILSRIAKTDHRSQRLMKLKGVGPTTACALVACIGNAHDFKNGRQLAAWLGLTPSQYSSGGKSKLGRITKAGDSYLRTLLVQGKLPGNSY

SEQ ID NO: 251630 - protein, 379 aa, unidentified
MTRFAAVTTPKHTLHAALELSKNSWLLAIQFPDRDNPSLYPIRGGNAEGLMAKLDAARKRLAKVSGQTPKVTLCYEAGYDGFWLSRLLEQRGIECLVMEPASLQVNRRARRVKTDRIDVEKLLHTLIAWCRGERHVCSMVVIPSVEEEDLRRSHRERDRLVRERTAQINRIKGLLFGQGIRGINVKKYYKTLAPAELVTGDGRPLPKRLGREITREIQRLALVQEQLVEVERERDLAPTPCQATERKRHELLRLKGIGPTFAAVLSREVYYRHFANRRQVANYIGLAPSPYDSGDSRRSQGISKAGNSLVRYTMIQAAWLWIRHQPNSALTQWFRRRTEGESKRMRCVMIVALARKLAIALWRYVELGLIPEGATLSAR

SEQ ID NO: 251631 - protein, 339 aa, unidentified
MKLYVGIDLHSTNSQLAILDETERRVFKKRLPNHSQVILDALSPFQQEIEDIVVESTFNWYWLVDLLMDEGYRVHLANPSAIQQYKGLKFTDDTHDAFWLANMMRLGILPEGYIYPKEERPIRDLLRKRAHLVRLRTSLILSLQGLIQRNCGFKINSNEVKGVRENRVEPLLSSNEDLALSGRVSKETIDFMSRKIQEIERVVSEKTRIKDSFRFLNTIPGVGKILSLTIMLETGGIERFPEIGDYVSYCRKVPTDRLSNGKSKGKGNKKNGNKYLAWAFSEAAEFARRYDPQAKAFYNRKRSKQHRMVAHSALAAKLARAAYVLMKRNEPFDPVKLFA

SEQ ID NO: 251632 - protein, 483 aa, unidentified
MKSKSEEQNKRATNHPTQHHWHEMNRKQRREMMRKMQTEDLSLEVIHPDAAGIDIGNESHYVAVPPGRDSQSVREFGCTTAELKAMAAWLQQCRIRTVAMQSTGVYWVAVYDILEQAGLEVYLVNARDTKNLPGRKSDVQESQWLMKLHTYGLLRNSFRPSQEIRVMRTYWRQRNDLVQSAGRHILRMQKALTQMNLQLANVLTDISGATGQAIIKAILAGEHDAHKLAEFRDPRVKASEEQIAQSLEGNWQEDLLFVLKQEHEGYEFCQKQMAECDRQLQQYLQQREDRSHGAPLPEEKRQGRLKKKKGNAPQFDLREGLFRMTGTDLTRMDGIDVMTATTVISEAGYDMSKWENENHFVSWLRLCPDNRISGNKIIGKGRLPTNNPISIALKLAASTLRESKTYLGAQFRRLRTRLGAPIAIKAMAAKLARLVYRMLRYGMKYVDQGAAFYELRHRELQIKRLKAKAEKLGYRVTPIPAAA

SEQ ID NO: 251633 - protein, 412 aa, unidentified
MEVVHGRCAGLDISKKDAKVCVRIAGAGRRKTVETVTTWSSMTNQVLALREHLIEQKVTCVVMEATSDYWKPFYYLLEDLPGVELMLVNARHVKNLPGRKTDVADATWLAQLAAHGLVRGSFVPPEPIRQLRDLTRARTAITRERSREVQRLEKLLEDAGIKLSSVASDIVGVSGRAMLERLIAGDRDPAGLADLAKRRLRSKIPELSEALVGRFTEHHAFLVRVHLDLIDRHTAAIADITARIEVVIEPFQGFRDLISSIPGVATLVADVIIAETGADMSRFPTAKHLASWAGTTPGNNESAGRKKSTQTRPGNPYLQGALGQAAMWAAQHPHTYLGARYRRISLRRGPQRANVAVQHSLLVAIWHMGTTGTLYEDLGGDYYTRLNPERARTRAIHQLEAMGYRVTLDQAS

SEQ ID NO: 251634 - protein, 410 aa, unidentified
MSASNVQATRFVGLDVHKRSITVGAVDAQQNVVLRPRRLSWPEFELWRKQQFRPTDVVVLEATTNAWHLYDQLVPCVASVTVANPLLVQWIGSAAIKTDPHDTLKLARLLAAGLIPAVWVPPEPVRQLRALVSHRRRLIRQRTQARNRLHSVLHRHNIAPPEGDLFAAAQRPWWRQLPLQPLEQLLVAQDLQSLDAVESLIEQVEHQLCLESVKEPWAGQVPYLVQQTGIGILTAMTLLAAIGEITRFPHAPQVVGYAGLGAKVHDSADTHRGGGITKQGRRDLRAAMLEAAWVAVIHNAHWKNRFEHLCRHLSKEKAIVAIARQMLVVVWHVWHDHEPDEHMEAAAVARKMMTWAEQGGKAMHPDLTATQFVRLQLDRLGVGQDLTELKYGSHVYPLPPAASVKLTDAR

SEQ ID NO: 251635 - protein, 343 aa, unidentified
MKITRVGVDLAKHVFQVHGVDRSERAAWCKRLRRDRWIRELELAVAPGAEIGMEACGAAHHWARLLQSKGYRVRLIAPQFVKPYVKSNKTDANDAQAVCEAMSRPSMRYVAVKTIEQQDIQAVHRVRASLISERGAKANQLRGLAYEYGLVAPREIAALRRAVPVWLEDGSNGLTVRLRALLSGLYEDLQALDERVRELDKEIRAIGRENEAVGRVQQLRGIGPLIASALVAMIGDARQFKNGRHVAVALGLTPRQHSSGSKERILGISKRGDSYVRTLLIHGARSALRTAAGKNDRMSRWALALAQRSHVNVAVTALANKMARVAWAMLKHGTSYEPNGLAA

SEQ ID NO: 251636 - protein, 416 aa, unidentified
MSTTFNCPTGPVAGIDTHTDTHTVAVISDTGRHIATDTFPATNPGYVAISEFMATYGVTTVGVEGTSSYGAGLTRHLRTQKYSVVEVLRPTRAVRRRDGKSDPVDAVAAARQVLTGEALSIPKDTSGPVESLRGLQITRRQLVMTAAKLMTTIKSLLVTAPDEIRRRYSAMSTLVMVEALSRCRPSADLADPRNGVLLALKTLATTYRDLQKQGTQLEKHISILVEMINPHVTSIFGCGSVVAADLIVSVGDNPGRIHSEAALAHLCGAAPIPASSGRTHRHRLNRGGDRRANSALHRIALVRMHHDQRTRDYVAKRTKEGLSKKEILRCLKRAIVREVYRVLCLGQAVLPTGQVEVDELKARRIERQLSQAQVAEKLGCAPARISDIETGKRPLPELRLAYERVSDGLCVGTDPA

SEQ ID NO: 251637 - protein, 467 aa, unidentified
MKQKSTSHPKPARRPRAFGIPTLRPNVAGIDVGSIQNFVCAPAPDGATEIRVFGSTTPDLLDLLHWLQQSNVVSAALESTGVYWIPLFELLESQGIEVILTDARQLQRVPGRKTDATDCEWIQTLHSCGLLQACFRPEDRICQLRSLTRAKATLIAERADWLRRMQKALDQMNVRVHRAVSQIHGTTGMAIMRAIVAGERDPVVLAQFRDPRCHKSEASIAKELTGNWRLDHLFNLRQALLMFDLINDRIGDYQAEIQRHIDSMRSPEADSLPLPPVRSKEKAKAFKRRGQEPMRHSLHGLTGRDLTTIDGVGVDTAEVILSEYGPNLTRFPSEKQFVKHLRLAPRQNITGGKPRKGKGAKSATIAGQALRMAATTLNHSHTALGAYYRSIAAKKGSDVAVFATARKLATLIYRMLRWGQAYVDEGIAAFEHRYQQARLRRINSTADQLGYRLVPKSPLPDPVSNAS

SEQ ID NO: 251638 - protein, 409 aa, unidentified
MRYYVGVDWADQTHAVWVVDESGTKITWRTVPHTAAGFSEWGRELDEWRAQGIERWAAIERPEGRVVDFLLDHGVVVYPVNPKALDRARDRFRQSGAKSDPFDARVLADFLRTDHRHLQALQPSSEAAQELKLLTEDCQRHIRQQTRLVNQLTTTLKAYYPRALEVAELTTALAREFLQTYPTPEALTALTARQWQRWARGRRVSEARIGALWAVLQQPQLPVPAHVVRAKARLMQSLVEQLTPVVTAVAQYRTAIDDFFARMPAAQWARTLPIGKHGITAPTLWARLGDAPGRWESFRHLQAQAGAVPVTKRSGKQRVVRFRFACDKSLRHVVDQVAFLSLLSSDWARAYYDQQRARGHAHHQALRALGAKWLKIIFVMWHRQVPYDEQYHLATMTRQQLRQRQITIA

SEQ ID NO: 251639 - protein, 328 aa, unidentified
MCTLGIDVSKNKIDLCLLTAGPGGKKKHKVLTNEPAVARKVVDWLNAQKCVPESVTVVLEATGIYHENLAYGLHEAGVSVCMANPCRVREFAHGMDILNKNDAVDAFVLACYGELKSPAVWVPPSPEVRKLRALLRQRDALREDVQRTVNRLEKANSTSTPQEVIRSLERMKSWLNEELARIEKLITDHTDNDPGLKADLDLLKSIKGVKDQVGREMLALLKDGTFKSASQVAAYLGLTPVEKTSGSSGRGRPHMSKTGPSGVRAKLYVAALTASRWNKQAKAIYERLVAKGKAKKAAPGAVMRKLVHLCFGVLKTRLPWDENYVATA

SEQ ID NO: 251640 - protein, 421 aa, unidentified
MEEVDELDQIVDRVAGLDLGKTGLVACVRVPSDRPGRRQQEVRSYDTFSRSLLELADWLRAERVTRVAMEATSSYWKPVFYLLEAEGFECWLLNPRHVKHLPGRPKTDTLDAVWLAKVTERGMCRPSLVHPAPIRALRDLTRYRRTLIRDRTRERQRLEKLLEDAQIKLSSVISDILGVSGREMLEAMIAGNRNPRVLAQLARTRMRTKIGVLEEALTGHFTDHHAFLTRTMIDRIDQVGADVEKVNAAIEEAMAPFRAEARRLDEITGIGIRSAQELIAEIGVDMTRFPTPGHLVSWAKFAPIVHQSAAVTRNGSTGKGNPWLAGTLGEVVAGVSRTHTFLGERYRRLARRRGKKRAIVAVGNSVLKIVWHVLSDPDARYQDLGEDHYLSRHTTVRRRRTLIRDLELLTGQHVTLQPHAA

SEQ ID NO: 251641 - protein, 342 aa, unidentified
MDHFAGLDVSVKETSVCIVDDVGKIVREVKVASEPEALLAVLKNLAYQFKRIGLEAGPLSQWLYGALAEAELPVVCVETRHMRAVLKAQINKTDRNDARGIAQMMRVGLYRAVHVKTLRSQKLRMLLTHRKLLQSKAIAIDNDLRGTLRNFGLKVGVVGKVKFEARIRELVENVPDLAELVEPLLVVRRALREQFVILHRRLLAIVRDDEVCRRLITTPGVGPVVALTYRATVDVPARFRKSKAVGAVFGLTCAKYQSGESERSGRISRCGDEMMRVMLYEAAQSMLRSTRWSWLKAWAMQIARRRGTKKAIVALARRLAVIMHRIWIDGTEFRWTREAAVA

SEQ ID NO: 251642 - protein, 364 aa, unidentified
MKRKVYVGMDVHKETIQIAYLTSNTKEMVKEQQIKHNEVHIKKFINKLKTEWNEIHCCYEAGVTGYPLYRYLKSLGVNCILVAPGKIPRQSSDKIKTDKRDAIKLARLLRSGDLESIHVPSEEDEAARDYLRSRDSLRLDLGRNRQRLMKFLLRKGNVYSTTKYWTVSHYKWLNNLHFENEILHETFNDYYSRVRVQEENLKAMDQKIQEIAKSEAFRERVGILRCFRGVDYLTAMFLLSEVNDFRRFKTAGSFMSFLGLVPGEYSSGSKRKQTGITKTGSPRLRRILTEAAWQHRFPGTGSKIVAARRTGQPALVVALAEKASLRLHKKFRNLQLRGKTPQVMITAVSRELSGFLWAAMNLVA

SEQ ID NO: 251643 - protein, 461 aa, unidentified
MPKRKRQSTTSAQPVDVLQQLNANAAGLDVGAEEIYVCVPAGRDARSVRVFATFTDDLHALADWLVACGIDTAAMESTGIYWIPIYEILEARGLEVYLVNARHLKNVPGKKTDILDCQWIQQLHTYGLLHASFRPSEDICALRAVARHRDTLIRYQSGHIQHMQKALELMNLKLTQVVSDVTGVTGLSIIRAIVAGERDPQVLAQLRNSQCVKTEEQIAKALQGTFKPEYLFVLKQALAQYDFYQQQIQESDVELEAMYHALPAAEQGTSACPPPKPKRQKRRKNQAHFDLAASLYRMAGVDLTAIDGLDALCVQKILTETGVDMSPWATEKHFTSWLSLAPHNDKSGGKVLRSRTLKTQNGANLAFRLAAQSVGRSHSALGAFYRRMKAKHGPAKATTATAHKMARIVYHMLKYKKAYADPGESHYEQQYRERTIRNLKRRAANLGMELVPKPSQPALVS

SEQ ID NO: 251644 - protein, 414 aa, unidentified
MELANRVVAGIDVHKKMLAVVVRRETADKPEYEKRKFGTTHKEILALAAWLQHAQAKEVVMESTAQYWRPVWYGLEAHFHLHLSHPLKTRAPRGRKRDFRDAQRLADRWHSGDLEESFVPGAEQRAWRWLTRTRVDLKRKMGVVRNQVEGLLEEGGIKVAAVVSDVFGVSGWAMLERIAKGEADVEALLEEARGALRKKKPQLREALVGQLQPVYQLLQRQHMEQVKLLRQQVEELSQQIAVAMKEHALTLHRLTKVPGVDLGAAQDLLAEIGPKAVVFATADQFASWVGVCPGSQESAGVCYSRRCAKGNRYLRRLLCQIAWAAVHTKETFFAGLFARLLPKIEGKGAAWAVAHRIAKVIWLMLHEGVEYKEQGPAPANPRTLTRKLRRLLQEFRRAGIDAKPLLEEPVLGAS

SEQ ID NO: 251645 - protein, 347 aa, unidentified
MRFYTKQHQYYCGIDLHTKKMFICILDAAGQIRVHQNIKTDQETFLNIISPFREDLVVAAECMFTWYWIADLCAEKNIPFVLGHALYMKAIHGGKAKNDKIDSHKIATLLRGGMLPQAYVYPARMRATRDLLRRRNHFMRKRAELYAHIQNTRSQYNLPDFLGRIAKPQNREGIVERFHDPSVQKSIAVNLEMIQAYDHILTQLEHDLITSAKEHDLRSYALLQTIPGVGRILALVILYEIETIERFPQVQDFVSYCRLIKSIKESNGKKYGSSGKKIGNAHLKWAFSEAAVLFLKGNEPAKRYLERLSRKHCKAKALSILAHKLGRAVYFMLKNKEAFNQKKFLGL

SEQ ID NO: 251646 - protein, 375 aa, unidentified
MKKNSSACKSPKASMKATKSTNVSVGMDLGDKTSRYCMLDENGEILREASVGTTKEAITQVFATMKPCRVAIEVGTHSPWVSRLLKSLGHEVIVANARQVQLISNSSRKNDRMDAQMLARLVRVDPRLLRPIQHRSEQAQEHLRVIRVRAALVEARTMLVNAARGLTKATGERLPSCDAEQMGVERMESLPAGLQNSLRPLLEEVESLTEKIQAMDQQVEQIARTDYPETRLLRQVSGVGSLIALTFVLTVEDRERFQKSRDVGCYVGLRPRQSDSGESEPQLRITKEGDPYLRKLLVQGAHCIMARRGPDTDLKRWGLKLSARGGKNAKKRAVVAVARKLAILLHRLWVTGEVYEPLRNNQAEPPVKQTGKAAA

SEQ ID NO: 251647 - protein, 410 aa, unidentified
MQYTYVGVDSHKDAHTAVFLDCFFGRLGQITFDNLPSKFSAFLIDAEKYRVDQTSLLFGLEDTSDYGRNLMMFLKDNGQTVKHVNSLLVARERKNQSITQKTDSYDAECAARVLLSKFDVLPDVQTQDKYWALRTLVTRRNFIITNNMSLKNQLHSLLTHHYPGYQRFFKNIQGNTSLAFFMKYPSPGLLKGVTVEELADFFYKPSQGKIGEAKAKMILESIEHTSVEFQEVRDNAVQSAIRQIRFNLTELEKIDQYIAELLAKFNCTLTSMTGIEVTTAADLLSLIGDIRRFSSPAKLARYAGIAPVTYASGKKESKFANQRGNRELNSVLYQLAIRVSMIAGPNHKVINPIFYEYYKRKQTEGKTKRQALKCVQRRLVNVIWGMLTNDREYINPPMFNLPKEGLTTKK

SEQ ID NO: 251648 - protein, 355 aa, unidentified
MDRYIGMDTHSQTCTLRALTATGKEVARQVLETSGAALVQAVRSIPGTKHLCIEEGTQSAWIYELLHNEVDEIVVTMPSRRAGQKDDAKDALQLAEGLRTGAIKQRVYKLCGPYSELRAAVRSYVLLRQDVTRTKNRLKALYRSRGIATPGNEVYQPDKHLRWEKLLPPPLRQSAAILFSQVDSLMKLWTTAEERLVTASKPHAIVKTLATAPAIGPIRAAQIVATVVTPHRFRTSRQFWAYCGLAIAMRSSSDWVRDRQGRWVRSKRFQTLGLNRNRQPTLKAVFKAAAHQVALQMTGHPLHADYQRLLNTGTKPNLAQLTIARRIAAAVLAMWKKEEVYDPNKHRSHTTDAPA

SEQ ID NO: 251649 - protein, 410 aa, unidentified
MEVLVSRGCGLDVHQATVVACLLTGEPGKLPRKQVKTFSTMTSGLIELRDWLAAADCTAVAMEATGVYWKPVYNILEGHFELIVANARHIKAVPGRKTDVKDAEWIADLLRHGLLRPSYVPPPELRELRSLLRYRVKLVNARSAERNRIIKLLESANIKLSGVISDPFGVSGRLMLNALKVGAATPEEMAELAQKRMRSKLPLLKLALDGRMEAHHRQLLSIQLDRLDRFDRDLKQMDAKLEAKLKPYARQMELLDDIPGIDWVVGATIIAEMGIKMGQWPTVGHLTSWAGLCPGQNESAGKRGKTSIRPGNPYLRSALVEAALAVTREKDCYFREKYYRLKARRGHKRAVVAVAHKLLVAIYHVLSSDTPYRELGADYLERLEPERLKLNLVRRLERLGFQVKLEPRRA

SEQ ID NO: 251650 - protein, 380 aa, unidentified
MGWPGRAQRPRTTVVPDGEASKLKELTMHTHQQSTEPVATIGLDIGKNTFHLVGLDRRGAIAMRIKVSRNQLVRRLVNLPPCLIGLEAGSGSHHIARQIQSLGHDVRLIPAQYVKPFLKGHKNDYRDAEAIAEAVQRPTMNFVAIKTPEQSDLLSLHRVRSRLVRQRTAIINQIRGFLIERGITVRQGPGPLRKVLPEVLSSPPEALSPRLLHLISELDHDWRHLDDRLEVLSGEIESLSENDAACQRLMTVPGIGPIISSAVVAAIGTGSGFKQGRDFAAWLGLVPKQESTGDRTKLGRISKRGNKYLRTLFVQAAHVVLERRPAAAMRALWPWIAQASKRLAHRNLLAIALANKLARIAWAVLARGRDYEPRITPNAP

SEQ ID NO: 251651 - protein, 395 aa, unidentified
MFIVGIDIAKRSHEAIIIAEDGQVVRKAFSFRNNCTGYNLLLEQVRKLTLVKSQFVFAMESTAHYWLALYARLLKDGYTVIVLNPIQSHSLRELYIRKAKTDARDSLVIAGLVRFGRCKASNVPQDKILALRELCRSRAYLVDMAADLKRKLIALLDRIFPEYESLFDSVFSKASIAVLSKYSTPQKVKNANLRKLTDLLMENSNGHFGEWKAHQLKEAACSSFGIDDSGGVYSTLLGMFLEQILSLTAQADSLEKQISVFFQEFNNPLTSIPGVGTVLAATILSEIGDITRFSSADKLLAYAGLDPSVKQSGEFKSNQNRMSKRGSPYLRRAIWLASTVAVHRDPMFQTYYEKKISEGLHYMNVIGHVSRKMTAVIFAVLRDGQPYQPILQSAG

SEQ ID NO: 251652 - protein, 360 aa, unidentified
MQTKREELNFEGQNIYAGIDVHLKSWTVCIMTEKLEHRQFTQPPDAQALYNYLTQHFPGATYHSVYESGFSGFWAHRQLSSLGIKSMVSNAADVPTGQKEKIQQDDVVDSRKLARSLRSGDLDAIYVPSEATEQDRALVRLRATLVKDNIRFKQRIKACLYFIGIPYPERFSKKGSHWSKNFLHWLKEEVHFSQMSGEQLLASMITEVETNRQLLLSVTRHIRQLSETERYVSNVELLLTVPGIGLLTAMHLLTEIENIERFKDTDHFASYVGIIPGRHNSGEVKHDGAMTFRGKSVLKRCLIESSWIAARHDPALLLAYNKYVSRMAANKAIIRIARKLLNRIYFVLKNKKKYVKSVVK

SEQ ID NO: 251653 - protein, 390 aa, unidentified
MSFDHHSKEPTVILTNLGAIFVSLELSRSTWLITSMSPGGGEKMSKHSVSAGDIGALLACFSELKQKALSRTRKSFSIIVIQEAGLDGFWIHRVLEREGHESYVADPASIATSRRRRRAKTDRIDGEALVRALLAYKRGEPRVCAMVRAPSPESEDSRRLSRERKTLTVERVQHVNRIKGLLFSQGVSGYEPLRRNRRQRLDELKTGDGRPLPPHLKAQISRELDRLELLIEQVKIVETERDALFAPAVKTGQLPAPQAMLADLKGIGAEFVAVLWSEGLCRSFTNRKQLGAYAGLAPTPWQSGSVAHEQGVSKAGNPRLRTTMIQLAWLWLRHQPQSALALWFKERVSHNGGRLKKTTIVALARKLLVALWKYVTAGIVIEGAVMKSTA

SEQ ID NO: 251654 - protein, 339 aa, unidentified
MQLYAGLDLHSRNTYIGIMDKEFKRVFGKRVSNKLPLILEALDPFRDRLKGIVVESTFNWYWLIDGLMDAGYQCVHLANPSAMKQYEGIKHTDDQHDAFFLAQMLILGILPQGYIYPKQDRPVRDLARKRLFLVRHKTAHILSLQSLIARCCAKRVSANEIRKFTIEDLQQLLKEEHIVLSAQANLDTIGFLKQQIQRLEKAIQKKVKLNKAFQQLLTVPGIGLILAMTIMLEVGDIGRFAQVGNFASYSRCVSSQRLSDGKSKGHGNRKNGNRYLSWAFTEAAHLSRRYNENFRSYYNRKVAQANTSLATKALSNKLARICYYLMRDQVPFRKELLSH

SEQ ID NO: 251655 - protein, 347 aa, unidentified
MDFYAGLDVSLEATNVCVVDGDGKVVREAKLETDPDAIELLLTEWGIHLKRVGLEAFSYSAWLYTALAEKGLPVTCIETRHAKAALNAMLNKTDRNDAKGIAQMMRTGWFRAVHVKSESAQTLRALLVGRKALLGKVLDMENMIRGLLRPFGLKIGEISVGRFDARVREIVAGKKDLEAIVTPLLDARGATRLQLAKLQRLAPARSDNAVRRMMTVPGVGALVALTFRATVDDPARFKKSTNVGAHFGLTPRRYQSGQTDRIGSISKCGDELTRAMLYEAAIAILTRIPKNFKLRLWGLRLARKKGLKRAATAVARALAVLLHKIWSSGTTFRFGAGGKRGRVAAAM

SEQ ID NO: 251656 - protein, 421 aa, unidentified
MNATTDFAATIGLDWADQKHDLWLHPADGTKTEHVRLEQTPEAIHEWVAKLGDRFGHRRVAIGIETTRGPVLSALLAYDFIVFFPINPKALKDYRAAFAVSGAKDDRTDAMLLEEFVRLHGGKLHALAPDTQLTRQLGGLTENRRRLVDERTRLVNQMHGLLKTYYPLAETLLDGNLNTPMAADFLARWPDLADLQKAPVETVRAFFYQHNSRGAKKMEERLAAVAKARPLTEDPAIITPARHLATALAGMLKPLHRAIADLDQAIAEAFDQHPDAALFRSLPGAGPALAPRLLCAFGTQRDRFASAAEVAEFYGIAPVVKQSGKTKTTQMRYRCPKFGRQTFHENAGCACKREPWAKRYYEDQKGKAEGKHHKACRALAYKLIRIYYACWKQNVPYDGLRYLQALEKHGSPLHKKLQTPI

SEQ ID NO: 251657 - protein, 374 aa, unidentified
MSQSTGFVGLDVHKDSISVAMMTAKGIDVQLGQIQNNPTAVRKLARRLAVKYGRLSFAYEAGPCGYGIYRQLKDMGHPCLVAAPSLIPKRPGDRIKTDRRDAMTLARLLRMGELTEVWVPDPHHEAVRDLVRCREDVKQIERRCRQRILAFLLRQGRHYDKNNWTQEHRRWLGRQRFDQQEHGDVFAHYLHSIIEAEQHVVELERQMGEALETWSLAPLVRGWMAMRGVKLVTAMTLASELGDVTRFVRPEGLMSFVGMVPSERSSGQTRRQGRITKSGNRHVRRVLIESAWAYRHGACWTSPLRKRAAGTSEAVRAIAWKAQKRLHKRYHRLTSRGKPGQVAVTAVAREELGFLWAIGWQVMKENPSLAQAGV

SEQ ID NO: 251658 - protein, 343 aa, unidentified
MQAIRTIGLDIAKSVFQVHCVDVEGNVVLRRRLKRRYVLAFFQKLSPCLVGIEACASSHHWSRELQALGHRVRLMPPAYVKPYVKRQKNDATDAEAICEAVSRPNMRFVETKTSEQQSCLMLHRTRHLFIRQQTAVINAIRAHLAEFGIVAPVGRRGVEQLLGVVADADDKRLPEVARTCVAALGAHLQMLKAQILQFDRLITAWHRSSEVSKRLDAIPGVGPALATALVVSVPDPKAFRSGRDFSAWIGLVPKQNSSGGKDKLGNISKRGDRYLRSLFTTGALAVIRYAKIHGTTHRPWLTALLARRPTKVAAIALANKLARMAWAMMARGEQYREPAALAA

SEQ ID NO: 251659 - protein, 438 aa, unidentified
MRRKKNKATKKVHFESLPLIHPNAAGIDVGSKEHLVAVPPDRDPQPVRTFQAFTPDLHELAAWLKRCGIETVALESTGIYWISLYEVLEQYGFEVRVVNARHVKNVPGRSKSDVLDCQWIRKLHSFGLLNGSFRPDQQIRKLRTYMRLEDNLVVESTQAVHHMQKALFEMNVQLSNVISDITGESGLRIIEAILAGERDPEQLADLCSTRIKASRQTVAKSLHGNWDEALLFCLKTALETYRFSQKKIQDCDQCIERQLATFEIKAPLPDSKQNLQTQLHQVCGVDLTKIPGIKEQTAKIIISELGLDMTRWNTEKQFSSFLGLCPNNLITGGKIIRRSTRKVYNRAADALRLCAQSLTHCKSALGAKYRRLRTRLGAPKAIVAMAHHLARLVYRMLRYGQDYVEKGIQQYELKFRLQRIKWLKKEAHSLNLELVAAQ

SEQ ID NO: 251660 - protein, 348 aa, unidentified
MASYVGIDLHRRRSVIVVLDEAGDRVWSSRIENSRLNLEVELRSIVDAVEGPVHVVIEATWGWYWAADVVGEVGLEMHLAHPLAIKGYENRRVKTDWLDAELLADLLRMGRLPEAWIAPRSIRELRELVRYRRKLAQLRSGLKAQVHQTLGKEGAIPETKSIWFSGGQQWLDDLQLADAYTNRIESLRDVLEVFDREIGALDGLIHRTIMTNDDWRDGYQAIQTIGGVGRVFAAVFIAEIGDVNRFPNPRTMASWAGLTPRHRESDIKIRRGRMTKQGPVLVRWAAVEAVTNRNCEARLRATKRRVGERRGIKIGKVAAARELLALVFYGLRDGEIRCLQDRHKPTAA

SEQ ID NO: 251661 - protein, 354 aa, unidentified
MNTTQVFEKRKIAVAIGIDLAKDHCDVVAYNADNKICFTKANWAYPHLMEWLANAQPAVVLMESCKGCHVRARDIADLGHDTRLVKGADVKALRNVCQKNDIRDADYIARLLYVPGTKFVFVKNQRQQSLQFLQNEYKSIQELRIQVGNQIHAGLEEFGCPGPKSKKFIQSRMMAHLEKNAEPIPDEVMSSFLRRREMWLNLFEQEEEAKKRMEEIAKTDDDAQRIMTVPGVGAQTAVGMLVHIGGDIGRFKNSGQFAASIGLVPKQNSTGGNTTLNGITKCGPKRLRANLVQCGQVILMHADKLKGNFGDWVRKLRDSGKKRGVIVCAIAAKIAKIIYRLMKDKVDYTPVPSR

SEQ ID NO: 251662 - protein, 389 aa, unidentified
MRTAKKRGPGPSHVLTTPDHAGNVVGIDPHKRTLTATVVDPRGGVVASEHFRVSGEGHRELEVWARQFGQIARWGVEGSASWGRHTAVFLVGRGGDVRDLCANRTPRSDRARQRGKSDTLDSERIAREVLAHPLLPRAFKRAGQEQGPDEQHQLLALWHNRRRSILTSRQHLVGEAEHLLCDLPLELRDELPDAKAVRPRLAALAHRNRRRRYDAPTTVRLGMLDAYRAQISALDREEKDVVVQLRELVAANGSTLSELCGLDTRSVAELLVEVGDPRRFTEGGFARFNASAPLAASTAEGPGEPVRHRYNPGGNRRVNAVLHRMAVTQLRCEPRAQAIYANARARGHTKKEARRILKRHLSDVIYRRMIRDLAAADRASVPAQRLLAA

SEQ ID NO: 251663 - protein, 337 aa, unidentified
MKKNYYTFIGIDVSKEKLDYCIISNDTINSSPQFGIIGNTSKEINKFIASVKKKNINFEHVLFCLEHTGVYGMPLCYWLQSAEAHYWVVPALEIKRSKGIARGKSDKTDSRDIANYAITHEHELQLSKIPENDIVELRLLLAEREKLIKSIMIFGTTSENKNYLAKEVLKATLKNNNTTITFLKKQLKNIDKLIEEVINRNELFKHQNELLRSVPGIGQQTSVILIAYTQAFTLFKNHRQFACFAGVAPFEYSSGSSVRGRTRVSHLANIKIKTALNMAALSAKKYDQQIKLYYERKVQEGKNKMLVMNSIRCKVISRAFAVIKRDSKFVDVMKAVA

SEQ ID NO: 251664 - protein, 308 aa, unidentified
MKDTVIGVDLAKNIFQVHGASRAGEVMFRKKLRRQQFMQFMATQPPALVVLEACGSAHYWARELAGAGHEVRLIAPQYVKPFVKRQKNDAADAEAIVIAARQPEMRFVEPRTEAQQARGVLFRARQRLVHQRTELVNALRAVLYEFGLVVPQGIAHIRHIEAMLDEAVLPEAVKQECLDLLRQISEQSVRIDVRTKKIRMLAQESENTCRLQSMPGVGPLTALAIEAFAPDLQSFRRGRDFAAWLGLVPRQFSSGGKERLGKISKAGQADIRRLLIMGAMTQVNWASRKAPAPGSWLARMLARKPVCW

SEQ ID NO: 251665 - protein, 341 aa, unidentified
MQITTIGLDIAKNVFQVHGIDAAEKVIVRKQLRRGQIIAFFEALAPCLVGMEACATSHHWARELTKLGHEVRLMPAKDVKAYVKRNKNDAADAEAICEAVRRPTMRFVRIKSAEQQGQLMLHRARDLLMRQRTQLINALRAHLAEFGVTAAQGREGIKELLAIVAQDESSRLPIDAHASLTVLAAQLQAVQTMIGSIEKRIVAQHRSNEASKRLETIPGIGVVGATTITAVVTDPKAFRSGRDFAAWIGIVPRQDSTGGKQKLGPISKQGDQYLRRILIVGAHSVLRRARQQPEKYPWLTQLLARRPFKVVAVALANKMARIAWALLARGGTYRPPQLVAV

SEQ ID NO: 251666 - protein, 385 aa, unidentified
MVYIGIDIAKFKHYASVVSSDGEVIVKPFSFENSRKGFMKLVEEIENFHDCLIGLESTGHYAENLIFFLYERGYQIGVINPIQTDALRDSNIRKTKTDKIDTKLIVQCLMLKKYSLVTLQDIDMIKLKRFCRFRMEMVQQQTRIKTQLVTCLDTVFPELAGFFKGNLHLKTVYVLLEKYPSSKAIKSARIDGLTNVLRKASKGKFNQEKALQLKKLAQDSVGIDNPAIELQIQCLIKQLKLYKTQIADIDLSIMTLMEIIDSPILTVPGVGYTLGAMIISEIGDIKRFSNPTKLLAFAGLDPVIKQSGNFQADQMKISKRGSTCLRYAIYRVAFLIIYNNETFHNFYLAKRSQGKKHRVALGHVCNKLVRVIFKILTENIPFNLS

SEQ ID NO: 251667 - protein, 424 aa, unidentified
MKFKMQDKQNQLIERISDKHLVVGVDIAQQFHVARAVNFRGIVVGDPLTFENNEDGFTILLHWINNLKRTNNLVTTIVGMEPTGHYWINLSKWLFEQNIDVVTVNPYHVKRNKENRDNTQSKSDKKDALVIADMVKNGYYSIVRPTSESFEELRVLMSNRDVIVKRLVSSINQLNRWVDVVFPELRQVFKDVKGKGAIATLRLFPTPMELRLMQPQNIVIGWKSQMKRQPGLKKAQLLIHLAKRSIGTRQALDAYKFHLQQLLEEFDLATTQLERVEEQVTEVLKQIPYANHLLTIKGISEISLAGILGEAGDLSGFAHGNSLLRHAGLHLAEASSGKWKGQIVISKRGRSRLRRFLYLATMSLVMNNPEFKALHTLNVKVKKIKKMKSIMKLVGKLARIFVGIAKRNESYCPEKLQPLTSLAA

SEQ ID NO: 251668 - protein, 418 aa, unidentified
MQTEFSQYTAVIGIDWADKKHDVCVQDMATGKRRASQVRHRAEDLDEWARSLQRRFGGPIAIAVELSKGPIINVLQKYDFFVIFPIDPSKLANHRKTFTSSGAKDDPTDAEFALDLLSKHTEHFKPLDPQSIEMRTLMTLVEQRRQLMNDRVRITNRLRSTLKQYYPQPLEWLNHIDTLLFCDFIRRWPALSQVRRARRATLEKFFHEHNMNRKALLERRIKAIKSAMPLTMDDAVIVPHRLRALALVAQLEVTLECIKQYDTEIASLAPQHPDYELFDPLPGAGPVFTPRLMVAFGEQRERFNNAAEVQKYGGLAPVTKRSGQSTWIHWRWQCPTFLRQTFVEWAAQTINKSYWAGLYYHQQRARGCSHQAAVRALAFKWIRILYRCWKTRTPYDETRYLKALQERGSPLLKMAEAA

SEQ ID NO: 251669 - protein, 392 aa, unidentified
MVVSVGIDVSKDKHDCFIVSSDGEVLADVFTISNTLDGFHGLLQRIQECSAPQDKIRVGLEATGHYSYNLLGFLLDNGLATYVLNPLRTNLYRKSLSLRKTKTDRVDARTIASMLLSDAGLKPYTDTAYHNEELKSLTRYRFDKVKERAKLKSSIARLVCILFPELEKLVPSLHIASVYALLEEFPGAKQVAAAHLARLKALLETASNGHYKRDMALEIRDAAKNSIGSQMPAKSLELQHTIRLIRELNREIDEIEEQIQSIMDELHSPITTIPGLGFRMAAMILAEVGDFTRFDSPDKLLAYAGMSPSTYQSGQLKNCYPHMEKRGSRYLRYALYNATKYVCHWDSAFADYLAKKRAEGKHYNIAISHAAKKLVRLIFAMEKSRQPYCSAA

SEQ ID NO: 251670 - protein, 416 aa, unidentified
MPILVVGVDIAKNYQWARFVDFRGIEHDHALKFKNSKGGFETILARIRGICKKENFAKVVIGMEPTGHYWKAFANWLKKQEGIKVVLVNPYATKQAKELDDNSQTKSDKKDALTIAKLVKDGRYFELYLPHDVYAELRGLSTTRTGLNKRKNALKNTITAVMDEYFPEYEEVFKCPLSGKASRHILKTCPFPKFILELGEDGVTDEIKKAVKKTVGRKKAAQLIETAKESIGVDYGEEAARLKLRLMLEELELLEKQAEELEVQMEAALQKTDYAGFLLSIKGIGVVTLAACLGELGNPARFENPRQMSRMAGYNLVEDSSGKNKSGTKISKRGRKNLRSVLYQMALIMVATNDEMKQLYHYLKTREEAPLRKMQALIVVSKKILALIHALAKKKENYDPGKVFGPVRREQLKAAA

SEQ ID NO: 251671 - protein, 351 aa, unidentified
MAEKLNSVIAVIGIDIGKNSFHVVGLDERGAIVLRQKWSRGQVETRLANMPPCLIGMEACVGAHHLSRRLKLLGHDARLMPAKYVRPYSKGQKNDFRDAEAIAEAVQRPMMRFVATKSADQLDLQALHRVRERLVSQRTGIINQIRAFLLERSVAVRQGLRFLRAELPGILATRCDVLSPRMIRIVEDLACDWRRLDERIEGLSGEIDALARQDAGCERLMSVPGIGPIISSAMVAAIGAGDAFAKGRDFAAWLGLVPKQMSTGDRTILGKISKRGNRYLRVLFVQAAWVVLIKPKSWERYGLKPWIEAARKRLHHNVLAIALANKLARIAWSVLTHGRDFEARRIGGAAA

SEQ ID NO: 251672 - protein, 368 aa, unidentified
MKALPHLLHYMWSSRMSYIIGCDAHKHYSQFAVYEGDQTRGKQVRVEHERGAIREFLSEFPEGTRVALESIGNWYWIVDEMEQAGCKPLLAHPAKAKAMMGNVNKTDKLDARGLAMLLRNGTLPTVWIAPSQVRDERELPRTRMALCKIRVALKNRIHASLAKYNLSLPTESDIFAPKWNSQLNQVIEQLPAETQKCLQQELELLDKVQGQIDAMEDRMKVCISLTPSMQLLKTVPGVGDILAIVIGTEIGLIERFSSAEQLASYAGTVPAVKSSGGKVRYGHTPKESNHYLKWAFVEAANGPAQYAKKPHWQHRHVTRLYERVKLRKGHSVAVGAVARHLAEATFWILNKNEPYREPTHPKVLPKQA

SEQ ID NO: 251673 - protein, 384 aa, unidentified
MEALLYCGCGLDVHKEIIEACILRGLGAEPEVIRQSFGTTKPELQKLMDWLGENDCYTIAMESTGVYWKPIYQTLETKSKYIERIWVVNARHMRNLPGRKTDVQDAEWIATLLRHGLLEKSFVPSVPIRDLRECARLHRTFVQERCRYVNRLEKFLQAHGFKFSSVMKDILCVTGRKLLDILLDTGVLTPEDVEKNCRRLRRPTQEIAAAVCGNMTLAERRLLKQLLHKLDSAREDITSILEDMRLLSQPFQEQIAIIDSIPGFDEESAMEIIAEISEVPQEHFATSEKLCSWSGTVPRNDESAGKIKSRRTNHGNSYVKAILCQCAWAAVSVRSSPFRAWYWAHKHKLGEKKAIIAVARKLLKLIYLLLSRNQMYQPPIPVQR

SEQ ID NO: 251674 - protein, 342 aa, unidentified
MDSLSVGIDVAKASFVAGVVGPAGESTWGEFANTPAGFEQWQGRVTAAAAEHNAQAEVVVLEPTGGDELALAGFAAAQGWLVSRPNALRVHDWANSQGRRAKTDRQDARILARYGAAQPLAAWKPLPRAYSELESLLQRQDDLESMLQQERNRQAALALQAGAARVVAASLAAILLSLETAQREIQSAIKAHLKAHPALKAKQQRLLSVPGIGRQTVLHVLVLLARWETLTEGTGRAKGLVAYTGLDPKTHDSGSSVHKPARISRMGNRQMRRRLYLAAFGGVRARGGPLQDFYDRLVGRGKAKKLALIAAARKILIWAWAVYRTETNFDPQRHIKPEAQTA

SEQ ID NO: 251675 - protein, 366 aa, unidentified
MKKLTTTTMQRIHKQSEGLTIGLDLGDRSSFYCVLDEKGDVLLEGKVSTTPKAMRETFGAMPLSRIALETGTHSPWVSRLLSELGHEAIVAHARNVRLIGESRRKDDRLDAMTLARLVRVDPQLLRPVKHRSAEAQADLTVIRARAALVRTRTLLVNAARGLTKAYGERLRGCNARGMKPKAAQDLSPELKSALNPLMREIESLSERISEYDQMLQSMAVNRYPEAERLKQIKGVGTLIALTYMLTLEDPHRFRKSRDAACYVGLQPGRRNSGQSEPQMHLSKEGDPYLRTLMVQAAHHILGPWGVDSDLRRRGLQLAEHGGKRGKKRATVAVARKLAVLLHRLWVSGDVYVPLRQNRSTTQLIAA

SEQ ID NO: 251676 - protein, 367 aa, unidentified
MKKVSTAATEQSRNISQQKLTIGLDLGDRNSWYCVLSESGQIQLEQRVRTNAKGLREIFGAMPSSRIALEIGTHSPWISRLLSALGHEVIVANARKVRLIGESRKKDDRLDAQTLARLARIDPQLLYPVKHRSAQAQADLMMIRARAGLVRVRTGLVNTARGLTKSYGERLRGCNVRNMNQEKAEGLSPELQAALEPLLAAIESVSERIAEYNERIETLAQQSYPQVALLKQVKGVGTLIALTFLLTLEDPHRFRKSRDVGGYLGLQPGRRKSGQTEPQLHISKEGDPYLRTLLVQGAQHILGPFGPDCDLRRWGLKLAERGGRSGKKRAIVATARKLAVLLHHLWLSGEVYEPLHNSCRVAVTAAA

SEQ ID NO: 251677 - protein, 338 aa, unidentified
MNRPEYFIGIDIASATFTASVLTAPGEIVMMRENTLNTPEGFTGFISGLEGQQIMPKNSVIVMEATGVYSEQLCYFLHAKGFKVAVEPPNEVKKAFKSKRKNDTVDRQQIAEYGYRFFDKLHFWEPKADLLEQIRTLLTTREQFTKQRTANQNALRALKRKVVQTPLATHMVQKNIERLGADIKAIDKAIKALMDQDPTLKEKGQLADQVPGVGLLLTANLMVITSGFSNHVDPKSLAAYIGICPYAHESGTSVKRRPTSDRYGTGRLRKLLYLASLSVRAHTEQFKKEFYRKVAEGKSERLGVNPIATRLLRIICATVKSGIPFHENYRSVTPALLK

SEQ ID NO: 251678 - protein, 377 aa, unidentified
MSKLRYVGLDVHAETIAVAVAEPTGEVRSVGQIPNRPEAVRRLVKKLGAPEQLRACYEAGPTGSGLYWQLTALGVACEVVAPTLVPVKAGDRVKTDRRDAEKLARCYRAGDLTAVWVPDPAHEALRDLVRAREAAQQDQLRARHRLGKFFLRHGQRPPLPMKAWTQKYLGWVKTAVHFAQPAQEATLLDYVHEVDHAAGRVERLEQAIDAVVRTTPAPLGTVIGALQALRGIAQVAAVTIACAVGTFTRFRKATPLMGYAGVVACEAASGARTWRGGITKTGNAHLRRIVVEAAWAYRHRPALGSALKQRQVGVSAAVQEMAWKAQHRLHDRYRKLLGRGKAKQLAVTAVGRELLGFIWAIGVHVEQQARASQPRAA

SEQ ID NO: 251679 - protein, 337 aa, unidentified
MLFCGIDLHSNNSVVVILDESDKVIYSRRHPNNLEEICGVLMPYQSQLVGVVVESTFNWYWLVDGLQAQGFQVHLANTTAIKQYDGLKHRGDESDARHLAHVFRLGLLPTGHIMPKEQRAVRDLARKRMQLVQQRSIHILSIETQMDQQHGAHLSSNLIKKLSCSDIDAMGLGEMASLAMKANVSLMQSTDQQIDLIEKALASHCRHHPGFPLLKSVAGIGDVLATVILLETGSIERFKDVGNYVSYCRCVGSIHTSNGKKKGEGNTRNGNRFLAWAYVEAANFAIRYSEAAKKFYQRKKAKRNGIVAIKAVAHKLARACFHMLKTGEVFSVERCFT

SEQ ID NO: 251680 - protein, 349 aa, unidentified
MIVIGIDPHKQTHTAVAVDGATGKVLADLTIKARTPGFERLLEWARALDDERLFAVEDGRHVSGHLERHLIGRGERSVRVPPRMMGEARRTDRISGKSDPVDATAVARAALRHSDLPEATLAGPERQIGLLVAHREMLINERTDRICKLRWLLHDIDPDLAPALRTLGRFKTLDRLVRALETVEPTVEVEICLDLLARCRAITVRTNELERQIGALVKTHALALLEIPGCASLTAAKIVAEAAQVARFPSEGHFARYAGTAPIPASSGARHRQRFNRRGNRQLNAAVHRIAVTQIRIHDPAKDYLAKKRAEGKTKTEAIRALKRHITRVVFKTMTSMNQPTDRLTAVAA

SEQ ID NO: 251681 - protein, 363 aa, unidentified
MIVIGTDTHKRTHTCAAVFAQTGQLAGELTASAREPGFRQLLAWGRDLDAERIWAIEDCRHVSGSLERFLVASGERVVRVPPKLMGESRRAERSAGKSDPIDALAIARAALREGPETLPAAHLDEDALQVKLLLDHREDLVKARSEDQCRLRWHLHDLWPELEIPAGALDRMVWLDRVARKLARAEQGARVRVARELVTEIRRRTRRATELEREIGALVKAQAPELLALEGCGALTAAKLLAETTGARRLPSDAKFARLAGVAPIPASSGNRVRHRLDRGGNRQLNCALHRIAVTQGRCHAPAREFLAKKQAEGKTRIEALRCLKRHLARRVWKLLVNSEREISMTTVDTQRGKLTPQFAVAA

SEQ ID NO: 251682 - protein, 355 aa, unidentified
MRILSLDLSKYKTVACDYEAETGRHQFATVLTTPKGLHDLIVDREPDRVVIEICSIAGWVCDLVRSLGIEMQVASTNDERWHWRKVKTKNDRRDGLKLAQLSARNELDLVHVPRSEMRQWRALIAYRQHLVQRRTKIKNHIRELLLREGQLLPRHRSAWTQDALAALEAMVKPLREVSMDELWRGELEVELAQFKAVQAQLTEVVAKLDALGAANHNVRLLQTASGVGPRLAEAVVTMFDDPGRFRRGAAVSAYIGMVPKQWDSGETERLGKITRHGNRLVRSLLVEVAWCALRHNPWARETYQRISGGKKSRKKIAIVAVGRKLLVRCWAMLRDQTPWHWEGQSAVLTPRAPTA

SEQ ID NO: 251683 - protein, 331 aa, unidentified
MQKHYIGVDISKDTLAVAYFTSDNSRIYTEYKNTKKGIGHLIKMARKLTNAHIVLEDTGSYGKRLLHTLFTAGIPCSMLTSSQSKGFRDALKSLNKTDPGDAAALAVYGERMQPPTYELPLPEQEQMSQIRTYIKGLQIDKNRIENKLHALEHEMTKNKFVIKKLKESLDACKKNIDEAMNQLTDLQSEQNKEAIKNAESVVGIGPKTALFLVAMTDGFKNFDDAKKVAKFFGLCPTTFESGTSVRKRSRISKKGNGYIRALLYMCARSAKQHNQACKELYERLRAKGKPHKLAMVAVAHKLLRQVFAVVKEQKTFDRNFYANIQKNANLA

SEQ ID NO: 251684 - protein, 339 aa, unidentified
MDVTTVGLDLGKDVFQVHGITGDGTVAFNRSIRRRHLLKFFEALPNCLVGIEACGSAHHWARELIAIGHDVRLMPAAYVKPYVKRGKTDAVDAAAICEAVTRPTMRFVAVKSKEQQALLTMHRVRQLIVRQKTQMLNVIRGLLREFGHVIGNGPVAAMRFVKAFQTEDCPDIPDVAKSMLKTLCDQVVALDERVTFYDKLIEYHSRIDERAKRIRTVPGVGPITASAIVATIGDGKQFKNGREFAAWLGLTPLNRSSGGKERLGRISKKGDRYIRRLLVIGMTSQVQRSRGYPERVHPWIMQLLERKPMRLATIAMANKAARIIWAILTKGTYYRQVAA

SEQ ID NO: 251685 - protein, 388 aa, unidentified
MNLNRDKLLSTNIPNTQDGATIIESKLCDLLMKHSLSKIIVVLESTGVYSAHLATHLSNSKFLSIYDSKVFIINPKISKNYRRSFSDMDKTDPKDAFVLADIARVGRTDGLTPFKGAQRLALERLTRHRLHIAELLSTEKTYALNNVFLKFSEFESLFADNFGKTAVDLLLEYHTTDDIIQSSLEDLTAFIIKSSKNRFSDSQAIANKIKAAARASYRLDKLAYDPINFSLASSINVINCYEAEIKEIDKAIIRQVAGFNQNHYDVLLSIPGIGKVYAAGILAEIADINQFESDDALAKYAGITWRKTQSGKFEADDTQMTKTGNKYLRYFIIQAANTARQFIPEYRDYYQKKFDEVTTHQHKRALALTARKLIRLIYGLLSTNRLFQ

SEQ ID NO: 251686 - protein, 338 aa, unidentified
MHPTIIGLDLAKHVFQAHGVDAAGKAVLRKKLRRSELIAFFAKLPSCVVGMEACGTAHYWGRELTALGHQVKLMPAAYVKPYVKRGKNDEVDAEAICEAVTRPTMRFVPVKSAEQQSILMLHRTRDLFVRQRTMLVNSLRGQLAEFGLIAPKGVWRVPELEALAQDGELPEPARACAELILMQIEDLQSKIKAIERTILARHRANELSLRLATIPGVGIITATALVATVANASAFKSGRHFAAWIGLVPRQNGSGGKMALGGISKKGEPYLRRLLVLGATAVVRYVRNKPELAGWVNALLARRPARVVTVAVANKLARIVWAIMQRGGTFRERPFGIA

SEQ ID NO: 251687 - protein, 331 aa, unidentified
MIQIYGIDLSKEKFNVSFVGPRGSLKDLEVKNSYSAICKFLTELNKEVTLCIEHTGIYGDLLIFLANCFCIPICAIPGYKIKHSLGIQKGKSDPIDASRIREYGERFQDKLVETRFCSEQLHELKELHSLRDMLVKQRKMLQTHGIEKNKAPFCSVKVKLISDDIMKKLDDQIRETEKQIQEIILSVKEFAENSRLMQSIKGIGPVTANELIIKTHNFKKISTAREASSFAGVCPFPNSSGKMVKKSKVSPMSDKKLKSLLFLCASSAIQHNKDMKHYYHRKKAEGKPSYLALNNVANKLLRTVYAIITSRENWDPEHICLDPREKEKKAA

SEQ ID NO: 251688 - protein, 360 aa, unidentified
MFIERTSAGLDVHARSVAAAAIDGLTGELFQAKLTPSYDHITSWLKDKPGPVAVAYEAGPTGFGLYRHLSAAGIRCEVVAPSKIQKPAGDRVKTDAKDAIHLARLLRLDEVTSVAIPTVDREAARDLVRAREDCRGDMMRARHRLSKLLLRHGIVYYGGTAWTGRHDVWLRHQRFENPTTQVTFESDYDAVLVATARRDRLDRQIETMAADSEFTPMVRRLWCLRGISTLTAFALAVEIGDWHRFTGSTIGSFVGLVPSEHSSGSSRAQGPITKTGNGHARRLLVEAAWHHRPRYQPGKTIRDRWDLASPAARARGDLGNRRLHARWVTYIDRKKKATVANTAIARELAGWCWSLALLEE

SEQ ID NO: 251689 - protein, 329 aa, unidentified
MGQPTTFIGIDVSKDTLDACLLAPGGATRQAAFPNDARGHAALLAWADRHTAGAERHFCLEATGPYSEAPAAALAEAGRRVSVANPARVKAHAVAAGQGNKTDPADARAIAEFARDRDPPAWRPPAPEVRELQALVRRRDDLREMAAREKGRLDSPALTRAARQSIQRAVKFLGREADRMQAQADALIAASPALRVDRDLLESIPGVGRQTAATVLAELPPVERLPSAESAAAYAGLAPREFRSGASVRRRTRLSKAGNARLRKALFLPAQTAVRFNPLLKEFFARLVGAGKPKMQAVGACMRKLVMLCYGVLKNRAPFDPAWASKKAA

SEQ ID NO: 251690 - protein, 379 aa, unidentified
MRNDSTVYVGLDLHKDSITVAYAIDAGEIELLGKTGTTGADIDRLCTRLQSKAPHVRVVYEAGPCGYGLYRQLVQKGFDCMVCAPSLIPRKPGERVKTDRRDAIKLARSLCADDLSAVYVPGIEDEAFRDLARAWAAAREDLRRARHRLKSFLLAHGVRYTGSANWGEAHRRWLGRCSFPSAWQHLAFDEHRRTIEDRLAQCARLETALREAVISWRFYPVVLALQAMRGVQFVTAVGMISEVGDLSRFEHPRQLMAWLGVTPSEHSSGGKRRQGSITKTGNSYARRLLVEAAWSYRHPARVSPEIQARLEGLPKAIIDRAWDAQVRLCRRFRRLTARGKPINITVVAIARELAAFIWDISRLAMALAIPRSKPPAACV

SEQ ID NO: 251691 - protein, 375 aa, unidentified
MSEITRALIARVGVDLAKQVIQVHAVDASGRCIVARAFKRDQFFAWCAQLPAGCMVAMEACSSAHYWARKLRALGLDPRLIAANFVTPYRMEGKNGKNDATDAAAICEAASRPSMRFVPIKTCEQQGVMSLHRVREGLKEERTACINQIRGVLTEFGMVFGKSPKVLRAVLADVIEDASNELSTLARLVVQRAFEHWRELDDHMRWCDRQVGQHVRASPAAKRAAKVTGIGELGASALTAGVGDFTQFKSGHQFGAWLGVVPRQASSGGKIRLGRITKRGDDYLRTLLIQGAKSAVMNADKRDDPTSRWLVQLTARVGWQKACVAMANKNARILWAVMTREEGFDPRHVSIKPQVKQAARQSVVAAPPGTVACAA

SEQ ID NO: 251692 - protein, 347 aa, unidentified
MRFYAQQHLYYCGVDLHARSLYVCILDQAGDVQVHQNLRADPQAFLQLVAPYRQNLVVAVECMFAWYWLADLCAREGIPFVLGHALYMKAIHGGKAKNDRIDAHKIAVLLRGGMIPMAYVYPARMRATRDLLRRRMHLMRKRAELLAHIQNTASQYNLPAFEKRIAYESNRAGLSAHFDHPVVRKSIGVDLALIEHYDRLLKELELYILRTARQHDPNALYRLRTVPGIGKILSLVLLYEIHDIRRFPTVQDFASYARLVKCSKESAGKRTGTSGTKIGNAHLKWAFSEAAVLFLRQNPTAQAWLKRTASKHGKPKALSILAHRLGRIVYYLLLRDEAFDMQRFMAA

SEQ ID NO: 251693 - protein, 410 aa, unidentified
MERMLERCAGLDVHKKTVTACVRVPGTHGDRTQHVRTFDTTTAGLLVLRDWLAAHAVTHVAMESTGVYWRPVYSVLEDAFACILANAAQIAQVPGRKTDVKDCVWIAQLLEHGLIRASFVPPAPIRELRDLTRYRKVLIQERTRHANRLHKVLEDAGIKLTSVASRLLGVSGRAMLDALVAGTTDPEVLADLARGRLRQKLPALRQALVGRFRSHHAFLVSQLLAHVDYLDEAIQTVGGHIDEVMVPFTDELARLDTIRGINKRTAEVIIAEIGVDMTVFPTAKHLASWAGLCPGHNESAGKHRSGKTRPANRWLRAALIEAALAASTRAAPGAFAARYRRIMPHRGHKKAIVAVAHAMLVTIYHQLTRQTTCHDPGTDYYDRRHAERLRRRALQTLERQGYRVTLEPAA

SEQ ID NO: 251694 - protein, 428 aa, unidentified
MNTPTSNPPVVAWVGLDWADQRHEIRLQAAGSPRLESFSVEQKPEAFQAWVAELRARFPQGRIALALEQSRGAVIYALMNYDFFLLYPIPPKTLARYREAFASSGAKSDRSDADLLLELVRTHGDRLRAWQPDDAMTRQLRLLVEYRRKTVADRTRLTNRLTDLLKTYFPQALDWLGDLRSLAACEFLGAWPTLQAVQGANRPALRRFFHDHRRLSAEEREKLLDQIRHARPLTQDRAVLEASELMTQTLVEQLRAVISALARLDQALEELFGQHPDQQLFDRLPGAGEALGPRLAAAFGTDRDRYQSAEEIQQFSGIAPVTAASGKMRWVHWRWACPKFLRQTFHEFADASRKKSLWARAYYQQQRQHGVSHHAAVRALAYKWIRILYRCWKTRTPYDEALYLRALQRRHSPLWLAAASLSTQEAHP

SEQ ID NO: 251695 - protein, 411 aa, unidentified
MQTLVERGCGLDVHQATVVACLLIVGKDGKVQKQMRAFGTTTHELVSLREWLLAQGCTHLAMESTGVYWKPVYAILEGALEIIVANAQHVKKVPGRKTDVKDAEWLADLLCHGLLRPSFVPPRPIRELRDLTRYRRKLVESQAAERNRLLKLLESANIKLASVATDVFGISGRLMLRALIEGKASPKEMAELAKRKLRSKIPELELALEGRVEEHHRFLLKLQLDRVESVEKDLEVLEQHIRQKLEPYAAQLSLLDEIPGVDWTLAAVIIAELGVDMSVFQNVSQLASWAGVCPGNNESAGKRKSSRIPKGNVYLKTALVEAANAAAKAKGTYLRDKFYRLKARRGYKRATVAIAHKILVAIYHMLSQQVSYNDLGDLYLDKLNKHHLTRNLVHRLERLGYTVTLTLQEKA

SEQ ID NO: 251696 - protein, 373 aa, unidentified
MSESCVVYRSLVGVDLHKTTVTLVAVDAQGNVIAKLTIATKCIEKITGWLRSLPDPVWMAVEACPFVEWFIDRFRACVFRMDIADATELARLRGKRRKTDPNDARDIAERLAAGRCPLGYIADDELLQLRKLGRHWRQLSHLLSRTKHAMRSMFHAANLAGPKVLDAAAAHRWFLGQRHLLKPAGQQAFADFLDTLALVERQRERLRREITLANRCETFRDTVELLKTVPGIDEIWACVIVAEIGPFDRFPNADALEFWAGMTADLKESAGRRQSGNITKAGSRTLRWALCKAAVTLCQSDAGQEAIRQRVIRRTGGIKPKANVAMGRRLLRVLFAMVRDKTPYHNARPVARNTAANQARAAKRARKTGKEAA

SEQ ID NO: 251697 - protein, 370 aa, unidentified
MTDGMRSGGCAVLAAPTMWGASHHPEVVPRPRAVVMGLDQHRAQITADWIDTRTGEVERARIAPADRAGVRRFLGRFRGLPLEATLEATTGWRFVAEELRAIGAEVHLAEPAETSARRGNKKRAKTDRADARHLRELLLVGRLPESWIPPDHLLDLRARVRLRHALVNQRGEWQQRIHSVLYHHGMPQRRELLTRANRAWVEQAPLPATAREQVTVALTLIDALHAQIDPITRELRAYAPRQPGCRALMGHYGIGPLTAVAILAELGDARRFSSSREAVRYAGLDITVHQSDQRRAPGHLSRQGPPALRWALFEAAQAAARRTGSPDRAYYQQAAERLGGNRACLAVARKLLKRSYHTLRELGEEALTPA

SEQ ID NO: 251698 - protein, 340 aa, unidentified
MTHIAMDVHRKRSVLAYQTPAVEEPKIARCYTTRAGLGKVLGALPRPWVVCVEATRQSPAVVRWLRELEVDDIQLVDPKGLKAFVRGKPKTDARDAKEMLVLLQMGRLPKAYLAPPAVQEVRALTRTRGYVRRASTSLRNQVRALLNQHGLEVPARDLCGVGGRRQLAECVAQLGPLGQIAADQLSPLLLGTEQALDVLDAQVREELAHQPVARALTALPGIGPVMALALAAELGEIERFEDVAHLWSYAGLAPRAHDSDDYQAERHLPQRCNKRLRHLAVQAAQAAARSRQPSPARRTYQRLCRRGLHPNTAKVAAARDLLKDIFYTWHQEVAPSPAAA

SEQ ID NO: 251699 - protein, 429 aa, unidentified
MSYRIAGIDVHKKMLAVVVSDVEIESEFQFERRMFSSNPEQLRSLAAWLVEQKAEEIVMESTAQYWKPVWETLERYWKPLCEKREGARRRSGTLHLAQALSNRGRRGRKRDFVDAERLVKRLVARELTLSFVPDPEQRLWRTVTRKKYQLRRDVVRLHNQLEALLEEAHIKLSSLVSDLLGVSARRMLKALADGETNPAALAALAHERLRATPEQLCDALGACTELKPVYRRLLKMALEHLQLLEQQIGQLDQELATLLHPHQDAVQRLAEVPGFAVDSAQQIIAEVGPTAATFPSEKCLSSWVGACPGEEESAGVNYSHRSPKGNRHVRRLLNQAANAAIKVKGSIFEIIYRRCVPRLGHNQTIGVIAHRHCRLIWLILHQGTRYEERGPAVNVRSKYQRTWRMIRQLRSLGYRIESPNPQPSQALAQ

SEQ ID NO: 251700 - protein, 429 aa, unidentified
MNYTQNDKIEQVTDTTLVVGVDIGSQTHYARAFDNRGRELCRKVFTFHNDLEGFNSFYDWAEKLKAENEKKDVIIGCEPTGHYWFAFQNYVAIHQMLLVIVNPFSVKKIKELDDNSPKKTDAKDPKTIAKLVVDGRYSIPYMPEGIYAEIRDLVYSRDRIMKQYNISANRIQRWLAIHFPEYLGLYSRFDAASGLAVLEKAPLPKDVIALGVEGIRRIWHDKKMRGRGVTEDRAKTLVEAAHKSVGLDGGIGTRSELYMLLEENRLWASQLEAVNAVLEETILKVQYVEKLLAIKGVGSVTIAGFIAEVGDIRRFKSPKQIQKYAGLELVENSSGKHKGRSRISKRGRRKLRKVLYQVMIPLLASNQEFRQIYDYYVTRVKNPLKRRQAMVAVSCKLIRIFYAVLTKGIDYDRFKMMTDIHRNDELIAA

SEQ ID NO: 251701 - protein, 372 aa, unidentified
MTSIIYVGMDVHTTNYTLCCYSMEDDRFFVEVQVEPDAKNILKYLARIEKQQSRDCRIVCGYEAGCLGYSLYHQLHAHGIGCVILAPTTMMTKPGKRIKTERRDARLISKCLAFHTYSPVYIPTEVDDAVKEYIRMRDDANSALTRVKQQIIAFCIRHGKIHDGKSYWTNKHLEWISSLDLGNKILSEVLQEYLIRYYQLREQVDVYDMRINELAQAEPYRQKVEKLGCFRGIAAHTALSFCVEVGDFRRFATAQQFASYLGLVPGECSSGDKQQYTGITKAGNSHLRKLLVETAQVFGRSATKSRKSVALKERQARCDSLTVAYADKANARLKKKYFKIAMRSKVNIAKTAVAREMACFIWGMMTDNISCA

SEQ ID NO: 251702 - protein, 375 aa, unidentified
MNDHSEAFVGFDTSKLRNAVAIADGVRGGEVRFLGEFENSAAATAKLVKKLAAKYQRLTFCYEAGPTGYGLYRQIKNLGPDCIVVAPSLIPKKPGDRVKTNRRDALSLAKLLRAGELTAVWVPDRGHEAMRDLTRARETAMMDLRSKRQQVSAFLLRQGLHYSERKKTWTKTHMNWLASQKLEYAEQRLVFEEMMLAVRQAQERLERLEQAIRVAVPDWSLAEVVTALMAMRGIDLISAATFLAEIGDLSRFQHPSELMGYLGLVPSEHSTGDKINRGPITKAGNRRARRMLVECAWSYQHPPRVGQEKQEKVAAASRAVREIAWKAQCRLHGRYRALVRRGKLKTVAITAVARELAGFIWAVNRAITTARAVAK

SEQ ID NO: 251703 - protein, 355 aa, unidentified
MTSVGFDLHKRYITACALNAAGEIIAEVRQLSTALEAVLTWLGALPGPVTIGCEATLYWEWLATRLAEHSYTVRVAHAFHVKLIWQARAKTDPIDARKLAELLRVDLFPAIWIPDLETRRRRQLLRGRAFLVRERTRLKNRIHGHLMSENLVPPGADLYGKGGRAWLAAAPLSPVLRAQTERLLTLHDAITVEIQGLDGDVRRAARGNPTVKQLTTMPGVGVFSALFVQAEIGSIDRFRSSHELAAYAGLVPTTRSSGGKTAHGGLGKASNRWLKWIMVEIVVTLKLAPGPVGTYYRHLLRAKGKPKAQAAAARKLCCYLYWMLKQGWTYDEWLQQHVNSQRSEVRPVQRMGAMA

SEQ ID NO: 251704 - protein, 336 aa, unidentified
MQVYGIDLSMEKFDVNYIDQDGNERKQEVKNRLNGISKFLATVSSDAVLCAENTGTYGDMLVFLSNQKGINISLVSGYTIKHSLGMIKGKSDPIDAGRIREYGERFYDKLIFKEYDREEMVELRSLYSLRSQLVKSRKILRTGEHSRLNVPMQSISVKEHVTNALAHLDAEIKEVEKEIEGIITSDRELNENYALSVSIKGIGPVITTELIIKTGNFKTIDTARKAASYAGVCPFPNESGKMVGKRKPSSFADRKLKALLYMGAKTAVKHNPEYSLYYQKKKLEGKPHYLIMNNVSNKILRTIYSVVKNKTPYSQDYLCLDPRELEKNNSSAKKVA

SEQ ID NO: 251705 - protein, 414 aa, unidentified
MKLVYPVCCGVDVHKSFFIATIITTTSDIQPNYSRKRFSTFNNDILRFAGWLSENNCNDVCMESTGKYWIPVFNILESRNINVTIANPKWVKAVKGNKDDKKDSKWIGDLFRLGLVPGSFIPSKPIRILREFTRYRYKLVSMKSSEKNRFQNAFTVCNIGLDSVVSDMFGKSATLITDYLLSEDTFNPEYCVSLLQRSLKKKADSVLESIEGYQISKEQKLRINTVRSHMTYIENSIKYLDDTIDSMVTPYESLITLMCTIPGIDRRSAIVVISEIGDDVSLFGSSKRLCSWAGLTPGSNESAGKKKSVRISRAGVYLKPALVEIAHSAVKSTKSPYYKNKYEKLAKRRGKKRAIIAIARMILTAIYNMLSTGEVWNPCDLFKIDMPDELKAKQEEKAVKQAIKFLEKRGYAVS

SEQ ID NO: 251706 - protein, 345 aa, unidentified
MKITTVGIDLAKNVFQVHAVDERGKAVLRKQLRREQVAAFFGNLPPCLIGIEACASAHHWGRTLQRFGHTVRLMAPQFVKPYVKTNKNDAADAEAICEAVGRPNMRFVPVKSIEQQAILSVHRVRQGFVKARTAQANQIRGLLGEFGLIIPQGISHVAKRVPALLEDASNELPAAFRQLIADLTRHLKELDQHVKELEAQIIAWHRGSELSRKLEKIPGIGPLAASALVASIADANSFDNGRQVSAWLGLVPRQSSSGGKSTLLGMSKRGDAYLRTLLIHGARSAILAARRKSQNTNVWLANLLTRRHPNIAAVALANKNVRTVWALLAHGREFKADYASRVATA

SEQ ID NO: 251707 - protein, 427 aa, unidentified
MKYAPIQVLPDVPAGGVFAGIDWATADHVACVVDMAGRVLDRFSAAHDRAGIEMLIARLRRSGITEVAIERGDGVLVGALLAAGLTVVVVSSHRVKNLRARYRSGGGKDDRFDAFVLADTLRTDRARLRPLVPDTPATLALRAAVRARRDLVAHRVAACNQLRAHLAVAFPAAVGLFFDLASPISLRFLASFGSQDAAAQLDEQAITAWLKTIPERGKTAPASVLCARLRAAPDGVTGEDGAAHAVITAALAATAGMLATQIKVLETGIGAQLAAHPDGHIFTSLPRAGTLRAARLLAEIGDCRSRYPGPQSLAALAGVTPVTRESGTHTAHAFRWAVSRPLRDAVCSFADGSRHASPWAESVYQAARARGKDHPHAIRILSRAWIIIIWRCWQDGTAYDPARHTALQHILAQQAAQAATAGPGDTP

SEQ ID NO: 251708 - protein, 410 aa, unidentified
MRLFVGDDWAEDHHDVELMDAAGRVLAKKRLPEGVAGMARLHELIARHAQDPDERGEDAEVVIGIETDRGPWVAALVAAGYTVYAVNPLQASRYRERHGVSGAKSDTGDAHMLTDMVRTDSHQLRAVAGDSADAGAVKAVARTHKTLIWDRTRQVQRLRHQLREYFPAALAAFEDLDTPDALELLGKAPDPARAAKLTRAQISAALKRARRRDIPGKATAIMAALRSAQLGQPPAVAAAYAATVRSLIAVITTLNEQVKTLQGEVEADFGRHPDAEIYLSQPGLGPVLGARVLGEFGDDPGRYASGKARKNYAGTSPITRASGKKKIVMARFIHNDRLIDALMAQAFAALTASPGARALYDAERARGAEHNPALRKLANRLVGILHGCLKTRTLYDEATAWPQCQNKLAA

SEQ ID NO: 251709 - protein, 350 aa, unidentified
MQGTGRWIGLDLSKETYEMCYFDQKGKVGRSGGETTKAGRAKLYAKVKPEDIVAMEANSLAFVMEKEMRAIGCTVVILNASQLSVIYASTKKTDKEDALKLARLVKIYEKEDLPIVDVPTDKEYYRRKLIKEYKTLKGDRTREINRLHALFVQCGITTIKRSNVQTEVNRQDVLPQLFEYEARQAKRVCERLRVLEAQIEELDQLIKKECKEDKDIQRLQTIPGVGDKTALAFAAYVGDGKRFNNGNEVANYVGLVPRVDCSGTINKYGHITKKGNKIVRALLYQAAWAIVRSSHGGALKAKYFYLTEHGKGKKISITAIARKMAKLMYLIMKNKEEEYQEVPVSALKAG

SEQ ID NO: 251710 - protein, 407 aa, unidentified
MIFVGVDWAEAHHDVHVEDGDGARLGKARLPEGVEGIARFHDLVAPFAEQPAEVVIGIETDRGLFVAALVAAGYDVYAVNPMSTSRYRDRHSASGAKSDAGDAKVLADMVRTDRHNHRPVAGDTEGVEALKILARAHQRMVWSRGRQTNLLRSTLREFYPAALVAFEDLSSPDALEVLRIAPTPTLGANLSRSKIAAALRRGGRQRRIDERAAAIQEALRSEQLQASAVVATAMGASVAATVAVITEMCTQIAQLAVELEANFEQHPDAEVVRSLPGLGTILGARVLGEFGDEPNRYATAKSRKNYAGTSPITRASGTKRAVLARHVRNQRLADALYLWAFASITASPGARLYYDRRRAAGDTHHQALRALGNRLVGVLHGCLTHHAAYDEAIAWGHRAQDNLQEAA

SEQ ID NO: 251711 - protein, 370 aa, unidentified
MQEDITFIGMDAHKKKIQVAMLMPDMGVTEWTVPNEPAAVRRMVKKIQREAKGEVKSCYEAGPCGYELQRRIRAQGMACTVIAPSLIPVRPGDRIKTDRKDALKLAELYRAGLLTEVAPPTEDEEAVRDLCRCREDVRQDLLRSRHRLSKFLTRRGYRFTQGKKNWTNLHRKWLRSLRFERPADQATFDAYLLAVEQLEERRRTLEAHMDAFAVQEPYQEPVAWLRCFRGIDTVTALTIVAELHGFSRFNSPRQLMGYLGLTPSEYSSGEKRRQGAITKTGNVHVRRVVVEAAHHYRHKPAVGQRLKKRREGQPGWVIAHADRAMERLHRRFMRMIMGGKHYNKSVVATARELVGFIWAVLYVRVEEGKC

SEQ ID NO: 251712 - protein, 348 aa, unidentified
MIAIGADVHKRTCTLAMQGEDGQLTMLPSMENTRENWLHRLAKLPPQAEIALEVSTSGHFVMSVLEEAGWRERAHWVHTAGVDSLKKQKNDRLDAKRLARKLSVAERDPLPEAWFPPPPIRELRLRARQRCWTAVGRAQCRNRLRSLLQMYGLRPKGSPFTPQGRAWLEKQPLPPAAREYVERTWRVHDFLSAERESSEASLVAASASFPEIARLQTIPGLGHILAAVIWSEIGDLRRFASADALVNYTGLVPSLYESGEVSHHGGITRQGPAWLRWALITAAHAVTRSKSPLARRYWRLRRRKRPNVAKTAVAGSIARCVYGVLKHGGAYQEERWGRQTGDELKQEA

SEQ ID NO: 251713 - protein, 367 aa, unidentified
MKKVSTAATKQGRNISQPTRTIGLDLGDRNSCYCVLDESGQVQLEQRVRTHAKALREIFGGIPRSRIALETGTHSPWISRLLSELGHQVIVANARKVRLIGESRKKDDRLDAQTLAGLARIDPGLLCPVKHRSAQAQADRTVIRARAGLVRARTALVNTARSLAKSYGERLRGCNVRNMNPEKAEALSPELQRALEPLLSAIEELSERISEYNERIEALAEESYPQVKLLQQIKGVGTLIALTFLLTLEDPHRFRKSRDVGCYLGLQPGRRNSGQSEPQLHISKEGDPYLRTLLVQGAQHILGPFGVDCDLRRWGLKLAERGGRTAKKRAIVAAARKLAVRLHHLWVSGEVYDPLHNSSRVIVSAAA

SEQ ID NO: 251714 - protein, 327 aa, unidentified
MNSICLSTDSLPVLGLDVAKKSVQAELRRAGGKTVRFGFENNAKGFAQLARVLKEHNVPKVWAGLEATGPYSHALALWLHGAGHRVSLLNPRRVKQYARSAGKRNKTDLLDAAIIADFVCAHRPAPWQPPTLEVAQLRALVRRREELSLMLQAEKNRLEGVASNVSCSLRRIIATLSAERARLEKLITQQIRSHQQLSCDHQLLCSIKGIGSLTAAILLAEMARPGQVERARQAAAHAGLVPRREESGTSVRRNRGLGKEGNRYLRKALYMPALVAIKYNAPLRHFASRLRAAGKPKMSIVCAVMRKLVHIAFGVLKHQKPFNPSLA

SEQ ID NO: 251715 - protein, 365 aa, unidentified
MESTHLLPNLSISGNIKMGYIMLKTNIIGIDLAKNVLQVCHISTHGELLSNKAVSRQKLKELIAKSKPSLVAFEGCAGCHYWGRYAESFGHEVRIINPKKVKAYVDGHKTDANDALAIANASLQIGIKYSKPKSVDQQTLMSIESSRQFLSKTVVSLGLHIRSLIHEYGMIAAKGPKGLAELVTTALDNEQSNLPASVSIVLAKLWQQYLQIKQELDDLQKSMNATTRQIEPCKILMELEGVGETTASMLYATLGNGSQFVNGRQASAFVGVTPKQYSSGGKVTMVGIDKVGGVKDLRSMLYLGAMAYIYRLPEQPKTLKQDWLIKLVNRVGFKRACIALANKTVRTAWAMLRNETKYQPQTLLY

SEQ ID NO: 251716 - protein, 403 aa, unidentified
MVFLGIDWAEAHHDVCLLDEQGKLLGKRRVVDGLEGVRQLHELVAEQVPEPEQVVVGIETDRGLLVQSLVATGYQVYAINPLAVSRYRERHSTSGAKSDPADAKLLADLVRTDRHNHRPLSVDSELAEAVKVLARTHQNLIWSRQRQLNQLRSLLREFYPAALEAFAGDLASADAIAVLERAPTPDQGRSMSQGQLVSALRKAGRERNLVVKAAQIQACLRRPQLEAAARLTQAYGRSVTALVRLVRQLNQELASLEQELSASFELHPNAEIYLSLPGLGKVLGARVMAEFGDDRTRFQNPKARKNFAGTSPITKSSGKHKAVLRRFACNHRLLDACYFWAFASLRRSPGAKDYYRRLRARRQSHKQALRALANRLVGILDGCLRHRQLYREKVAWPLLEAAA

SEQ ID NO: 251717 - protein, 365 aa, unidentified
MARIAHTGPIHLGLDVHRNTISVATLPPDHTSAEVEQIPSDEAAVLAFLGRFAEPSRLRVCYEAGPTGYELARLLQRQGVACQVIAPSLIPRAAGDKVKTDRRDCRRLARLHRAGELVAIRIPEPREEAVRDLCRARADLVDDRSRARRRLQAFLLRHGRVYRAGACWTGKHQRWLGTQRFDDPQLQATFTHYRAVAASRDAQVTAIEADLAEAATTPPFAEAVARMAAYRGVGQLGALSLAAEVGDWQRFAHPGAFMAFTGLVPSERSSGDSVWRGHITRTGSKHLRFQLVESAWSYHHRPLIAGALRERQQHVGADTLARSWTAQLRLCRRFRQLERRKHITGVAVVAVARELAGFLWAEMQT

SEQ ID NO: 251718 - protein, 418 aa, unidentified
MEVVHARCAGLDLSKRDAKVCVRIAGKGRRKTTETVTTWGATTNQVLALREHLLAQNVTVVVMEATGDYWKPFYYLLEDGLDVMLVNARHAKNMPGRKTDVSDAAWLAQLGAHGLVRGSFVPPPPIRQLRDLTRARTAITRERAREIQRLEKLLEDAGIKLSSVASDITGVSGRAMLEALIAGQHDPAVLADMAKRKLRHKIPELTEALTGRFAEHHAFLARVHLDLIDRHTDAIDGITDRIEEVMAPFRRARDLLTTIPGIATLTADVIIAETGADMTRFPSPGHLASWAGTCPGSNESAGRVKSTKTRPGNPYLKGALGAAAMSAAGSQNTYLAAKHRRIAARRGPVKAIVAVEHAMLIAIWHMLTDNHEYHDPGGDYFTRRDPDRARRRAIDQLRAIGYDVTLTPHQERQLPEAS

SEQ ID NO: 251719 - protein, 346 aa, unidentified
MRIIGCDYHPSWQQVCWLETATGETGEQKLEHASGEAERFYRQLREPALIGMESTGNCQWFLELARRLGHDLWVGDAAKIRASDSRQQKHDRRDAALLLKLLLENRFPRIWVPSSEEKDLRQLLIHRYKLVRIRAQVKNELQHLAMNQGVTRKRKLWSKTGEKVLRELPLLPWTSRRREDLFRVRAMLDAQIAPLDQAVAEAAEKNEKARLLMTQPGVGPITSIAFVLTMGDVSRFQRGKQVASYLGLIPREYSSGGHQRLGSISKQGNRFLRMLLVEAAQNAVRYDPQMRNEYLHRCHRMAKGVAKVAAARKLAIRLYWMLRTNQGYPEVVRVESSSRVPLVSAS

SEQ ID NO: 251720 - protein, 350 aa, unidentified
MIIIGADYHPGFQQIAYVDSETGELQERRLQHPEEAEKFYRELAAQGMKVRVGMEASGHARWFERLLGELQFELWIGDAAEIRTKRVRKQKTDRQDAQLILQLLLEGRFPQIWVPSWENRDVRQLLWHRHRMVQARTRIMNQLQAVALNEGLRAKKRLWREAGREQLAALRLAPWATRRRQDLLELLDRLNPTIGELTKAVEEEAEKCPEAQRLRTHPGVGPLTALAFVLVIGTAERFDCGKQIASYLGLVPEEDSSGERRRLGHISKQGNSLLRFLLVEAAQVTVRSNQEWRSKFFHLAMRRGRKIAKVAMARRLAVRLYWMWRKKWDYEQLTKFGAHAGQPGNPHGVQ

SEQ ID NO: 251721 - protein, 320 aa, unidentified
MMAQNDLAVVGIDVAKDKVDLCIRALALRQTCPNTAQGRRKLVGWLRKHQVGKAVMEASGGYEREWRKVLHDAGIEVRIVDPKRVRSFAQSAGRLAKNDTIDAEMIAWFAETFSETPSQTHDAAQEELAALVKARLALVELKIRLQSQSVHAAPGPVQKAQARVLKTLATEIEKLELAIAAKVKATSHLAERAEIIESVPGFAETTSAILVAGMPELGQVSDKIAAALVGIAPYDDDSGKRRGERHIKGGRRWVRNAIYMPCLGAATQNNPVTKAFYRRLIAKGKEPKVALVACMRKLICILNVLIARRQKWDATRYIVA

SEQ ID NO: 251722 - protein, 353 aa, unidentified
MVVIGSDVHKRTHTFVAVDQAGRKLGEITVKAVPMGHDKAIRWVQERFGGEVLWAIEDCRHLSARLEIDLLDAGQAVVRVPPKLMAEQRRIARTRGKSDPIDALAVARAALREPGLPVATHDEASREMKLLVDRREDLVGERTRMINRLRWHLHRIAAGDPAADPKSKSLKQVSVRRRLATWLGDRPGIDARLARDILADIDRITPVINALEKELTALVEARVPQLLGIPGCAALTAAKIAGETAGVTRFATEAKYAMHAGVAPIPVWSGRTHGRVRVNKSGNRQLNTALHRIAITQLQRPGLGRTYYNKRIAAGDSTTEALRALKRRLARVVYQTLKNNPSTAAETLLPSAA

SEQ ID NO: 251723 - protein, 435 aa, unidentified
MSRKAYRATRVNDVNWEQIARGKEGLGATLGVDVGKFDVLVVCRWADGRFERPWRIKNPWEIATLVALVRQVKADRKLVVAMESSGTYGDALRQALGDSGIEVRRVNGKAAHDYAEVFDGVPSQHDGKDAAVVAELAALGKAKPWAYQAADSWEEELTYWVEEMVAQRQMVTLWQGRLEGLLARHWPEASQVLKLSSGTLLRILKRYGSPQALAEDAGAAKQLARWGRSLLSPEKIEALLAGARSSVGVRVGPWQQRQIQEYAEKALAARQQSDRARRRLGQLAEGQTVLQAQGKVVGVPTACVLWVSTGDPRSFDSAAAYRKAMGLNLVERSSGTYQGLLRISKRGSARTRQWLYFASMRLVQKCGVRPWYEAKKARDEGDARRVLVAVMRKLAVALYHVGVRDEEFQPRRLFGRIDRRGGRSAGRPVSSAEPA

SEQ ID NO: 251724 - protein, 401 aa, unidentified
MQTIWAGIDSGKRAHHCVVIDHAGTVLLSQRVENDEAELLELIAAVTELAVDGEVCWATDLNAGGAALLIALLTAHGQRVLYIPGRIVHHAAATYRGDGKTDAKDAKIIADQARMRTDLQPVRGADQVAVDVRLLTSHRLDVIHDRVRAINRLRATLLEYFPALERTFDYSKNKAALTLLSRYTTPDSLRRVGVTRLATWLKGRGCRNSAKVAQAAVDAAHAQHTALATEAVGSALVTRLAARITAIDEDLAEIDAKIAEHYGQHEDAEILLSLPGFGPVLAATFLAQIGGTLDNFDTVDRLACVAGLAPVPRDSGRINGNLHRPRRFNRRLLRTCYLAALSSLKNSPASRTFYDRKRAEGKSHKQALIALARRRINVTWAMLRDHTPYAEPAVDSTPIAA

SEQ ID NO: 251725 - protein, 388 aa, unidentified
MQIVTDRSQAPTAIRTDLGAIFVSLELSRSTWLITSLSPGGGEKMSKHAVRSGDVAGLRMRFSQLKDKVQVRMGQVVPIIVIQEAGLDGFWIHRLLQDEGVESHVVDAASIATSRRRRRAKTDKIDGEALVRALLAYKRGEPRVCAMVRAPTPHEEDRRRICRERKTLTAERVQHVNRIKGLLFAQGVSDYEPLLRERRARLEKLRTGDGRPLPEHLKAQIGRELDRLELTLEQIKSVETEREAMLSPPDEGTPAPGAMLKSLKGIGPEFAGVLWSEGLFRSFSNRRQVASYAGLAPTPWRSGSVAHEQGISKAGNPRLRTTMIQLAWLWIRHQPRSILTLWFHHRVQLNGGRVRKVLIVALARKLLIAFWKYVTAGVVLEGAETTAA

SEQ ID NO: 251726 - protein, 410 aa, unidentified
MTDTTIAQAEPVLVAIDIAKARHEVLISVPGKKRRRRLTVLNQLEDFKRLIVTLSEYDRPVRAAFEATGNYHRALAYRLGNAGFDVKLVSSVALARTREALNNSWDKNDPKDAQVILHMMQIGNEQVYHDPLLCGTNDLQELSKTHDIVSRSKTELWHRVLTHYLPLYWPEAERFHRSSRSDWFFAFLERYPSPHFISTMSQEAFIADAWEVVGRKVSKERLLADIYQTAKSSVGLPIAPNSDAARMFRLVLGEGRSLIAQRNEIEDRAVELLKTNDDYHLLTSIPGIGPINALTILAEAGDLRRFQHHRQFLKFCGMDLATIQSGTFRGQTKLSKYGNARLRRTLWMAGQVAIMQKTNSFRDKFERYIAKDRQNTHLRRKTYTAIAAKMAGTAHGIIKRGEPYRPFFEG

SEQ ID NO: 251727 - protein, 365 aa, unidentified
MKKHSNLSATAQAAGRGINRFTIGIDVSDRSSCYCILDGSGQVCAEGKVRSTPEAFREQFGGMGPALIALEAGTHSRWMSALLGECGHEVLVANPRRLRLLTESDKKNDPQDARTLAELGWAKPALLAPIQHRSAAAQADLNLVRARDLLVEARTKLINGVRCLVKGTGGRITKCPSGQFTSRAHEQMPEEVRAAAAHLLEIIDELSEKIRYYDELLEHVAQTRYGYTFLLKQVSGVGTLTSLAYVLTIENPRRFARSRDVGCFLGLRPKQQDSGQRSPQLRITKAGDIYLRKMLVSSAHYILGPFGPDTDLRRWGLKLCERGGKNAKKRAVVAVARKLAVLLHHLWVTGEVYEPLRTAAAKAAA

SEQ ID NO: 251728 - protein, 462 aa, unidentified
MNKSSKKKQSKKSKQSELSVINSHAAGIDLGSREHWACVPSSSTESTNIQAFGCTTPDLIALADWFTSGGVTSVAMESTGVEWIPLFHILSARDFQVFLVNAKTVKTVPGRKSDVLDCQWLQQLHSYGLLAPSFVPEGDIAVLRSYLRQRENLITNSSTHIQRMQKALTQMNLQLHKVISDITGVTGLNIIRAIVSGERNPKILAELADKRIKSTSEQISKALTGNYREEMVFILHQELSFYEYYQQQILALDEQIEQCLSKFKSETTEPPPEPKKAKRNRSKKPSFDLHSHLYRIAGVDFTTIDGLDVLTVQTIISEVGLDPSKFKTVKHFCSWLGLCPGCRITGGKVKNSQTRQVKNRAANAFRLAAQAVSRSQTAIGAFYRRIKARSGAPKAITATAHKIACREGRRTARLFYTLWTTKESYLDKGADYYEQQYQQLTLKHISKKAESLGYQLVALPQP

SEQ ID NO: 251729 - protein, 415 aa, unidentified
MPTTELPHALATRFVALDVHRQYLVVGAVDLQQHVVLSPRRFGFAAFAEWATTHFTHADAVVLEATSNAWLLYDQLQPLVAEVVVAHPQAVKLIAAARVKTDSRDTIKLASLLAANLIPAVWVPPQEVRELRALVTHRNRLVQQRTQAANRLHSVLQRHNIDPPPGTPFAVHQREWWLALDLPFAEKLRVQQDLSLYQTLEALIQESEAELGRLSTCDPWVQQVPFLVQLPGLGVLSAMRLLAAIGEITRFPSAKHLVGYAGLGASVHQSGETNRGGRITKEGRSDLRGIMVEAAWVAVEHHPHWKAQFERLAARIGKQKAIVAIARKLLVTIWHVLSQQESDSHAQIEAVTRKLLNWISHTGTIPGKKRDRLLLLYDYLDQLGLSEEVEQVNYHGSTYRLSERQKQLRATQQKG

SEQ ID NO: 251730 - protein, 320 aa, unidentified
MQTPPEVLNIGADVAKDEIVVACALGSFPARKLANQRSALVAFLKGLPAGSRIGMESTGSYHELLAEAAHKLGFTVFVLNPKDARHYAKAVGLRGKTDRVDAELIARMVAHEHAKLHPWIPPTPEQREMARLISRRAKLSSLRQALVMSLKGLEGFATELKALRARFDQLLARIDERLKALLEASPERKQQLTHLRTICGVGPVVGAALVNTLERVPLRSADAFVAFTGLDPRPDDSGQHRGKRRLSKRGPAELRRLLYVAAMSAKKKPAWKPLFEHYRAKGLSSTAALVILARRIARTAWSMYTYKTDFDPARLTKCLT

SEQ ID NO: 251731 - protein, 320 aa, unidentified
MTSRGAEKMQNDTIGVDVSKDHLDVHRLYDGASRRFANDKRGHKALIKWLAETPVSRVVFEPTGPYHRAFERALGAAGVPFVKVNPRQARRFAEATGKLAKTDRLDAAMLARMGAMLELEARPARNETLLELKELYMAREALMKDRTAAKNRGKALTLSLLKRQNAQRLEQIDRQIATVEAAILQIVEADESLADRFAILISIPGVSNITAFALLIAMPELGSLEAGQAANLAGLAPIARQSGRWTGRSFIRGGRADVRQALYMPALVAARFNPDMKAKYAHLIETGKPAKVALTAIMRKLVVLANAILKANRTWTPRTA

SEQ ID NO: 251732 - protein, 348 aa, unidentified
MTLTIVETRAITGGVDTHADVHVAAALDVIGGLLGVQEFPATPAGYAHLLAWLGGFGTVCLVGIEGTGSYGAGLARHVTAAGVRVVEVDRSDRQDRRRQGKSDPLDAVSAARAAQSGRAAGVPKGRDGAVEAVRALMVAKRTARSERTQTINQARALVLTGPDDLRTRFTRHTPADLVAGLASLRPRPGDVVGYATRIALRELGRRAEFLDGQLERLDKLIVPLVTARAPGLLALYGVGPDTAALLLVAAGDHPERLRSEAAWAHLCATAPIPASSGKVTRHRLNPGGDRQANHALWRIVITRMSSHPPTRAYVERRTKEGLSKKEIIRCLKRYTAREVYRHLRPGPG

SEQ ID NO: 251733 - protein, 375 aa, unidentified
MIAATRPEMSVNEPTLYVAFELGKKDWKLAMTAGFCVEPWVRTVPSGDLRAVERVLRDGRRRFGLAAGTLVMSCYEAGRDGFWIHRALTQLGLRNRVVDSASIEVNRRARRAKTDRLDALKLVRMLVRVCYGEQRVWSEVRVPTVAAEAARQVSRERTALTQDQTRLVNQMRGWLATWGATLPARRRGDWWTRVRDWAGAALPAEVHARLARADRRLQGLEAQIAELDTQQQIAVTTAAPTSPVRQLVQLKGVATTSASVLLEEGLVWRAFRNRRQIGGLLGFAPTPYDSGDSAREQGISRAGNARLQAISIQLAWNWVRWQPASALTRWYQANFGTGKRARRIGIVAVARKLVIALWRYVTLGVVPEGAILKTA

SEQ ID NO: 251734 - protein, 354 aa, unidentified
MIIIGVDFHPEYQEIASVDTDTGEYQEKRLAHPKEAEEFYRCLSCVGPVVRVGMEASGHGRWFERLLEGLGVELWRGDAEVIRAKRGRKQKTDREDARHILKLLLKDDFPRIWVPNWENRDLRQLLWHRHRMVQARTRVMNQLQAVALNEGLRCKKRLFRADGRQQLESFQLAPWACRRRRELLEFLDRLNPTIAELSQAVEREAEKCPEARRLMTHPGVGALTALAFVLIIGEAERFQCGKQIAAYLGLVPLEKSSGNRRRLGHITKQGSSIVRFLLVEAAQVTVRSLPEWRSKYIHLMMRRGRKIAKVAMARKLAVRLYWMWRKGWDYEQWKKFGSYAGQPGHRYGVQSNTE

SEQ ID NO: 251735 - protein, 479 aa, unidentified
MGCRRLVGIDLGIASAHTVRVLDESGSTIAKRKAWPTVESLTAVETAALAGCPAGIRLEVIVEPTGPAWMPIAVFFSRRGHRVFRVSSAKAADLRRFLSRHTKTNGIDADTLARLALIDPDGLRPLELPGPERAALDRRVRATDRLTRLASEHKVRIKDLVRQLFPMTPLTGDLGVADLAVLERWADPNRLLTAGVKRVTAVIVKASHNHQGHTRALEWVTAAQAAVELYDGHPAVAFVDLAAEVATEVRLLRAVQAELAAHAAERERAYRWVDPCGLARSLPGVADIGGPALVAAIGDPARFPTGKQFRAFTGLTPRASETGNTDRKGQPMSKAGSSLLRTTLIRAADHARKLDPQLARIYHVQMVERGKDHLGANCVVAANLAERFWAVMNRGMPYVICDTDGRPVTAAEAKMIIAEQWAIPAEVRARRRSRKMGKAPQQVLEAHVKSDSRRVDKRGDLPQRPSSRRPATNVKQRTA

SEQ ID NO: 251736 - protein, 523 aa, unidentified
MSQITNTVLASSSPAFLSAHSSNEINLQKTISLLSSSEVGVEVTPTKEYGVGIDCHSKFLEINVLVKRGSGYFEYCREVDTSWTAIKEARNWVVHILQTCADPPVQLSEPLHYCIESTSTYHLPVLLAWEGKPCVVNPSLAGATKRKTDKLDARLLAVHDFTGIWRPFYVVSTEIQDLRVLINQRDYYSHAANRLGNRINSTILKFGFTIGRDGSVVRNETVRSFVENLISDHPKPCSTDLPPDRIPFSTRKVIAEEYQQYDKFMLLVTEYNKKIRDLAFSMNWPVRDGKTISGKELIPILMTAPGVGERTAITWLANIMDPTRFPNAKAVAAYCSLDPSLKISAQHVTSTKKRKGNKLLHSSLCMSASVIIGYHSEHFGRWGYRIYQQTGKWKKATNAVARRLATALYHMHLNAEPFSYEKYQMTKEIMVMNIPLDDLALINSGFRRYIPLLKSVGIVDTQALAHSFFACELRGCKGLGPKFFSLVKDFTENQDGYRKLYNSFLMTKSNVKGDICNGTAKKK

SEQ ID NO: 251737 - protein, 331 aa, unidentified
MKFKSFIGIDVSKSTIDAYLKINQHHAVFGNNQEGFRELVEWVMENSGLVLAKHLLFGFESTGIYSSELALFLEKHALPFHIMSGLELKRSLGIRRGKSDKADSKDIAEYLYEKQEKIQPTVLPSQTIQDLKKLFNYRERLVKNRAAFTTRLNEYETIVSGNKIKVYQKSHNTVIACLDKQIETIEKEIDKLLHKEELLLNQYMLLNSIKGIGPQTALALIILTEGFMLFNSWRNFASYAGTAPFPNQSGTFNGRTKTSKLANKRIKTLLTLCAGTSIQYSTEMKNYYQKRISEGKSKMSTLNIIRNKLLSRAFAVVNRNSRYVDTLKYAA

SEQ ID NO: 251738 - protein, 337 aa, unidentified
MKSYLFIGIDISKAILDVCVISPSETVTNHYHQFCNNLKGFIQLLKWLKQKSEAVVVEDWRVCMENTGIYSLELNCFLHEQGILQSMENALQIKRSMGVVRGKTDKADCKTIALYAYRFYDKLKPYVLPGETLLRLRALFSQRERLVSIHSQLLAANQSMKGYARELVKDIQNQNEILLKNLAGEIKAIDKSLKECLQKDRELRSKARLIQSVPGIGQQTAAYLLIVSRGMKSFATAREFACYSGCAPFEHSSGTSVRGKTKVHYIANRKMKMLLHMAALNAITFNEELKTYYQRKVAAGKNPMSVLNAVRFKLICRIFSVIKRNEEYQKEYRKNAA

SEQ ID NO: 251739 - protein, 412 aa, unidentified
MSVTPETSRPRVCAGLDWAKDDHVVCILDADGEVIDRFTVTHTAEGLRRLIRRLLAAEVTEIGIERGDGPVVEALLATELTVLVISPNQVKNLRSRYGSAGNKDDRFDAYVLADVRTDRRRLTPLTRSSPATRALRTSVRARRDLVEHRVAAANQLRAHLQIVFPGLVDLFAELDSAVSLSFIERFTTQAKADWLSPARLGEWLKKVGYSGRTQPTVLHQRLLAAPRGATSTDAETNGTVTLAYVAVLRGLNTQIEILAHTISDQFDIHPDAHLFASLPRSGTLRAARLLAEIGDARGRFPTAESLACLAGVAPSTRQSGKVKAVTFRWSADRELRDALCDFAGDCRRANPWADDLYNRARARNHDHPHAVRILGRAWANIIWRCWQDGVAYDPDRHNALQRILSERAPQAA

SEQ ID NO: 251740 - protein, 360 aa, unidentified
MSTITIGVDLAKQVFSVCSVDAAGRVRERRDLRRDAFIQWLPSVPTGTTVAMEACSGAHHWARRCQDYGLTPRLMAAQFVAPFRKSRTAKNDRNDAEAIATAARQGNMRFVPVKSVDQQVRLSWHRVREGYKAEALATSNRLRGLLAEFGVVVAQSDAALRRTLADLDALALPCSLVELLRDVDAQWKQLQARIIEADCQIQTHANADEACTRLRAIIGVGPITADAVVATIGSAHSFANGRQFAAWLGLVPMQHSSGGRTRLGRISCRGDGYLRTLLIQGARSSLQRAKAVSWEKATAEQRWIQDLERRLPFGKVLVAIANKHARQVWAMLARGEHYDAEAWLKHPMVQRPASRREVTA

SEQ ID NO: 251741 - protein, 341 aa, unidentified
MKVSTISIDLAKNVFQVMGFTHTGKTLFNKRLNRLQLSEFMQMQPKCRVVMEACYSSHYWGRTFNSMGHNVDLIPAQHVTPFVRGNKNDSNDTLAIFEASERPFIRFVPVKTEVQQEVLILHRLRERLLSSRIAASNQLRGLLTDFGIFFPLGQKGFNEKLVNLSSDESLSATLKWLVNDVYREYQLLKTRIKEIERQLKTDVEAHPLGKILLSIPGIGYLNASAFIASIGNGQAFSSAKDFAVWLGITPKQFASGNKSVMTGISKRGDRYLRKMLIHGARAVINNAGKKQDALSLWVCQLRERKSFNCTAVATAHKLARIMWTLLQKKCYYTPQITGVTA

SEQ ID NO: 251742 - protein, 427 aa, unidentified
MKYNQNTKIMQITEKTLIVGVDIAKEIHHARAFDFRGIEYGKRIEFSNDIDGMKRFLKWAADIMNKSNKEHLMVGMEPTGHYWLCFAQFLRDKNHKVVLVNPFHVKRSKEFDDNSPTKNDRKDPKTIAMLVKDGRYVEPNIPEGIYSELRIAVDIREMLTKDLNKIKNRVARWLDIYFPEFNKVFADWEGKAALITLKEFPTPAKILGIGAEEILAAWKKEINRAVGAKRALKLIEAASQSVGKRDGIEMAEIEIKIILEQYEMLVKQLKKIESKIEELFMQVPGANEMLSIKGVGVITAAIFIAEVGDITRYEHPKQIQKLAGYNLVENSSGQHKGQTTISKRGRRRLRSALYKMIMPILANNKEFQELHKYYTTRKENPLKKKQSMIVLCCKLIRVFFVILKKGVKYNGNKMLRDIKRPEIRNAA

SEQ ID NO: 251743 - protein, 416 aa, unidentified
MDVHRDFVMACIASTNAQGVTEYQSQRFSTYTGGLRDCAAWLAENNCKDVCMESTGKYWFPIHNILEKTCRVVVTHPKFVKAIKGKKTDKKDAMWIADLFKHDIVSGSFIPPERIRQLRDLCRYLMKLTGNATGEKNRAHNCLTVSNLKLDSVFSNVFGKSASAIISFMLEHPGEQFDVAPFVDGRCKSPIAEIQAAVDGAFSPWQADKLKIIREHMEDIDHCKKLLENLIYRLAEPYGRQIELIMTLPGISDRMTAIRIIAEIGVDMNQFESSKHLCSWAGLTPQNNESAGKKKTTRIGKAGQYIKPLLVECSIGAANPRSKKYPEILGKYQQLRKRRGAKKARIAIARRLLTAVYQMLLKDEPYQPYVAPAQDAIPKQRIMTAHDALAMLRRKGYILVDELGTVIEGNSLTAPV

SEQ ID NO: 251744 - protein, 380 aa, unidentified
MNHNPSSSSMVRFSPASVVVGVDVHKYSHSAVAMNAWGQEIGKLEFTNNDLDGYVQWLLSLGRKADIIVGLEDANCYGIHIAEALGKQGFLMRSVPAILTERERKQSTKRQKSDYEDAKRVGKVILTKYEETLPAKESIADESELRTIRELDLLLMERRDLVKQKTILKNQAHALFHQYYGDSYANRFSKPFHREAIDFWMADLEQKIKTEQSLRHILASGIMRRLRHLLLVEEQIDAVSGEISAAGKRFQVASALEQELHGCGIMTACSILVEIVTIKRFSSKDKLAMYAGIAPRRHASGRHDRFYTNPFGNRLLNRALHTVALSQIAAVKGDPRGREYYQRKLKEGKTKLWALRCLKRQIVNQVFRILKNQSANKTTV

SEQ ID NO: 251745 - protein, 343 aa, unidentified
MKNELFIGVDVSKNWLDVAYYDGVDVDWKQGHIRVDNSQSGYDRIGRWLRKLGTDKDSVLFCMEYTGLYCQDFRVWLEKEGYVYGMVQPRKMHRFEPDLGEGERALDRIKTDETDSFRIAMYCEKHCRKIRASPSRLPGEAYLRLKRLLAERKQYTRQSTLYKQQLHDISAYDTEGSRRRKQDTLAMLSRQIRLTDAEMLGVMDGDPALRGSYDLLCSVGGIGHVVAVETIVLTENFTSVTNPRRYACYIGIAPARKESGTSVRGGEHVSRKGFTQAKADLSMACLTAIQADANIRAYWQRRKAEGKTGGVVLNAVKFKLVLRMFAVIRRQKPYVEIDGYKAK

SEQ ID NO: 251746 - protein, 386 aa, unidentified
MKLKLNKLTKITKQFSVKAVALESWIFPISNYFFYILLIHHQNKERIMYYTGIDLHKQTSYLTTVDSNGVIVKQKNLRNNPYEILNYFHQLKGEHSTTVETTGGWYWLSDLLKEHNISLKLAHAKYVKAIAYAKVKTDKVDSHILAQLLRMDFIPEANKIDEDLRPLRDTLRARLRLTQKRTSALNFMNRMLEKFNISSSSELNEEYQLQYSQFQAQANFLKEQMLVLEKSLYPKLIPDNNIQLLLGIPGIGKMNAFTAYLEIYDIHRFESVKNFLSYCRLAPKASNSGGKTKQNKTPKDGNKYLKIVFSDAAVHSIQHYPVIKKHYNSLLRKKNKQIAKYIISKEIASIVYHVLKTGKEYNNRFKNKELQHIKSFNWPRIASPDV

SEQ ID NO: 251747 - protein, 316 aa, unidentified
MKRFIGVDVSKDSLDVYVRPDELRRRLDNTPDGIAELVNFLRPLTPERIVMESTGPYQKPVIGALLAEGLPAVVVNARQVRDFAKALGTLVKTDAVDAAVIAHFAEVIPTTVRPLPSKDLQEIRALYDRRLQLVHMLAAEKNRRHAAAHGSPKVLRNIDKVIAFLKQQIRDFEERMDRIVASSEAFQTQNVLLQSITGIGPQVSRTLIAYLPELGQRSRQSITALVGLAPFNNDSGQHSGERHIRGGRAKVRIGLYQAAVAAIRYSPPMRDFFAALKARGKATKVALVAVARKILVLANALLRDNTPYKNPANSVC

SEQ ID NO: 251748 - protein, 438 aa, unidentified
MSNKVIFNLDELFISVGIDVGADFSWMSIALPNQQFVGKPYKILHNSIDSLTTAVSKIKEAEELYSLESRIFLESTGIYHYPLFCYLRDKGFNCSVINPIITKNSTNINIRKVHNDRFDSKKAALVGLKPDLKVSLMPSDLALNCRNLCREYYDLMDNRSAYVNKLQGELRMAFPQYLGIFSKVTINTSLTLLETYTSPSAFLEADKQEIIDIIKSTARFGLTYAQNKYNAIIQAATDANQFGYIIDSNIKRIRLYISFIRKYDEELNSILESLHELVDANEDSDFVKQIHLIETFKGAGFLSAVSIMGEIGDFSAFSKPKQLFAYFGLDPAVKQSGKFEGTKVQMSKRGSAIARCVIHTLTLQSISISRNREAKNPVLREYYLKKCDSKPKLVAMGAVSHKVCNMIFAILRDNKPFKIIAPQEHIKQYNSAKCDIAA

SEQ ID NO: 251749 - protein, 346 aa, unidentified
MNQIIRIGMDTSKHIFQLHGVDAAEQAVLRKRLRRKEVLAFFAKLPPTVIGMEACGAAHYWGRELRKLGHEVKLMAPQHVKAYVKRNKNDGRDAEGLCEAMSRPTMQFVPVKTEEQQAALMLAGVRQQLIARRTQLSNAIRGYAAEFGVTAAKGLDKIEPLLARIAQDESLPALARELFAIEGREYTQVQAELKAIEAKLMAWHRANAASRRLAQIPGVGPIGATALVMKTPDPRAFPSGRHFAAWLGLTPKDHSTAGKTRLGKITRAGDEVLRSLLVAGATAVIQQVRRGRGRPSPWLVALLKRKPPKLAAVALANKIARIAWKLMTTGESYDGARMPGASALAA

SEQ ID NO: 251750 - protein, 426 aa, unidentified
MNPKRSKPKNDRTMPMIHPNAAAIDIGATMHTAAVRADRMPEPIRSFGTFTTDLHRLVDWFTECGVETVVMESTSVYWIPIFELLDARGFAVFVVNARDAKHVPGRKTDVSDAQWLQRLHSYGLLRASFRPKGQIAELRAYVRQRERLLEYAASHIQHMQKALTEMNLQLHHIVADVTGATGLRIIRAILAGERDSKVLACLRDYRCHSSAEAIEKALTGNYRAEHLFALELALALYNIYQDKASACDARIEAVLKELSISRGRDAGPLPSPRRRLHGKANGPDFDVRAALFKLLGKDLTQIDGLGSYLSLRLIAECGDDLSAWPSAKHFTSWLCLAPSNKISGGKVLSSRTRRSGSRASALLRLAAVTVGRTDTALGAFYRRLSARNGKAKAITATARKIAVLFYSAVRHGMEYVESRDTATAPA

SEQ ID NO: 251751 - protein, 361 aa, unidentified
MFTERTSVGLDVHARSVVAAAFDGDTGEVFKKRLTPASDDVIAWVRSLPGPAAVVYEAGPTGFGLARAFDTAGIRCEVAAPSKIQRPPGDRVKTDARDAMLLARLLRLDDIVPVTVPTVEREAARDLVRAREDVRGDLMRSRHRVSKLLLRQGIVYYDGHAWTRAHLVWLRRQHFDAPGLQLAFDAEHEAVLAAEARRDRLDKAIEAMAADSEYTPVVHRLGCLRGIATLTAFGLAVEVGDWERLTGSSIGAYLGLVPTESSSGQSRSQGSITKTGNTHARRLLVEAAWQHLKPYRTPGATMRARWELAPAAARARGHGGNRRLHERWLHFNDRKKDPVIANVAIARELAGWCWSLAVMDD

SEQ ID NO: 251752 - protein, 412 aa, unidentified
MRRVIGMDIHRTFGEVVFWEEGKLRRAGRVDMTRTALEGFGKTLLATDEVVIEATGNCIAVSRMLSPFVKRVVIANPLQVKAIAHAHVKTDKVDAGTLASLYAAGYLPEIWTPDADVERMRRLVARRYQVVRHRTRIKNEVHSILHAHLIPKCPHADPFWGRGRSWLLLQPLPDDERQAIERHLRELDWLAQDLANLDREIAETTLDEPAIKRLLTITGVNLVVAAGLMAAIGDIGRFDSPQKLVSYFGLNPRVRQSGLGAAHHGRISKAGRSHARAMLVEAAWAAAKAPGPLHAFFVRIRAKRGHQVAAVAVARKLTVLVWHMLTKAEDYYWARPSLVAHKVRSMELQSGKPQRKGNRRGSSYAYHVKELRAQEMKIAKKAQESYEQLVESWRPRSPKGVARGRLNSARLE

SEQ ID NO: 251753 - protein, 463 aa, unidentified
MVAVGVDVSKGKSTVAVVGEGKKILQKPFDVTHNKVNLAELTEFVKKYEDVCVAMEHTGVYYQVVAETLSKAGISVSVVNPVLINEYGNNSLRKVKTDKKDSMKIARYALDNRNDLRNYSTSDVLRDSLKSFVRQFNFEDKTLTSHKNRLNALLERSFPGIDGFFNGATKTSGHQKLIDFVIRFWHNDCVSSLSLAKFTEKYRKFCKKNNYNFCENIAKEIHALSRNNITTMQRNDLTEMLVADAARQVLSISVRVEKLRSKMIELAKQLPEFDTVASFYGVGETIAAKLIGEIGDVRRFESKWSLVAYAGVDPGKNDSGKKVSISGSISRAGDALIRKFAYQVVEVHLLKSPVDEPLYQFLDKKRSEGKNYYVYMTAACNKFLRMYYGRVKEFMDAVPEISTNVSDSHECITSCDFGKDTTTFTCRQDKAMLESNLSGLQDFAYTNSAVGYTPCDNLARVGI

SEQ ID NO: 251754 - protein, 385 aa, unidentified
MAPIRMPEAVIGLDVGKSSHWACVATRDGEVLLSTPVANREDDLDSLFGRFPDALVVVDQSRNIGALALARARAAGMSAAYLPGLAAHGAARLFAGDAKTDERDAMVIAKTALGIPDALLPVGDPGPTIAAARALAAQRNFLTCENTRNKNRLRSILLESCPAFEALVDLSDGSQLRLMASLGGAWSVADAGPRRAAALTRGAARGKIEALVRSTTSSTRPDASVVAGEDRAVKLLARRISENSAEIEAITAEISALLEGDDTYRCLLTVPGIGPKTASELAISIDIEDFPSHDRLASYCGLAPRNRQSGTSISSVTASRQGNKRLKNLLIFSCNCLTRTEGRWGDYYTRCRERGMSHGKALKALARKRLKVIYAVMRDRVPYAA

SEQ ID NO: 251755 - protein, 379 aa, unidentified
MSQHITWVGIDDHKMNLFAAVVRGLDDRVSEPRRVANEDRALRRWLRRLERESGGGQIRICYEAGPNGFALKRRLEALGAVQVDVIAPSLTPRRSGQRVKTDRRDAKQLVRLYRAGELTAIAMPASEDESARDLGRTHQQVKQEIRRKQHHILKFLTRRGRIYRDGGHWTQKHRRWLKSQQWDHWCDEVGFDELLVGLRELEDRRLRLERGLHRLAEEESRALMVGVLRCFHGIDTAAAVSLATEIFDVRRFRSPRRLMSYLGLTCSVDQSGEKERRGGITKAGNRFVRFTLGQVAWHYRHRPSVGVALRKRRQGQPAWAVSIADRAHQRLHRRYWALVNHGKPVHKVVTAVARELVAFLWEAMVEAERHGDQRHETAA

SEQ ID NO: 251756 - protein, 340 aa, unidentified
MGDITTIGLDLAKSVFQVHALDEVGRIVLRKRLRRGQVLAFFAGIPPCLVGLEACATAHYWARELVALGHEARLMPPNYVKAYVRRNKHDVADAEAICEAVRRPSMRFVPVEAVQQQSAHMMHRARDLLIRQRTMLVNALRGHFAEFGLIEAQGLHKVARLIAVVMDEEDARVPDIARQVLKVIVNQIEDSQTRIAGLETQVLSWHKSNPVSQRLATIPGIGPIIATAIAATVADPNTFRSGREFAAWLGLVPRQSSTGGKARLGGISKRGDSYLRRLLVNSAHTVLLCSKHAKTDPWLTSLLSRKPRLVAALALANKTARVAWAIMSRQDTYRHAAVPA

SEQ ID NO: 251757 - protein, 396 aa, unidentified
MRAVFGIDVSKASSEVAILVNGEKVHGYTMTNDAIGFSRLLGDLKTVHKPEIIFEATGVYSRRLQSFLDEHGYAYTRLNPLEAKKQLDSLRVRKTDQIDAEKLAQSQFVLNRKTTYVQEEIYQNLRDLSRFYQNLTEDIVRAKNRQHKALQVTFPELENILSTPTGEQYWNLVIAFPCKDFVLELSKDKLSESIRQSTSKRISDKRVAYLAALANQSYCAVKKTSPIMEEVRYYAKELLRLSEQRQAVLDEMVELAQPLPEYDILLSIPGIAETTATSIIGELGDIRRFQSANQINAFIGIDLRHYESGNFLAKEHITKRGNPYARKILFKCIHNIASASHTNPCHIADFYEKRKRQSQTTSTKPHTIASIHRLIRTMYYLITHNKLYDYTSTQNR

SEQ ID NO: 251758 - protein, 393 aa, unidentified
MKNYILTGCDSHDKSMLLKIAHNDGAPQMRSFGSDREGRQKMTEHLKRCAKEVGGAEIVFGYEASGQGFGLYDDLKEAGIRCLVLAPTNLPRSPKSERDKTDEKDAQRVLDEIRAHVLAGKELSSVWVPDPQTRDDREVVRSRLDAAEKLSAIRIQIQSLLKRNDLRRPRGVSAPWTKPFRAWLLGLSKAPSALEAGARTALSSLLRQVEFLEEEVERLDQEVDRLSQTQRYREPVLELRKLKGVGVLTAMVFLTEMGDMARFCNRRQIGAYLGLAPTTYESGEAQDRKGHITHFGPWRVRRVLCQAFWCRMRTDAKEKAWFERWAQKHPKRKKVGVVAGMRRLGVRMWHRAFEAQQRQPHLFPPSVPPKGGDASLRPPQGAEAEALAGAPPD

SEQ ID NO: 251759 - protein, 427 aa, unidentified
MKYTQNERIMQITEKTLIVGIDVGSETHYARAFNFRGLEYGKLLKFNNDAEGFSRFEDWVRKLVNNNGFKDVTIGMEPTGHYWFNLGEYIERQSGMRIALVNPHHVKKSKELDDNNPSKTDRKDPKTIAMLIKDGRYIEPYLPEGVYKELRTAMDSRWRIMKELSAIKNRISRWLCIYFPELTKVFKDWEGKAAILVLKEYATPTKIKEKGIDGIIAVWKEHKIRAVGRNRAKMLLEAAVSSVGTTEGLISAEYELEMLLEDYESKKRQYDKTMELVEILTKEIPGFEKLLEIKGIGLVTAAGFIAEIGDIKRFSHPKQIQKLAGLSLKENSSGKHKDKTTICKRGRKRLRYYLTFGMMPLLSKNEEFRALHEYYTSRKENPLKKMQSLVALSNKLIRIFYAILTKNVAYDPQKMMSDIRRPETKAA

SEQ ID NO: 251760 - protein, 413 aa, unidentified
MKKPSSFSESRELSVKEAKPMRRESQQVMWELVAQLRKQLDGEGVVTAEDQGVPDAERPSLDRLTVGVDVGDQWSNYCILGLGGETLAEGQFRTHPEEVGKFFQGLTGSRVVMEVGTHSAWMREVIAGLGHEVLVANARRMQGSKRRRRKNDRIDAGRLARLGRVDPKSLYPIEHRSTEVREDLLVLRAREVLVESRTKLISAVRSMVKTVGARVSHSSSDGFSRKAAKEIPQPIRDTAQPLLDLIAYLSEAIKCYDQRIEQLGAEKYQHTRLLRQVTGVGPVTALAYVLTLETPLRFKKSRDVGPYLGLVPKQEDSGDSQPQLGISKAGDRMLRKLLVGSAHYILGPFGPDCDLRRFGKKLCERGGKNAKKRATVAVARKLAVLLHRLWISGELYEPLGHVPFRSIAQAAAA

SEQ ID NO: 251761 - protein, 385 aa, unidentified
MRTAKKRGPGPSHLLLTPDHAGNVVGIDPHKRTLTATVVDPRGGVIASEHFRVSGDGHRALEAWARQFGQIARWGIEGSASWGRHTAVYLIGRGHDVRDVCANRTPRRDRARQRGKSDTLDSERIAREVLAHSLLPKAFKRAGQDQGPDELHQLLGLWHNRRRSILASRQRLVNEAEYLLCELPLELREQLPDTKAVKPRLVALTRRNRRRRHDAPTKLRLQLLDGYHQQIHALDREEQQVVAHLEELVRRSGSTLGELCGLSTRSVAELVVEVGDVRRFTEGGFARFNATAPLPASTAEGPGEPVRHRYNPGGNRRVNAILHRMAITQLAREPRAQRIYANARASGHTKKEARRVLKRHLSDVVYRRMIRDLHAKHSDQSLLAA

SEQ ID NO: 251762 - protein, 356 aa, unidentified
MESMPAPAPSVTVGVDTHLELHVAAVIDQAGRLLGTQAFPASTRGYVALVTWAEGFGPVERVGVEGTGTFGAGLTRFVRAYGLAVVEVARPDRSTRRRRGKSDPIDAQAAARTTLAGVAVTTPKTRDGQVEMIRLLRVARRGAMKSRVAAAEQLYGVLYSAPEELRQPLLGLTTKALVRACAAMRPGPLTSPTAATKTTLRTLARRWQQLQAELDQLDTQLQALVTSVAPTLLALPGVGVETAGQLLVTAGDNPQRLGSEAAFAHLCGTAPIPASSGRTDRHRLNRGGDRRANNALWRIALVRMRCHPPTRAYVERRTNQGLSKLDIMRCLKRYIAREIYHQLTSPPLTTPTTCPK

SEQ ID NO: 251763 - protein, 423 aa, unidentified
MPYRIAGIDVHKKKLAVVVADVEVEDEYQFERRWYGSNPEQLQLLAEWLIQQQVEEVVMESTAQYWKPVWGALEQYWKPSCEKREGAGRMSGTLHLAQALSNRGRRGRKKDFRDAERLLKRLVSQELTLSFVPHAEQRLWRTVTRTKYQLRRNKVRLHNQLEALLEEAHIKLSSLVSDLLGASARRMLQALAEGETDPAALAALADQRLRATSTQLRDALGACTELNPVYRRLVKMVLEELQWIEQQIGQLDQEMASLLRQHQDAVQRLAEVPGLGVDSAQQIIAEVGAKAATFASAKNLSSWVGACPGEEETAEVNYSARSPKGNRHMRRLLNQAANAAVKVKGSIFEIVYRRLVPRLGHNKTIGAIAHRICQLIWIILNKGVPYEERGPAVSENSRRARTSRMIRTLRKLGYRVELQADPV

SEQ ID NO: 251764 - protein, 358 aa, unidentified
MNNVKSSRIDFTGQPIYIGLDVHKKSWSVSINTKYGEYKVFSQPPEVDKLVHYLRHHFPGGDYRSVYEAGYCGFWIHDELREKGIQCLVVNPADIPTKNKERRTKRDRIDCRKLGRSLRNGEIEGIYVPSRSKLEDRTLTRTRQSMVRKQTRCKNQIKGMLLFYGVVIPEEREMGHWSRRFIQWIEGIRMERASGDIALKAHLEELNHLRQLIASLNRAILRLARTEEYRPLVRLLKTVPGISTLTAMILLTELGEITRFPSLDELSCYVGLVPDTQESGEKEYVGSITQRRHSQLRWLLIEASWTAIRKDPALLMAFEEYCKRMRKTKAIVKIARKLLNRIRYVLKNQAEYVPCVIE

SEQ ID NO: 251765 - protein, 347 aa, unidentified
MRFYTKQHKYYCGIDLHTKKMYVCILDSEGKIRLHQNIRTDAESFLQILTPFREDVAVAVECMFTWYWIADLCVQQNIPFVLGHALYMKAIHGGKAKNDKIDSHKIATLLRGGMIPQAYAYPAKMRATRDLLRRRNHFMRKRAELFAHIQNTRSQYNLPDPFGCIAKPQNREGIVERFDDPSIQKSISANLVMIEAYDRLLTKLEHDIIASAKEHDLRSYALLQTIPGVGRILALVILYEIESIERFPSVQDFVSYSRLVKCTKESNGKIYGTGGNKIGNAHLKWTFSEAAVLFLKGNEPGKKYLQTLAHKHGKAKALSILAHKLGRAVYFMLKNKEAFNQKKFLGF

SEQ ID NO: 251766 - protein, 336 aa, unidentified
MPVSYLGIDIAKRTFDVALLTQDGKPKHKSFANSAQGFDALLLWLKQNLVTDRTGLHACLEATGTYGDALARFLVSAGHRVSVVNPSAIRAFARTELSRTKTDKADAVRIARFCQMHQPTAWTPPTEEIAILQALVRRLETLRQMHQMEKQRQEGAPASIHASVTAVLSVLEEQIAQVEEQIRDHVDRHPDLREQSDLLQSIPGIGAATAATLLCELGDWSRFASARSAAAYVGLVPRVHESGTSVRGRSSLCKIGNGRLRKALYFPAMNAVRFNPVLKAMAQRLMASGKSKMAILGAAMRRLVHLAFGVLKSGKPFDPKIALPSLPQSSPATAQA

SEQ ID NO: 251767 - protein, 342 aa, unidentified
MEQVTTIGLDIAKNVFQVHGIGADGTVVVRRQLRRAQVLPFFEKQAPCLVGIEACASAHHWGREISALGHEVKLMPAKYVKAYVKRNKNDAADAEAISEAVSRPTMRFVPIKTPEQQALLMLHRTRKLLVRHRIRLVNAIRAHLAEFGIVAGIGRNGVDRLLKLIEAGDARLPVAARDCLLALRDQLTSTRQQITEADKRILACHREDELSRRLEEIPGVGPLIATALVASVPDPHAFKSARDLPAWIGLVPKQSSTGGKERLGHISKAGNRYLRSLLMIGAFSLIKRAKLGKGKHRPWLIELMARRPVKVAAIALANKIARIAWALMTRGTRYREPLPHAA

SEQ ID NO: 251768 - protein, 402 aa, unidentified
MNAVGIDVSKGKSTIAVMRPFGEVVLSPFEVHHSSSELSKLAKLLKSLDGESRVVLESTGNYHAPVAKTLHDAGLYVSVVNAMLVHDYGNNSLRRAKTDKKDAVKLANYGLDHWLSLPRYVPEEDTRLLLKNCYRQYQQYAKVQTMLKNNLISLLDMIFPAVNCLFSSSARADGSEKWVDFVDAFWHVQCVAGLSAKAFSAKYLKWCRKHGYNFSEEKALEIHRTAREHVAVMPKSETTKLLVKQAVAQLRTVSSAKAALQNEMDALAASLPEYPVVMDMFGVGPKLGSQLMAEIGDVRRFHSKKALVAYAGIDAPPYQSGQLNVHSRSISKRGSPALRRTLFLVMRVYLQCSPPDEPVYQYMAMKRAEGKPYLVYMMASANKFLRRYYATVKAYMNALEQS

SEQ ID NO: 251769 - protein, 394 aa, unidentified
MKLIGIDIGKNKHFFCVMDQQTGEIISQHVSFSNDKEGFDFLVQKIKSYPKDSILIGMEDTGHYHFALLKYLLDLQYTVALINPKTTDFNRKMQGGITKNDKLDTINICDILDTPERKKQYRITKVNSFDLYEQKQLTRHHHNLKEEENVYKNRLQKCIDIVFSEFNKLFNSKYGIVYMNILKMFGSAENIANTDIRTIRKCFEIEGRGNRISLTPERLKECARSSIGISSSAEVIQIKHLTAQIELIEEQLTEIDKKIEEFSIQNNSPILSIPGISHFSGTSILAELGDISNYSKPSQIIKFAGVAPLHYESSQFNAQHTAITKKGSKYLRKTLYQIILPVIRHNPVFNKYYQLKISQGKGHRCAQGHCVRKLLRIIYHLLKTNQQFDPQLLR

SEQ ID NO: 251770 - protein, 389 aa, unidentified
MKIYVGIDIAKLNHFAAAISSDGEIIIEPFKFTNDADGFQLLVSKLESFDKNSIIIGLESTAHYGDNLVRYLVTELYQVCVLNPIKTCQMRKNNVRKTKTDKVDTYVIAKTLMMQDNLRFVSFFDLDMMDLKALGRFRQKTIKQRTRLKIQLTTYVDQVFPEIQYFFKSGLHQHAVYALLKEAPSPKEIASMHMTHLANLLKVNSHGHFTKEQAKELRVLAQKSVGANDSAISIQITQTIQQIELLDSQLEKIEAEMTDIMKFNDSVIMTIPGIGYINGGMILGEIGDIHRFSNPNKLLAFAGLDPSVYQSGNFQAKTTRMSKRGSRVLRYALVNAAWNVVRNNATFKAYYDAKRAEGRSHYNALGHCSGKLVRVIWKMLTDNVEFNLK

SEQ ID NO: 251771 - protein, 352 aa, unidentified
MENIALIGIDLGKNSFHIHCQDRRGKAVYRKKFTRPKLIEFLATCPATTIAMEACGGSHFMARKLEELGHSPKLISPQFVRPFVKSNKNDFVDAEAICEAASRPSMRFVQPRTESQQAMRALHRVRESLVQDKVKTTNQMHAFLLEFGISVPRGAAVISRLSTILEDNSLPLYLSQLLLKLQQHYHYLVEQIKDLESQLKRKLDEDEVGQRLLSIPCVGTLTASTISTEIGDGKQYASSRDFAAATGLVPRQYSTGGRTTLLGISKRGNKKDPNFVGSMCQGIHTKTGTPVWQIGRLGQGFTVPEKQLCRHLCSGKQAGQNSLGPNGTTANLCSITAEIHRFKELLIWFCEY

SEQ ID NO: 251772 - protein, 351 aa, unidentified
METQITAQPKLYIGIDIHKRSWKIHCSTDLFSGKSFSMDPEPEQLRNYVSKHFPEYDITTAYEAGCCGYYAHRCFEGYGWRSLVVNPADIHRKGKEKYTKTDRIDAQLISRELKDGRLDSIHIPSIEREELRSLFRRRNDLVKDFRRIKSYIKMQLLYFGIKEPIEFDNDHWSHAYRKWLDDMIFKHPTAKSTLASRMRFFRFVDKELRDVSSQIRAYCRKYHKKDYYLLRSIPGIGGIVACGIISELGDLRRFNSIKHLAGYVGLAPSVYQSGGNYKSMGITMRAHRLMRSYFVEASWQAIRADPVMQAYYRKHHGKNVKSVIIKVARKLLSRTLAVIKTEVPYTIGVLE

SEQ ID NO: 251773 - protein, 411 aa, unidentified
MHERQKYLYIGVDLHKHHHTAVIINCWQEKLGEIQFENKPSAFSKFLLDVDKLVDDGLTPVFGLEDVGGYGRALAQFLTDHGQVVKEVNPALSYAERKSHMSTQKSDSWDAECVARILVNKLDLLPDAKPHDLYWSIQQLVTRRNALVKAQGALKNQLHIQLSHHYPSYKKFFSEIDGKTALAFWEHYPSPSCLEGVSVKQLTIFLLEASNNTCSVKKASEIMKLVKEDGNTVKEYQETRDFLVRSIVRDILFKKQEINYVEKELKELMSLLDFQLNTMPGIELVTASALIAEIGDIRRFPNANKLARFAGIAPVYFGSGGKGKEQKSKQGNRVLHGLFYNLAVQQVQVAKGSKLPRNPVFYAYYQRKQKEGKTKGQALVCIMRRLVNIVYGMMKYKTAYELPLIKEKEVV

SEQ ID NO: 251774 - protein, 420 aa, unidentified
MKSASNTLSETPANDVTCGIDWARDDHAVSVVDARGREVARCMVEHTAVGLRELVGFLARRGAGEVAIERPDGPVIDTLLEAGITVVVISPNQVKNLRGRYGSAGNKDDRFDAFVLADTLRTDRARLRPLTLDDAATVTLRRACRARRDLVAHRVGVANQLRAHLRNTFPGAVGLFADIDSGISLAFLTRFDTQDRADWLTPTRLGKWLTSVGYSGRTDPTVLHARLLAAPRGATSTDATTQAHVTHALVAVLHTLLAQIKTLTVQISNQLDAHSDQHIFTSLPRSGRVRAARLLAEIGDCRARFDTPESLACLAGAAPSTRQSGTSRSVGFRWACDKQLRDAVTDFAGDTRHPNPWAADLYRKAITRGHDHPHAVRILARAWLFVIWHCWQTDTPYDPARHHALQRVLAEQATTQAEAA

SEQ ID NO: 251775 - protein, 345 aa, unidentified
MELHTIGIDLGKTVFHLVGLNLRGEVVVRKRFSRSQLLRFTANVRVGLIGMEACGGAHFLGRALREQGHEVRLIPAQYVKPYVKTNKSDYIDAEAIAEAVTRPTMRFVPIKTDDQLDLQSLHRVRERWVMRRTAVINQIRGLLLERGITLRKGRRYVDDALPLILEDAEAKLSGAVRMLLAQLKMDLDQLAVRIDEADAVIHKTAHENEACQRLLAIPGIGPVTATALIAAVGNGGAFHKGREFAAWLGIVPREHSTGGQQKLLGISKRGNSYLRRLFVQGARAVLQQRTKQSSGLSAWLAQLTSRTHRNVVAVALANKLARIAWAVLAKNEQYRPPVLADGAAA

SEQ ID NO: 251776 - protein, 412 aa, unidentified
MLDVMFTHCAGLDVHKKSVTACALVPGKKGKVRPVFKTCGTTTKALREMKAWLLELGVTHVAMESTGVYWKPVYNILQDEIEVWVVNAQHIKQVPGRKTDVKDAEWIATLMRLGLLNNSFIPDEAQRDLRDLTRYRTQLTNERSAAVNRVQKVLEDANIKLDSVVTDIQGVSARQMLAGLIEGQEDGEALAELAKGRMRNKIPELVAALTGYVRPHHRFMLAELLTHMDQLNQQLTQLNERIEAQTAPQADLIARLDEIPGVGQHTAEILLAEVGCTVEQFPSEKHLASWACLCPGNNISANKRRSGKTRKGQKWLRTALSEAAWAASRTKDTYLSAQFHRLRARRGAKRAAVAVAHSILHIVYHLMKDPTATFQELGGDYFVKRNKGDQKRRALKTLAALGYAAELTPVAG

SEQ ID NO: 251777 - protein, 458 aa, unidentified
MKIYLGGDASKGYADWVMISETKKKLLDNFQLDDTFDGHHQLYNAIKGCVEKYPKAEIYAALESTGGYENNWLNTLRSYQKDFDIQVARVNPLGVAHDSKASMNRNVTDAVSALSIAEYLINHSDKIRYEQDDTWKSLRRHWNFVEMQKKQRVQTINQLDMLLYSANPILLSYKTDKLADWLLEVIIQYPTAKLLAKAKAAKLSKIPYLSLEKAEKIIASVQKSIASATDKDSGVLIKQVALQIRMFDQTIDSQMSLIEKELVNSDIDILKTFKGIDTTSAIGLVLEIGAVERFERVKSICAFFGLNPKFKQSGDKIIGVRMSKQGSKKMRKILFNIAFGAIGHNPLIQEVYLRKLSEGMTGMAAIGVCMHKILRIVYGMLKSKKGFDAQIDKQNTNRSAIKQAEKNQQKDAYILKNRRFQDYDKNAPISKRQTKKRKEHVLSQCEITSQSAGSTCSS

SEQ ID NO: 251778 - protein, 338 aa, unidentified
MDHYVGIDLHSTNSYTAIIDHDNRRVFKKKTKNDLGLVIEALKPYQEQIKGIVVESTYNWYWLVDGLIEEGYTVHLANPSAIKQYEGLKHADDVTDAFHLANLLRLGILPEGYIYPKEERPVRDLLRKRLQLVQQRTAQILSFQNLVARHLGKSLNVNAVKKLSEDDVAHLFHKEHVVVSGKVSIATILFLSARIQQLEKMVHRVAKLKDEYKLLMTVPGIWRILALTIMYETGPIERFAKVGNYASYCRCVGSKRISNEKLKGKGNRKNGNKHLSRAYMEAANAALQHYDYVKRYYQRKMARTNIVVARKAIAHKLARACYYIIRDQKEFDPTRVFV

SEQ ID NO: 251779 - protein, 453 aa, unidentified
MGRNESKTMSVLHPNAAAIDVGATMHMAAVNADRTPEPVRSFGTFTTDLHRLVDWFAECGVDTVVMESTSVYWIPIFELLDARGFAVFLVNARDAKHVPGRKTDVSDAQWLQRLHSFGLLRASFRPKGQIAELRAYLRQRERLIEYGASHIQHMQKALTEMNVQLHHVVTDITGVTGLRIIRAILGGERKPAVLARMRDRRCHATVETVEKALTGNYRAEHLFALDQALALYDTYQQKASACDARIEAVLKELSVRRGREGGQLPAARQNRSRQQNSLLFDVRAALFALLGKDLTQINGLGPYLALKLIAECGDDLSAWPSAKHFTSWLCLAPSNKISGGKVLSSRTRRSGSRAAALLRLTAATVGRTDTALGAFYRRLSARIGKAKAVTATARKIAVLFYNAVQHGMEYVDPGASSYETRYRARVIDNLHRRAKAFGFALQPIDPPPGIAVS

SEQ ID NO: 251780 - protein, 343 aa, unidentified
MQSITTIGLDIAKSVFQVHGVDANGLVVIRRQLKRRYVLAFFEKLPPCLVGIEACASSHHWSRELQALGHTVRLMPPAYVKPYVKRHKNDVTDAEAICEAVTRPNMRFVATKTPEQQSCLTLHRTRHLFIRQQTAVINAIRAHLAEFGIVAPVGRHGVERLLGIAADINDKRLPEVARACVAALGAQLRMLKEQIVQFDRMITAWHRSNEASRRLDDIPGVGPALATALVASIADPKAFRSGRDFSAWIGLVPKQNSSGGKDRLGNISKRGDRYLRSLFTTGALAVIRYAKIHGTTHRPWLAALLARRPTKVAAIALANKIARMAWAMMAKSERYKEPAALAA

SEQ ID NO: 251781 - protein, 418 aa, unidentified
MNREQNARVSEKRYVGLDVHKHYITVGGMNGQQEIVLRPRDVEMERFKTWAESNLRKTDEVVLEATTNTWDVYDTIAPLVQRVVVAHAAEVKQIANARVKTDNQDVIRLIRLLIADIVPEVWVPPVEVRELRALISYRWRLVKMSTAIQNRMHSLLHRHNIQAPQGKIDTGENREWWQKLKLSELENLRLKQEIKTLRLIRENIVEVERELGRLSNSERWGDQAVYLMQIPGVGIIVTMTILSAIGDIRRFESPKKLVGYAGLGAGVHDSGQKHRGKGITKFGRKELRWALVEAAWQAIRSNPRWRAEYEALCKRKHQNQAIVVIAHKLLVTIWYLLNKQETYHHSNEEDLAYKMLTWAWHMDKSALNGMTNQQFAKYGLIRLGKGEELTRIVRGGLPRRIASKEEVLVLKPELCLKQ

SEQ ID NO: 251782 - protein, 344 aa, unidentified
MCSVTSQVVFVGLDYHAESVQVCVLARDGKVLVNRPCRNDWRTITAAVREKCGSQTAVEAAIESCCGAADLADELVGKARWSVNLAHPGYVARIKQSPDKTDFSDARLLADLQRVGYLPRVWLAPEEVRELRRLVRYRQRLTKERKDLKLQIRATLREARQKPPAEMNPWTKVWQVWLRKTAVLSPNARLITDCRLARLAELARHIRAMERLLAEQTRHDPLVRKLLTLKGVGLVTAVTMRAEIGRFDRFRTGKQLARFCGITPRNASSGQRQADAGLIKAGNRGLRTVLVEAARRLMRYEERWMKFAARLSLRGKPVSVINAAVANRWLRWLFHRMQPGELAA

SEQ ID NO: 251783 - protein, 377 aa, unidentified
MEKFSKYVGLDTHKDTIAVSVADAAGGPARYFGQVANRRSAVSKLLRDLSPEGEVVSYCYEAGPCGYGLYRQIRDSGHECEVVAPSLIPSRPGDRVKTDRRDSESLARLFRAGELTPVWVPDAEQEAMRDLTRAREDMKHLERQFKQRLNAFLLRHGQSYTTGKSKWTQAHWRWLEGLRFSQPVQQIVLQEYIDCVKQQQLRVKELELEMARAMTHWRLAPVVEGLMALRGCRLITAMTTVAELGDITRFETPRQLMAFLGLVPSEHSSGPRQRRGGITKTGNGHVRRVLIEAAWCYRFPAKKSAPLQRRAEKNSASIQSIAWKAQKRLCARYRHLSDRGLLGVKISTAIARELCGFIWAIACEVKREQPHLMGARS

SEQ ID NO: 251784 - protein, 373 aa, unidentified
MIAGIDTHKDTLAVAVIDAAGRLLAQHDLPNTEPGFDALAELLDTHDVVRVGIEGSGSFGRAAAIHLVLTWQPPRTVDVVEVPTLMTSRERRAQNKGKTDPVDSLAIARVTARETHLPPVRLTVGPAADLRAVLDYRGDLVVERTALVNRVHADLGGIRPGYQHQIGHLSTRSRIQQALELLAGDDTIRATVCRRRLQRVLDIDEETAALKRQLATMVEATGTTLTDMYGIGPVIAARLIAEVVDPRRYPNRNTFAAANGTAPVPASSGRTTRHRYNPGGNRQLNRALYTIAITQIRTDGEAKAYYQRTRAEGKTGREALRCLKRRLSDIVYKTMLADVRAAERQAIHGLTTELATSRLAVDATAATEARLTA

SEQ ID NO: 251785 - protein, 354 aa, unidentified
MEQVDSQAEVILGVDTHLDVHVGVVIDAVGRVKGTISIETNPTGYEQLLNWARGLGRLARAGIEGTGSYGAGLTRFLERSGVAVLEINRPNRSRRRNRGKSDPTDAESAARAVLADDATGAPKAQNGLAEALRTLSVARRSAVKAKTQAVNQLRALLVSAPSFIRDALLKVKPEHCVAACADLPDDDEKNPVLASLKTTLRLLAKRWNALRDELRELDKQLTRLTKLAAPRLLGRFGVGPQTAATLLVTAGDNPTRLRNEAALAALCGVSPLEASSGKTSRHRLNRGGQRQANNALWTIAMVRMRSDARTREYVARRTGQGLSKKEIHRCLKRYIVRELYPLILADLADSARAA

SEQ ID NO: 251786 - protein, 348 aa, unidentified
MQVSTIGIDLAKNVFQAHGVDSAEKPLLKKQLRRGQVIEFFGKLSPCLIGMEACATSHHWARELRKLGHDVRLMPPSYVKAYVKRGKNDAADAAAICEAVRRPSMRFVPLKSAEQQAALMLHRTRDLLIRQRTQLINAMRAHLAELGLVAQKGREGLQQLMRTVADTDDEALPSDARFACQAIVAQLQAVQMQIAGLEKRILQAHRANPASKRLDAIPGFGVIVSTAVVATMTDPKAFKRGREFAAWIGLVPRQNSTGGKERLGSISKQGDRYLRRLLVVGALAVIRSARARPDKYPWVVAMLSRRPAKVVAVALANKMARIAWAILAKGETYRAPAHSNSGAIAVSA

SEQ ID NO: 251787 - protein, 455 aa, unidentified
MAKKGKKNTPSPENMPILHPHAAGIDVGAEEHWVCVPADRDAQPVQKFSAFTCDLHRLADWLTACRITTVVMESTGVYWIPLFQILEARGFEVALVNARHVKNVPGRPKTDRFDCRWLQKLHTYGLLAPSLRPPEDICQLRSLLRHRDNLLRMTVKHIQHMPKSLDQMHLHLPHGMSDVTGVTGMRILRAIVAGERDPQTLAQYRDYRIQSSEDTIAKALEGDYRAEHVFTLTQSLALYDFTQQHIAACDQEIERVLATFDSLVDPEEHPLPPPTTAHRRPQRNEPAFDLRTHLYRITGVDLTQVPGLQAPTIHIVLAEVGLNRHTWPTDKHFASWLGLCPDHQISGGKVLSTGSRRVQNRASRALRMAAQSLRTSPSYLGAFFRRMRSTLGPAKATTATAHKLAKILYHMLKEKAPYRARSAEDYLPKDHERQLRQFRKQAQYLGFDVVPQTNH

SEQ ID NO: 251788 - protein, 339 aa, unidentified
MSKPIQAIQALAFCGIDVSAATLAVAVQQQDQRFEERIFDNTASGHKALIRWLHKLKVHVRVSLEATGIYSLDLALALDGADGIEVAVLNPKLIHRFAQTLRRSKTDSADAQVLAEYSMRMPFTPWSAPGLSGLQLRSVSRHIQSLVVEHARECNRLHAAEKSASTPRCVVEDLKRSMASLKRRLARLRSAALELVLSDELLQKRFELLIGIPGIATISALELLGELAPLSSEMSARQWVAHSGLDPSHRESGTSVHKPSRISRAGNRHLRRALYMPALVAVRHDPHLKAFYESLLGRHKAKMQALIAVARKLLHAIYGIFKSRIPYDGKKLFPQQATA

SEQ ID NO: 251789 - protein, 359 aa, unidentified
MDSIAQQAPTRKVAIGVDTHKHIHVAVALDELGGRLGELTVSADSGGYVRLAQWAVGHGRILAFGIEGTGSYGAGVASHLHRQGHRVIEVNRPDRRERRLNGKSDSLDAENAARSVLSGRAIATPKAADGQIEMLRQIKIAKDTAVKARTQAIVTLKTLVVTAPPDLREQLDGLPKMALIERCAGLRPGPMTTPLAATKHSLRELARRWQLLQVEIRGHERHLEILTSAAAPAMVAAFGIGADTAAEMLIVAGDNPDRIRSEPAWAKLCGVCPIPASSGMTNRHRLNRGGHRQANAALYRTVIVRLRFHQPTIDYVARRTAEGRTKSEIIRCLKRYVAREIWAYLHPDRHAVPQPELAA

SEQ ID NO: 251790 - protein, 317 aa, unidentified
MTTEVFIGIDVARDSLEIVVRSTGEQWQVGNDAAGTATLLPRLHALRPTLIVLEATGGFELPVLAALGSAGLPVVAVNPRQVRDFAKAIGKLAKTDAIDARVLAHFAEAVRPPVRPLPDAATQALGALVTRRRQLVEMITAEENRRAGALPPVRADIQQTIAFLRTRLKGIDQDLSQAVRNSPLWRDQEHVLRSVPGIGPVVSVTLLADLPELGVLGRKQIAALVGLAPLNRDSGTLRGKRTVWGGRATVRAVLYMAALVGTRFNPVLRALYTRLLAAGKSKKVALTACMHKLLTIVNAMLKHHQRWQLTTSLSQAS

SEQ ID NO: 251791 - protein, 406 aa, unidentified
MTPKFVASWIYLYTMNWKHINGNRDYRIQIGGHYMNYNTVYVGMDVHKESFTLCSCKYEDEKASHYQRTQASYKNVLRYLEFLRTIYGDDTRFMCGYEAGCLGYSLYRQLESFNVECVILAPTTMLEQRSKRRIKTDKRDAEIIARSLAQHNYSPVHIPTETDNQTKEFIRMRDDHKAELKKIKQQILSFCLRQGYQYDGSGNWTEKHVKWLRSLKPVGLYKEILDEYLLTYTTLTDKLNRLDHRIEELASKEEYKESVSKLTCFLGIRTHTALSVIVEVGDFQRFASARKFAGYLGLVPGQHSSGDDRNGLGITKAGNTHVRRLLTESAQSYTRGKIGYKSRVLRLRQAGNSPQVINYADRANERLRRRYYKMVLKDGKKYNIAKTAVARELACFIWGMMTDNIY

SEQ ID NO: 251792 - protein, 411 aa, unidentified
MQTMIARACGLDVHKAQLTACVRLLVDGVVSEVIQTFGTTTSDLLALRDWLAAHGVTHVAMESTGVYWKCVYYTLEDEFELLLVNATHIKHVPGRKTDTIDAQWIAQLLACGLLRGSLVPPKPIRELRDLTRYRKALIYERGRAVNRLHKVLEDAGVKLSCVATDVMGVSGRAMMRALIEGNADADALAELAKGKLRAKLPALRKALEGRFRTHHAFMLERMLAHIDMLEDDIAALSKQIEEQIAPFAAKVELLCTIPGVQQRTAEVIIAETGGDMSAFPSAKHLASWAGVCPGQRESAGKRKSSKTRKGSPWLRATLIESARGAARTKESYLSERYHQLARRRGDKKAIIAIAHEILTATWHMLTTGELYRETGPAPLRELAAERARNRAIKQLERLGHKVILEPSPQAT

SEQ ID NO: 251793 - protein, 354 aa, unidentified
MKRTTKYVALDVHQATTSASVREESGRVIARSVLPTDGAAITEFVRGMRGAVHVALEEGTQAQWLHDVLAPLVDRVVVCDRRGAPRQGNKADQVDADQLSEQLRRGGLRAVYHGSADRATLKELTRTYRNLVEDATRVMLRLKALFRARGIPAPGKRVYHPRTRAQWLAQLQDPGARLRAEALYAELDVLRHLRPRAKAAMVTEARRDPAWPVLRTIPFFGAVRVALLLATMQTPWRFRTKRNLWAYAGLAVVTRSSADYALVAGQTVRRRRPPLTRGLNRNHNRVLKDVFKGAATAATARPGPLQDFYHSVIARGTREELARLTLTRKLAALTLRLWKKGERYDPTKLTTPAR

SEQ ID NO: 251794 - protein, 354 aa, unidentified
MLAELVDHVIGVDPDRDWITAAVVDAHTTGVVATEKFPANSTGYDEAISWAEALTVTGERAWAIEGTASYGRGLTAALGRASEWVIEFDRPREKASKDGAKSDELDAIRAAREALGRTRLHTPRAHDGHREALRVHTVTRAGVVRARTAAINELKALVLTAPDDLRQELRHLTTKALVKRCASFRDTPQRPIAERCSRNTMRSIGRRIGHLTDEITVHDTAMKQLIDEAAPQLVAEHGIGYVTAAMFYIAWSHPGRCRNEAAFARLAGVAPLPATSGQRQDRHRLNRSGDRQLNSALYVVALARTRTDPTTREYRDRRRAEGKTDREIRRCLKRYIARRVWRLLEHPPGPKTAA

SEQ ID NO: 251795 - protein, 407 aa, unidentified
MAVLFAGDDWAEDHHDVEVQDGSGRVLGRARLGEGVAGITRFHELIGRFADPDAGPDQVVIGIETDRGPWVAALIAAGYVVYAVNPRQAARYRERRGTSGAKSDAGDAHMLADMVRTDSHQLRAVAGDSGEAQAVKVVARAHQALIWERTRHVLRLRSALREFFPAALEAFDDLTAPDALELLARAADPASAARLSIAAITAALKRARRRNAAEKAAQIQAVLRGHQLAQPQVVTAAYAATVRAAVAVISVLNEQAGVMEAQVESHFGRHPDAEIIVSQPGLGMVLGARVLAEFGDDPDRYAGARARKNYAGTSPITRASGKKKAVLARYVRNRHLADALHQQAFCALTASPGARAYYDELRARGTSHHAALRQLASRLVAILHGCLKTSTLYDEATAWRHRLDDAA

SEQ ID NO: 251796 - protein, 380 aa, unidentified
MDFKQNQKINQVTEKTLVVGIDIAKRKHFACFVDDRGRVLQKSFSVLQSSDGFQSFYQRILAAMKEYKKTEVIVGIEPTGHYWLNLAHFLEDRGIPLAMTNPMHVKRSKELDDNLPTKHDRKDALVIARLIKDGRFSYPRILKDVEAELRVGSTFRSKLTEELGAVKNMMIRWVDRYFPEFTQVFPSFGKMAMAVLECTPFPSDLHQKQPDELLSLYRQVEGLKSPQRPKAMLLIEVAANSIGVTEGREMARIEIATLVRRYNQLEQDIESITQHLVELVKTSVEYEWLSTVQGLGDTTIVDLLAEIGSFSHYEDPRQLIKLAGLTLRENSSGQHKGQKRISKRGRRNGITTPMTNKAIATYRMVPAIGRIHFCFLYWNQ

SEQ ID NO: 251797 - protein, 320 aa, unidentified
MMAQNDLVVVGIDVAKDKVDAYIRPLSAGRTFANSPIGRRQLTAWLRRQKVGKAVMEASGGYERSWAGVLRQAGMEVRIVDPKRVRSFARSAGRLAKNDTIDAAMIAWFAETFDQAPGQAHDAAREKLAQMVNARQGLLDLQTTLQNRDEHCEVEAVQKMHARLLKKIAGEIIRLEAAIAALVKTTRHFAELAEIIESVPGLGEITSAGLIAAMPELGLVNNKVAAALLGVAPYDDDSGKRRGERQIKGGRRRVRNLFYMACLGAATRHNPVLKTFYRRLVAKGKEPKVALVACMRKLIVILNTMIARRQKWDPHRHALS

SEQ ID NO: 251798 - protein, 406 aa, unidentified
MEVLYPRCAGLDVHAETVVACVRTAAGSTVHREHLTVATTTRGLLTLAEWLTEHQVTHVAMEATGVYWKPVWHVLEGHFTLELANATHIRNIPGRKSDINDATWIADLLALGLIRGSFVPPAPIQELRDLTRTRTQLVREIRRHTQRLQKILEDANLKLTEVISDILGTSGRAMLQALIAGQTDPEQLAALAHPRIRASRAELAEALQGRVTQHHRFMLRLHLDQITRLEQTVAAVEARIEEYLEPFREAVDLLLTIPGVRVTAAAVIVAEIGTDMARFPTAGHLVSWAGLCPRLDESAGKRRSTRTRRGRWLKTLLVQVAWSAARTKDSYFHAQFLRLKSRRGPKKAILAVAASILADIYVMLRDRVCFNDLGAQYFAQRDKTKLTNRLLKRLRDLGVDVEVKAA

SEQ ID NO: 251799 - protein, 355 aa, unidentified
MKKVLKQVLGVDVAQGELVVTLGRMFDDLRVDLYAHKVFRNTEKGILTLLDWVNKLTDPEVKVRFVMEATGVYHQKFAFYLYAQNYEVSIVLPNKISNYMRTLENKTITDKSCSEAIAQFGLERNLDRWHKPKKTYRSLQQLTRERDQIVMERVMVKNQLHAEQAEAEPNERSVARLNERMRLLNKQEKEIKSDLTEIINSDRILKSEITNICSIPGIGELTATIVLAETNGFELIRNKKQLTSYAGLDVKEKLSGTSVKGKPSISKKGNRHLRKAMYLPALSAVKYDESFRNLYVRIVSRQGIKMKGLVAVQRKLLEMIYVIYKSKNEYQKDYTDLKRSSALSHKDQYATQTGS

SEQ ID NO: 251800 - protein, 347 aa, unidentified
MDVFIGFDISLQTTHICAVDIDGNVVREGIAVSEMEPVDSWLRTHCKDWNVRRIVFETGQLSTHFYHGLRASWPVICIDARQAHGTLKAQRVKTDKNDARGLAQIARTGWYKAVHVKSPEGQALRALMGGRKQLVELRLELENHIRGTLKTFGIKLGSVTAAAFSEKAQALIASENDLVKEVILAMLNTRNAILEQQKALDRRCGFIARRSPVVKRLMTVPGVGIITALSFQAEIDDPHRFRKSCDVGAHLGLTPKRYASGETDWTGGITKCGNGALRTLLFEASVTMLTRSGKWSRLKAWAVRLAQRNGFKAASTALARKLSVVMHRMWVTERDFAYGDVPALHGA

SEQ ID NO: 251801 - protein, 420 aa, unidentified
MQDVEDEPLFADRAAGIDIAKAGIEVTIRVPSNTRAGARQQETRSFATTRRDLMALADWLSERGCTHVAMEATGVYWKPVWNLLEGQFEVLLVNAQHIKAVPGRKTDQKDSEWIADLLQHGLLRASFVPPTPTRELRDLTRYRASLAQEINRIANRIQKVLEDANIKLASVATDALGASGRAMLEAIVNGEQDSQRLAEMSRGLLRNKIPQLQQALEGRITGHHRFLLRELLDHLYFVESKMRRIEQQVEERLHPFQSEVVRLCTIPGVDRVTAWGLLAEIGLDMKQFPDAPHLASWAGLCPGSHESAGKRKSGKIRKGSLWLRRCLCQAAWAVSTKKNNYLSALYRRLAARRGVKRATIAVAHNLLVIDYYILRDQTCYQDLGPDYFDRLNPEGLRRRLTRRLEGLGFKVTLEPSAQVA

SEQ ID NO: 251802 - protein, 368 aa, unidentified
MKMNAIKAAPAASAIALKNEKSAKAKRILIGTDVHLRGYQAARKIDNGVIGVVENLRSEEALLLHVEKQCERADQVVVVYEAGPLGYTLYRKLTARGVLCYVCAPDSSEQKRKRRKNNKIDARNLTSKLFNYLNGDQGALQLARVPTEAQEQLRLASREHDQMVEERKRLGAKGNALLLSQGFGSWSNWWRPKAWVQLSSLVPQWLLERLKIWVDVLKMLDEKICQAKVALARTCSGPRPKGVGALSQMQLQSEVLDWSLYTNRRKIACLAGMVPSEWSTGDKERRGSITKVGVPAIRRIIVEMVWRMILFQPQYKPVQKWQKVLQGTNPALKKKAVVAIGRQLIVDLWRLQTGRVTAQELNLVMVGA

SEQ ID NO: 251803 - protein, 357 aa, unidentified
MLSSNVKYIGLDVHKEAITVAVRNSAGKLVMESIVETKASTLLDFLHGLRGELHVTLEEGTWAAWLYDVLKPHVREIVVCNPRRNALLKEGSKNDRVDARKLSELLHGGLLRAVYHGEHGLRTLRELARSYEVISKDLKRVMNRIKALYRSWGIPCTGTQVYGRRHREQWLQKITEPGVHRRAELFYQQLDGLQVLRHTVRGELLVESRRHQAVKVLRQIPFIGPLRAAQLVALVQTPHRFRSKRQLWTYSGLGVETHDSAQYRYVDGQLQRSKKPQQVRGLNQNHNHAMKEIFKSAALSAALRAGPFQDFYEGLLTKGIKPELARLTLARKIAAITLTLWKKGEHFDAKYVKSQAA

SEQ ID NO: 251804 - protein, 391 aa, unidentified
MSSLAVRTPEPTIATPTPARSIIYLGMDVHKDSITIAVLPAEAKAPTRLERLPNDLPKLKKWIARVARDGEIRACYEASGAGYVLHRALREWGYACEVIAPSLTPKRPGVQRKHDKRDATDLARYYRAGELVVVRIPSEAEERVRDVVRCRETFQREILKSRHYILKFLARRGFVYREGTNWCTPHLKWLQHLTTDGSPLAPDDRLVFREYHALLEYKLRRREELDRKIEQLALLPSLAPMVQTLQCFRGISLHSAMVLATEIGDWRRFEHPRQLACYLGLVPKEDSSGDRIRLGAITKAGNTHCRHVLVQASWSYRHRPQTSVDLKRRQAGQPPAVITHAMKAQHRLHARFNHLSYRKRSQIAVVAVARELVGFLWAVMQDVVIPEPQSV

SEQ ID NO: 251805 - protein, 349 aa, unidentified
MKHYIGVDFHMQHSSVAVIDETGVVKDERKLYHTDMKQFQDFFSSFDKGTSVSIEATRNWYWIIDCLQDLGLNPKLVHAKKARIIAESTIKTDKLDARVLAHLDRCNFLPQAYIANKETRSSRELLRYYMSIVKIRSSIKNRVHALLAKNNVHHGFKDLFGKSGLLFLKELSLSYIFRLELDGYLNVLDHLKQRISEAQCEIKDECAVSEGAKLLMTIPGISYFTALLLYSEIADIKRFSTYKKLCCYAGLTSSTRQSADKTHHGHIIKDSNKYIRYALVEAVSIAVRKDPKLWVLYTRLESEKGFAKAKIAVARKLLTTIYFMLRDKTCYVINETHFNRVNPVTKLGA

SEQ ID NO: 251806 - protein, 375 aa, unidentified
MSIVRFLSFDNHADTLVPAIAEPDGEVRRLPTIANRFECLRKMVQNLGPAEQLRACYEAGPTGYVLYWQLAALGVKCEVVAPSLTPVKPGDRVKTDGRDAMKLARSYRAGDLTPVWVPDAAHEALRDLVRGREDVREDQQRARQRLGKFLLRHGWQRPKDIQKSWTQKHMAWIKSQVRCEQPASQAAFLHYVHEVEHAADRLQTLEQAIDDAIATAPAEIQEVVKALQALRGVGKIVAVTVVAEVGSLSRFSNPRQLMGYSGLVSSEYSSGSHIQRGAITRTGNAHLRRVIVEAAWAYQHKPWIGGWLAKRQQGLDQETKDIAWKAQWRLCTRYKKLAARGKNKPQIVTAIGRELLGFLWAIGVRAEARAAGRTV

SEQ ID NO: 251807 - protein, 339 aa, unidentified
MNVTTIGIDLAKNSFSLHGVDSRGKMVYRKTLARAKLMPFLAQQPPCLIGMEACSGAHHWARSLQALGHRVGIMASRFVAPYRKGGKNDGNDAEAICEAVARPGMRFVPVKSDEQQAILSLHRVRQGLIKERTALINQLRGLLSEFGLIMPKGRYSAQHHIPDILEDAENGLPMLTRRLLNDVYLRLRAMNEQVLAYDRELEHLARESAVAKRLMSIPGIGAVTATALVASVGDAKQFKNGRQFAAWLGLTPRQYTTGGTIRLGRITKKGDVYLRTLLIHGTRAVLATVKDKQDKLSVWTRVLIERRGYKRAAVALAAKNARILWALMARGETYQLKTA

SEQ ID NO: 251808 - protein, 348 aa, unidentified
MTMLADIVEVVIGVDTHKHTHTAAVVTAATGAAVDNVTVTTDPDGYRALVDMADRHRGLRVWAIEGTGSYGAGLARLLTARGEWVIELDRPRRPVRRHGAKSDPLDAVRAAREALARPDLAAPRSDGQRAALAVRLAARRSAVGAATIAQQQLHALAIAAPETLRGRLRGKPTTETVAICARLRIDPRWDLLTRETATVLRSLASRVRTLHDEARDHEQALLELVRGWRPDLLDQQGVGPIVAATVLCAWSHPGRIRSDGAFAMLAGVAPIPASSGQTIRHRLNRSGDRQLNRAIHTIVLTRLRHDPTTRAYLERRRAQGHTDREIKRCLKRYVTRQLYRQLERALTT

SEQ ID NO: 251809 - protein, 354 aa, unidentified
MKKIFIGIDFSKEKFDATLIQAEGLKECAPSVHEVFDNKTSGYRRLVKWVKTHAEGFTADTWLFCGENTGGYSIGLSNYVYASGYDMWLECAYKIKHSAGIQRVKNDKADSRTIAEYAMRNYDKMIPYKPQSASLTCLREVFLYRHSLVRQKVALQVRRDEKRLTQEKSEARAFVSFTSKHLITEVNKAIAKCDQKIKDIIASDDELREVFDIITSMPGIGIQNATCLMVYTDNFRKFDLNSRKIGCYYGIAPFGRQSGTSVNSRPQVSPFANRMIKSLLSQAALAAIKFDMNVHNYYQRLIERGKHPLLVHNNIKNKMLHILVAMVRDRVKYNPENVYGTRNELSLAPQGLNI

SEQ ID NO: 251810 - protein, 355 aa, unidentified
MNSEKYIGLDVHQATIVVAVTDSTGKLVMESILETEAATILQFFAGLRGNLAVPFEEGTWSAWLYDLLNPHVEKLVVCNPRKNALLKDGNKNDRIDARKLAEWLRGNQLKPVYHGENGVRMLRELSRSYLAIVKDLSRVMNRLKAVYRSWAIPCAGRDVYYRRHRAQWLDKIREAGVRRRAERLYEQLDMLQHLRQEARRELLAESRKHAITARLRQIPYLGPIRSALAVALMQTPHRFRTKRQLWAYSGLALQTRIRAEYRMVEGQVRRSKKLLSIRGLNKDHNHDLKGLFKGAATMASVRPGPLQDFYQAALAKGIRPTMARLTLARKIAAITLTLWKKGESFDAEKLKSQAA

SEQ ID NO: 251811 - protein, 461 aa, unidentified
MIRRLVGVDLGIASAHTVRVLTEDGREVCRRRCEPTVDSLRRVEAAALAGAPAGTVLEVVMEPTGPAWLPIAVFFTARGHRVFRVSSGKAADLRRFLSRHAKSNGIDADTLARLPLVDPAGLYPLELPGTEAAALDRRVRATDRLTVLAAQHKVRIKDLTRQLLPCSPLTGDLGVADLAVLERWADPRALLAAGPARLTALIVKASNGHLGADRAQQWRAAAAAAVELYGDHPAIAWTDLAAEVGTEVRLLRATLGELATHARERETAYRYADLGGLARSLPGVGDVGGPVLVAGMGRPGRFPNGAAFKSYTGLAPRAAETGNTDRKGQPMSKAGSSLLRTTLIRAADTARKQDPQLARIYYTQMVERGAEHLKAVCVVAGALAERIWTVMNRQMPYVICDIDGTPVTPEQAKQIIAQNFTVPDEVRRRRRSSKTPSRKPAQQPTISSKGGRPLSKPHTAA

SEQ ID NO: 251812 - protein, 365 aa, unidentified
MEYYTAIGIDVSDKTSKICIMTKIAGERRIIEETTVATTKEAFSEYLATKDRKTAVTFETGVHCRWMAQLIRGMGFKVNVANPAKLRALTHSNTKNDRNDARELARYTLADVEMLHPVYLRPETHQQMIRLLEARLALVETRTKLINEMRGFAKSMGFRIPKKDAAYFHLLDRTGWPKDLEAVCWPMMGVLKTIHVKIAAIEKQMHELADTPEFAADVERVRQVVGVGFFCSVAYVAILGGSYARFDKARDVGPYLGLVPRQDQSGDIDKQLPITRAGSTLLRTLLTEAAQVVLKDSVRMTDLKLKGLRIAERGGKNARKRAVTATVRGLAVTMMALLKHPERDYMPLSEANQKFIEQMAAIKTA

SEQ ID NO: 251813 - protein, 424 aa, unidentified
MKVTYQICCGVDVHKSFLVATIVKTTGGIEPSYQKKRFSTFNNSILEFKQWLLDNGCHDICMESTGKYRVPVFNLLEDEINVVIANPKWVKAVKGNKDDTKDSKWIGDLFRLGLVKGSYIPCKKVRILREYTRYRYKLVSCRSSEKNRYQNALTVCNVALDSIVSDIFGKSSTSIIDYLLEQSGTSINHEEIASKLLRSLKSKEDAVIESVEGYQMTDAQKYRMRLVRAHMDYITAEINDVDKMIENMISSNPDFENAVQFLCTIPGVKRDSAITIISETGTDMSQFSSSKRLCCWAGLTPGSNESAGKKKSVRITRAGIYLKPALVQCAHAAVKSDKSPYYKKKYESLVKRRGKKRAIIAIARMILTAIYQMLSTGEQWNPSDLYKIDMPVALVEKQKAKAIKQAKKLLQREGLLPPDESLAS

SEQ ID NO: 251814 - protein, 370 aa, unidentified
MEKDTTYVALDDSKRKIVAGILRPNDTVPELREIANDPHHIRRLLTRLQRERPVSACYEAGVSGYDLYRQLRALGVACHVIAPALTPRRPGRRIKTDRRDAAKLVHLYRAGELTAIHVPDEVEEGGRDLIRCRDDIRRDVLRWRHRLLKLLTRHGRMYVAGRNWSQAHWRWIREQRFDVPPLQRAFEATLFTLEQALARQAELDKEIEALAATVPYREPVGWLRCFRGIDTLSAMILLAEVVDFQRFHRPRELMAYLGLVPSEYSSGETQRRGALTKAGNAHARRVLVEAAWHYRHRPTIGHALATRSQGQPPAIVAQAWRAQQRLHRRYRHLVVGHGKRPPVAVAAIARELVGFIWAAMTGHESRLQTA

SEQ ID NO: 251815 - protein, 391 aa, unidentified
MVCVGIDVAKDKHDCCILDSDGTIRADCITIPNNMDGFKQLLQTIRDCTKKSDKIKVGLEATGHYSYNILGFLLDNDLAVYVMNPLHTNLYRKSLSLRKTKTDRVDARTIATMLLSDVDLKSYTDTAYHNEELKSLTRYRFDKVRERAKLKQSVSRLVTILFPELEKIVPSLHIASVYALLSEYPGAKQISEIHLTKLTNLLATASKGRYGKDKAIQIRDAARTSIGSVMPAKSLELQHTIKLIRELTSEIDEIEVSIQKIMDELNPPILSIPGVGIQSAAMILAEIGDFSNFESPDKILAYAGCSPSTYQSGKLTNCYAHMEKRGSRYLRYALYNATKYVCYWNPVFAEYLAKKRAEGKHYNVALSHATKKLVRLIYALQKSGKAYLTAA

SEQ ID NO: 251816 - protein, 336 aa, unidentified
MDILALDLGKYKTVFCEYDTANGEHTFGTVSTSAQEIHDLIVRTEPDRVVMEVCSIAGWIVDITQALGTPTEVANTMHEAWRWKNVKKKTDKEDALKLARLSTMGQLALVHMPGKDVREKRALIKHRQRLAKYRTSIKNAIRAIFARQGIAIPRGAAMWSREGLDWLQSEARDLAGISDATELWRGQLHVELELLQAVADSMKVVESKLDKMGAADKQIKRLQTIHGVGPRLAEAVVAFLDDPKRFKSTKEVGSYMGLVPRPYQSGERERQGKTGGRGNLMLRNLLIEVCWASLATNAWARDTYKKLLRGSFLAEEDRHHGPGAEVGGPLLGHAPR

SEQ ID NO: 251817 - protein, 354 aa, unidentified
MSQKLSAAIAVIGIDIGKNSFHIVGHDQRGAIVLRQKWSRGQVETRFANLPPCLIGMEACVGAHHLSRKLQIFGHDARLMPAKYVRPYSKGQKNDFRDAEAICEAVQRPTMKFVATKTADQLDLQALHRVRDRLVGQRTGVINQIRAFLLERGIAVRQGPHSLRSELPNILATRTDVLSPRMFRIIEALAGDWRRLDERIDGLSSEIETLADHDQACERLMTVPGIGPIISSAMVAAIGTGDVFSKGRDFGAWLGLVPKQISTGDRTILGKISRRGNRYLRALFVQAAWVVLVRVKRWERYGLKSWIEAAKKRLHHNVLAIALANKLARIAWAVLNKGRAFECVKTEEMASGPA

SEQ ID NO: 251818 - protein, 351 aa, unidentified
MKYYTSTTEFNCGIDLHAREMYVCVMDRQGNKLIHTNIVGNDFAYFLKKIAPYRHSLTVVSECTFNWYWLADACFEAKIPFVLAHALYLKHIHGGKNKNDRIDSEKLAHLLRSNLIPPAYVYPSERRPIRALLRQRMSYVWQRAALMTHVSMNQTAEGLTPAAKGGHNRDVWIERILAQYDNPLHRMAATCEMDMIRAYDTQIVKLETEIIRQAKHHEGRDYQLLNTVPGIGRILAMTILFELDAIERFATVKDFLSYSRLVKGSVASAGKVKGVTGGKMGNAYLRWAFGEAAVICKRNHPLLTPYADRLVAKRGKFKGNAILAAKLARAVYFMLQKGTAFDAEKLIATSL

SEQ ID NO: 251819 - protein, 333 aa, unidentified
MQKIFIGIDMSKASLDLCVRNSEIVLEELKLSNTISELNKFFKKFLKEYNQSAFLVCCEFTGHYTYPLSFVCEDLGIDLWLASPYQIKHSCGLVRGKTDKIDSRRIADYAFRFQDKCRLYSLPDKKLASLKVLVSERDLYVSHKIALQGQLTDQKNFMSAMDYSRKSKRLKGLLKGLDKNISTIDKEIEKFINNDATLSNQHKLLTSVDGVGTITAAKMIAVTNAFKNFDDARSFCCYAGVAPFEYTSGSSVHSKRKVSHKADKSIKSILHMAAMSVLRMKNSELKKYFDRKVAEGKNKMLVLNAIRGKLILRMFAVIKQNRTFDKNYQHAVA

SEQ ID NO: 251820 - protein, 351 aa, unidentified
MTNSILAHRWCVGIDLHKDTMTVCTYCRCCGEIAFRKIACKNRDQVAEFFRALPRPHAVAIEAVGFYRWLWELLEPLVEKLVLADATQARALAGRRMKTDREDARNIAELLADGRLPLAYAPPMEVQVLRDWTRQRNRLSRAHARALHGVKSIMNTNNRPGPVRLSAERLTGYIKAYGARLPERHVRMLWQHQRQLSLVEEEMGLCEREIAGLLASPRFAATAALLVTAPGVGPVVTATVLAEVGDFHRFPDGKAIGRYAGLTPRLFASGGKERHGHICKTGSRDLRWVLQQAAWTAIRCDERIKHRWLRISRGSGRKAAAVAVGRQLLVTLWHMVHRQTPYRSPTPQEAA

SEQ ID NO: 251821 - protein, 348 aa, unidentified
MSRMQEQITRQPLTFAGIDVGKDGLDIFIHPAGVRLKVKNQKKAIPALIGELTKHGVTLVTMEATSTYHRLAHSMLHEAGIAVAVINPFRSRQFADSIGQLAKTDTIDAKSLALFAERMDPAPTVPPDAQSRQLRDLNTARRQVLDEICDLKRQLHTTEHPLAVRQIKARIALGKRHKAVLEQEIKDVIASHSELKNRFIILTSIPGIGSITAAILLTDLAELGQVNARQIAALAGVAPLNWDSGTKNGTRIIRGGRQHVRNALYMCAVACIRRPGHLGMTYNNLIRRGKNPKVALTAVMRKLIILANTLIAENRIWQAQAPDHIAGRVSLEIPGVSARPGLQTAMAA

SEQ ID NO: 251822 - protein, 418 aa, unidentified
MARVVEIVYPICCGIDVHKNFLVACIATTDERGHTTHLIRRFSTNTGDLRRLADWLTVNNCKDVCMESTGKYWIPVFNILEQICNVTLTHPKYVKAIKGKKTDKKDAKWIAELFKCDLVRSSFIPPYDIRQLRDLCRYHMKLTHMTTSEKNRSQNCLTTCNFKLDAVFSDIFGKSATRILETLIAQGNSDFEIAPLLDRRCKATVDEVAAALDGELSFAQAEKLKLIRSHMESLSELKVRLESLIYELAIPFKAEIGLLLTVPGISTPLTAIRILAEIGADMSVFETSKHLCSWAGVTPQNNESAGKKKTTRISRAGAYLKPLLVQISLATCKSNKHPELKEKYETLKKRRGHKKAVIAISRRLLTAIWHILSKREAYNAELYRKADKPPASRILTPEQAFAILRSKGYQIKSSEPAA

SEQ ID NO: 251823 - protein, 403 aa, unidentified
MNNVAGIDVSKGKSMVSVLRPFGEVVAKPFSIGHTGSELKELADYLKSLDGETRVVMEHTGRYYEPVARFLHDEGVFVSAVNPKLIKDYGNNTLRKVKTDKADSRKIARYGIDNWAELRQHTPMDTIRMQLKTLNRQQSLYTKTKTMMKNNLIALLDQTYPGVNALFDSPVREDGSQKWVDFATTFWHVDCVRNMSLAAFTERYRKWCKRHGYNFSQSKAVEVHAGAQDLIAMLPRDALTKTMVRQAIDALNAISASMERLKAEMQALAAQLPEYPVVMAMHGVGDSLGPQLMAELGDVTRFTHRNAITAFAGVDPGADQSGTHEAKSTRVSKSGAPELRRALFLVMDCLLKTQPQDDPVYRFMDKKRAEGKPYLVYMTAGANKFLRIYYGRVKEYLASLEGN

SEQ ID NO: 251824 - protein, 344 aa, unidentified
MVTTIGIDPHKATHTAVAIDESETVLSEITVLADRYQTMRLMDWADGLNGDGRRWAVEAAGGLGYLLSQQLVARGEHVVDVPAVLASRVRVLSSGRSEKNDPNDARSVAIAALRQPGLAVVHREDHVQVLRMLAKRRRELTGLRTQAACRLHAIILQLRPGGMTRHLSASKAARILQGMRNLDAVGEQRRLMARTHLGDIRRLDRELKANKKLITAAVGRADTTVTDIYGVGPIVAAFLIGYTGDIGRFASADHYAAYNGTAPIEYSSGGKTKHRLSLRGNRVLNHAIHAAAVTQIRFETPGRRYYDKKIAEGKTNKEALRALKRRISDAIYRQLVTDQQPTTR

SEQ ID NO: 251825 - protein, 424 aa, unidentified
MEERDEEKSIRAWIGIDWADEKHDVSIYDVASGKQEALIVRQNPEALQEWLGQLRCKYERGYVAVVLEQGRGGLLNALMGCEFLVLYIINPKSLSSFREAFYGSGATSDPVDAELMREMVRQNPSRFRAWRPDDVQTRSLRLLSEGRRDLVNQTTALTNRLTALLKGYYPQALAWVGAPNTAWACDFLEQWPSLQSLQISSRRQILRFYEKHPRAAIDLEEQLKQFQEARVLTQDEAVLESSVLMVQTLVSQLRLLLASIAEFDRKIATLFRKHPDRPIFESFPGAGAALAPRLTAAFGTDRDRFQAATEMQELAGIAPVTEKSGKKLFVHWRYACPKFVRQTFQEFADHSRRWCRWAKAYYELLKKRGKSHNAAVRALAYKWIRILFRCWKDRQPYQDEVYTKSLFKHGSPLTAFLVAAVEKP

SEQ ID NO: 251826 - protein, 347 aa, unidentified
MGHYAGIDVSLECSSVCVVDASGKIVREGKVASEPVTLITWLGSLGVNLERIGLEAGPLSQWLYGALRETGLAVELLETRHVKTALSTMPVKTDRNDARGIAQLMRLGWFRPVHCKSMAAQEVRALLTARKLVQSKLYDIEMSLRGILRGFGLKVGPTTSQSFAARINHLVDGQTSLEAVAAALLSLHAVALREFKSLEKSVRQISRADARVRLLMSTPGVGPLVALTYVAAIDDPARFTSSKSVGAYFGLTPKKYQSGETDVSGRISKMGDGSVHTALYEAAHVILTRPIKGGALKSWAMKLARRAGMMKAKVALARKLAVVMHRMWIDAIKFDTDKASGCLRVAA

SEQ ID NO: 251827 - protein, 344 aa, unidentified
MQIASIGIDLGKTTFHLVALGERNKVLVRKKFSRATLLTYTANLPASLIGLEACAGAHFLGAALRAQGHQVRLIPAQFVKPYRKSNKNDFIDAEAIAEAVTKQNMRFVQIKTQEQLDWQAMHRVRDRLMQRRTALINEIRGFLLERGLTFAARPIYLRKNLPTVIEDAEQNLSPRLRWLLDRLWQEWKQTEIDIKAITDEIERISNDDARCRRLRQIPGFGPLVSTATVAAIGNGAAFRRGRDFAAWVGVVPRQYSTGGKQKLFGISKRGNIYLRRMLIHGARAVLLRVKYDTGGFGQWVHRLAQRAPRNKVVVAIANKLARMAWAVLSSGQEYRHQPLQLAAA

SEQ ID NO: 251828 - protein, 428 aa, unidentified
MADRLNNKPYGAWIAIDIAKDFNAVLSETNEGKRQHFRMANSAQDHDRFIVFLKSLPSPCIIGFEATGNYHRALGHRLISEGFEVCFISSIASARYREVMFNSWDKNDPKDAAVLLELLKQEITQRYVDPLIAGHHDLQELSKTYYQVTLSRTRLQHSILTHYLPLYFPEMGKWWNSTRSAWWINYLLHFPIPSAVTKHSQETFCEIASPIVGRKVNKAAKLIELYETAQHSIGLPITEDSLACKTFQIQLRRYQEINDCRTELEKTAQAVLANNLDSAILQSVPGIGPINALTILAEGGDLRRFNHHRQFLKYCGFDLAKNQSGNYRGQEHISKRGNARLRLALWMAVNTAITQPENSFQQKYNRYIKDAPQDKDIQRKARTAVAAKMARVVYGLVKSKQMYQGYYEKALPSGSIPLCRAVEAARTS

SEQ ID NO: 251829 - protein, 345 aa, unidentified
MEHYVGLDVSLKLTAICIVDQTGKIEREGVVPSDPEAIAAFIKSHAPHVERVGLETGATATWLWTELNKLGLPVICIDARHAKAALKMQINKSDRNDAVGIARIMQCGWYKEVRVKDLDSHAVKALLVSRALLVKIKRDLENQIRGLLKNFGLVIGRAKMNVFAVRAAELTVHRPELAAAIAPLLNARAAIEQQIADLDRKVMRLVRNNAQARRFMTAPGVGPITALCFLATIDDPTRFKRSRSVGAYLGLTTRRYASGEIDWTGRISKCGDKMLRSYLYEAANVMLTRVAKWSALKAWGIRIAKRTGLRKAKVAVARKLAVILHRMWIDGTEFRWSKEAANQPA

SEQ ID NO: 251830 - protein, 472 aa, unidentified
MIRSVGIDLHQGQHRARCLDERAQPCDSFSFQTTPEGLATLEEHVFRDGANPIIVLEPAGLPWLMVAVYLRSRHPDCRLVKAKTQKVAALRRYLRGPVKTDRLDALTLAKMPFIDPEQMDEIYLPPAEIHALQRLTRQRNRIEQDITGRKVRISAIVDGYLPGVRRAFNDAWSSPVRAFLRSRLNPFVVVRDGEEALHAFLSKNSYHSKWSRAETRLVFLACQSVASVCEFSRPSGTVNEDFFMDLQDEIARELRLMEAEEAESDSLAWCIAELYQKLHPSDNLRTVPGVGEHTAPVFLATVGDPARFPNQSAFANYEGVVPGARQSSNVEAKGLRMTKAGPSIMRMALYQAGDVGRRWDPQLAAVYYREMVYHGKNHRQAMGAVMSHLGARVLTVLKEDRPYELRDIETNPISKEHARKLILAKYRVPEEIRRERRRRNSKISKARETATYRTNEAAEAPQPVPVQAVSRK

SEQ ID NO: 251831 - protein, 359 aa, unidentified
MGERDRRAAAKPAGNPNSRRGREGEPELRKAGGRPGRKWVKVMGQYTELFVGIDVAKRTLEVALSSGESWTVNNDEAGVAGLVKELARRAPALVVLEASGGYEREVWLALIEAGVPTARVNPRDTHHFAQAHRQLAKTDRLDARGLVLFAAQLRPQPDAAPGAADERLKELVTRRQQLTAMLTAERNRQQQAHSVANRRGIQTVIRFLERQRKAIEEAIEKHLRANASLHEISELLQTATGVRLVVAGTVLALLPELGRLSGRQAGALVGVAPYDRKSGDWDGRSHIFGGRTEVRCALYMATLSAVRWDPYLRAFYQRLLQRGKEKKVALTACMRKLVVMLNAMVKTRTPWSPPCPILG

SEQ ID NO: 251832 - protein, 411 aa, unidentified
MIFVGDDWAEDHHDVYVCDADGARLAKRRFPEGVVGVGAFHELVAGLVDDPGEVVVGIETDRGLWVQSLVEAGYSVFAINPLAASRYRERHVLSGAKSDAADAKMLAELVRTDRHNHRQVAGDSGAAHGVKILARAHQNLIWDRTRAVGRLRSSLLEYFPAALSTFNDLSDRDTLAVLARAPTPGEAKRLSPAKIRTALRAGGRQRNIDTRAAEIAKGLRVEGLGAPAAVTSAFAATTRSTVAIIVELNAQIAVLETELANHFEQHPDADIYLSLPGIGVVLGARVLGEFGDDPNRYADAKSRKNYAATSPVTKASGRTHVVKSRFVKNKRLADAVHRWAFCALNNSHGARAYYDLRVKLGDSHHKALRALSNRLVGILHGCLRHHTLYDEHTAWAHRPENDLSIELRPAA

SEQ ID NO: 251833 - protein, 412 aa, unidentified
MDVLYPCCCGLDVHTKTVAACLMTSTEGPEPVKEIRTFRTMTADLLALADWLQQAGCTHVAMESTGVYWRPVYNLLEGQFELLVVNAQHIKTVPGRKTDVKDAAWIAELLRHGLLRGSFIPSKPQRQLRELTRYRSTLVQDHARTLNRLQAVLEDANLKLASVVTDIYGVSARAMLAAILTGERDVETLADLARGRLRAKRDQLKEALEGRVTAHHSFLLTEHLSTLEYLDEAIARVSGEIDQRLTADQEAIALLDTIPGVGQRAAEILIAEIGTDMRRFPSAKHLASWAGMCPGNHESGGKRLSGKTRKGSRWLRQILVEIAHVASKTKNTYLAAQYRRIAARRGKKRALIAVGHTILTIAYMILTRKQPYQDLGTAYFDQREQHRVERRLVQRLERLGYEVSLQPKALAS

SEQ ID NO: 251834 - protein, 377 aa, unidentified
MHSTTAPLASIGIDIGKEVFHIVGLETDGKIAFRRKIKRLALVETFKKMPPCVVGMEACLSAHFVSRVLRQLGHEPRIIPAIYVKPFVKGQKNDYNDAEAIAEASLRPNLRSVREKTQDQLDLQACHRVRSRLVSRRTATINQIRAFLIEQGIAVRAGATALRNSLPAILKNRQDEISPRMRGLIAGLYEDWICLDERIETIAGEIEKIGEKEANCRRLMSVPGIGPLISTAVVAAIGTGEAFERGRDFGAWLGLVPRQYSTGGRSILGRISKRGSKYLRTLFIQAANVILMRPHNWERFSFGTWLSNAAPRLHRNKLATALANKLARIAWSILRNEKTFDVPPSRGDGYLKPSLIRVRDREHAWNGSMNASRVWWH

SEQ ID NO: 251835 - protein, 312 aa, unidentified
MNQSPKAFVGVDISKETFDVFINVGNFYQKFTNNQTGHVDFINLLKNYEVAQIVMEATGRYHCVLAANLSVENYPVSVVNPRQVKHFSLSLGNLAKTDKLDAMVLSRFAQVVLPPLTVASDEQTQRLAQMVTRRRQLIDMRTMEKNRLDGVHLDVAELIHHHIEWLNSQIKDLDDDIGRQLRVMPLWQEKAKILSSVKGVGPTTTATLLALLPELGTLSRRKISALVGVCPYSHDSGKLKGKRAIWGGRSAVRAALYMAALVAKKNNKEIKRFYDGLIARGKLKKVALTACIRKLVTILNAMVRDGREWAAN

SEQ ID NO: 251836 - protein, 386 aa, unidentified
MTTIVGIDVSSKKANYHILNIGGAQGSAGSFMMDYEGFTSLLSQTNITSDSMFIMESTGVYHLPLQNYLLHEGKKTITVNPVLVKKFSAAQTLRKTKTDKADAFMIASFGEAHMKDIESKRIKMSKDTQAKAFARRRQEIAEDIARAKTQLKSDLSIAWPEILVINVFTDSMLTFLSHYGCAEEVLASSNEELLTVFSHQRGRSTSFSIEKLKDLSRNSIGVPHFADLVKDSAKKIITLNSRIGKLTEALVEHEKEFHKAEIEILTSMPGIGDVTASHFMAEIEDITRFNSYQQLIAFIGTDPAIYQSGMAFKNGRITKHGNKNLRKYCYLMAQKSVIYNPVFREYYDKKRGEGFPHRKAMIAVLNKMLKVIFALLTKGETFKRDV

SEQ ID NO: 251837 - protein, 369 aa, unidentified
MTKIIRIGVDTSKHVFQLHGVDAVEEPALRKKLRRRDVVRFFAKLEPSKVGLEACGAAHYWARELRRLGHEPFLLPPQYVKPYVKRGKNDQADAEAICEAMSRPTMRFVPMKSAEEQAALMLAGTRDGLVRRRTQLANTIRGYAAEFGLTAAKGVAHIEPLLVRIAGDTSFPELAKELFAIYGQEYAQLNQQLKHIQARLMAWHRGNELSLRLAEIPTVGPMGASLTVMKVSDPRHFRSGRDFSAWLGLTPKDHSTAGKARMGVITRAGDEALRSILVVGATAAIRQARLGRGNPSPWLLDLVRRKPPKLAAVALANKTARIMWKLMISGQRFNPLHEAATRKGRSAPLHGGYAARPLLTPCSQREIQS

SEQ ID NO: 251838 - protein, 389 aa, unidentified
MFYLGIDIGKNTHVASLIDDKKKVIFKAFSFSNSVDGAESLISKLSNFKSELEVGMEATGHYWLSIYSYLVKNNFTVRVINPIQTDGWRQGIEIRKRKTDIIDSLLIADLLRYGDFVESSLLSEDFMSLRNLSRFRSYLVSSIGDLKRKTIALLDQVFPEYASSFSDIFGKTSKQILETFSSPSDFEDISSDDLNAFLESVSRKNYASRKIDELSRKASTSFGINFSLDSFSLQIKMLIQQISFIQNQVSDIDKEIECLLEKLNSPITTIPGIGPVNGANILGEIGDISRFSNPSKLVAYSGIDASVSQSGDYESTHNHMSKRGSPYLRRALFQAALIAEFNDPVFSAYYQKKISEGKHHLVATNAVARKLIHTIFAVLTKNEPYQVQS

SEQ ID NO: 251839 - protein, 345 aa, unidentified
MDYFVGLDVSLRSVAVCVIDADGKHVFERAVACEIEDIVACLRDVPQDQCRIGFESGAMSQHLYFGLRGAGFDVVCMEARQVNAALSAMRNKTDKTDARGIAQVLRSGWFSKVFVKSREAHAYRALLSSRKAVQKKCIDLANEVRGLFRVFGLRLPSRIDQGSFDERVRPLIEADPDLSRALLPLLDARAMLYKTYRELDRRVKQAASHDAMCLRFMAIPGVGPIAALTFRAAVDDPSRFTSSRTVAAHFGLTPRRYQSGETDNPGRISKAGDRDVRATLYAAANAMMMRSVASSEIKSWGLRLMRRKGRRRAVVAVARKLAVIMHRMWADNTEFRHRPLEGAMT

SEQ ID NO: 251840 - protein, 385 aa, unidentified
MANQNDLSRSLVAFEQDNTIIAVIEMSLNSWLVAGIVPGIERHPLKKLSVDEQMLLQLLYRWRDEAVKAGRMITRMVVAFEAGRDGFWLARWLRARGIEAYVIHPTSVAVSREHRRAKTDRLDTELLKRAFLGWLRGEPDHCSMAAIPSLQEEDAKRPTRERENLVGERTRIVNRMKACLVRFGIRNFNPTLRRATERLNALCTPEGVSLPPNTLAELRRDMARLRFVMDQIKEIEAARLQRLERAPAEGPHAMVRLLARVIGVGLETADMLVHEILSRKLRDRRAVARYAGLTGAPDESGSKRREKGLAKAGNARVRRGMIQLAWRFLLFQKNSALSQWYRARTESAGKKRKTMIVALARKLLIALWRLVTTGEVPAGVVLRAV

SEQ ID NO: 251841 - protein, 392 aa, unidentified
MIFIGIDIAMDKHDIIIINDLGEIVYDHFIIQNNRSGFKKLHTVIQSCTKSVNDIRIGMEATGIYHNNLRDFLISKGYTVYCTNPMLVSLSRKSASPRMTKTDKIDAIAVCRHLMHNLNRLHPYTPPLYHLLELKQLSRDYNSNNQIITKAKGELKRLLQMFFPEFLKHFNPFSKWTLDLLYDFPLPSDYKGLHIESLAQRIRSRSNRIEQAKLIKHIAKNSIGNLNNLNAYLIKFCVSNIIHFNGQNKELKKLISQHMTLYPKILSVPGIGPINGATILGETGDISRFPDKHKYTSLFGIEPIVHESGKYKRKRTRISKRGSKYLRTAIYSAARVACVNPKTKDNKFRRKYLKMMSKENKHHSTVIFAIAKNMVHSIYKILKTDNFYNDLL

SEQ ID NO: 251842 - protein, 355 aa, unidentified
MVDVSSEAKSSATGVTNPYRRTEHYDKIHEYRCDKEVGVIGIDISKEHLITSRGRVRRYENSKKGYEEILKMKPCVIVLEPTGVYAIRPSQYFKEKGIKVLQVSPNVLSREKEFRGKKTDFYDAEKLENMVNKAKEYDYNPLKEMTTLFLKDIETKYKNRLKRALFLVSDNDKVSKDRLEKLAKGDFTREELYQLEYTPIVLEEIKILAKNLLEIQERLKEVRRMIEGQVPQDHVLLTIPGVGKLAAGIIIGIVGDVKRFPKPESFVAYCGLDPVVERSGKAVVSRGISKRGNKYLRSLFYFLAMRSYSRNPTLLKFYETHKDRLKGRKLYVALARKLARVVWSVWYNNRPYEPK

SEQ ID NO: 251843 - protein, 426 aa, unidentified
MKEKIDYLSTLFVGIDIASRIHVISALDFNQDFFIKMKPVQNTQEGAALLESMIVDVLKVNHQFKYVVIAMESTGFYGVHLANYLSASDLLAPFSVRVYCLNPKEVKNYKKSFNDIGKNDGIDPFVIADFARVGRISIRPWRGSQYLALQRLTRHRMHITECISREKTYMLNNIFLKFSEYALLRDGGHPFSNKYGTTAEAILTEFTTNEDIVNSSVEDLVAFINAKSRGRIADPEETAKIVQAAARNSYRLDKCLYEPLTISIASSFNCISSFEKELKAIDKAILQTVQGLNPEEYTVLNSIPGIGKVYSAGILAEIGSVKAFQNANALAKYCGIVWNDNDSGDFEAEDKRMSKAGNSYLRYYIIEATGSVIRHCPEYERFYQKKYAETRNHQHKRALALTSRKFIRLLYSLLDKSQLYSLEKSR

SEQ ID NO: 251844 - protein, 437 aa, unidentified
MSDQKPLELRVSVDVGYRRHSVAIGLPSGELLEEFEIAHRPEGFAEFFARIEKQQKTRGCGVAVAMEGFNGCARPLDRMVRRRGYRLYNINNLKLARFKEIFPGAAKSDRIDARKGLELFQLSDHLPLAKEVLQEVRGTPEENDLLKRLTRRRRRLVDERVRVISNLQTDLQAVCPGLLEITKNASNQWFLNFLVSAPSLPQLARLRISTLLKIPAVGRKYARLIEDWQKQAHFSEEVTWVSEMIQEDAQRCLDLDEKIKALEAKIKNVAKESKIARTLLSIPGFGTICTAELAAEIGTIERFSKEGSLALYLGMATLDNSSGKYQGSKQPKQINTRAKAAMMVALDRHRKYVPESQRYYEKKRSEGKKHNQAIRALGRHLCRIIYKMLTEEREYELRRENRNTKTKVSPRSLLKTQIRKPKILAKGKINKIYQQRT

SEQ ID NO: 251845 - protein, 367 aa, unidentified
MKKVSTVVTKQSRNISRQTLTIGLDLGDRNSWYCVLDEAGTIQLEQRVRTTAKALQEVFGAMPRSRIALEIGTHSPWISRLLSELGHEVIVANARKVRLIGESRKKDDRLDAQTLARLARIDPELLYPVKHRSAQAQADLMMIRARAGLVRARTGLVNTARGLAKSYGERLRGCNVRDMDPEKAENLSAELQRAVEPLLAAIEELSERIVEYNDRIEALAQASYPQVELLKQIKGVGTLIALTFLLTLEDPNRFGKSRDVGGYLGLQPGRRKSGESEPQLHISKEGDPYLRTLLVQGAQHILGPFGIDCDLRRWRLKLAERGARNAKKRAIVATARKLAVLLHHLWVTGEVYEPLHNSSRVTVAAAA

SEQ ID NO: 251846 - protein, 344 aa, unidentified
MTYYTGIDVSLRSVSICVVDDKGEVCLEAKVAAEIDAIVERLRRFSSDVKSVGFEAGTLTQYLTYGLQAAGFEVICLEARQVSVTLAAMRNKTDRNDARGLAQILRTGWYSRVHVKSLQSHQVRALLASRKAILKKCVDLENELRGLLKVFGIRLPSRVGHGSFDAELRETVSTDEMLACALVPLLDARTVLYKTYLKLDNAVKGLVRVDPICRRLMSIPGVGPVTALTFKAAVDDPNRFKSSRTVAAHFGLTPRRFQSGEVDNPGHISRAGDADVRSALYVAAHSLLTRNAQWSTLKAWGTRLAKIRGHRRAVIAVARKLAVILHRMWIDGSEFRWGAAETAV

SEQ ID NO: 251847 - protein, 340 aa, unidentified
MRGLYAGSDLHGNNNLLGIIDEQGKRIFKKRLPNDSDLIKDVLKPYKEEMVGIGVESTYNWYWLVDALMEEGYRVHWANPSAIQKYSGLKHEDDKHDAFWLAEMLRLGILPEGYIYPKEERPVRDLLRKRGHLVRVRTSLMLSLQNILSRTLGRKVSVNDLKRLGEDRVTPLLERSEDLALAGRVSKETIDFLTYQIHTIERVVQKRIALKEEYRYLLTLYGVGKILSLTIMLETGPIGRFETVGDYVSYCRKVPSQWTSNGKRKGAGNAKNGNRYLAWAYGEASEFSRRDYPEPRAYYQRKMQKTNAAVAHSALAHKLARAAYYGLRDQVPFQPEKLFG

SEQ ID NO: 251848 - protein, 369 aa, unidentified
MKKDTIFVAIDDSKRTLVMGILRPGADEPETRSIPNEPRHVRRFFARLTREGPVRVCYEAGPSGYDLYRQLTALDVPCQVMAPALTPRKPGDRIKTDRRDAAKLVRLFRAGELTPITVPDEAGEAGRDLLRCREDVQEDLLRWRHRLGKFLARHGRVYREGRNWTQRHWTWIRRQRFDLPALERTLTEYRCAVEQLLARVADLNREIAALAETAPYREQVGWLRCFRGIDTLAAMTLLAELGDFQRFDHPRQLMAYLGLVPSEHSSGDRTQRGSITKAGNTHARRILVEACWHYRHPPRIGAALARRSQGQPPRMLAHAWKAQLRLHRRYRHLVGHGKRPPVAVVALARELVGFLWAALTHPDPVALAA

SEQ ID NO: 251849 - protein, 441 aa, unidentified
MPDLTPSTASRTEEWAAFAAIDWADQKHFWRLAPAGGEQEEHGQLDNTPEAVEAWASGLQGRFGGRPVTVCLEQFRGALVYMLAKYEHLVLFPVPPAMSAAYRKTFRTSGAKDDPNDTALLLDLLLQHRERLRQLRPDTVETRLLQFLVEERRKMVDEKTRQHNRLIDCLKLYFPQVLPWFDDLASELAGAFLQQWPSLQDAKRAHPGTLKRFFHEHNCRSEERIAERIRAIQEGTPATSDAAVLEACSMTTRGLVALLATLRCNVATYEKRIEELVAAHPDGALFASLPGAGAALVPRLITAFGTHRDRFDSAYQVQCYSGIAPVTEASGKSHWVHFRWSCPKFFRQTFQEFAGQSIRQCEWARDYYQLQRDRHKSHHAAVRALAYKWIRIIFRCWKDGRPYDEQMYMSSVRRRTAVLGTALAAATGCGWKDVAGFKKFC

SEQ ID NO: 251850 - protein, 344 aa, unidentified
MLRKKVAQSELNGKSLIPEKYDHYVAIDWSIQIMAIAHMTTRRKSPQVFERPTNLKELKTYLSTLHGRIVLTIEETTTSQWLFLELLDYVDRIIICDPFRNRLLCHGPKTDKIDAGKLCLLLYNGMLSEVFHSTSELYELRILVGAYADHVQAGVRCQNQESALLRGHQDQSPTAMFILKHLESAIEQYRATKEEYEKHFATIVRKNKLLRNLISVDGIGNIGATKILACVVDARRFPNRGKYYGYCGLARHEKTSGGRSYGSRKPRFNHMLKDVYKTAASAVIGSTKPLNEYYEALLSKGVAEHNARHAVARYIARVSLAIIKSGQPYEPYRWRNSVIEQDIS

SEQ ID NO: 251851 - protein, 347 aa, unidentified
MSKIKLVGIDLAKRWYQVCALEEHGKVLYNRKLSASKFAVAVQQLEPTIVAMEACAAAHYWGRRLHRLGHEVRLVPPQHAKAFRRVHKSDEHDALSIAEAAQRPNIHFVPVKNIAQQDLQLLGRIRERLVAERTAMINQVRGLAREYGVNFGKRREVLMAELPQALGHASNELSPIAREALSERHEQIQHLSAQIKVIMQRIATLAAEDPAYERLLSIPGIGPTIAPALLASVGHAQQFSSGRCCSAWVGLVPRQHSTGGREQLGSITKNGDQSLRTLLIHGARTLVRWAGRFENAQNRWILALIERRGKNKATVAVANKLMRIVWAVLTKAEDFDRNKAFRPQPAR

SEQ ID NO: 251852 - protein, 317 aa, unidentified
MDKPPAATCFVGIDVSKGHVDVHVRPDGTAFSCTTDPDGLANLITRLAPLQPQLVAMEASGGYEAVIAAALTEAGLPVAIVNPRQIRKFAGAIGRLAKTDAIDAGVIAHFADAIRPAPKPMPDALMLRLRELLARRRQLVVMVNAEKQRLGKAADKFAQRSFKTILRSLEAERARIDRAIDTLIQQSPLFCAKQDLLKSVPGIGDIVARTLIVELPELGSVDRHQIAALAGVAPMNRDSGRYRGKRRIQGGRVEVRAPLFMACLTAIRHNPPLRSFYRRLRDAGKPARLAIVAVMRKLLTTLNAIIRDNTAWTHVHI

SEQ ID NO: 251853 - protein, 317 aa, unidentified
MTTTTTQKFIGIDISKDTLDVAIWDSEVFRQFDNNARGIKKLVRRLKKCSPALIVVEASGGLEQSVVRALYEEYLPIAIVNPTRVRKFAHSTGQLAKTDKLDAKIIAQFAQAVRPKVRPLRTAQQEHLDALVTRRRQIVDTITAEKNRLSTTHPALRERLKKHIDWLEEELQALNDEIDKFIQQSAEWKQKAAILESVPGVGPVTVSTLLAELPELGTRNRQQIAALVGVAPVNKDSGKMRGKRRVFGGRAPVRRVLYMATLVATRVNPVIRSFYERLLAAGKEKKVALTACMRKLLVILNSMIRNNRSWNPYLVHG

SEQ ID NO: 251854 - protein, 405 aa, unidentified
MRSTTSRRACGTTSAARSHAGTTTGPRPIVSRPEAAGTKHGPSRSRVASPEQPTELPRPRARAGRSHSQERAIVTHANATDCIFAGIDVAKHKLDLALTGIQQVATFTNDPAGITQLVEILLKAPPRLIVVEATGGLERPLLQALLEANLPVALANPKHVRYYALSLGILAKTDPIDAHVIERYAAQLSPRLLQKRSENQTELEALVTCRRQLLHVRTEQTNRLGQTSSKSARKSIQAVLKTLAKQLKSLETQIRQLIESDDDFKDIDKLLRSVPGIGNVASATLLCEMSELGTMQRGQAAALVGVAPFNRDSGRHKGKRVIRGGRRAVRSVLYMSAVSAIRFNPIIIAFAQRLQKAGKLPKVIIVAAMRKLVCIINAMVRDGLSWDQLEIVKKLNYVKSVASTT

SEQ ID NO: 251855 - protein, 424 aa, unidentified
MKVTYQTCCGVDVHKSFLVATIVKTTGGIEPSYQKKRFSTFNNSILEFKQWLLDNDCRDVCMESTGKYWIPVFNLLENEINVVIANPKWVQAVKGNKDDAKDSKWIGDLFRLGLVKGSYIPCKKVRILREYTRYRYKLVSCRSSEKNRYQNALTVCNVALDSVVSDIFGKSSTSIIDYLLEQSGTSINHEEIASKLLRSLKSKEDAVIESVEGYQMTDAQKYRMRLVRAHMDYITAEINDVDKMIENMISSNPDFENAVRFLCTIPGVKHDSAITIISEIGTDMSQFSSSKRLCCWAGLTPGSNESAGKKKSVRITRAGVCLKPALVQCAHAAVKSDKSPYYKKKYDSLVKRRGKKRAIIAIARMILTAIYQMLSTGEQWNPSDLYKIDMPAPLLEKQKAKAIKQAKKLLQRERLLPPDEPLAS

SEQ ID NO: 251856 - protein, 352 aa, unidentified
MDFTQNNRLAQITAQTLIIGDVAKHKHVARAIDDRGVDLTKRLIFTNTQDGFQKLMEWAGNIAQAHGRPNIMIDMEPTGHYWLNLAYYLKAEGIKTVVVNPMKVKRSKELDDDSPTKNDTKDAKVIAQVMRDGRYHEPILPEDVYAELREGMKLYDMIKEDQSSIKAQMNNASDRYFPEFLTVFKDWTGKAALHLLEQSYLPKDIVQASEEELLFEVKQAAKRGVGIKKIQHLKQAAQNSIGLSTGLTMARHEIRYLIDQYKALEQRLITLEAQLEELVLQVPGADRMMDIKGVGVLTVAGFFAEVGDLRQYKDPRQIIKLAGLNLKMNQSGLFKGKTTITKRGRKRLRSLL

SEQ ID NO: 251857 - protein, 356 aa, unidentified
MSQKSSSAIAVIGIDIGKNVFHLVGQDRRGAIVLRQKWTRSQVEARLANLSPCLIGMEACVGAHHLSRKLQVLGHNARLMPAKYVRPYSKGQKNDFRDAEAIAEAVQRPTMKFVATKTVDQLDLQALHRVRERLVSQRTGIINQIRAFLLERGVAVRQGLHFLRAELPGILATRTDVLSPRMVRIIEDLSADWRRLDARIEGLSDQIETFARQDQHCERLMTVPGIGPIISSAMVAAIGTGDVFCKGRDFGAWLGLVPKQISTGDRTILGSISKRGNRYLRALFVQAAWVVLVKLGPKQWEHYGLKSWIEAAKQRLHHNVLAIALANKLARIAWAVLNNGRAFACDKTDAMASHPA

SEQ ID NO: 251858 - protein, 363 aa, unidentified
MDNRITWVGMDVHKESIVVTAIPHDSDRATAHFEIPNTDTGVHRLAKRLREMGDVKCAYEAGPCGYDLRRFLASQEIPCDVVAPSLIPKKAGDRVKTDRRDAEKLARLHRMGELTPIRVPTPAQEALRDLVRTREDAKEDALRRRHRLLKFLLRQGRRYEGKSWTQRHWNWIRSQKFDDGNSQAVLTEYIVALEQELERIQRLNAMIEEESHRPEIAPAVAKLRTLRGVDTLTAMTLVSELVDFSRFATAHELMSFAGLVPSEYSSGGKERRGRITKTGNAHVRRVLVEAAWHYRHAPVATGISLRKRREGQPPGVLEIAHRAELRLCRKYRKLTAKGKNSRLTVVSVARELAGFVWAIGRSR

SEQ ID NO: 251859 - protein, 434 aa, unidentified
MKTTTKLNPINPNLLQITFDVGKEALYAYTELPLATNALDCVEETIPNRNLPILKALEHFKTLALQHGLAGLCVLCEPTGGYERRLLRLARQAGHFTAYLNAESVRKLRVVQSNDATKSDLKDPKTMFLLAKLGKTLTHRNLSGPWLVLRETHAYYQTQEAHNVALRCQIHRVLTQLFCEFSFKKDFLFGSPALPHLDQEFGLNPYRIVAAGQSAFYRKMKKHGVSLRTLERLWQDAQRSSLQRLEKGYSDLLEQQLRELFEDYWRCQQRLEAASQKMIGLLHELQAQGQVRLQARPGLINEGLLARVLAETGPLEDFASWSQLLRYAGMNLCERQSGTMVGRRRISKKGRSLLRKVLRQAVLPRVRKTDLYGPYYHGKKANGMVGQKAMMAVARKFLKLLWGLDRSAQGFIPRRVFCCASQFPAAVQPLVQAA

SEQ ID NO: 251860 - protein, 340 aa, unidentified
MEVATIGLDISKHVFHIHAVDSQGQVTGRQRLRRGEIMSFFSSLAPCLVGIEACATAHHWAREIRRFGHDVRLIPPAYVKPYLRRGAKNDAADAAAICEAVTRPNMRFVPIKSVENQGFLMLHRARGLLVRQRTMTACAIRAHFAEFGIIVGQGRQRVDGLVDLLNDEELTLPAHARMALAILVNQLKELDRQVEAIERELADIQRENPMAKLLSSIPGVGPITATALAATVPDPTMFRSGREFAAWLGLTPKQNSTSGKDRLGRITKQGDSYLRHLLVIGARNVVRYPKARSGVGGGWIEALLERRRPMVVAIAVANKLARIVWAMMTTGEFYRPKLAA

SEQ ID NO: 251861 - protein, 393 aa, unidentified
MICVGIDVAKDKHDCFILSSEGEVLADVFTIQNNAEGFDMLLQTIRRCARPEDKIKVGLEATGHYSYNILGFLLDKGLDTYVINPLHTNLYRKSLSLRKTKTDRVDARTIAAMLMSDVDLKSYTDTAYHNEELKSLTRYRFDKVRERAKLKQSVSRLVTILFPELEKLVPSLHLASVYALLIEFPGAKQVAGAHLTHLKAILSDASKGRYGRDMAVTLRDAARCSVGSVMPAKSLELQHTIRLIRELDAEIEDIETAIQSMMDEMQSPITTIPGIGVRMGAMILAEIGDFSRFNSPDKILAYAGMSPSTYQSGQLSLSGPYSHMEKRGSRYLRYALYNATKYVCLWDPAFAAYLAKKRGEGKHYNVALSHAAKKLVRLICALEKSQQSYRNAA

SEQ ID NO: 251862 - protein, 381 aa, unidentified
MRIVCGLDVHKDSVFACILNENGEKFECKFGVLTPELEELHQLLLTQDVKEVTMESTSIYWHPIWRVLDDIEDLKLVNPYFIKQLPGRKSDVRDAAWIAECTMKDLIRGSFVPSTLVQRMRQYNRRIFDLNKEIVYKLTKLDSVLQRCNIRISNYVSSVDSKSYKEVVRLVSEGVTDPNRLASVIHGRTINRVGKETITASLTGVISEVDIDLIRQYLEEIELAQRHKQESHEKLTRMCEDEFPKEFENLQTIPGVKERSATSILAEIGADMKMFITASALVSWCGLKPRNEESAGKIKSRRITHGNKYIRKTMIECAWGASKTQNCFFSKYSYTQTVVRKKNAMKVKVAIARKMLTAIWHVLSEGKTYTDYKKPDTKGNS

SEQ ID NO: 251863 - protein, 423 aa, unidentified
MRFIGLDVHRDFCEVAIAEGGEVRLAGRVRTEPAALELFAQSLAGDDQVALEATGNALGIARILEPHVGRVVLANPKAVKGITRAGAKTDKIDARTLAQLLAGGFLPAVWLPDEQTRILRRRISARAQLVRQRTRAKNQVHATLIRNLKGKPPVSDLFGVRGRRWLAAQDLPADEQETVAACLRQIAFLDGEIALIERALAEQVLASTEMRRLLTLPGVNFVTAAALLAAVGEIRRFPSARQLVSYLGLDPRVSQSGAEPARHGRISKQGPGETRHVLVEAAWHASRAPGPLRAFHQRIAARRGGNLATVAVARKLAVIAWHMLSRGEDYAFARPSLTREKIRRLELATGAERQKGKRIGVWVTKEQHRLDKDLAAQAELAYRRLVKDWQPAIKGAGAAPGHASRRPSSGQAARQETAPPPAL

SEQ ID NO: 251864 - protein, 369 aa, unidentified
MKGTIKNIGLDVHKNSISIGIADEGRDGEVRYYGKIDNDMNQLDKVIRKLISDGAVLRFVYEAGPCGYGIYRYLTNNGTDCVVVAPSKIPQQSGNRLKNDRRDCLSLARLHRAGELTPVYVPTEADEALRDLVRGREDATSAVRTAKQQLGAFLLRHDVVYTGKSKWTKAHFNWLSDITMPHSAQQVVFQEYIDTVVDCSNRVQRLTEQIRQQSKQSRLHELIKALQSMRGISLIVAATIAAELGDLTRFDNPGKLMAFLGLIPSEHSSGERVKKGAITKTGNGHVRRALVEAAHAYRFPARKSREILKRQEDLPKEILDISWKAQCRLCTRYQYLVAKGKKTNVAKTAIAREIAGFSWAIAQALPKAA

SEQ ID NO: 251865 - protein, 406 aa, unidentified
MISVGIDVSKGKSTVCAIKPYGEVLMTPRDFKHTKDDLDSLVKQLSRFKEEIHIIMEATGNYHLPVYQYLKSKNYQISIINPLEMKRYRCQGIRNPKTDKIDSMIIAQYGIDYWYRFKPNDDMDKKRQELRLLGKQYTSYMRIRTIRCQDLCHILDRTMPGVYGLLDDFNRNNGQDKLCDFAEKYYHSDNITKYSEKIFTERYSSWLKKKGYRPNEKEARQLYSIAKNAIPTLDSKLPSTKLLVQEAVNVLREVDSSLYDILNQLKDLSKEMPEYETVLSMKGIGTTLAPRFIAEIGDPRRFHSAKALIAYAGIDAPPYQSGQFTGTKRHISKRGSSNLRKLGFELMDSVNKHKSSYTGDPVCEYFMKKRNEDKPYRVAMIATFNKFLRIYHSRVSEVLNEYDNSH

SEQ ID NO: 251866 - protein, 346 aa, unidentified
MTIVEDKRAITGGVDTHADMHVAAALDPIGGLLGVQEFPATAAGYAGLLGWLGGFGTVALVGIEGTGSYGAGLARHMAAAGVQVVEVDRSDRQDRRRQGKSDPLDAVSAARAAQSGRAAGAPKGRDGAVEAIRALMVAKRSARNERTQAINQARALIVTGPAELRERFARHTPAQLVAGLAALRPRPGDVPGYATRIALRELGRRAQFLDAQIGHLDELIVPLVTARAPSLLALYGVGADTAALLLVAAGDHPQRLRSEAAWAHLCGVAPIPASSGKVTRRRLNPGGNREANHALWRIVITRMSAHPATRAYVDRRSKEGLSKKEIIRCLKRYVAREVYRHLRATG

SEQ ID NO: 251867 - protein, 413 aa, unidentified
MDLLVERCAGLDVAKDEVVACVRTPAPGAGGRRRQEIRTFPTFSADLEALADWLVAEGVTQVVMEATGQYWKPIWYVLEGRGLELLLVNARHVKIVPGRKTDVADAAWLAELLEHGLLRSSFVPPPAIRELRDLTRYRKKLIQAHTAECQRVHKTLEDAGIKLDSVASDVLGVSGRAMLAALVAGERDPQALAELAKGVLRKKLPLLRQALRGRFSDHHALLVGLSVGHLEHLERAIAQLDARVDQVIAPFAQARDHLDTITGVGKRAAETIIAEIGVDMAVFPTAGHLASWAGRCPGNNVTGGKRRSGKPTKGNRWLADVLTECAWAAARSRDTYLAAQFWRLARRIGKKKAVVAVGHSILVIAWHLLANDCDYQDLGGDWFIRRNDTDRHKTHLIKQLQALGYSVTLQPAA

SEQ ID NO: 251868 - protein, 414 aa, unidentified
MKLFVGIDVSSQELEACLMNPDGEKLDTLKVNNDLQGASHLRDRIVAAADKLSASEIHIGLESTSVYSWHPAMYLHQDPALKARNAKVFTINPKLISKFKEAYPDLDKTDRLDAWIIADRLRFGRLTMTVVMQEQYIALQRLSRMRYHLIHSLTREKQYFLQNLFYKCNAFTSEVESSVFGHAILEMLSEKYSLDDIATMDVADLADYLKEKGKNRFPDPEHVARCIQKAARDSYRLSKVVEDSIDLVLGVSIQTIRSIQAQLKELDKAIERILDGMTGAKCLRSIPGIGHVYAAGILAEIGDIERFDNQAAVAKYAGLTWRRHQSGSFEAEDTKRIRSGNRFLRYYLVEAANSVKNREPEFGEYYRKKYQEVPKHQHKRALVLTARKLVRLVDALLRNDQLYTPRRKVNSAKG

SEQ ID NO: 251869 - protein, 401 aa, unidentified
MAFVVGLDWGGAAHAVCVLDRESGAVVDRFEARHDAAGLRELARRLACRGAPADLPVAIERPSGLIVDALVAAGHPVVPIHPNAVKASRPRYRSSGAKDDHGDAYLLADVLRTDGHRFRPLAPVSDAIRSMRALTRGRDDLVATRVALANQLGSLLDGFWPGAAAIFADLASPIALAFLERYPTPASAARLGPKRLAAFLAQHRYCGRRSPEALLARLRAAPQGLAGPEEAEAKGEMVRALVAVLAPLVARIAELSARIRHAVAQMEDGRILMSFPRAGQVCAAAILAELGEDRARYLTPDQLAADAGLAPVTRQSGKSRGVGFRWACNRRLRAALTCFADNSRHASAWAADLYARARGRGCRHPHAIRILGRAWLRVLWRAWVDRSPYDPALHRAAAAMG

SEQ ID NO: 251870 - protein, 373 aa, unidentified
MKKNSTTAQSPKRAAARQAGPKTIGMDLGDKTSRYCVLGAGGERVSEGSVATTRKAMAQRFSRMSRCGVAIEVGTHSPWLSRLLSSLGFEVIVANARQVRLISDSSRKNDRLDAQLLARLARVDRQLLRPIQHRSEPAQTDLMTIRIRAGLVEARTSLINTARGLAKALGERLPVCDTDTMGVEKLEGLPAPMREQLRPLLEAVKSLTERIHELDSTIEQIARSKYPETELLRQVSGVGTLIALTFVLTVEDRDRFQKSRDVGCYVGLRPKQSESGQSQPQLRISKEGDLYLRKMLVQAAHCILSRRGPDTDLKRWGLKLAERGGKNAKKRAIVAVARKLAVLLHRLWVGGEVYEPLRNSQAAAQSSKKKKAA

SEQ ID NO: 251871 - protein, 361 aa, unidentified
MTQTILLTVDYHDQNCVIRRRLLHTQQESVFSVPTTPEDLARVVAQARQSVGQQGHVVWVQESTTGWARVQTLLANHVDEFALANVLQMPLPPKARRRKTDKVDTSRIQREYLNGELPTAHQPPPWWRQLRRLVAYRENLVARRTSLRNWINRYLAHETWEDRKTLWSAKGFKQLHKLVAVWPVWDRLVGQSKLEELVHLEKRLGAVETELLAVHKHCPDAQRLDCVRGIGLVSAVSIVARIGPIERFQNAEQLIAYAGLAPGVSQSDQTRRDGRIGGGGTDKHLRHYLIEASVWARSIPRYKAAYERVAKRRGKKIGRIVVARMLVRSIYKVLKEGVAFEPSAVRAADDSRTMTASSVVG

SEQ ID NO: 251872 - protein, 422 aa, unidentified
MDRTDDRLDLVARVAALDLAKASLMACVRVPDPDTPGRRCQEIRSYDTFTRSLLDLADWLRCEQVQLVVMEATGDYWKPVFYLLEAEGFTCWLLNPRHVKHLPGRPKTDKLDAVWLAKVAERGMCSPSLVHPQPIRQLRDLTRYRRTLVRDQVRERQRLEKLLEDAQIKLSSVVSDILGVSGRAMLEAMISGQRNPTVLAEMAMTRMRPKIPVLREALTGHFTDHHAFLARTMLDRIDAVTADVEKITTAIDTAIAPFRDAVVRLDEITGVGPVCARELIAEIGVDMTRFPTPGHLVSWAKFSPIVNQSAARSKPGATGHGNPWIAATLGEVVIGLARSNTFLGKRYRRLARRIGKKRALVAVGNSVLKIVWHLLSDPDARYTDLGPDFHDSRRNAYRQERDLIRRLEHLTGKKVALQPAAA

SEQ ID NO: 251873 - protein, 330 aa, unidentified
MKNYEEVVGIDVSKKTIDAYCYQAQVHKEFVNDLIGYKRLLKWVLKETKTSKVFYCFENTGYYSLKLALYLHSQDIVYVEESPLKIKRSSGVVKEKTDKLDAKLIARYAWLYREELQPSTVKSMSHLELGRLLALRDQLVRNNAGLKGTLKEMKVLLSSPTTDFGCISLKRSIDYLEKQVKAIEARIKEIITADDSMNKNYELLSSLIGVGLVVACQLIYHTGNFTRFASWRAFSSYCGTAPFEHRSGTSIHRRKQCHYLGDRKMKSLLSMASVSAIQHDSELRLYYKRKLAEGKDKMLAINNVRNKLIARAFAVVKRGTPYVVLQQHAA

SEQ ID NO: 251874 - protein, 344 aa, unidentified
MNSTTIAVDVAKSVFEVAVSEYPGQVRERHRLSRGRFSRFLAEHPPATVVMEACGSAHHWAREAQSRGHRVVLVPPHVARPYVLRNKTDRTDAKGLLEAFRNDDLRPVPVKSETQQALAGLHRLRSTWVATRTARLNTLRGILREFGVVIPTGAHHVVPHVRALLEDLDAGVPGLLRVALGEVIREVGELEERIRAIERQLATAAEPALLIRRLRTVPGIGVLTATALVAVVGDVQRFPSARHFASYLGLTPREHSSGQRRHLGAISKQGDTYLRMLFIHGARSVLHHAKSKTAPATDRVRRWALQVERLRGHNKAAVALANKLARIAWAVWRSGNDFIAAAAV

SEQ ID NO: 251875 - protein, 360 aa, unidentified
MQQAKDIILVVDYHAENVEFRWFNEATGEERIGKYATTRDGIVRQVEQATREVERDGQVVWIMESTTGWARVKDLIGTRARFVLANVLQMPLPPKARRRKTDKIDTGRLLREYLHGDLPQSYQPAAWWRQVRRVVDCRQDLVERQTALKNWMGSLLHHETWEDRENLWSAKGRARLQRLGLSASDRALVELKLEQLDQLAAEQEQIEKRMLAIYAAWPEAQRVDEVRGIGMVTAVSVLAHVGPIERFATAEDLISYAGLAPGVRQSDATCHHGRIGGGGTDTHLRYLVIEASMWLRDIPRYRPTYERVLKKRGRKIARIVVARLFLRSLHKMLKDQLRFNPAGPSRTKTVTTTATATAGL

SEQ ID NO: 251876 - protein, 392 aa, unidentified
MFYLGIDIGKNTHVASLMDEKAKVIFKAHSFSNTSDGAATLLEKITPYAAKLEIGMEATGHYWLSLYSFLIENHFVVHVINPIQTDGWRKGTEIRKRKTDIIDSVLIADFIRYGDFLETSLADEDTMSLRNLSRFRNYLVGSIGDLKRKTICVLDQIFPEYHHAFSDIFGKTSKELLLQLNSPSDYEDVSSEQLEELLSQVTLKGYAAKKFKDVSALAKTSFGITFCVDSFSFQLKLLIEQINFIEKQVSDVESQMSELLEKIKTPITTIPGIGNIIGATILGEIGDINRFSSGAKLVAYAGIDASVSQSGEYECTNNHMSKRGSPYLRKALFRAAFVASNSDPVFKAYYQKKRMEGKHHNVAVGAVARKLCYTIYAVVKTNVPYKVQTPRD

SEQ ID NO: 251877 - protein, 389 aa, unidentified
MLLDHPSDGLTAIRTHIGAIFVSLELSRSNWLVTSLSPGKGEKMSKHGIAAGNVAELLTLFAELKRKTEVRTGQSYPIITIQEAGLDGFWLHRVLQQEGIESHVVDPASIATPRRRRRAKTDRLDGEALLRALLAYKRGEPRVCAMVVAPSPEEEDQRRLCRERRTLIEERIRHVNRIKGLLFAQGICDYAPMRRDRRARLEALRTGDGRELPSHLKAQIGRELDRIELLLGQIKAVEAAQDALLAAARKPASEEAAPDPVTMLLALKGIGANFAAVLWSEAFYRQFANRRQVAAYAGLAATPWQSGGIRHEQGVSKAGNPRLRTTMIQLAWLWIRHQPQSALTRWFKERSQQGRKRAIVALARKLLVALWKYVTQGVVIEGAVMKPAA

SEQ ID NO: 251878 - protein, 362 aa, unidentified
MQDNAQVQCSDRPVVGGVDTHKDLHIAAVVDEHDRVLDNQCFASTRQGYRKMLAWMQSFGEVTRVGVECTGTYGAGLLRYLQQSGVQVVEVTAPDKTDRRKRGKDDQIDAQNAAHAAFAGIRTATPKSRDGMIESLRVLKVCRKTAVSARRVALQMIQTNIVSAPDELRESLRKLTRMQLIRTLAAWRPDLTDYRNVTSAYRITLKSLGRRYLELHDEIADLDTMIAALVNELAPELVARNAIGYESAAQLLLTAGDNPERLKSEAGFAALCGVSPIPASSGKVTRHRLNRGGDRAANSALHIIAIGRLRTEPRTKDYVKKRIAEGHSKLEAIRCLKRYIAREVFGLICKRNRQVNQTQIAT

SEQ ID NO: 251879 - protein, 338 aa, unidentified
MIVIGVDVHKQSLTAVAVDEAGRMLDKRTVSGANDGLLAWAASLTDERLWALEDCRQLTRALEQTLLAEGERLVRVPPKLMAPERRAGRARGKSDPIDALAVARAALREPRLDHPRPGERRLRELKLLVDHRDDLIDERRRAQQRLRWHLHELDPTLAVPLGALDRAVWLDRLGRRLARLQQTAQVRIARELVARCRGLTRTILELDRELQAATTETAPALLALPGCGALSAAKLLGEIGPIERFDSDAQLARHAGVAPLEASSGKQRRHRLDRGGNRQLNCALHRIAITQGRVHAPARAYLERKQSEGKSRREAIRCLKRQLARTVYTTLKTESALT

SEQ ID NO: 251880 - protein, 332 aa, unidentified
MEEITTVGIDLAKNVFSVHAVGSQGEVVVRRTLSRAKLSELIAQLPPCLIGMEACSGAHEWARRFAASGHTVKLMAAKFVMPYRKSGKNDGNDAEAICEAVARPNMRFVPVKSLEQQSDLTLHRVRQGFVEERTATLNRLRGLLTEFGHVLPLRASEVHRRVPQLLGKLPTRVAACARDLLEHAARLQAKTLEYEHEIKIHVRSNALACRAQTRLGIGPITASALVATVGNGHDFKNGRQFAAWLGLVPRQYSTGGRIRLGHITKRGDPYLRTLLVMGARAVLQRAASLTDPLSRWALAVRERRGYHRACIAIAAKNARVAWALLAKEPSAA

SEQ ID NO: 251881 - protein, 360 aa, unidentified
MIVIGADTHKRTHMLVGVDAGTGQLLGDRQIAASEDGHRGAVRWARELDSERVWAIEDCRHVSRHLEEALIAAGERVVRVPPKMMGQSRRGERQAGKSDEIDALAVARAVVKDGVERFPAAYLDERAMEIRLLSDHRDDLVAERTRIQNRLRWHLLQLCPELEAQLPKGGLDRNVVLERIARRLRTFRGDQRARVASEQLRRIRTLTRQSNELERELHRLVKAHRPALLAEQGCGTLTAATLIGRTAGAERFPTDAHFARQAGVAPIPVSSGRVDRHRLHRGGDRQLNRALYMIAITRARIDPQTKAYLERKRAEGKTKREALRCLKRHLARRIHRLLSMPVVDPDPITLNPAISGGCLT

SEQ ID NO: 251882 - protein, 402 aa, unidentified
MNFFVGLDWASQAHAVCVLDATGQVCWQGSVEHSADGLAELLRRLARFGPPASLPVALERPSGLIVDTLMDAGYRVVPIHPNALKASRPRYSAAGGKSDPGDAFILGDLLRTDGHRFRPLQPLSDETRALRALVRGRDDLVAERVALANQLRALLDRFWPGAAAIFADVDSPIALAFLSRYPTPHSAERLGEKRLARFLVQHAYCGRRPAAELLARLRSAPITQTSELEAEASGEIVRALVTVLLPLVTQIQQLSTAIAAALPQHPDGPLLQSFPRSGSVNAAQILAELGDDRSRFATDEQLAAEGGVAPVTRESGKHRGVAFRRACNKRLRQALTSFADHSRHASPWAAAIYAAARRRGCHHPHAIRVLARAWVRVLWRCWQDRRPYDLTLHRAAQRVAAA

SEQ ID NO: 251883 - protein, 409 aa, unidentified
MNKVDIAPFEVFCGIDVGKSLNHIFALDRYGDKPLINRKVPQEEAEIRAALEEAGDFGLALVIVDQFGAFGRLVVGVAKSMDIPVAHMSPRRFRQVAETYGEDKFDEKDAFILADASRTTPRNIEFVGNRAESMAEIKVLSSRRDDIVEERTRCYNRLHDFIHQVSPPLEELFSKRKLHNDLEIRLIARYGGPIGFRQAGHARASTWAAELKYHCVDGPKKVEQVFDVLDRQTVMLPGAAVIEEQIRSIASRIIELLAEEKRLNLMIEQRAKMIPEVDLLQSIPGVGPVYAALIAVEIGDIGRFRDSNHLASYAGVAPRKEESGTSVHKRRKRKGGNRRLKNALMQSSQRSVQCDSLARAYYERKRAEGKKHLQALRALARHRVTVIFAMLNEGTFYEPPVEVDENGRG

SEQ ID NO: 251884 - protein, 354 aa, unidentified
MAKTIETAVAVIGIDIGKNSFHAVGLDRRGAIVLRQKWSRGQVEARIANMPPCLIGMEACVGAHHLSRRLKALGHDARLMPAKYVRPYSKGQKNDFRDAEAIAEAVQRPTMRFVATKTVEQLDLQALHRVRERLVSQRTGIINQIRAFLLERGIAIRQGRLSLRLALPQILAAPPDVVSPRMLHIIEDLSGDWRRLDERIQALSDEIEAIARQDVGCERLMSVPGIGPIISSAIVAAIGTGDAFSKGRDFAAWLGLVPRQISTGDRTILGKISKRGNRYLRVLFVQAAWVVLVKRKSRERLGLDRWLEAAKKRLHHNVLAIALANKLARIAWSVLAHGRTFVAGNVAEPTAQTA

SEQ ID NO: 251885 - protein, 360 aa, unidentified
MAKARSLVGLDVHAAKIVAAVLDAETGELQFFAMTADIGKTAGFCAALPRPVRVAYEAGPTGYGLARELAKRRVECVVAAPSKIPRASGDRVKTDRRDAELIVRLLLAGKLHAVRVPGAEEEALRDLVRAREQVRVDLMRSRHRLSKLLLRHGIRFEDGGAWTERHRQWLATVELEWPAAQATLLDVRGAIDALTHRRDGLEREIVAMLPGSPWTAQVGVLRCLRGVDTLTAVGLCAEVGDFTRFGRAEQLMSYLGLVPSENTTGQQRRLGSITKTGSAHARRLLIEAAWHYRPRPNLGKTLTERQADQPAAAIAVSWTAQKRLHRTWSRLEARGKRRTIIAVAAARELAGFVWAITQIE

SEQ ID NO: 251886 - protein, 356 aa, unidentified
MQNNFQSPESVILGVDTHLDIHVGAVISQAGKLLGTRIIQTNQIGYQELFDWAKSFGVLERAGIEGTGTYGAALTRFLIKNGIYVVEVNRPDRSKRRLEGKSDPLDAENAARTVLSGSSKAIPKMQSGACEALRIISVARRSAVKARTQAINQLRSLLVSAPQDVRDKLWKSKPHECVAACINCEVSEYSPLRIALYSTLRSLAKRWGALTEELNELDESLDKLTRKYASNLRSQFGVGPQTAATLLAVAGDNPERLKNEAALASLCGVNPLPASSGKTVRHRLNRGGSREANNALWTIALVRMRSDPRTRIYFDRRTGEGLSTKEILRCLKRYIVRELYPLILSDLTYANRPLLT

SEQ ID NO: 251887 - protein, 341 aa, unidentified
MAQATTIGLDIAKYVFQVHGADRAGHVLFRKRITRAKLLGFLAAQDPCVVAMEACAGAHYWAREIGKLGHHVRLIAPAYVKPFIRRQKNDAANAEAICEAAQRPSMRFVPVKTEEQQANGIVFRARDLLVRQRTQCVNALRGHLMEYGHAFPKGITHVETLAALVEDLQSSLPGRVRVILKLLVDTFTALEAQITALDAEINQRSKSDPTARRLMTIPGVGPIVSTAITALVPAAEEFPAGRDFAAWLGLTPLQKSTGGKQKLGAVSKRGERTIRRLLIIGASAVVQQASRRGAPKGSWLAQMLARKPKMLVTVALANKMARIIWALLVKGGTYRTPTAAA

SEQ ID NO: 251888 - protein, 358 aa, unidentified
MFYLAIDQHRKQLTVNLRNEHGDVLIKRQVSTRWEPVRKFFAEIRDLARPDGGFTAIVEVCGFNDWLLEMLRQFECRETVLIQAERRSKRKTDRRDADALGELLWVNRHRLLGGQKPHHLRRVILPSRESRENRQLAALRRRLSQCRTQTINKVRHLLRKHNLDQECPTKGIDTKAARRWLASIALDEIDRLEMNLLLAQWQLFNEQLARVEEKLSERHRCSKDAKLLSTIPGAGIFNSIGLTASIGDIHRFPTPQSLPNYWGIVPGCRNSGEATDRLGSITKQGSSMARFILGQMVMHVLRRDARMRDWYRRIKHRRGSKIARVAVMRRLAMIIWHMLKHERPYVLNGLPPVREPSV

SEQ ID NO: 251889 - protein, 309 aa, unidentified
MEHFVGIDVSKDRLDVHLRPSGESFAVARDGEALAGLVERLRTLAPALVVMEATGGYETVVASAIGAAHLPLAVVNPRQIRDFARATGKLAKTDRIDAAAIAHFAAAIRPPARPIAEPEAQALGELVARRRQVIEMIGAEGNRRRMARQRRVIRAIERHLALLQTELSELEDDIDGAIRSSPAWQADADLLTSVPGIGPATRRVLIAELPELGRLTRRKIAALVGVAPINRDSGTLRGRRTIAGGRSAVRAALFMAALVASRKNPIIAPYYDKLRAAGKTGKQALTACMRKLLVILNAILRDRKPWQPA

SEQ ID NO: 251890 - protein, 340 aa, unidentified
MKISKKNYLGIDVSKPWFDVSLLTELNHVKQPMLTLRFDNTAQGLKLFKKWLTAQHVSFDNNTLLVIENTGIYHRLLWRFCSTHNLQLHIGNAAHIKWSLGITRGKSDIIDSKRLCLYCCKQAEELKATPALNPVFMKLKDLMTSRSRLVAQLHSTKNYLKEIQCTEDKQLLLVLESLHKAAIEGLKKSILKIEEYITKMIKEDAAIYHNYELIKSVPGIGHLTAVYIICCTNNFASKISGKQLASYAGVVPFEHSSGISIKGRNRVHKMANKDLKKMLHLCALTAIKYYPEFSNYFNRKKAEGKNGMSALNAIRNKLVLRVVAVVNKQTPYVDYSVKVA

SEQ ID NO: 251891 - protein, 365 aa, unidentified
MFTERTSVGLDVHARSVAAAAIDGVTGELVQAKLTPSYDHVRSWLAALPGPVAVAYEAGPTGFGLCRSLAAAGIRCEVVAPSKLQRPAGDRVKTDARDAVHLARLLRLDEVTSVAIPSVDQEAARDLVRAREDCRGDLMRARHRLSKLLLRHGIVYYGGQAWTGKHDAWLRHEARDQLTGTAGRATGLTFDFAYENVVTTKAHRDRLDAAIDQMARDSEFTPLVRRLGCLRGVGVLTGFALAVEVGDWHRFTGNSIGSFVGLVPSEYSSGASRVQGAITKTGNTHVRRLLVEAAWHHRARYRVGAVMRSRWDQAPAAARVRGDEGNRRLHARWVKFIERRKRPTIANVAIARELAGWCWSLAVLE

SEQ ID NO: 251892 - protein, 312 aa, unidentified
MTDITIGVDVSKDTLDICIHPDGDHRQFPNDPKGFKAILRWFGGRPITRLVFEATGPYHRAFERAMGTAGLPLCKVNPLQAKRFGEAIGQLAKTDRMDAAMLARFGALIEPEVRAAPSIIISELKDLHVARTALVKDRTAARNREKNLTSSLLKRQTRQRLASIEGHLKQIESAIMALIHSDADLRRKFSILISIPGIAERSAFALLIDMPELGTLEPQQAAALSGTAPMTRQSGKRMGKALVSGGRVNVRQALYMPALVATRHNPDLKVKYTELTARGKPPKVAITAVMRKLIVLANALIRDDREWTPRLA

SEQ ID NO: 251893 - protein, 341 aa, unidentified
MSIITVGIDLAKNVFAVHGVDDSGKPVLVKPKVSREHLLPLIAQLPACVIGMEACSGAHHWARQFRRYGHTVKLMAPKFVIPYRMSGKRGKNDAADAAAICEAVTRPNMRFVPVKEEHQQIILCLHRTRQGFIEERTALYNRLRGLIAEFGIVLPQKVACLRREIGGHLEELPGYANQCVGDLLAHADRLDDRIADYDRAIAQAARDDERSKRLMQLPGIGPTTASALLASIGGGHDFANGRQVAAWIGLTPGQYSSGGKERLGRITKAGDSYLRSLLVMGARAVLNGLGDKQDRFSRWARSLVERRGYWRAVVAIAAKNARLAWAVLRYGEAFRLKPSVA

SEQ ID NO: 251894 - protein, 347 aa, unidentified
MKHYVGLDVSMKETSICVVDETRKVVKEGKVGSEPETIAAWLELTGLGFERVGLEAGSLAPAMYDGLAAAGLPVVCLDARHLKAATSAMPVKTDRIDARNIAWALHAGWYREVHVKSQATHKLRALLRSREMLVRSRVMLDNHLRGILKAFGLKVGKVDPGRLDQRVRELVDGDEILERVVGAILSVRRELLERLDELHRMVLAAVKADPVCRLLVSVPGVGPVTALAFRTAVEDPSRFAKSSLVGAHFGLTPRKYASGETDRNGGISRCGDRMVRSLLCEAANVLLTRVQRWSWLKRWGVEVARRRGKVRAQVAVARRLAVIMHRMWVDGTPFQWSRDGADEAAPA

SEQ ID NO: 251895 - protein, 338 aa, unidentified
MNYVGIDHHRQYSHITWLDETGEVVKSGRVGNLRRELEEFLQGVRDVKAVIEAGRSSYTMVDVLADLGIETTVAHPKDVKAIAKAKIKTDERDSYKLAHLLRTGYIPEVHKRSRENRSSQRVLRQRAFYVAKQTAVKNRLRALLAQQGEEIRSEVSRAENLFTEKGMKVLKGLALPEREAKMVGALLRTYHHLEERINETNALVKELYEKTPSARLIQTVPGFGIFLAVLVAVEIEDLGRFEDVSKLHAYAGVIPSTHSSGDRSYHGKIIKEGNRWLRWAAVEAVWPALRADFDIRCFYDRLKRRKGANSAKVATARRLLTIIYRMLKENRPYIPHKR

SEQ ID NO: 251896 - protein, 355 aa, unidentified
MDSKKYIGMDVHKESISIAVRNGAGKIVMECVIETKASMILQLIDGLRGDLHVTFEEGTWAAWLYDLLKPQVTELVVCDPRKNASMREGNQSDKIDARRLAELLRLNHLSPVYHGEHGLRSLKELVRSYLTITKDLGRVMSRVKAIYRSWAIPCTGKQVYAPRHRAEWLGKISELGVRRRAEFYYQQLDALRALRQQVRRDLLAESKKHPAWKRLCQIPSIGPIRAAVLLGILQTPHRFRTKRQLWTYSGFGIETHSSADHRSVHGQLQRVKKPSSIRGLNRNCNHDLKNLFKGAAIVASSKPGPFQEFYTTLLTKGLRPEMARLTLARKIATIALIVWKRGASFDAQHLKPQTA

SEQ ID NO: 251897 - protein, 311 aa, unidentified
MSDKQVVGVDVSKQFLDVSFPDGQVERLDNDQAGIEQLAGRIKAVDLVVMEATGGYESAVATALLGAGLRVAVVNPRQVRDFARATGRLAKTDRIDAVLIAAFGRAVEPQIVPLPDDKAKELQGLLVRRAQLVAMRVQEKNRLELMHPGMRRGIKEHIAWLEAQIDKLDIDLTAGLRSSPAWRAKDELLQSLKGVGPITSGMLLVALPELGHLDRREIASLVGVAPFNRDSGKMRGRRAIYGGRGRIRTLLYMAATSAIRWNPVIRTFYEQLKERGKPHKVAMVACMRKMLTILNAMVRDGTAWNPQIKPI

SEQ ID NO: 251898 - protein, 352 aa, unidentified
MQTLAVGCDAHKHYSQLEVQDSTGQALSRVRIDHAHGSILRFFSTLPKGTPVALESVGNWYWIADEIEQAGCLPLLTNPAKAKLLMGHVNKTDKLDASGLATLLRLGSLPSVWLPPAELRDQRELPRTRMALTTLRTAIKNRIHSLLAKYNLSPDGGAQLFSKEGRAWLDCSVSRLPPESARCLTQQLQLLDSLSLQISTLEQRIHSLIPLTPTMQLLKTIPGIADILAIVIEREVGSIQRFPSAPQFSSYCGTTPRVSSSGGKTRYGKLRTESNQYLKWAFIEAANAVAAHHAQRGWTTRHASRLYLRIRSRKGGSVAIGAVARHLAESAFWVLKKNEPYRETNAVSPRQG

SEQ ID NO: 251899 - protein, 402 aa, unidentified
MNAVGIDVSKGKSMVAIMRPFGEIVSAPFEIKHTASDINSLVELINSVEGESRIVMEHTGRYYEVLAHQLSEANLFVSAINPKLIKDFDNDSLRKVKSDKADAIKIARYALDKWQNLKQYNVMDELRNQLKTMNRQFGFYMKHKTAMKNNLIGILDQTYPGVNTYFDSPARSDGSQKWVDFASTYWHVDCVRKMSLNAFIVHYQNWCKRKKYNFSQSKAEEIYGKAKELVPVLPKDDITKLIIKQAVNQLNSASTTVESLRTLMNETASKLPEYPIVMAMKGVGASLGPQLMAEIGDVSRFTHKGAITAFAGVDPGVNESGSYEQKSVPTSKRGSSDLRKTLFQVMDVLIKTHPQDDPVYQFLDKKRAQGKPYYVYMTAGANKFLRIYYGRVKEYLSSLPES

SEQ ID NO: 251900 - protein, 339 aa, unidentified
MVYIGIDVHRKRSHLAALDEAGQVVLSRRVWTRPEEFLRVFGELEPEPFEVAFESTFGWGWLADLLADAGIPAHMAHPLATKAIAAGRVKNDAVDARTLAHLLRGDLLPEAWMAPPEAREARRLARMRASLMRVSSRLKCQVHAILAEHGVTPAQSDAFGKQGRDQLSKVMLPEISQHRMEANLRLIDSIASEVKQAERELTSLFAHDPRVKRLLPIPGIGFITAVMVVAEVWDVSRFRSPDQLSSWAGLTPKERSSAEHTRRGHISKQGSRWLRWIMVESAAQHALRDPELRAFFNRVCRRSPDRIKIAHVAVAHRLLTLCFYALRDEGGCRTFPVAS

SEQ ID NO: 251901 - protein, 427 aa, unidentified
MAYRIAGIDIHKRMLAVVAADVDVAGEYEFQQRQFGSNPEQLRLLANWLLEQEVQEVVMESTAQYWKPVWATLERHWKPACEKREGAGPLSGTLHLAQAQSNRGPRGRKNDFADAERLVRRLVAEELTLSFVPNPEQRLWRTVMRTKYQLRCNQGRLQNRLEALLEEAHLKLSSLVSDLLGVSGRRMLKAIAEGAGDPSAVAARADRRLHATQEQLRDALDACRDLHPVYRRLVKTALEEWERTEGQITRLGQEMADLLGARQEQVQRLAEVPGLGGDSAQQIIAEVGASAATFPSGKALVSWAGACPGEEETAGVNHNRRSPQGNRHLRRILNQAANAAVKHKGSIFALLYRRYVVRFGHNKTIAVIAHRLCSLIWRILHEGVRYEERGPAVSQKAQQRRTDRMIRQVRSLGYQVQLLKATKSVPA

SEQ ID NO: 251902 - protein, 388 aa, unidentified
MQDVADQSAAPTTIGADLCAIFISLELSRSTWLVTSLSPGGGEKMSKHSVSAGDIAVLLGRFSELRRKACARTGKSFPIIVIQEAGLDGFWIHRVLLSEGIESHVVDAASIATSRRRRRAKTDRIDGETLLRALLAHKRGEPRVCSMVRAPTPEDEDRRRICRERKVLIMERVQHVNRIKGLLFSQGASGYEPLRRDRRARLDALQTGDGRRLPQHLKAQVCRELDRLELLLEQIKAVEAERDALLDAEQTKASAPPPMLLGVHGVGPEFASVLWSEGLSRHFDNRRQVAAYAGLAPTPWQSGSVNREQGISQSGNPRLRTTMIQLAWLWLRHQPRSALTLWFKDRFERNGGRRRKTTIVALARKLLVALWKYVSAGVVIEGAMIRPA

SEQ ID NO: 251903 - protein, 428 aa, unidentified
MASVTDAIAPCTWVAIDIAKGVNVALVEHADGRQQRFRFTHERGDYDRLVEFLRGCAQPCRVALEPTADYHRTIAYRLIAEGFDLVLVSSVAGARLREAVFNSWDKNDPKDAQVIMRLLKQGMTQRYCDPLLMHTHDLQELAKTYHHISRARTRLQHVLLTHYVTLYFPEIERFWSPQRNEWFIRLLIQFPTPASIAALSVEEFRDRIWKSMGRRVHKEAKIQEIHALATRSIALPIETDSTAVSTFRLQLERYLQLCQTRDALERNADALLSENPDYQRLRTIPGIGSIIALIILAEAGDLRRFGHHRQFLKFCGLDLAKSQSGAFRSRDQLSKRGNARLRCALWMAAMSAARMRETAFRDKYRRYIARAPEDLDLNRKARTAVAAKMARVVYALIKHGQSYRHCFDAGLPSGSIPLTRAVEAFGTS

SEQ ID NO: 251904 - protein, 342 aa, unidentified
MKIVMVGIDLGKNLCSVAGLDESGAIVFRRRMKRESVLLFTAQLQQCTVAMEACCGAHHLGRQIATQGHAVRLMSAEYVRPYVKTQKNDERDAEAIAEAATRPTMRFVEIKSEAQLEVQSLHRVRGRLVGERTALINQLRALLLERGITVPQGRRKVERLLPEILADEGNGLVPRIRRLIVDMREEWQGIDRRILEFDQELLDRARAMEATRRLMRIPGVGVLTATALVAAVGNARTFARGRDLAAWLGLVPRQATTGGKPKLLGISKRGNVYLRTLLIHGARTALPGLAKSQTPLGGWLRALLERAHRNIVIVALANKLSRIAWAVLAHDRQYAAMEVAND

SEQ ID NO: 251905 - protein, 307 aa, unidentified
MVIIGVDPHPSSHTAVVLDALGRRLAQCTVPNDPAGWAPLKAWMERFPRAHWAVEGATSPFALPLARYLVAQGACLYPIHPSLTSQYRRRVERRKEDGRDAAHAAQALLANPQLPRYLPSEANLALQELTRRREQLGSVRKALRSSLGQLRVVLPGFAEQMQALLAALAQSLDWLDREIGRRVQQQAPGLLALPGIGPVLAGILLAEIGDIRRFPSAQHLASYAGAAPVYRGSGAVGRVCVNPGGNRRLNRALHLAVLTRIRLNKRGSRDYFLRKRQEGKTPREALRLLKTYLAREVYRVLRAQYPA

SEQ ID NO: 251906 - protein, 427 aa, unidentified
MNGTNDSRVERFRQFRKRIRGSDTDLIVGIDIAKSKHHAFFGTAGGRTVLKGLIVENSASGFEHLVTMVKFYMDRDGFKEVVFGVEPTSVYHKPLAEFLIEHGYLVVYATNEAIKKNRSLLDGRWDKNDTKDCANVADLIAQGKCHYYDFPDHGLRDIRSLLLFRKRLKKQLHSCRVRIRNNLVAQYFPEMDRLWNQAEAENLAIVRWCLSPQRINDLTFEDFYQMVTTHNRGLRQHRRLQKIWEIAPYSIGCRASTASQFEAKLLVDGVDYLKDQIAQVESTIFTMCRSYEQYEDLLTIPGFGPYVSAVVLAAIGDPHRFDNASQVIKMAGFDLNAHRSGNKSDTAVPVISKKGKADLRYALYQAALIASSLTAHFRGYYHRLLEGRQKEKGIRTKMRVKLATKLLVIAWTLMKKKEPFNPAYVKI

SEQ ID NO: 251907 - protein, 356 aa, unidentified
MMVVGVDPHKQAHTAVAADELGRRKAQKTVRARRDGHRELIAWARQACPGGRTWAVEDVRHVAGGLVRDLLAAGEAVVFVPPKLMAGARRGGRERGTSDPIDALAVARAALREEIALPAARLDGPVLEVRRLGDYRDDLVAERTRVINQLRWMVHDLDPALAPAPRSLGSARARAKLEAGLAALPACAGRAVALSQLARVAALSAEITGLEQDLAGLVTPLVPDLLAMTGVAVLTAAKILGEAGDIRRFTSPAAFARHDGTAPLPASSGTGDGASDGPHRLNRGGNRQLNAAIHRIALAQARCHPGARALLERRGQDKHETRKASFRALKRHLSDAVYRALKADAWRLDDPSRQAA

SEQ ID NO: 251908 - protein, 361 aa, unidentified
MSLSSWLVAGIVPGVKRQPLKKLPVDESALLKLLNRWREEAEKAGRKIERIAVAFEAGRDGFWLARWLRARGIEAHVIHASSVAVSREHRRAKTDRLDTELLKRAFLGWLRGERDHSKMVAIPTIGDEDAKRPNRERESLVGEQTRIVNRMKAALSRLGIRGFNPKLKKAAERLEDLRTPEDEPIPPNTLAELRRDMERRRLVRSQIRDIEDARLGRLEKAPGDGPHAMVRLLARVIGVGIETADMLVQEVLSRNLRDRRAVARYGGLTGSPDESGKKRREKGLARSGNARVRRGMIQLAWRFLMFQKDSALAHWFYARTKQAPQTRKTMIVALARKLLIALWRLVREGVIPEGIVLRPAL

SEQ ID NO: 251909 - protein, 441 aa, unidentified
MSKIINLNAAGIDISSKEHYVAVPEDRSKQSVRCFQSFTRDLHELAKWLKECKIETVAMESTGVYWYHLYTVLLDYGFTVYLVNAYHVKNVPGRKSDVSDARWLQQLHSFGLLNGCFQPDNQTRSLRNYVRQRKQLITQMSREVQRMQKALEQMNIKLNNVIRDIMGKTGMAIIRSILDGERDPQVLAQYKDPRIKASKEKLIKSLEGNWREEQLFNLKQAYEHYFFLKRQLAECDKECERLVNDMSDDDVPQKKIKSGVKQKNNPDFNVSQHLYNVLGVDVTQIYGMKSTTALTVFSETGSDLKKKFPDEKQFLSWLNVVPDNKITGGKVIYSRVKRKKNKAGLAFRDAANSLWKAYNPLGEYLRRKKAISGGRQAIVATARKIASIYYKMVTENVEFDPRVLEYKTQEYLIRKLKRFEKNIQKTKSLLTENELVSESVI

SEQ ID NO: 251910 - protein, 359 aa, unidentified
MQTQSNKIDFNGQSIFVGIDVHLKSWKVTIMTEKLNHKTFSQDPSPEILHQYLTRNFPGGLYYSAYEAGFCGYWIHNKLINLGINSMVVNPADIPTTNKEKVQRNDKRDSKKIARSLRSGDLTAIHVPSSTTLEDRGLLRVRSTITRDLTKNKNRIKSFLYFHGIEYPESFKDPGTHWSNRFMIWLKGIELQEPSAQQSLSILIDQSTYLRKVILETTRTIRNLSRSEPYKDRVNLLRSIPGIGVLTAMIFLTELETINRFDNFDKLCGFIGLIPSTNSSGEKESIGDITSRGHSILRSALIECSWVSARLDPVMNKCYHDYCKRMEPNKAIIRIARKLLSRIRFVLKNNQPYVYSVVK

SEQ ID NO: 251911 - protein, 346 aa, unidentified
MTYVGLDIHKKTISYCVRRVDGVILQQGTLAASRDALDAWMRHLPMPCMAGMEATLFTAWVYDHLVKTGLSVKVAHPAMLKAIFAGKKKNDRIDAQKLADLLRCDYFPECHIAAKDIRDRRRILRYRTLLVRQSTQTKNKLSALLMETGVPYNKQKLHHSKKYFDQLIKEQKTTMPETMPALLGLGRNVIEVLAAMDRRLLRSLESDSMLAERVQRLMTIPGVGIILALTWALEIGDVKRFPSLKAAISYCGLCGSERSSAGTSKRTPLSKQRNKHLQSTLVEAAKIAPRWHAEFAAMYEHEKQRGNRNRASLVIARKLVAYLLAIDRAERSFLPQPPSAEALAPA

SEQ ID NO: 251912 - protein, 338 aa, unidentified
MAKTSIISIDLAKNVFQLHGIDARGHKQFNRQLKRVQVLPFLANQPKCLVAIEACGGSHYWARKIEELGHKVKIIHPKYVKPFVQVNKNDQRDAHAIAEAAARPSMPSVAHKSIEQLDVQALHRVRERLVKEKTAVGNELRGILGEMGIIIAQGHQSIREAVPAILEDAEAELSMRGRQLIADLREQWLEREQRVAYYDRELKAIANENEVCKRLQSIPGIGPVNATLLYSHAGDASNFKTARHFSAYLGLVPKQHASGGKEVLLGISKQGNKQVRKQLVHGARAAYRALSQSGDDSRLRQWLSRMSGKHANTIIVALANKLARIVWAVMMKEQCYQP

SEQ ID NO: 251913 - protein, 460 aa, unidentified
MPDGGENSSTRRKKQIEGLPVVLHNVAGIDLGSEQHWVCAPVAGGISREVADFGATTAELIRMTKWLQACGVKSVAMESTGVYWIAPHEVLEAAGLEVLLVDTRQLARVPGRDKKTDPTDCEWIQRLHSCGLLRGSFRPREEVCMLRTLVRDKANLVAECGDWLRRMQKSLDQMNVRVHRAVSDIDGVTGMAILRAIAEGERDARKLAKLRDTRCHKSEEEIAEQLSGHWREDHLFSLRQALKMYDAIQQRLADYDREILQRLAAMQREELRQQPPPPVKNPQKAKNMKKRGEEPMREALFRMSGVDLTGIDAIGVETVQVVLSEYGPDLSRFPTEKQFASHVTLVPHKPMSGGKPVRKKRRNSASTRVAAALRMAAVTLRNSATALGAYYRKMARRLGGDVAVFATARKLATLIYRLLRWGQPYVDEGAEAFERRYQETRLKNLKAKVKELGYELVASN

SEQ ID NO: 251914 - protein, 339 aa, unidentified
MELYSGIDLHSNNLTAAIMDETGKRILKKRLINDPKIVLTTLEPYRTELVGIVVESTYNWYWLVDALMDDGYPVHLANPSAIQQYSGLKYVDDNHDAFWLANLLRLGTLKEGYIYPKEDRPLRDLLRKRWHLVKLRTSLIISLKNILSRNFGLQMKSSRIKNESLDAFVSGLPGEDNITLVVRTSKASIDFLTVQIEQVESTVLKQAKNKPFYARLLELPGVGKILALTIQLETGPVDRFPKVGNYASYCRKVESRWFSNEKTKGRGNAKNGNKYLAWAFSEAAEYARRFYPASRAFYNRKLNQGNAAIAHNALAHKLARAAYYIMRDNVPFEEGKMFA

SEQ ID NO: 251915 - protein, 396 aa, unidentified
MIYVGIDVAKETHYAAVMDDNNNVLVKPFDFTNDAVGFAKLISKLTSFPKEKLLFGLESTGIYSENLIAFLYDSGFSIAVINPIQTATLRKTGIRKTKTDKTDTLLIIKSLMVNPYHLYTRQDAVTMKLKSSCRYRQNLKKSKARLKIQLSAYVNMVFPELQNFFKSGIHIATCYELLKMCPSPAEIAALRIDKLSKLLSKASHGRFGKSSSEVLKSLAKTSVGVKNPYISIQITQTIASIELLEQQIEEIETLIEEMMKELDSVIMTIPGIGAMDGAMILGEIGDISRFASASKLLAYAGLDPTVCQSGNFRARSTKMSKRGSKTLRFALINAAWQLTLHSDVFKAYYDLKRSAGLGHYAALGHVAHKLVRVLFKLLRSRIPFDENFLLISQGGA

SEQ ID NO: 251916 - protein, 391 aa, unidentified
MVCVGIDVAKDKHDCCILDSEGTTLVDYFTIPNNMDGFKSLLQTIQDCSQKSDKIKVGLEATGHYSYNILGFLLDNDLPVYVMNPLHTNLYRKSLSLRKTKTDRVDAKTIATMLLSDVDLKSYTDTAYHNEELKSLTRYRFDKVQERAKLKQSVSRLVTILFPELEQLVSSIHGTSIYALLSEYPGAKQISEAHLTRLANILVKTSRGHYRKDKATHIRDAARTSIGSVMPAKSLELKHTIKLIQELTSEINEIEDAIRKIMDELKPPILSIPGMGFHSAAMILAEVGDFSNFNSPDKVLAYAGCSPSTYQSGKLTNCYAHMEKRGSRYLRYALYTATKYVCYWNPVFTEYLTKKQAEGKHYNVALSHATKKLVRLIYALQKSGKAYLAVT

SEQ ID NO: 251917 - protein, 310 aa, unidentified
MERIIIGVDVSKDRLDVAVRPSGEAFVVERNARGLAELVARLRTLAPDIVALEATGGFETVVAAALAGAGLPTAIVNPAQVRAFARALGKRAKTDPIDAAVIAHFAEATGLTPRPLADEATRLLADLVARRRQIVEMIGAEQQREQRTTAPRLKKSIARLLKALEKELASLDGDIDDAVRGSPAWREKEDLLESVPGVGPIIARTLIAELPELGQLSRKEIAALAGLAPFTRQSGQWRGKSFISGGRTAVRCALFMGAMVAKKHNSVLKDFFDRLVAAGKPKMVALIAVARKLLTILNAIIRDNRPWQTA

SEQ ID NO: 251918 - protein, 341 aa, unidentified
MNRAEHYIGIDISSEYFTVSILTVSGMKTESLDDFENGTPGFQSLADALERKKIEAGNCIVCMEATGVYGEHLSYFLISRGHSVAVENPLKVKRAFGISKNKTDKIDSARIAEYAFRFSDKLELWTPKTRIIEEIRVFQAQRELFTVQKISNMNAKKALERKFHRSEKAIQMYDDMIKKCTENIKEIDMAIISVIQDEPEYRQHIANIKSVPGVKDQLAFQIFSVTNGFTEHMDFKKLASYAGIAPVPFESGKSVRKKTASSGIGPGKIRKLLFLASMNARMHNKQMREYFERRTAEGKSKRLVLNNIGNKLLKLIISIIRNRRPYIANFSSVNPIFLKKS

SEQ ID NO: 251919 - protein, 428 aa, unidentified
MTKRNENLSLIRKGRTLIVGIDIAKDIHWARMLDSETSIEVGTAFKFNNNIEGFTRLLENANRAKEEIGAKRVVIAMEPSGHYWKALAGHLSDLGVTVVLVNPFHVKNQKELDDNSPSKNDRKDALTIAMLTWQGRFSRCYIPEGVWAELRGYTVIRHQQKRKLNAALNNLAAILDEYFPEYKDVFKETLGKASQHVLTHFPFPTDIVKLTKAKITQELKKASRNRVGAKRAALLLDKAQVSVGAKKGLAAARLRLSQCLLEISFYKEQLAQTEAAMEEALDRTEIADNLLSIDGMGVVTVASFLGEIGDPSRFENWRQIRKLAGFNLVESSSGKHRGKTSISKRGRPRLRNILYQASLNIVVHNPEFKALHHHFKTRRQNPLKPKQSLIAIACKLLRVMFALAQKNCSYDPEKALGIYRQQQLELVA

SEQ ID NO: 251920 - protein, 363 aa, unidentified
MEVTTIGIDLAKTVFAVCGADGSGRIVLRQQLRRNQVLNFFGQLQPCVVGMEACGGAHWWARQLGELGHTVKLLNPRAVAPYRSGAKNDGNDAAAVCEAVSRPQLRTVAVKSIAQQDLLAVHRVRHLLVRQATAFSNQVRALLHERGIAVRPGAKALKQALATLPLDNPDLSGEVRALLLEVGGWWRETQERIEQLEQRLERKCRADERGQRLREMSGVGPITATAALALVGNGSEFHSGRHLSAWLGLVPGQHSSGGKTVLLGITKHGNRYLRTLLIHGARSALRICGRRSDPHSRWMQQLLKRRGPNVAAVAIANKQARIMWALLRHGDRYLSARAVFGRAPSAGAVVRRVHDQKLLMVKD

SEQ ID NO: 251921 - protein, 421 aa, unidentified
MPNIEIGVDSMDKENFIYVGIDLHKETHTAVMIDCYNQKLGEITFPNRPAAFPKLVTKVKKCNTDGKEVVYGLENAYGYGRALAVWLIDKGYLVKDVNTAISHRQAKHRGAMYRKSDSDDAEAIALATLNMLDKLPDACPNDAYWSLGQLVHRRDNIMKQRTRLVNQLHEQLCIAYSSYKSFFNDISRPTALYFWEHYPSRKYLRGKFVEDLRKELVPVSHNKCSTKTCQAILDAVAGDKVKNIDYQDARDMVTLSIVSDLQHYDSQLMEVDKMLEQMYKMLGCTLTTIPGVNVITAVKILAEIGDIKRFSNANKLAQFAGIAPLHLSSSGKGKDVATKQGNRRLQATIYFLAIQMVQLSSKGTPRNPVVRAYYEKRKAEGKTSQQALICISRRLISIIYGMLKYGTEYRMPVVENAGEKL

SEQ ID NO: 251922 - protein, 419 aa, unidentified
MGRIKAKKVKWINKKTMIATFDVGKNIHYGYFRTPDGRERKPFCVHNARKSFKQLWAQICRFKRDHQLEQVVVGFESTGPYAEPLFHFLRKKPVKLVQVNPVHTKRVKELTGNSPNKTDKKDPRVIADVICLGHALTLVVPKGAAAHLRRLTQARQRALRDRTAAINQLQHLIFVIFPEFLAIMKNINTKTAAYLVKYHPAAQDIAALGVEALTAMMRKISHGRLGRERAEQLIAAAKSSIGIREGCESILLEIAHLNARIENDSDFIAKLEDQLEEYLHQIPYSSSILSVKGIGVVTAGGLIGEVADFKKFDTISEIMKLAGLDLYEISSGKHRGQRRISKRGRPLMRKLLFFAAINAVKSKGIMHQKYQQMLARGMLKMKALVAISRKLLGLIFAIVRDSTKYIEDYNQNHHYKLAA

SEQ ID NO: 251923 - protein, 377 aa, unidentified
MSKVRWIGLDVHADTIAVAVAEPTGEVRSLGVIPNRPESLRKLVKRLGPAEQLRACYEAGPTGYVVYWQLTALGVRCEVMAPTLVPVKAGDRVKTDRRDALKLARSYRAGDLTPVWVPDAAHEALRDLVRGREAAKRDQLRARHRLSKFLLRHGWRPPVGTKAWTQAYLTWVKQAVHFAHLAQEATLLDYIHEVDHVAERVARLDRAITEAVVVAPPAMRAVIDALQALRGVALVSAVTIVAEVGTLSRFRRPPQLMGYGGLGPREASSGARTWRGGITKTGNAHLRRIVVEAAWAYRHRPAVIGALRRRQAGLSEPVKALAWKAQHRLHGRFRKLLGRGKCPQQAATAVGRELLGFIWAIGMAVEAEHRQAPAAAA

SEQ ID NO: 251924 - protein, 410 aa, unidentified
MTVASDNRKSTLWIAIDVAKIKHVVLIEYPNGTHNQLNIMNNLAEFTRLAEHLKKSELPVVVGLESTGYYHRAIAYFLLQQAFEVKLISTMAASRVREAKFNAWDKNDPKDAGVILYLLKSGISQYYHEPLLHQTLEIQELANTHRQLSLRKTRLQHSIISHYLRLYFPEAEKYLCSTRAQWFAQFFAKFPCPQAVTQYTMDNFIEEAWALAGGKVDKRNWLKDVYHTAKQSIGLPIDNQSKAMDMFRLVFNEFATLCQRRADVEALSEAYLENNSDYQRLKTVPGIGPIIALTTLAEAGDLRRFKHWRQFIKFCGFDLCTHQSGQFRGQSKLSKRGNNQLRQVFWMAATIAIRMRENTFRKKFENYTKENPNHADLKRKAYTAVAAKMARVCYSIIVHETDYRCTYESQ

SEQ ID NO: 251925 - protein, 355 aa, unidentified
MDSKKYIGMDVHKESISIAVMNGAGKIVMECVIETKANMILQFIDGLRGDLQVTFEEGTSAAWLHDLLKPHVTKLVVCDPRKNASMRDGNQSDKIDARRLAELLRLNHLNPVYHGEHGLRSLKELVRSYLTITKDVGRVMSRVKAIYRSWAIPCTGKQVYAPRHRAEWLGKITEPGVRRRAEFYYQQLDALRTVRQEVRKELLAEAKKHKAWKLLCQIPSIGPIRAAVLLGILQTPHRFRTKRQLWTYSGFGIETQSSADHRSVDGQLQRATKQSSIRGLNRNCNHDLKNLFKGAAIVASSKPGPFQEFYTALLTKGLRPEMARLTLARKIATIVLIVWKRGACFDAQHLKPQTA

SEQ ID NO: 251926 - protein, 351 aa, unidentified
MDTIGLDLHQRESQLCVCDADGTVTERRIVTSRERFTAVLGNRPRTKILLEASTESEWIARHLESLGHEVLVADPNYAPMYATRSRRTKTDRRDARTLMDACQTGAYRLAHRLSDPRRHIRAELAVRDALVRTRTRYVALAKTLVRRDGLRVASSESHLVAQRIGALSLSPALEAELQPLFTVLAPLNEQIAAADGRIATLAATDPLVARLATAPAIGPVTASAVVATVDDITRFRSAHQFEAYLGLVPGERSSGEKRHVGPITRAGNSRVRWLLVEAAWRLLRTKSAEAAALRGWAHGVAGRRGKKIAVVALARRLAGILYAMWRDGVPFDASRIRNPRIAAAEGTARAG

SEQ ID NO: 251927 - protein, 342 aa, unidentified
MGEISIIGLDLAKQVFQVHGARVDGSVVLRKKLTRGQLLAFFSKLPPCIVAMEACATAHYWAREIGEFGHEIRLVPPAYVKPFVKRQKNDVADAEAIAEAATRPTMRFVEPKTPEQQARAMVFRTRELFVRQRTQTINALRAHLAEHGLIAPKGLWNLSSIRQLIDQAEDTVDGLIVETARIYLEQIETFSTRILSLEAVLKKEAARSDASSRMMTMPGLGPITAMAIEAFAPTLTVFRRSRDFAAWLGLVPRQHSSGGKQILGRTSKMGQRDIRRLLIIGAMSIIRWASKKAPVPGTWLHAMLLRKPRMIVAIALANKMARSLWAMQTKKEDYRDPLLTVA

SEQ ID NO: 251928 - protein, 344 aa, unidentified
MEHFAGLDVSVNETSVCIVDDTGKIVREVKVASEPEALLAVLGNPACQFKRIGLESGPLSQWLYSALADAGLPVICVETRHMRAVLKAQINKTDRNDARGIAQMMRAGLYRPVHVKTLRSQKLRALLTHRKLLQSKAIAIENDLRGTLRTFGLKVGVVGTMKLETRIRELVEELPDLRTLVEPLLVVRRVLREQIAVLHRRVLAIVRDDEVCRRLMSIPGVGPVVALTYRATVDVPARFRNSRAVGAVLGLTPCKYQSGESDYTGGISKCGDAMLRVMLYEAAQILLVRSTRWSWLKAWAMRIARRRGMKKAIVALARRLAVIMHRIWVDGTEFCWTRQQAAAA

SEQ ID NO: 251929 - protein, 516 aa, unidentified
MPNRRGCSCLMAFLGATAFRVLVAVDTVAEIAAPRPGWKDVGLCKCDAQIESKDGLRALGPLPILGPGGKPPARKQGVQTRGERWKFSAWSGTGLELEVEVEEADSELGCTKLPRKRTQKVQKGRNRPMKKNSKNETMKSKRETKKVAELEAGWTRLDEREANTLVIGIDLGDRTSAYCVRTLGQQIVKEATVATTATALLEAFQGLRRQRVVIETGTHSRWVAQLLELMGHEVIVANARKLKLISENNQKSDKVDARLLSELGCMNVEWLHPVYQRSQAAHSDLLLARARQALVDARTALINHVRGSVKSFGSRVEKCASERFVEVARGALPEALKPALSGVLATLEELNEQIYGYDCQIEHLCHTKYREAAKCLLQVNGVGPVTTLTFVLTIENKDRFEQSRDVGPYLGLIPKKRQSGQRDPQLGISKEGDEMLRKLLVNCAHHILGAKGQDSDLRRWGLELVRAVERKGKKGARKLAAAAVARKLAVLLHRLWVTGAAYEPLRNRGAQQAPAA

SEQ ID NO: 251930 - protein, 357 aa, unidentified
MLSNNIKYIGLDVHKEAIAIAILNGAGKLVMESIVETKASTLLDFLHGLRGGLHVTLEEGTWAAWLYDVLKPHVAEIVVCNPRRNALLKEGSKSDKIDARKLAELLRAGLLRAVYHGENGLQTLRELARSYLTISKDLKRVKNRLKALYHSWGICCAGKQVYAPRHREQWLSKIALGGVHRRAELFYQQLDGLLVLRNTVRGELLAESRKHQTAKILRQVPSIGPLRTALLLALMQTPHRFRSKRQLWTYSGLAVVTHDSAQHRYVDGQLQRSKKPQQIRGLNQNHNHAMKEIFKSAALNASRCAGPLQDFYVGLLAKGMKPDMARLTLARKIAAITLALWKKGGSFDAEHLRSQAA

SEQ ID NO: 251931 - protein, 343 aa, unidentified
MIWVGLDVHKRFSRMGSFDPATGDLQDLGEVSNDREVLQVRLEQVASPRTVVLEAGRSSYHMAGLLEPLADEVWIVNPTELRRLQHRVAKTDRRDAAALAWWAAKGALKPLWRPDRPVLELRELTRGRTTLTRLATQLRNLIRSLLARHGYECPQRDLLCARGRAWLDTVTLEGYAGEMLAAFRALLSLIQEKADGFEQEVEAAAADCPAAQRLRTIPGIGPVLGLSLAVEIGDISRFPSPGHLRGYSGLAPAVFQSGEKEARGPITKRGNKRLRRTAVLAAQRMSQMHHPDPSIKRTFLSVAFRHGRNPGKVAARRLLDLSYYLLKKEVDYQAPRARTASAR

SEQ ID NO: 251932 - protein, 427 aa, unidentified
MPHRIAGIDVHKRMLAVVVSDVEVADEYQFERRQFGSNPAQLRALAEWLLEQQVQEVVMESTAQYWQPVWGALEQYWKPPCQKSEGARPRSGSLPLAQAQSNRARRGRKRDFLDAERLVRRFVANELVLSFVPDPEQRLWRTLMRRKYQMTRNRVQLQNQVEALLEEAHLKLSSLVSDLLGASARRMLRALADGETNAVALAALADYRLQATPAQLQDALGACAGLDPAYRRLLSMALEELQLLEKQIGQLEQEMADRLRPHQDAVQRLAEVPGLGADSAQQILAEVGATAATFPSEGDLASWVGACPGDEESAGRSYSHRSPKGNRQMRRLLNPAANAAVKLKGSIFALLYRRYVTRLGHNVTIGIIAHRLCRLIWKILHQGIRYEERGPAASEQSKRQRARRMIRELRSLGYRVELPNPQPAVPA

SEQ ID NO: 251933 - protein, 341 aa, unidentified
MKSVYYVGLDVHKKTISYCVKEASGEIVDQGRIDATRTSLDAWAEALPGPWNGALEATLFSAWIYDHLQPLAEDLAVAHPAMLEAITRAKKKNDRADAEKICDLLRCNLLPRCWMAPGWIRDLRRVLRFRNLLVRQAVRMKNRISGLLMECGEEHVKSKLHGKNYFYELLDSLASTPESAIELLVYSRGMYELFVELETSLRRGLLRHPRLEQRVALLRTIPGVGEVTALTWALEIGEVERFSSIGRAVSYCGLSARQDESAGQSKRGPLSKQRNAHLQTILIEASKLAPRYNPRLKEVHEKALESGSRNRVTVAVGRKLVAFLMAVDRSGRPFTPRSQAA

SEQ ID NO: 251934 - protein, 355 aa, unidentified
MNDAKYIGMDVHQATISAAVRDSSGNLVMEATLETKAEIILEFVHGLRGSLRVSFEEGTCAAWLHDLLKPHVTEVLVCDSRKNALLRVGNKNDREDARKLAELLFLNKLHSVYHGEAGIRTLKELARSYLTITRDLTRVMNRLKAIYRGWGIACAGQQVYAPGYRAEWLAKIAEAGVRRRAEIYYQQFDVLAALRQQARRELLAEARKHPALRLLRQIPSIGPIRAALLIALMQTPHRFRTKRQLWAYCGLALRTYDSGEYRFVGGQLKRTKKAVTIRGLNQNHNHDLKNIFKGAATRAAAIAGPFQNFYQARPASGMKPPMARLTLARKIAAITLLVWKKGVRFDATQLKQQAA

SEQ ID NO: 251935 - protein, 430 aa, unidentified
MKSNTQNKKIEAITEKTLVIGIDVGSETHYARAFDYRGIEYSKKPFKFSNTEAGFVTFKEWILDLKEKHEKDKVVPGMEPTGHYWFNLGKYLQDNEMKPVLVNPHHVKKSKELDDNNPTKNDRKDPKVIAGLVREGRYMIPYLPDGVYADLRTASNIRFQLQAELTRIQNRISRWFNIYFPEYKTVYGKPDAKSGMLILKAAPLPEDILTLGIDGVNQIWRDAKLRAVGKARAKTLIEAAGHSVGSKEGAVSARMEIRMLLEDYESRNMRLQEVMVLIEELVKGIPMAEKLLEIKGVGIRTVSGFLAEVGDISRFNNPKELQKLAGLALVENSSGKHKGGTTISRRGRKRLRYLLFEAAMSLVAKNPEFRELHNYYTTRRRNPLKKMQSLMAVATKLIRVFYAMLTKGVDYDPKKMVSDIRRPEAYLQAA

SEQ ID NO: 251936 - protein, 345 aa, unidentified
MELHTIGIDLGKTVFHLVGLNLRGEVAVRKKFSRTQLLRFTANIHVELIGMEACGGSHFLGRALREQGHEVRLIPAQYVKPYVKTNKSDYIDAEAIAEAVSRPTMRFVPIKTDDQLDLQSLHRVRERWVMRRTAVINQIRGLLLERGITLRKGRCHVGAALPGILEDADAKLSGALRMLLAQLKLELDHLDLRIDEADALIKKTARENEACQRLVAIPGIGPVTATALIAAIGNGGAFRKGREFAAWMGVVPREHSTGGKQKLLGISKRGNSYLRRLFVQGARAVMQQRTKQSPGLSKWLAQLTSRTHRNVAGVALANKLARMAWAVLAKNEPYRPPVLADVAAA

SEQ ID NO: 251937 - protein, 369 aa, unidentified
MEKDTTYVALDDSKRKIVVGILRSGDTQPELREIANDPRQIRRLFERLKREGPVAACYEAGVSGYDLHRQLIALGVAGAVIAPALTPRRPGQRIKTDRRDAAKLVRLFRAGELTAIHVLDESEEAVRDLVRCRDDIRRDVLRWRHRVLKLLARHGRACLTGKNWSRAHWQWIREQRFDLPPLQRAFEATLFALEQALARQAELDQELEAVAATAAYREPVGWLRCFRGIDTLSAIILLAEVVDFQRFRRPRELMAYLGLVPSEYSSGESQRRGALTKAGNSHARRILVEAAWHYRHRPTIGRALASRTHGQPDEVVAQAWRAQQRLHRRYRHLVGHGKRTPVAVAAVARELVGFIWAAMTRHESRRAAA

SEQ ID NO: 251938 - protein, 330 aa, unidentified
MSPTSGASVVPAPVCAYAGLDVGKASCQLAILLPDGSLLQKSIDASPPGFGQMAALAKEHQVALVVMEATGGLELDPAMALWNAGLAVSIISPGQSRAFARTTSKQAKTDRIDAAMLAQFASKIRPDPSVQPTALELELRELAGRRGQLTGLLVQEKNRLQQARTQLVKKSIRQVIEALQKQLDDLDGLLQERVKEDPRIHQAIELLSSAPGIGTLSATQLCLAMPELGSLSRRSSASLAGLAPYAHDSGTMVGQRSIRGGRSAVRNALFMPTLCAIRHNPIIKEFYQRLRAAGKRRIVAVVACMRKLLAILNSMLKQNKTWDQFVLKNH

SEQ ID NO: 251939 - protein, 352 aa, unidentified
MRKYYVGMDVHKLSIAIAVLDAYGKLVSRTVIETTTEAVRDFFRNLRGEIHLTFEEGNHAAWLYDIVEPLVKRVVACNPKHNRIEGSRSDRVDAVKLAELLRLNALKPVYHGEHGTRTLKHLMRCYECLVKDITRVKNRLKGLYNSQAIKQQGRELYHASKRQSWLAKLPNPGQRTRAELFFRQLDELKVIKRAAQKAMVAESKRHPAYRVLSTVAELGPVRIAQIIPTVETPWRFRSKRPFWNYTGLAVVTRSTADHEFENGRVRKRKRQIIQTRGLNQDYNRRLKLIFKSAATHASHCGAYREYYEGLLKTGMREEMARLAVARKLSATVLAVWKSGESFDVGRILRKAV

SEQ ID NO: 251940 - protein, 405 aa, unidentified
MFYGLDVHKEFIQVCELDPKGAKRKEYRIGGTAEEIDRWAQSLSRRDQVVLETTFHTWAIHAIVSRYAGRVVVANALQVKAIAHAKIKTDKVDAYTLARLLQADFLPSVELPDAKTWALRQLVSHRRLLVKQRVAIKNTVLAVFHRCLISPPEGDAFSAPGRRWMRSHELPSAERFLVHNALDLLEAIEARIEAADQELLKTAAIEEQAKLLMTIPGVGVTVALGLLAAIGDIRRFPSPGELASYFGLVPRVSQSAGRCHHGSITKAGPGNARSLAIEAAQILARSPAPIATTFYRVRRKKGYNVAVTALARKLIVLVWHMLQNGEPYRYASVESTRRKLRSLVPKHERPRALRPPRNLEEVYREAGLTLPSPPSDAERRAAASNRRTRTRLTRSSSKAVTEIPQ

SEQ ID NO: 251941 - protein, 347 aa, unidentified
MFAESVDVVIGVDTHRDSHALALLDAGLGALIAEERVDANRAGYRRALKLASGCGRRRLWAVEGTGSYGAGLARYLQRQGERVLELERPVRSGSRGRAKSDALDALRAARAALTGEPLAELRSGGQREALRVLLVSREASVAVRRRGLNQLRALVLTAPAELRERLQGLPKRALVKRCVALRPRSGQQPQLRGTLLALRSCSRQVELASREAAVLERELAALVKQLAPQLLSHYGVGPITAAQLLVSWSHPGRLRSEAAFARLAGVAPIPCSSGKTIRHRLDRGGDRQLNRALHTIVLARRRSDQRTIAYIHRRTREGKTEREAIRSLKRYIARSLYRLLEHTHRTA

SEQ ID NO: 251942 - protein, 342 aa, unidentified
MEQVSVVGLDLAKSVFQVHGVNAQGEAILRRRLTRGQLLKLFEKLPPCLVGMEACASAHHWARELTALGHEVKLMPPQYVKPYVKRGKNDAADAEAICEAVTRPTMRFVGAKSPDQQATMMLHRVRKILTRQRTQISNALRAHMAEFGITAAIGRGGMDRLIAVIADQDDARLPEEARACLTALSTQLEMVKEQILDNDRRILADARRTEAGRRLMKIPGIGPLLASAIVACVPDPSTFGGGRSLSAWIGLTPRQNSSGGKERLGSITKAGNTYLRELLVVGAMAVVRRAKQGSTKRPWVTQLLARKKPKVAAVALANKNARIIWAMLATGEPYREPELAAA

SEQ ID NO: 251943 - protein, 336 aa, unidentified
MSHYCGIDLHSNNHLVVVIDEEDKRVFEKRLNNDLSLTLGALSPFQKTLQGVAVESTFNWYWLVDGLQEHGYDLQLVNTAAVKQYDGLKYSGDRHDAFHLAHLMRLGILPTGYIYPKEQRAIRDLLRRRLFLVRTASSQLISVQSQIWRTTGLRIKSADLRKPDIVVPQVDDYTHQAVHAGLAVYQSIQREIEGLEQTAHQAVRLTGAFKLLQTVTGIGKILGLTIMLETGTIARFAGPGNFASYCRCVDSTRMSNGKKKGEGNAKAGNKYLSWAFSEAAHFAVRFEPLAQRFYERKKARTNGIIAIRAVARKLARATWMMLKHEVPYDAKLMFPG

SEQ ID NO: 251944 - protein, 341 aa, unidentified
MVKTPAITGGVDTHADVHVAAALNGIGGLLGVSEFPATPAGYARLLGWLTSFGTVCLVGIEGTGSYGAGLARHVTAAGIRVVEVDRSDRQDRRRAGKSDPLDAVSAARAAQSGRASGAPRGRDGAVEAIRALMVAKRTARAQRTQTINQARALILTGPDGIRARFTSHGPAELIAALAALRPRPGSMVRYHTLLSLRELGRRAQFLDGQLEQLDELIIPLVTGRAPGLLTLYGVGPDTAAMLLIAAGDHPARLRSEAAWAHLCATAPIPASSGKVTRHRLNRGGDRQANHALWRIVITRMSSHPATRAYVQRRTAEGLSKKEIIRCLKRYAAREACPHLRG

SEQ ID NO: 251945 - protein, 364 aa, unidentified
MAPSATPDKAPPDKDGVDGPNGIDVPHCGLSEPATGEPPTVSITMIGLDTSKSAFQIHGVNETGKAELKRKVRRSELIAFFEKQESCTVVMEACGAAHHWARILTGLGHTVKLIAPEAVKPFVKKGKKNDAADAAAICEAASRPDAQFVPAKTVAQQGILALHTVRSLLVKQQTMLANAIRGLATEFGHVVPKGLHNLEPLVALVDADEAMPAQARQAIAELHERFGELAKGIQSCEAGIVKHARNDATARRLATIPGIGPITASLIAATVVDISRFKTARQFAAWLGLVPRQHSTAGKTRLGRITKAGNREIRKLLVLGATSMLGRAEGWHSAVGSWLRDMLQRRPARLVTVALAEKMARIAW

SEQ ID NO: 251946 - protein, 348 aa, unidentified
MLIIGCDYHPGFQQIACVDTETGEFGERRLTHPEEAEEFYERLKERNVRVGMEASGHAHWFERLLKGLQFELWIGDAAEIRTKRVRKQKTDRQDAQLLLRLMVEDRFPRIWVADAANRDLRQLLWHRHRLVQMRTRIMNQLHVVALNEGVRRKKALWRPAGRNELESLNLAPWASRRRQDLLDLLDQLTPKIQEATRGLEEEAEKRPVARRLMTHPGVGVLTALAFELVIGTPDRFHCGKQIASYVGLVPSEESSGDRRRLGHISKQGNSLLRFLLVEAAQVTVRSQVQWRSKFFHLAMRRGRKIAKVAMARKLAVHLYWMWRQGWDYGQFEKLGSHAGEPGNRHGVQ

SEQ ID NO: 251947 - protein, 410 aa, unidentified
MHVIYPRCAALDLGKDVLVAAIRVQDAGGITRQCRTYGTTAGQLSELAAWLRGHEVRHVVMEATGSYWKCVWRALEGEFELTLANPAQIKNLAGRKSDRRDANWMVDLHAHGLIRGSFVPPAHIDALRELTRTRKQLVREITRHTQRIQKILDIANVKITGLITDTLGVSGRAIVKALIAGQTDPERLADLAHPRLRVSRVRLLEAVQGRPTDQQRRLLGMHLSLIESIEGSISQLDLDIAKAVEPFRELVERLGLMPGMSQISVPALLGEIGVDMSKFPRDANLISWAHLCPRHDESAGKVLSRRTLKGAAWIKTLMTQAAWAASRKKDSYLRAQYLRLCRTTGDRKKAIVAVASTMLKIAYHMIRDGTPYTDLGINYFDDHDRARAVRHHLARLRRLGYEVRLGGAVA

SEQ ID NO: 251948 - protein, 403 aa, unidentified
MSNYFAGLDWASKAHALCVVDERGGVVDRFEIGHDALGLGELQRRLRRLDSPPIAIERPSGLLVDTLVEAGLTVVPIHPNAVKASRPRYRSHGGKSDASDAYVLADLLRTDGHRFKALTPQGDEIKALQALVRGRDDLVATRVQLANQLRTLLESFWPGAAVVFADIDSPIALAFVERYPTPESARTLGPKRMAAFCAQHAYCGRRSTVDLLARLHQAPTAVCAELEMEAKGELARSLARTLKCLVEQIRLLSSRIEHHVASLEDGKIIMSFPRAGRICAAQLLAELGSVRERFLSDEHLAAEAGVAPVTYASGKSKAVVFRWACNHRLRAALTCLADNSRHANAWAAHVYAKAKARGCDHPHAVRILARAWLRVIWRAWTDRKTYDPTQHRAAQLLLKTAGG

SEQ ID NO: 251949 - protein, 359 aa, unidentified
MRTSGKNIFEGQLTIGLDLGDRSSAYCVLNAAGEIVLEHKLATTPEAMKQVFGSLPRCRIAMETGTHSPWDSRLLMALGHEVIVGHAQKVRLITKSRRKDDRLDARTLARLARIDPELLSPVKHRSAQAQLHLTEIRARAALVSTRTALVNAARGLVKSYGERLRKCHTQQVGREMTRELSMGLREALKPLLQEVESLNERIKEYDRRIEKMAKEMYPETALLKQVKGVGDLIATGYVLTIEDPHRFRKSRDAGCFLGLQPGRRNSGESEPQMRISKEGDEYLRTLLVQGAHYILGPFGEDSDLRRWGQKLSARGGKNAKKRAVVAVARKLAVLLHRLWVSGEVYEPLRNSQKPMSTAA

SEQ ID NO: 251950 - protein, 419 aa, unidentified
MDVVYPRCGGIDVHKKQLAACRIVVDERGQKRIEEAGFGTYTRDLQGLAEWFAEGDVRDIALEATGPYWRPVWNILEAYGMRLTLANPAHIRAIPGHKTDRRDARWIADLHQHGLVPASFVPSGPQRRLRDLTRMRTKVVHDRSRVVSRLQAVLEDANIKLASVVTDIMGVSGKAMLRGLVGGEAHPAELADLARASLRRKRPQLEMALEGNFTRHHGFLVQRLLMQERVLVQQEHALERQIASLLDDDQKRAIALWDTIPGVNETVATVLVAELGTRPEQFPDAHHAASWVAICPGNHLTAGKQKSGKTRKGNAWIRTALVEAAWAAARSKGTYLSALYARMRPRKDEKRALVVLAHSILVSAYQMLKTGETYRDPGPDYFDRLRPQHAANRLIKRLNRLGYRVHILPPDETQVAHLQ

SEQ ID NO: 251951 - protein, 351 aa, unidentified
MIIVGVDYHPSVQQVAFLDTETGETGERRLNHSDGEAERFYRDLQRRQVKVRVGIEATGHARWFERLLAELKFELWIGDPARIKAARVRKQKTDRQDAQLLLRLLVEDRFPRIWVPSPENRDLRQLIWHRHRLVQMRTRAMNQIQAAAMNEGVRRKKTLWSKTGRRQLEALPLAPWATRRRQDLLELVDRLNTTIDELTAAAEQEARKRPEVLRLMTHPGVGPITALAFVLVLGSPDRFGCGHQIGSYLGLIPCEDSSADRQRLGHITKQGSSLLRFLLVEAAQAAVRWDPDWRRRFVHLAMRRDRRIAKVAMARKLAVSLYWMWRKGFDYPQTLQFGSHAGEPGYVHGVK

SEQ ID NO: 251952 - protein, 401 aa, unidentified
MRPLVWVGIDVGETSHHACAVDETGKVLWNQKVSNEQRAIEQLIARAHKGADEARWAIDLTSPMALMLITVLLGAEQSVVYVPGHVVNTMTGAFRGEGKTDAKDARVIAETARMRSDLSEVAMPDELVVELAQLTGYRTDVMADWVRGVNRLRSLLGSIFPGLEAAFDYSNRTPLILIAHLCTPAEIRAAGIKGVTAYLSDNGGWPTTIAKTAATAVAAAKQQPLALPGEAGTAALVKRLARKLLDLDHEIKDIDKTITERFRDHPYAHIIESLPGFGPGLGAEFVVVTGGDLASFATAGRLASYAGLVPVPRDSGRISGNLHRPKRYNRRLRRVFYMAALSSIRGDGPSRQFYDRKRGERLIHSQALLALARRLVDVLWALLRDGREFTPDKPTPATAVA

SEQ ID NO: 251953 - protein, 320 aa, unidentified
MSTSGRTTSYVGIDISKATLDVAVLPTGEHFVVSNEEAGIEELLGKLAEVSDALVILEASGGFERPVAAALAASGVALFVVDPRQARDFAKATGQLAKTDRLDAFVLAHFAQAIRPAPRAIPDAEAREFQEILARRRQIIQMMAAEKNRLGASTSKAVCGRIEAHIRWLEKELSRTDRDLDETIENSPTLKENEALLRSVPGVGPVLCRTLLAELPELGSLSPRELSALVGVAPLNRDSGTLRGRRTVWGGRARVREALYMGALIASRFNPAIKEFYERLVEAGKPKKVALVACMRKLLIILNALMRERTPWRCPHALNP

SEQ ID NO: 251954 - protein, 415 aa, unidentified
MDVIVDRCAGLDVHKDTVMAAVRKPDGGGGRAEVVCEFSTFTVDLVRLRDWLAEAGVSQVVMEATGVYWRPVWHVLEEQARFELMLVNARHVKNLPGRKTDAGDASWLAQLLECGLLRGSFVPTKEMARLRDLTRYRTKLTQERTREIQRVQKLLEDANIKLDSVITDVMGKSAREMLDALIAGRHDVEAMAQMARTRMRPKIPELRLALDGRFDDHHRLMLRLHLRHIDDLSAMIVELDTTVDELMGPFDEPATRLLSIPGVGKRTVETIVAEIGVDMTRFPTSSHLASWTGLCPGNDESAGKRRSGKARKGNEALRTAMCEAAWAASHTHDSYLAAQYRRFKRRMGTKSEGKAIFAVAHTMIVIVWHLLHDNTNYAELGADYFEQRNDADARQRYLIRELEKLGNTVTLEPAA

SEQ ID NO: 251955 - protein, 332 aa, unidentified
MEFFYFIGVDVSKKKLDFCVMFEGKVVHEEKTANHQSAIMSLLRNLEEDYGITSGQMLVCAEHTGQYTFPLACACKSVECKLWLENPTEIKYSSGVQRGKNDKVDAKRIAIYANRFQDKVQYYERPTEDIERLKQLESERTLYVTDLAKYKGQMKDQKDYMPKALYERKMKRLQALMDDLEEAIQAITDEMDEVIASCPVLSRQRELLMSIDGVGRVVATNMIIATEAFTRFVDPRKFNCYAGIAPFYYSSGSSQHSKAKVSHRADKVMKRLLHLAAVAVTHRVGGELKMYYERKVAEGKNKMSVINALRAKIVARMFAVIKKNEKYKPILS

SEQ ID NO: 251956 - protein, 328 aa, unidentified
MEQELHFIGIDVSKAKLDVDVLRPDGRHRSKKFANTPKGHEELLSWLRNHNVTPAHVCMEATSTYMEDAAASLSDAGFTVSIINPALGEAFAQSEGLRSKTDAVDARMLAEFCRQKRPAAWEAPHPVERALRGLVLRHQSLTDMHTQELNRRETAREVQMPSIDAHLLWLEAELKRLEKQIKDLTDDDPDLKHRRKLLDSIPGIGEKTSAVLLAYVGLKDRFGQARQFAAFAGLTPRQHESGSSVHRTSRMSKAGHVSLRRALYMPAMVALYKTAWGKQFRERLEKNGKGAKLIIGAMMRKLAQVAYGVLKSGRPFDATLHEKNACVE

SEQ ID NO: 251957 - protein, 400 aa, unidentified
MRAVFGIDVSKTSSEVAILVNGEKVHGYSILNDAIGFNRLLGDLKTVHNPEIIFEATGVYSRCLQAFLEECGYAYTRLNPLEAKKQLDSLRVRKTDKIDAEKLAKSQLVHNRKPTYVQEEVYQHLRDLSRFYQNMTEDLVRTKNRLHKVLQVTFPELENLLSTPTGEQYWNLVMAFPCKEFVLSLSQSDLYEIIRQSTSKRISEKRIAYLTDKLIKLAKQSFCAVKKTSPMLEEVRYYAQELLRLSERRQVVLNDMVALAQPLPEYDILRSIPGIAETTATSIIGELGNIRRFQSTNQINAFIGIDLRHYESGNFLAKEHITKRGNPYARKILFKCIHNIASASHTNPCHIADFYEKRKRQSTIASTKPHTIASIHRLIRTMYYLITHNKLYDYSLTQNR

SEQ ID NO: 251958 - protein, 464 aa, unidentified
MNNAFIGIDVSKGYMDACLMEQHGKVIKHYEKLYDTRVHHDLFIDKIKGLINEGYTNIYCGLESTGGYENNWVRTISDNSFSGQVSVIRINPKRIHHESRTNMIRTVSDPVSAFTIADHLRKNLDHLTAHEPLSTELYNARKCYKYICLLQKQKTQLSNHLEKVIYENIPELGAWCKSGVPKWMLELLKQYPGKEKISNAHVSTMAKIKGLTTEKAKLVKLRITNGIGAVEDRFSSHLLKSLVSELTSIENKILNEKEYLIENYKDKNIDLLRSIPGIGIQSAVTLLIEIEDYSRFKDASSMAVYFGLNPVFRASGDKAGKTKMSKAGRASFRHIMYNVARNSVMHSDYFKTIYNKHRAHGMCHNQAIGVIMHKVTRVVFGVIKSNKMFDKDTDLKNIEKSKPNEQMANHSIKKSEVEELEIAKYAPCSARYMKKEKAKFQSQDHKMTKNEITETQPVQTYELV

SEQ ID NO: 251959 - protein, 442 aa, unidentified
MQNAHAAGIDVGDRTHWVCVEQTPDGSPTTREFPAHTPGLRELVKWLRHCGVTTIALEASGVYGHVLFLHLLEAGFATIITAPQFTRQIKGRPKTDRLDCQWIQRLHRHGLLPSVFQPDEPTQTLRDFVRQRANLVRLSGHHIQRVQKALELMNLKLTNVVEDVTGHTGLRIIRAILAGERDAQKLASLRDRRCKHSEAEIATALDGRYRNEHLLELRCCFHMWEQYLKMIVEVDQSIATQLQTMKKTTEWPPLSKRKPVRGRRPHDPAFDVRTALYRMLGLDLTELEGLDERNALTLISELGTDFSKWPTVKHFTSWLGLCPNFQKTGGKVKSSRTRRGKGRAAYTLRLAAWSLMRSKSYLGAYLRRMRGRLGAPKAITATAHKLARILYTVMRYGVAYQKRSEEAFTSEHRERQEKNLHRRAKELGYELKKIEIPAADLS

SEQ ID NO: 251960 - protein, 320 aa, unidentified
MTSRGAEKMKNDTIGVDVSKDHLDAHRLADGATRRFANNKGGHKALIKWLTETPLCRVVFEPTGPYHRAVERALGIAGVPFVKVNPRQARRFAEATGKLAKTDRLDAAILARMGALLELEARPARSELLLELKELYVAREALVKDRTAAKNRGKALTLSLLKRQNAQRLEQIDRQIATVEAAILQIIEANVSLADRFAILTSIPGVSNITASALLIAMPELGALEAGQAANLAGLAPIARQSGRWTGRSFIRGGRADVRQALYMPALVAARFNPDMKAKYAHLIETGKPAKVALTAIMRKLVVLANALLKANRPWTPKTA

SEQ ID NO: 251961 - protein, 391 aa, unidentified
MEARTVNNLPPAGTHDDAICCVLAIELSKKSWIVAVNTPLSDKISRHTLKPSDGKELLDLCERIRTRVAKETTKRVEMVSCYEAGYDGFWLHRLLQAHDIRNHVIDPASLQVDRRARRAKTDRVDAERLLRSLMAYLRGEPKVWSVVRVPSVAEEDDRRLHRERGRLINERIQHVNRIKGLLAIHGIYDYQPLRRDRIQRLQQLHTADGRTLPPRLEAEILRELQRLEIVIGMIKTIEAERDAIASANTETERGSVKKIQHLAKIKSIGPEFATTLVGEVFYRSFDNRKQLASYVGLTPAHFQSGAMSRDQGISKAGNAKARTVMIELAWLWLRHQPDSDLSVWFRDRVGKLKGRIRRITIVAVARKLLIALWRYLETGLVPKGAALKVCD

SEQ ID NO: 251962 - protein, 347 aa, unidentified
MLAQRVDHVIGVDTHRDSHTAAVLDTTGGVIADLTVPADAFGYKRVLAFGRTHAPERRAWAIEGTGSFGSGLTTFLLEQGEWVVEIDRPARPARRNGAKSDELDAARAAREALARDHLAQPRCRGDREAIRVLLVTRNGAVVSRTRAIAHLKALLVTAREQLRNHFRNMSTDDQVIRCSRLRTAPTQASEHRSTIMAMRSTARRILALEAEANDLESEIERLVKGVAPWLLEERGVGAFSAAQVLCSWSHPGRLRSEAAFAALGGSAPVPASSGQTVRHRLNRGGDRQLNRALHTIVLSRLAHDDETKAYAARRRAEGKSPREIKRCLKRHLARRLFKLLETSAGGA

SEQ ID NO: 251963 - protein, 409 aa, unidentified
MEVIYPCCGGIDVHDEFVVVCLSRVQQGQRHKELRRFATYSAELRGMCAWLAAAGCTHVAMESTGIYWRPVYAHLVSQFEVTVVNAQHMKAVPGRKTDVQDAEWIADLLQHGLLTASFVPPVEQQQLRDLTRLRISLVQERARLVNRVHKLLQEANIKVGNVLSDVLGVSGTAILQALARGETDPERLANRAHASVQRKHEQLVRALDGHMEQHEQFLLQELLGLISAMERSLVHVEQQIEERLHPFEDCLGRLEQITGVSRKVLYVVFAEVGTDMSRFPDAAHLASWAGMCPGQHESAGKRHSGRLRKGNRYLRAALVQAAHAAGRTQTYLGEQYRQISKRRGKKRAAVAVGHSILVIFYHMMQTGEPSKEKGVEYLQARNRQRVQRRLIQRLERLGYQVIAPSSAIA

SEQ ID NO: 251964 - protein, 449 aa, unidentified
MGNYAGVDWAAGKHDVRVCDETGEELLAATFAHDERGLRALCRALLRLKVEMVAIERPDGLLVERLLDAGLRVLPMHPKQVAAARARFRAAGGKSDRFDAFVLCELARTDSHRFRVLEPDSDETKALRALTRAREDLVHARVALCSQLRAELERFWPGPIGLFTKLDSPISLAFLERYPSPADARGLGEQRLGAFLARQRYSGGQKPTELLAKLRRAPEGRVGEAELAARRALVLALVTAIKPLVAQIKQLTEQIATALREHPDGAIFLSLFRDPRSVVTAAELLAEIGDCRARYPTRDTLAADAGQAAVAVESGRRKTASFRCGCNKRLRGAFCTLADSTRHWHPWAQDRYAAARARGHEHPRALRTLGRAWCRIVWRCWQHRTPYDPAKHRALQQHCTVTVPTPSGPVPDLPAIQRMLGAAVTEPVARRASAKRLTARRHPLPQAGG

SEQ ID NO: 251965 - protein, 444 aa, unidentified
MSIPNEAATQTQSYAAWIGLDWADQVHFWSMRSADGKLQRGQLDNTPEAVELWAAGLAQRFAGQPVAVALEQARGALIAMLSKYAHLVLFPVHPTTLSHYRQSFFPSGAKSDSNDGDLILDLLLKHPERLRRFEPDTLETRRLQFLTEERRKLVDQQTSEVQRLTNWLKQVFPQVLRWFDDPAAPVVGDLLLRWPTLRQMQRASPQTLLKFLHQHNCRSQERIQQRLAEIGQALPATTDAALLEAGTLCLQTCVRLLRLLRSAIAAFDRQIAEAYHGHPDRAIMESFPGAGPALEPRLIAAVGSRRERFDSATSLACFTGIAPVTQSSGNSSWTHWRWACPKFIRQTFHEWANCSIRTSPWARAYYDQQRAKDKGHHAAIRALAYKWIRILFRCWQDRTPYSETRYHQALQARSAQPTPGPTPSPAPLQWETCGGFSRPVQVSS

SEQ ID NO: 251966 - protein, 289 aa, unidentified
MKRAEDTSGQAQRCIGLDVHKHYVTVGGMNARQEMVLRPRNVEMDRFKRWAEENLRSTDEVVLESSTNTWDIYDTVAPLVKRIVVAHPAEVKQIANARVKTDNQDVVRLLRLLIADMVPEVWVPPVEVRELRALISYRWRLVKMATAIQNRMHSLLHCHNIQAPEGKIDTGQNREWWEQVQLSELERLRLNQELKTLRLVREHIAEVEHELGRLSTSERWGKQATHIMQLPGVGIVVTMTILSAIGEIQRFPSARKLVGYAGFGAGVEDSGQKHRGKGITKFGRKELRW

SEQ ID NO: 251967 - protein, 352 aa, unidentified
MTCTRIHIGVDVSKATLDFFAPGAKRAKTVANRPSGVRRIVALALRNGWSVCCEATAIYSSALIDGAHAAGIPVAVANPLRVRRYAQGKGILEKTDAIDARVIAQYADDNQPRPVPKPTDEERLLRELTDGREFYLRQVQEVSGRLEQCPRGSAIRKDLERTLRQHRNTLAQIEKRRSRLVASSPALSYRRDRVTLVQGVGETVALNVMAAIPELGTLSGKTAAKLAGLAPIPDDSGKEKKKRKIAQGRLDVRNSLYMAAVVAAQHNPVLSVFYEKLLAKGKLKKVALAAVMRKLIVLLNRIAQDEAFIPLSGGGKAKTTRRKTGKQRKPAKAKPLSEVPSGKKQTKSSEIP

SEQ ID NO: 251968 - protein, 349 aa, unidentified
MLHAGLDLSRKRLDFDLRDERGVLVEAGATRPDAAGLAALVQRVARHRQPVRAAIESMTGARFVHDQLEDLGWEVAIADALKAKGLAPLACKTDRIDARVLAELSRRDLVPAIWLPDPEVRAERERARFRLHLVRQRSRLKHRIHATLLAHGVACPVSDLFGVRGRALLAEGGLPEPWRSHVDTAVALIDELNRRIAELERALRQLGATHRYVPLLMTAPGIAWVLSYTIAAEIGDIGRFPTADNLTGYTGLCPRVYQSGPRDRRGPLSKQGPRYLRWALLEAATHACRHPAYRARYQHNKRRLGRQRGPKVAQIDIARKLAEAIWYMLTRGEPFAPAGAPPALAAGRP

SEQ ID NO: 251969 - protein, 340 aa, unidentified
MEQRQYVGIDLHRRRSVIVRMDAHGRVLGEARIDNEPMVLAAEVAKAGEAAEVAIEATVGWYWAVDVLRELGVRVHLAHPQGIKAFDNRRVKNDRLDARLLADLLRMHCLPEAWIAPREIRELRELVRYRHKLVEDRSGLKAQVHAVLAKEGVRFPISHIWGPVGSRFLDAADLPDAYYLRVASLRDLVEVYDREVRVLDRVIARRLDGHAGYRAIQTIPGVGTVLAAVFAAEIGDATRFAGPRQLVSWAGLTPRHRESDTKVHRGHITKQGSALVRWAAVEAAMMPKSNAWLKADKLRIAQRRGRKIALVAVARKILTLVYYGLRDGEVRCLAPAAQAG

SEQ ID NO: 251970 - protein, 293 aa, unidentified
MKMSIGVDLHKSQFTVYWKPEGKEGWYVKYPTNERGYRGFEHQVLETKEAGYRVSIAVETTGNAHYFRNRAEALGVKVVVVNSLKFKVVNESVKKTDRHDASTLAEFLEKEMLPEARLCSRESEELRRLLKVRKRLVETIVMVKNQIHGILMGYGIESVRGELQSKKERQRVKSVLAAHQLTDAAVEPLFEIIDKLTEEVKKLEKLIEEKAEGDSMIELLCTIPGAGLITASTIRAYIDDIKRFESPKHLAAYAGLVPWVQISNNTEHYGRITKRGPKELRTALVQVLSLIHI

SEQ ID NO: 251971 - protein, 418 aa, unidentified
MAVVMIGVDPHKASHTAVAVGGDEQPLGQVRVRASALQAMRLLEWAAAWPERAWAVEGAGGLGHLLAQQLVAAGERVLDVQPKLAARVRLLASEAVNKNDPNDARSVAVTALRSRAPREVAADDHSAVLKVWSRRYRDLGRSRTQIACRLHSALCELVPGGISKEITASHAARVLERAAPSGAVQQARWELAADLLDDLRRADERLREANRKLAAAVRATGTTLTGIFGVGPVIAATLIGEVGDVSRFAGRDSFAAYNGTAPIEVSSGKRKVHRLSRRGNRRLNHAAHMTAVTQIRYAHSQGRAYYDKKLAEGKTAKEALRALKRQVSDAFYKHLKADAARAAGSACSPGGQAGNDSVASAAGSHPECRLFGQATPGPETTLRLEPRTGRKSTSRARRKTARTTWHKEASFGPPLLVG

SEQ ID NO: 251972 - protein, 332 aa, unidentified
MEEITTVGIDLAKNVFSVHAVGSQGEVVVRRTLSRAKLSELIAQLPPCLIGMEACSGAHEWARRFAASGHTVKLMAAKFVMPYRKSGKNDGNDAEAICEAVARPNMRFVPVKSLEQQSDLTLHRVRQGFVEERTATLNRLRGLLTEFGHVLPLRASEVHRRVPQLLGKLPTRVAACARDLLEHAARLQAKTLEYEHEIKIHVRSNALACRAQTRLGIGPITASALVATVGNGHDFKNGRQFAAWLGLVPRQYSTGGRTRLGHITKRGDPYLRTLLVMGARAVLQRAASLTDPLSRWALAVRERRGYHRACIAIAAKNARVAWALLAKEPVAA

SEQ ID NO: 251973 - protein, 405 aa, unidentified
MNRFAGLDWASRTHAVCIIDNNGAVFERFEVVHDAAGLRDLLARLHRCAALPAHLPIAIERPSGLIVDTLLEAGYPVVPIHPNIVKATRPRYRSHGAKSDASDAYLLADLLRTDGERFHPLQPQSDAIRALRALVRGRDDLVATRVQLANQLRSLLESFWPGAASIFAEIDSPIALAFVQRYPTPASAARCGERRLAAFLAQHRYCGRRAPAALLERLRAAPTGHADELETDAKRTLVQALAASLTTLVEQIAQLTARIEHTVADSDDGQLIMSLPRSGQVCAAQILAELGDVRDRFPTDAQLAAEAGVAPLTYESGKSRSVTFRWACNHRLRRAITCFADNSRHASQWAATVYAKARARGCDHPHAIRILARAWTRVLWRMWTDRCTYDPTRHRAALALNTAGG

SEQ ID NO: 251974 - protein, 337 aa, unidentified
MNYCGIDVASISSDISIINGKGKQLRRREIDTEASDIGAALKGFGDLKVIIEAHPLAETVALIVEELGHKPVIIDARAAKNLMDAMKKTDRRDAQTLAEIGRCGWYVEVHRKSAAARQMRSILQARQALLKSNKALASSIRGLLRSHGVRLGKVSKGQFVEQVKKVTEQEAPGLLAALSGMLDAWVVTGERAEQIKKAMVNDCKQDEISGYLESTPGVGPLISTAYRATIDDPHRFRHGDEVSDYLGLAPRVYQSGEVEYRGRITKQGDALLRSLLVEGAHVLLTKGRDCALKRWGLSIEKRKGGAKAKVAVARKLAVLLWRLWKEEKMFEAFPQSV

SEQ ID NO: 251975 - protein, 428 aa, unidentified
MADLENATPACNLVAIDVGRYSNAVLIEVASGKRHRFKMANTAADFERLLQFLGSLPGGCRVGLEPTGDYHRPLAHRLLSKGFEVVSINSVALARYREAIFNSWDKNDPKDAAVILEMLRRGDVQRYVDPMVVGSHDLQELAKTYYQVSRARTKVQHSLINHGLPLYFPEMHRYWATTRNEWFVRFLLKFPTPAHVRSLACADFVAAAWDVVGRKVNKRAKLEEIWEMAGATAALPHAPHSLAVETFRITLRRYQELNDLRTELELRAERALATDTDFAHLKTLPGIGSVIAMTILAEAGNLRRFGHHRQFLKYCGFDLAKNQSGTQRGKEQLSKRGNARLRLAFWLAAVAAVHMKENSFREKYERYTRNAPGDPDLRRKALTAVAAKMARVAYGMIKKNQPYRQFFEQSLPSGSIPLSVAVGAHATP

SEQ ID NO: 251976 - protein, 336 aa, unidentified
MTQGRAKKEKRMTEEAVCVGVDVAKGTLDLAVSNSTETRQFENNHEGITSAASYIAGLKPTIIILEATGHFEMPLAAVLQTNHLPVVIVNPRQVRDFARATGVLAKTDRIDSRILALFGLQIKPQVRLLPDQKVRDMESLLSRRRQLIEMLTAEHNRVLQAEDGIRKGIKIHIKWLEKAISVINDDLDSQIRNSPSWREKDDLLKSVPGVEKLVSMTLLIELPELGQLNRRKIAALVGVAPLNRDSGTMRGKRTVWSGRAKLRAVLYMAALVGVRHNPVITSFYERLLEAGKAKKVALVACMRKLLTILNAMIRSNTVWQEAAMETKWPLTMSCMM

SEQ ID NO: 251977 - protein, 353 aa, unidentified
MSYIIGCDAHKHYSQFAVFEADQTRGKQVRVEHERGAIREFLSEFPEGTPVALESIGNWYWIVEEIEQAGCVPLLAHPAKAKAMMGNVNKTDKLDARGLAILLRNGTLPTVWIAPSEVRDERELPRTRMALCKIRVALKNRIHATLAKYNLSLPTESDIFAPKWSSQLNQVIEQLPSETQKCLKQELELLDKVQGQIGAMEERMKACIALTPDMQLLKSIPGVGDILAIVIGTEIGLVERFSRAEQLASYAGTVPAVKSSGGKVRYGHTPKESNHYLKWAFVEAANAPAQYGKKPNWQHRHVTHLYDRVRLRKGHSVAVGAVARHLAEAAFWILNKKEPYCEPTRPKVLPKQA

SEQ ID NO: 251978 - protein, 460 aa, unidentified
MEQVPVIGIDLAVTAASELAVATGATIEASRKVASTPRGLTEGIRKAAQGRAVAIVVESTAMAWFVAAVAALRSGVEYRLYRVSGRKSAALRAFYRSHTKTDHIDARVLARMPAVDDSLLAYSLPTSAEMALKRLVVARHKLTTETTKIQNRVRSLLAWAAPGMLKAAGGTVSTGLVGVLGRWSDLSSLAKARLATIALQGDWGTERAEAVRTAVGEAVAFYEGHVDFSAVGLELELSLAQLGFLASQVARLEDRIAALHTQLYPKDRLLSIPGIGPVVAGVVRAVVGDLSRFANQASFRAYTGLVPRENSSGEVRQRGRISKAGPSVLRWALYLAGDAARHCDPALADLYRRLMVQRGRTHTQAVCAVASHLAGRIYAVARAGRDYVWRDLEGNEITREEARSIAQGLRVDSDTRARLRARREGGPRTPYARQPVAPQGVTQPSGDKLIQAALELASKA

SEQ ID NO: 251979 - protein, 393 aa, unidentified
MSDRMLEERNYKLSKLAERIAPGPVYLGIDAHKKSLHATVVDSSGSVVLRRTVSNEWAHVEGLVRELDGHEVFAVYEAGPTGYQLLWWLRDLKCTALLTPPSLVPTRLGDRVKTDRKDSLRLAEWLRAGALRSVYELTKEELFNRELIRTYHQIQRHRKDLVRQIKSKIQVFGIAAPWEDPDGPQVQGLRKSDVEWLLDSPTSSDSLNSALITLTTLYVSTKVELQRCKKELERLSQSEQYAERADLLLSIDGIGLITAMTWLLEVPRVSKFATVEAFANWLGVVPSERSTGDAGDESNKRRGAITHAGNSFLRAALVQVAWGMFSKDPSLRALWTRVRQRSSSQTAIVAVAHKLARRLYAVMRDMVQYRVPAPPELTATATATATATATATA

SEQ ID NO: 251980 - protein, 352 aa, unidentified
MRTSQKTPETITTIGVDLGRNTFHLVGLDKRGAIALQRKVSRSQLEHRLSNVPRCLIGMEACSGSHHIGRQLTALGHDVRLIPAQYVKPFLKGHKNDYRDAEAIAEAVQRPTMSFVAIKTPEQMDLLALHRVRSRLVGQRTGTINQIRGFLIERGIIVRQGVVPLRKALPDILSSSSDILSPRMVNLIAELMQDWRRLDERIETVSTEIEALARQDDSCQRLMTVPGVGPIISSAMVAAIGNGAGFKQGRDFGAWLGLVPKQESTGDRTILGKISKRGNKYLRTLFVQAAHVVLVRRPSTAKRGLRPWIEQASKRLHRNMLAIALANKLARIAWAVLARGQAYQPRIAANAA

SEQ ID NO: 251981 - protein, 339 aa, unidentified
MTAPAIIGIDLGKRSFHLHAQTRHGKPLFRKALSRQKLLSQLAQQPACRVVMESCAGSHYWARQIQALGHDVRLIPPQYVKPFVKTNKNDFVDAEAICEAASRPAMRFAAIKSEDQQILCALHRTRQGLVAERTAIMNRLHGFLLEFGVALPVGHAAIRRLTSYLEGLPPAFVALAQRLQGHYTWLSDEIAVLEKTLEQHTRCNDGARRLMTVPGIGPITASAIVGAVGDASHYRSGREFAAALGLVPRQYATGGKPRLLGISKRGDGHLRRLLVQGARAVMQRQDQRNDQLGDWLRALGCRRHSNVVACALANKMARIAWAILAKGGEFRPSPGATLA

SEQ ID NO: 251982 - protein, 349 aa, unidentified
MVVLGADLHKRTHTVVAVDEHGRKLAERTVSAARDGHLELRRWAAQWPERRWALEDGRHLSRRLEADLLRAGEDIVRVPPKLMAGARRSTREPGKSDPIDALAVARAALREPDLPAASLDGVEREVRLLVDRREDLVAERTREIQRLRWFLVELEVDEPAPAALDRTVVQARLEAELAPRTELVARLAREILGRIVELSVTIRDLGREIDTRIRPLAPHLLALVGCGALTAAKLVGETAGVGRFRSKEAFARHNGTAPVPVWSGNTVRHRLSRGGNRQLNVALHRIAITQVRLGGPGRAYLDHRRSLGDTKTEGLRALRRQLSDEVFRRLRLDDHERLQSRPALTAAAA

SEQ ID NO: 251983 - protein, 385 aa, unidentified
MMTMTRTEESTAAATPIGTLLLAFELGERVWKLGFTMGLGARPRVRQIPARATDRVLEEIARAKVRFGLPATASVVSCYEAGREAFWLHRWLVAHAVSNHVIDSSSIEVNRRARRAKTDRLDLDGLLNLLARHHHGDRHVWRVVRVPSVDEEDARQLHRTRETVQQDRTRLINRLRGLLTTQGLELPIEADFLTRLEAAQLWDRTPIPAGLRARLQRGWAQLEFLNRTLAELDAERATLAPNPGTTMGRYINALPTLRGIGPIGTWVLATEIFGWRQIKNRRQLGGLVGLVPAAYQSGDSAHDQGITRAGNKHVRRLMVQLAWSWVRYQPDSALTAWYQGKFGRGSRRLRRIGIVALARKLLIALWHYVEHGEIPEGAIVKGQAA

SEQ ID NO: 251984 - protein, 339 aa, unidentified
MQLYAGLDLHSRNTYIGIMDKEFKRVFNKRVANKLPLILATLKPFQNQLKGIVVESTFNWYWLIDGLMDAGYHCMHLANPAAMKQYEGIKHTDDQHDAFFLAQMLILGILPQGYIYPKEDRPVRDLARKRLFLVRHKTSHILSLQSLIARCSGQRVSANEIRKFTVEDLQQLLEQEYIVLSAQANLDTIVFLKQQILQLEKAIKNKVKLSKAFQQLLTVPGIGLILAMTIMLEVGDIGRFPEVGNFASYCRCVSSKRLSDGKSKGHGNRKNGNRYLSWAFTEAAHLSRRYNERFRSYYNRKVAQANTSLATKALSNKLARICYYIMRDQVPFRENLLSQ

SEQ ID NO: 251985 - protein, 399 aa, unidentified
MGSHCSPLDEWLLSAHLVFLKTCILWDDGGSVTNRPRHDWKPVRVLAVRPRASSALQPYLPYPNSCQGTSPHQQGRGTKVSEPYYVGIDVSIDRLDVAIRPGGRGFCVTNDAAGWAELVARLPQGAIAAIGLEPSGGYERGIVRVLLAAGFSVRRINPNKLRQFARAAGALAKNDRIDARLIADYVAVIPTRVVERNPALERLAETVTMRRQLCDEHIAVESQASHLEDALLQRIAKRRLTRIKADIVLLDKRLAELVAAQPDLVQRFRLLCSMPGVGATLAYTLLALLPELGQIGRKQIAALVGLAPYAFDSGRFRGQRHIYGGRTAVRNTLYMPALAAFRFNPALRTFHHRLVAAGKKPKVAIVAVMRKMLTTLNAMLRDGNSWTDGHTGRHTVLAI

SEQ ID NO: 251986 - protein, 343 aa, unidentified
MTEVITIGVDLAKNVFQVHGVDAGGVVIFRRQLKRGQMLPFFKKQPPCLVGMEACATSHHWARQLIALGHEVKLMPPRYVKPYVKRNKNDMADAEAICEAVTRPTMRFVEIKTLDQQSVLMLHRTRHLFVRQRTMLINALRAHLAEFGIVAGVGRNGLERLLQLIEDGEDDRVPPTARDCLLALRDQLEMVKHQILGADQRILDWHRSNEVSVRLNDIPGVGPLIATALVASVPDPHAFKSGRDLAAWIGLVPRQNSTGGKERLGHISKAGNRYLRTMLVVGALSVIRRAKQVGYTRRPWLTKLLERRSTKIAAVALANKNARTAWAMMAYGTFYEEPVVQEV

SEQ ID NO: 251987 - protein, 344 aa, unidentified
MSSVTRKTVYVGLDYHSESVQVCVLDGDQRQLVNRSCPNDWRAVVGAVRKGCGEKLNVQAAIEACCGAADLAEELIGQAQWSVNLAHPGYVARIKQSPDKTDFSDARLLADLQRVGYLPRVWLAPEEVRELRRLVRYRQSLTKERKNLKLQIGATLREARQQPPADLNAWTKAWLAWLQETAALSPNARLVTRCRLARLAALAKEIRAVEQLLAKQTAQDPVVQKLLTLPGIGLVTAVTIRAEIGRFDRFRTGKQLARFCGLTPRNASSGQRQADAGLIKAGNPQLRTVLVEAAHRLIRYDPRWTKLAGQLRLRGKPMSVVTAAIANRWVRWLFHQMQPGQLAA

SEQ ID NO: 251988 - protein, 316 aa, unidentified
MDRFNVYVGVDVSKDRLDVYLQPDGQSCSFTNDEPGIAQLCDYLQRQASATLVVMEATNVFWKLAATQLAAASLNVAVVNPRQVRDFAKATGTLAKTDTIDAKVLALFAERVCPPVRVLPGEQCEMARELLARRAQLSAMRVAEKNRLTSARGKTVRKDIEAIISFFDKRLKTLDNEIDQWLAATPVDQTRVDLLKSFRGIGPSTARALLIGVPELGSLTGKQISALVGLAPFARDSGKARGQRHISGGRSAVRAALYMPAIAALRCNPVIRAFYDRLIAAGKHHYVAITACMRKMLVILNAMLKAHQPWRHPAGT

SEQ ID NO: 251989 - protein, 328 aa, unidentified
MFYLGMDVAKAKLDCTLLLNNASSKGKTKVVHNSKAGVADLLAWVAKHKVSPEELHVVMDATGVYHEQAALALVDAGVVVSIINPAQVKDFGRGLAVRTKTDGVDSLVLARYGALMQPAAWMPPTPEARMLQALLARRDAIAQDLHRERNRQEKAEATDTPALIRKSLEDSIVFLAKQLEQIQKDVDDHISNHPSLKSDMKLLQSIPGVGPQVGGNMLSVLSNHHFGSAEQVAAYLGLVPVEKLSGSSVRGRAKLSKAGPARIRAVLYMAAVAAKRCNPHVKAVYERMLARGKCKMSALGAAMRKLVHLCFGVLKTQQPYQRDYAKNA

SEQ ID NO: 251990 - protein, 386 aa, unidentified
MVTSATSRIEQATLPQPTLYLAFELGQNTWKLGFTIGVAQQPRERMIPSGDVEGLQQEIARAKQRFGLPEDARVVSCYEAGRDGFWLHRYLVAHGVQNSVIDSASIEVNRRQRRAKTDRLDVRKLLTMLLRHSAGEKKVWSVVRVPSVDEEDRRQLHRELTTAKQDRTRVINRIKGLLAGHGVQLVLQGDVDAQLDQVQQWDGSPLPSALRTRLKRAWQQVGFLTTHIQTLEAERRALLRHREDPVIDQVRQLFTLRGIGVNSSWLYVMEFFAWRDFQTPKQVGALAGLTPTPYQSGQSRRELGIAKAGNRHIRAMAIEIAWAWRRFQPASALSQWYERRFGAGSARLRKLGIVALARKLLIALWRFLKTGVLPEGAVLKTAAPRR

SEQ ID NO: 251991 - protein, 407 aa, unidentified
MEVVHPRCCGLDVHKETVVACVMISQGRTVEKVVRTFQTHTSELLRLSDWLSEQQVSHVAMESTGVLWKPIYNVLEGQFELLLVNAQHIKAVPGRKTDVKDAEWIADLLRHGLVRGSFVPNREQREVRDLTRYRATLLQDRARQVNRLHKVLQDANLKLSNVISDITGVSAREMLAALLKGQRDVAVLAQMARGKMREKQTPLQEALTGRFTGHHAFLVGELLAHIDYLDAAVERLNQQIEARLRPFEADIQRLDTIPGINRLTAQVLLAEIGSDWSRFPTDKHLASWVALCPGQDQSAGRRRSGKTRDGNRWLRQALVEAAQGARHTKHSYFKAQYARIARRRGSNKAIFAVAHSILVVAYHVHTEQTPYQDLGENYYDERQRQAVQRNLVKRLEGLGFQVQLSAT

SEQ ID NO: 251992 - protein, 314 aa, unidentified
MESVRILNDVESLDRVIERAGEDPEVVLEATYGWYWAVDALQEAGARVHLAHPLGVKAFEYRRVKNDFRDAADLADLLRMGRLPEAWIAPPATRELRELVRHRAKLVALRSHCKAEIHAVLAKCGVQVLMSDLFGIEGNKLLDRLRLPAAYAARIGSLRRLMDDLDFEIEVFTNAVQGRLHADPGYVAVRQIPGIGPILGAVFVAEVGDVTRFDHAPQLACWAGLTPKHHESDTHVRRGRITKQGSRLVRWAAVESVKRVGPHTRIGALRDRVAERRGGNIGAVAAARQQIEYVFYALRDGHVRALQHPARDSA

SEQ ID NO: 251993 - protein, 386 aa, unidentified
MVRTVNDLSAATHGETVRCLIAIELSKKSWVVAFNTPLSEKISRRTLTGCKWKKLLELIEDVRVRVSRQMGRSVEVMSCYEAGYDGFWLHRQLEAHGVRNYVIDPASLQVDRRARRVKTDRMDTERLLRSLMAYLRGEPKVWSVVRVPSVAEEDARRLHRERDRLVSERVQHVNRIKGLCALHGIYDYDPLRRRAMAQLEQLRMTEGEALPPRLKSEIKRELQRLELVVEMIATLEAERDAIVEDEASPHVNAKKIQNLHKLKAIGPEFAAVLVGEIFHRGFNNRRQLASYVGLAPSPFQSGNVAHDQGISKSGNRKGRTTGIELAWLWLRYQPDSDLSAWFRARVGITKGRIRRIAIVALARKLLVALWRYLETGLVPRGAVFKG

SEQ ID NO: 251994 - protein, 357 aa, unidentified
MNPLKQVVGIDVAKDELVCTLGLIRSNLKVELTSSSVFKNTSSGFVKLLSWVNKFSEDNCDLYFVMEATGVYHQKFAYWLNSQSQKVAIVLPNKISNFMRTLEIKTITDKTASEAIARFGLSRELDTWQPANEVYRSLKQLTRERDQIVDERTVIKNQIHAEKSEAYPNANTLKRLNERIKLLGTQEAQIKKEIQQLIESQKEVKQAIDLMSSIPGVGQLTAAIVLAETNGFELIRNKRQLSSYAGLDIKEKLSGISVKGKPKISKKGNRHLRKAMHLPALTAVKHSPIHKDTYARLVGRHGIKMKALVCIQRKLLELMYILFKNHTKYNANYQEKKVLQQNAAEPSNLAFADLNQS

SEQ ID NO: 251995 - protein, 424 aa, unidentified
MLEEDQQVEEIVARVAACDIGKAELVCCVRVPHPQHPGRRLQEVVSCSTMTRSLLAMADRLAELGVSKVVMEATSDYWKPVYYLLEAYGHGLQPELVNAHDVKHLPGRPKTDRLDAVWLAKVAERGMIRPSFVPPAEIRRLRDVTRYRSDLVEARTAEKQRVEKLLEDAQIKLSVVASDIFGVSGRAMLAALIGGQRDPKVLAGLARSRLRGKLGELEEAFTGYFTDHHARLLTKMLARIDGLSADIAELDAMIEEMVAPFAAAVTKLDEVPGVGRVAASIILAEIGPDMSRFPTPAHLCAWARFAPGIKESAGKKKGTGSTGHGNRYLAKVIGEAAVGAGRTDTFLGERYRRLARRRGRHKALVAVGRSILVIIWHLLFDPNAHFVDLGPDFHVKRNDPERRKRAHIGQLEALGYTVTLTPAA

SEQ ID NO: 251996 - protein, 306 aa, unidentified
MELPPPRMLARTNTPPCVLRPASCHAGPNSHTIGIDLGKTIFHLVGLNQQGEVVVRKKFSRKQLLHFTANLQVKLIGMEACGGSHFLGRALREQGHEVRLMPAQYVKSYVKTNKSDYIDAEAIAEAVERPKMRFVPIKSDDQLDLQSLHRVRERWVMRRTAVINQIRGLLLERGITLRQGRRHVDEALPGILEDASAKLSGAVRSLLAQLRLELDHLQMRIDEADAVIQKIAGENEACRRLVAIPGIGPVTATAILAAMGNGAAFKKGRGFSAGLGIVPGEYPTGGKQKLLGISKHGNSYLRRLLV

SEQ ID NO: 251997 - protein, 266 aa, unidentified
MVHITTITAGIDTSKAKLDIAIHGQSEVCPVENNLLGRQKLAVRMREAEVQRIGIEATGGYERGVTRHLEAQGFTVTVLQPLQVKAFARLHLKRAKNDQLDAILIAACTHFQDASSKMAPDARFDELSDHLTYIEQIEEVMVRLQTRMEHITDKRRRSAVKADLARLDTRRGSELLLLTKNLRLHVDLSRRLDLVLSVRGIGLCTALAIVVRMHELGQVSREQAAALAGLAPFVRQSGQHQGETHIGGGRERLRRSLYAAALAGAF

SEQ ID NO: 251998 - protein, 394 aa, unidentified
MLALFKELVMEDCSSEIKQCEYFTESREVTTDRFSCFIGVDLHKTTVTLRAVDPSEEIINSLRTHTQCVNKIEKWINELPEPKWMAVEAVSFTEWFIDRYRDCVDRIDIADATELARRRGKRRKTDRNDALDVAVRLVRGNCPLGYIADESLMYLRKLGRHWRQLSKILTRSKQCMRSILDAANIHGPKISGATAQAWILGHGDLLKDVQRESLANFIDVISLLERQRETLRRKIIFANRNEEFSARITMLKSIPGINDVWACIIAAEVGPFDRFPNADTIEFWAGLTPDNKESAGRTQSGRITKAGSQTLRWALCQAAVALCRSDVRQEAVKQRLVKRIGKVKANVAMGRRLLRIIYAMMRDGTLYERSEPTDRLKRNIKKTRYVKRKKREVA

SEQ ID NO: 251999 - protein, 319 aa, unidentified
MTQISTPPARFIGCDVGKAFVTVFDSLTGQTRDIPNRKPDLARLARAFDAGCLVVCEATGGYEAKLLAAMLAAGVPAHRADARKVKAFIRSFGTLGKSDAIDAQALARYGAERHAALARWVQPDPVREELQALVLTRVDLVRLRQAQRNRLAAPGADIVAAVLRALVREIDKQLRALEARIAACLRRHPTLSRDLAVLRGMRGIGEVTAAALLALMPELGALSGRAAASLAGVAPHPHESGQRSGYRKTRGGRPDVKRTLFMAALVASQGQGAMAEVYRALVARGKKPIVALTALMRKLVVVANAKLRDARAGEALQVS

SEQ ID NO: 252000 - protein, 339 aa, unidentified
MQVTTIGLDLAKNIFQVHGITKDDEVAFNRPLRRAQLLSFFSKLEPCLIGMEACSSAHHWARELTKFGHDVRLIPPIYVKPYVKRGKSDAIDAEAICEAVTRPTMRFVAIKTVEQQSLLSVHRARSLLVRQRTQLINGLRGMVAEFGVYIARGLARVISFSEDILAGEVLDLPDIANDVIHNLCEQLTALHTRLRWYEERLKQIAKEDARVRLLRTIPGVGAVTASAIIASIGDGHQFSNGREFAAWLGLTPANKSSGGKEKLGRITKMGDQYLRSLLVVGMTSLVRQTKSHPERASKWLISLLERKPARLATVAMANKTARIVWAVLTRNEPYKPRTA

SEQ ID NO: 252001 - protein, 459 aa, unidentified
MSEETRSSQTEPRKQRLDWRRLEVVHRDAAGIDVGNAEHYVAIAADRDEEPVRKFGCFTEDLRRMADWLVERGIRTVAMQSTGVYWLPLYDVLEERGLQVFLVNASHTKNLPGRKSDVQECQWVLKLHTFGLLSNSFHPTEEIRVLRTYWRYRDGQVKEASCCIQRMQKTLTQTNLQLANAISDISGLTGMRILKAILAGERDGRKLAELADPRVKATQEQIARSLEGNWRKELLFVLEQEIGLYEIFQQRIAECDQQIQQHLESFPSHEQALERELGPRVKRKKKQGNAPAFDLRQALYRITGVDWTRVDGMDVMVAQTVVAEVGRDMTRWASEGHFASWLGLCPSKETSGGRVVKKGTKKVNNRAAAAFRTAASTLLNSNSYLGAQYRRLRAKLGAPKAITAMAHKLSRLFYRLLRYGQQYVDKGAPFYEERWRQQQLASLRRKSAQLGYALTPIHP

SEQ ID NO: 252002 - protein, 324 aa, unidentified
MDKDKKTFGIDISKDTFDVMDSLGNYYQFSNNLKSFSKFLKLLDTNSHCVMEATGYYHYQLAYFLVDNNIMVSVENPLSIKRFIQMKLSRVKTDKSDAKMICLYGQERALKLWVGYSKNQMQCLQMIRLLDTYTKQGAAIKNKIQAEEVLGNPCKMVVSSLKRSLKNLQKESLSIETVLLEMVKSEHQEILTKLESIPGVGRKTAMMLIVLTDGFNRFESSSQLCSFCGLTPVIRQSGSSVKGRTRISKIGNAKLRNLLFMCSFTACKCNKGCQAIYERITNKGKSKKLALIAVCNKLVKQAFAIAKSGVEYNENYRSALPKMM

SEQ ID NO: 252003 - protein, 411 aa, unidentified
MELVHTVCCGLDVHRDTVVACLRRAVAKGEVRKEFRTFATTKQGLVELLTWLSDVNCDVAAMESTGVYWKPVHNILSAGVRIVVGNARDIKPRRGHKTDKTDADWIAELLAHDLIRPSFVPTPQIQALRDLTRLRVQLVQNRAQSKNRVHKLLQQANIKLSSVATDIFGKSGRAMMDALISGERDPKRLSALALGLLRRKVPQLELALAGTFTDHHAGMLRLSLEQIDLLSRQIGEVEAHMAHLAEPLSAELEQLTSIPGVDRTAALAIIGEIGVDMSGFGSAKRLASWTGICPGNNESAGKRKSGRARKGNRYLKRILVQCAWAARKTQSYLGQTFRTLEARIGGKKAAVAVGHKILVIAYHLLTEGTYYEEERYNRPNPRLERRRAMRALATLRHLGYTVDLSDPDVSV

SEQ ID NO: 252004 - protein, 382 aa, unidentified
MFNHIHSDPTSTVYAAIELSKKTWVVAILRPGKVQPSLHRIKGGSFAELVMRLRAASNDERLLVCYEAGYDGFWLARSLAAEGIDCRVLDPASLQVNRRARRVKTDRIDVLMLVRALIAIDRGDRHVCAIVNVPSIEEEDARRSHRERQRLIRERTAHVNRIKGLLFGQGVRGVEPVRRKRIDFSLLRTGEGRPLADRLRAELEREYARLDLVDAQLRAVEAERDTADAQDATVERKRNMLLQLRGIGPASAAILAREIFGRSFANRRQLGSYLGLTPSAYDSGSVSRCQGISKAGNSFARRVMIEVAWLWRKYQPASALAKWYEGRAAGQSPRIRRIMLIALARKLIIALWRYVEIGLIPDGADNGAPRKRRSLSRGAGIG

SEQ ID NO: 252005 - protein, 337 aa, unidentified
MNVKTIGIDLAKSVFQLHGVDVEGGVVFRKKLRRGAVLDFLRDLPVCLIGLEACATAHFWTREIGALGHEVRMIPPAYVKPYVKRQKNDAADAEAICEAVTRPSMHFVPVKSAQRQGVMMLHRTRDLLMRQRTMLLNTIRAHLAEFGIITAQGPHKLAALLDTLGEDALPDIARSALISLMAQLDSLAAEIRSLERRLLTWHRTDEASQRLETIPGVGLITATAILASIPDPSVFKTGRQFAAFLGLVPRQNSSGGKERLGRISRMGDGYLRRLLVVGATSVIRRVGTNTSATGDWVRRLLERKRARVATVAMANKTARIAWAVLARGETYRAPAMA

SEQ ID NO: 252006 - protein, 312 aa, unidentified
MNDKPAPVHAGLDIAKASLQLHLQGKSSDLPNTPSGHDQLVKRLAAIPGVHVICEATGGYERAVVAALHAAQTPVSVINPARVRQFARASGELAKTDPIDAAVLTAFGQAFTPAPAEPRTAVEIKLAALVTRRMQLIELRVAEEARAATCADPALRKLFTSWLPQMEKQITKVEALIEELLQEQTVLAGQVQRLDDITGVGRLTAVMVLATLPELGTLHRRQAAALAGLCPYNRDSGQWAGKRCIRGGRAEVRRALYMAALSASRSNHLLKPFYDRLIAAGKPAKVALTAVMRKLVVLMNHLLKNPNFSLAT

SEQ ID NO: 252007 - protein, 399 aa, unidentified
MDRNRTVAGLDIHKDSIYLCIMRHDETIIFENKYGVLTPDLRQMCNDMVERGVTEAAMESTAVYWVPVWNELCESMKLKLVNPYFIKQLPGRKSDVKDAQWIAECLLKNLIKGSFVPEPIVQDIRKFNRRIMDLNEDMTYNCNKLDAAMQRCGFRLSNYVNTIKSRSYQKVLGAIIGGTARPDELVKMVHGRTINKHGRDTIKAAVTGTFSEIDITIFRQIKEVIDMIERQIEECQKELTALCEQHFPEQFRRLQTIPGVKERAATAIIAETGVDMKMFATAACLVGWCGLKPRNDVSNGRYKSRKVTHGNRYLRQILIEIAWGASRTRNCFFSYFSYIQTTVKKKSKMKIQVAIARKILVAIWHMLSKEQDFIDIYLKRLEENRKMEEQLKSLESKMA

SEQ ID NO: 252008 - protein, 399 aa, unidentified
MIENYDSVDVFIGVDVGKSEHHAVALDRTGKRLYDKALPNDEARLRAVIQKLKVRGQVLLVVDQPETVGALPVAVAYAEGILVGYLPGLAMRRIADLHAGEAKTDARDAAIIAEAARTLPHALRPIRLEDEQIAELSMLCGFDDDIVGQMTATSNRLRGLLMQIHPALERVLGPHLDHPAVLDLLQKYPTPTALTAAGKVRVGNRLITLAPRMGRRLAEKIFQALSEQTVIVGGTHATRAVLPRLAEQLGTLHRQRAEIAVEVAELVDANPLQPIITSMPGVGVWSAARVITEISGKEFATAGHLASYAGLAPVTRRSGSSIRGEHPSRRGNKVLKRTLFLSAFAALSDPVSRTYYDRKIAQGKRHNQALIALARRRCDVLYAMLRDGTLYQNKTPVKT

SEQ ID NO: 252009 - protein, 460 aa, unidentified
MQYHYYLGGDVSKGYADFIIIDARKETVERNFQLDDTFDGHCKLYARLSEFFNAHPKAVLCAAVESTGGYENNWFNSLVCFQETLNLKTTRLNPRGVNNHSKASMNRVCTDKVSARNIAEYLIAHPEKVSYQNQDSFASLRKQWVFIKMLTKQRTQLFNQLESLVYSANPEILAFCKDGMPKWVLKLLLRYPTAASLAKARTTSVARIPYITAIRAQELIANAKRSVASARDHITENLVVATIQQIINLNKTIDAQIEIMADECHVPEVDLLKTFTGIDDFSAIGLLLEIQTVKRFPTVKHLASFFGLHPVFKESGDGSWGFHMSKQGRTAPRHILFMVAFTAIRTNPLIRDIYQEHVGKGMNKMAAIGLCMHKILRIIYGMLKNNAAFDPEIDRRNRQKRKTKARKKDWQNKNRRFQMFDSMAPISRRQGKKRKEWETSHSEIKSLSAGSLSPIPSILV

SEQ ID NO: 252010 - protein, 367 aa, unidentified
MKKISTVAAKASRNISRQKLTIGLDLGDRSSCYCVLDESGGIVLEQRVSTTAKALREVFGKMPRSRIALETGMHSPWVSRLLDELGHEVIVAHARNVRLIGESRKKDDRLDAQTLARLARIDPQLLSPVKHRSAKAQADLTVIRARAGLVRARTALTNTARGLAKSYGEQLRGCNVRNMNPEKAERLSPELQKALEPLLAASAALSEQIAEYNERIEQMAKESYPQTALLKQVKGVGTLIALTFLLTLEDAHRFQKSRDVGCYLGLQPGRRNSGQSEPQMHISKEGDPYLRTLLVQGAQHILGPFGVDCDLRRWGLKLAERGGGSGKKRAIIAVARKLAVLLHHLWVSGEVYEPLHNSQQNAVAIAA

SEQ ID NO: 252011 - protein, 371 aa, unidentified
MPSILYIGMDVHKESYTVCSYSYEKDALEHRQKLAADYKMVLKYLEQPRKRTEGEVEFVCGYEAGCLGYSLYHQLTSHGVKCVILAPTTMGITNTSRVKNDKRDAGNIARCLAFHTYSEVHVPTAEDESVKEYIRMRDNQKKALKAIKQQILALVLRQGYQFELGKKYWTQKHLAWLRALDMGGILQETLSEYLITYDYLTDKIERLDARIEELASMERYQERVKMLSCLLGVRTHTALSVLVEVGDFNRFAKADKFAAYLGLVPGEDSSGDKQRNTGITKAGNCHVRRLLVEAGQSYTRGTVGYKSMALKKRQAGNPPEIIAYADKANERLRRKFNRMVLRNNSPRNVAVTAIARELACFMWGMMTDHAA

SEQ ID NO: 252012 - protein, 354 aa, unidentified
MMIIGCDYHPGFQQIAFVDTETGELQERRLEHREEAEKFYRDLAAQGMKVRVGMEASGHARWFERLLSELQCELWIGDAAAIHAKRVRKQKTDRQDAQLILRLMLKDDFPQIWVPSWENRDLRQLLWHRHRMVQARTRMMNQLQAVALNEGLRCKKRLWRDAGREQLETFRLAPWASLRRRDLLELLDRLTPRIAELTAAIEQEVEKCPAARRLQTHPGVGALTALAFVLIIGKADRFQCGKQIACYLGLVPLEKSSGNQRRLGHITKQGNSLLRFLLVEAAQVTVRSLPEWRSKYCHMALRRGRKIAKVAMARKLAVRLYWMMRKEWDYEQLSKFGSHAGKPGNRHGVTQNTE

SEQ ID NO: 252013 - protein, 392 aa, unidentified
MYIIGIDIGKNHHEASIVSPEGKQIGRSLRFATTHKGADSLMSFIFKNIGNSPCVFGMEATGHYWYPIYSFLKAKGYTIYVINPIQSDSLRKMYIRQTKNDSIDSFLIAEVIRFGQFGTTSMADENILAMRQLCRYRDSVISSRTEIKLRIGTIMEQIFPEYEKQFSSLWVSTSMGILEKYLTPENIENAPIDELFEIIKDKSHNRLTKAKAISIKEAAADTFGIKIAQDAFSFQLKQLIDRMNFLDKQIEALDIEIMKYYEQFDCYLHTIPGIGMIATATILAEIGDIHRFKSSSALVAFAGIDPTVRQSGEFNSTHNHMSKRGSPYLRHAIFLAATTCSFHNSPLNAYYKKKRDQGKHHLTATGAVARKLTTIIYAVLRDSKPYEPKKFC

SEQ ID NO: 252014 - protein, 349 aa, unidentified
MTKISMIGLDLAKNVFQVHGIDAAGKVVVRRQLRRHQVEKFLAALPPGVVVGMEACSGAHHWGRVVQKLGHEARIMPAAYVKPYVKRNKNDGRDAEGICEAMGRPTMRFVPVKSVESQAVLTLQRTRRLLVRQRTMAANAFRSALAEFGIVAAQGLKGLRSLIETLDDPASAIPQAARMPLCVLARQWERFNADICKLEAQIVGAAKSDEAARRLMEIPGLGPIGATAILAAVPDARVFKTARDFAAWLGLTPRQFGTGGQQRSGGISKQGDRTLRTLLTVGATAHLRYERARNAKDPWLQALLARRPFKVAAVAYAAKMARIIWAMLVTGEHYRAPNRRHSGSVQAAA

SEQ ID NO: 252015 - protein, 436 aa, unidentified
MTLINFVAANQKYYAFNLLSVFIMVFWSVQYLLQHLLVQTQVSHQLLQPLILILQLPQTPQFRHARPGKFFLPVNGMDYFLPLRLTVRNVLTRRITMNIVFLGIDLAKNVFQLCGLNQAGKPVYTKRTGRKELLQTLANIPACLIGIEASTGAFYWQREFEKLGHKVKVISPQYVRPFVRGQKNDGNDAQAIAVALMQPTMQFVPPKSPEQQDIQALHRARQRIVNHRTATVCQIRGLLLDRGIPIGSAVSRARCAIPLILEDAENGLSSRMRRTIAELYDLFNDLGRRIHFFDKEIETVFRQSEACPRIAKVKGIGPKTATAVVAAIGKGTEFKNGRHFAAWLGLVPRQHSSGDRQVLMNMTKKGDKHLRTLFIHGARAVVRVATNNNDGHMNQWVNQLKERRGFNKTTVAVANKNARIIWSMLRNDTGYQVVCN

SEQ ID NO: 252016 - protein, 412 aa, unidentified
MTVPEALFYVGIDWATETHAICVLTAAGKIKTQFMIEHTAIGFADLIRRLGRLTGNPADVPIGIERPDGRLVDALLEAGFPVVPVSPNAIKTWRDGEVLSGAKSDAGDATVIAEYLRLRAHHLRVATPYSSETRALRTVVRARDDVVDMRVAATNQLSALLDANWPGATAIFADVESAISLAFLTRYPTYLSTEHLGEKRLQAFCVKHGYSGRRSAAELLARLRAAPAGSTDEALTDAVRDAVLAQVAVLSALTAAEKKLDRSVVAHLGEHPDAKIFTSLPRSGQVNAAQVLAEWGDSRAAYDHPDAVAALAGVSPVTKASGKYRAVHFRWACNKRFRKAITCFADNSRHSSPWASKVYADAIARGHDHPHAVRVLARAWIRVIYRCWNDGVPYDPNKHGNAGKLREIAVAA

SEQ ID NO: 252017 - protein, 321 aa, unidentified
MTYIGIDVSKDTFVVAYSSDKNCKTKVFKNTTKGIHEFITTISKDEHHCVMEATGNYSALLVYLLSEAGITTSLENPLKVKNFARAMLSTVKTDEIDARLIVLYGEKMQPAPYRLRSDAILTLKQKRTVIRQLKKQLIATRNLKGSMEVMPFFDAKCKKSIEKTIAFLEKQVKELEENLTTLARSEYKKQMDLLTSIKGIGVTLAAALIMATGGFTYFDNAKQLTRHLGLSPTYQQSGTSVNFKGHINRNGDSSLRGQLYVAAFASLRCNTECKACYDRLRSNGKPGKVAVIAVANKLIRQAFAVVTQEKPYVDGYVSSKK

SEQ ID NO: 252018 - protein, 345 aa, unidentified
MLADQIDFVIGIDTHKLAHSAALVNPVGGLLGVQELDANRAGYGAVLNWANAMTNGRRVWAVEGTGSYGAGLVAYLERQGELVVEVERPERRRRGAKSDQLDALAAARHALSKEHLARPRRGAARDGIRVLLSSREGAVRAATQARNQLKALLLTGDESLRGELSRLSDEQLLRRCRNLRRSAGQDVRRRALTMALSRIAGRIAALESEAKAYERELEGLTQQRLPGLRAEMGVGPWVAAQLVTSFSHGERFRSEAAFASLAGTAPIAASSGQTQRHRLNRGGDRQLNRALHQVVITRLRLDPSTQAYAARRRHEGKSDAEIRRCLKRFIARQIFRRLRSLDLGT

SEQ ID NO: 252019 - protein, 316 aa, unidentified
MTKAERFVGIDVAQATLEIAVRPTGESWQVANDEVAFGALVDRLHELAPTLIVLEATGGIQMPVVGALAAAGLPVVAMNPRQVRDFAKATGKLAKTDRIDAQVLAHFADAVRPEVRPLPDAATQELAILVARRRQLLEMRVAEQNRSRGVPPRIRAQIREHIIWLNRCLADLDRELGQLVRSSPVWRERVDLLRSTPGVGPVLSATMLADLPELGTLSHKQIAALVGLAPLNQDSGKKRGKRVVWGGRASVRGALYMATLVATRRNPVISAFYQRLLGTHKPKKLALTACMHKLLTILNAMVRRQTRWAPPVALVG

SEQ ID NO: 252020 - protein, 457 aa, unidentified
MSRARKAPQTIKSVAEVDTLTILNRNAAGIDIGLDEMWVSVRADRDAEPVRRFGMNTPDLIAVAEWLKACGVETVAMESTGVYWIPLYEVLEERGFQVYLVNARHAKNLPGRKKDETDAQWLRRLHTFGLLNNSFRPAGEMCAVRAYWRHRADLIEHRAAHIQHMQKALHQMNVRLSPTVKDITGVTGMAIIRAILAGERDPLTLAQLRDPRCAQPEAEFVKALTGNYRDEHVFALKQAVALYDAYTQQILECDQELERKFSALKPVHDDDLPPLDTTDKRNTHSKNAPAYDGRSLLYQLLGVDLVAVDGLNEVTAQTIISEIGTDMSRWQDEKHFCSWLGLAPHNDISGGKLLRSRTLKTHNRAGQAFRLAAQAVSKTDTAYGAFFRRMRTMHGPMKAIVATAHKIARAVYFMLRDHKPFHDTNAEEYHQREREREIARLKKKATKLGFTLAPASA

SEQ ID NO: 252021 - protein, 348 aa, unidentified
MAEAYDGRQVVGMDLHRRRSVLVRMTGDGRKLETARITNDPAELRRQIARAGKSPQVVLEAAYGWYWAADTLAAAGAEVHLAHPLGVKGFAYRRVKNDERDAADLADLLRMGRLPEAWVAPAWVRELRELTRYRHKLVRARTSVKDQVHAILAKLGIPVTCSDIFGVWGSAWLGELVLPQPYAGKMASLRKVCAVLDGEIALLEAAIAGRLEDHPGYRAVRALPGIGPVLGAVIVAEIGDVTRFPRPAELCSWAGLTPRHRESDVVVRRGRITKQGSRILRWALVEAIQHVPAGHPLRQRKDDIIARRGAQAKNIAKVAAARQLLTWIFYAMRDGQVRSLAASARQAG

SEQ ID NO: 252022 - protein, 436 aa, unidentified
MEEVEDEPLFAERVAGIDIGKAAVMVTIRVPGDGGRRRRQQETREFRAVRKDLLALADWLRCWQVTKVGMEATGDYWKPVYFLLEQAGFDCVLYHASQVKALPGRPETDKLDSVWLAKITGRGSLPGSFVPPEDIRRLRTHTRYRRHLTQARTAEKERCEKLLEDAHLKLSSVIRDIHGVSGRDMLTAIIAGERNPRTLAQLARGRMRVRIRELEQALDCSFFTREHAFILAMMLANIDHLTAQVSELSARIEVLCEPYARQIAQLDGIPGLGIITAQDIIAETGTGMTVFATAGHLCSWARQAPQVSQSAGKRKGKNATGRGNPYTGAAPGEAAIGAGRTQTFPGARYRRLVRHMPRKKAQGAIARTQLVIAHALLSDPGAEYEDPGTGYYERRADIRRRARDHVRSLERPGYKVTIESLSPDPETGELPITQAS

SEQ ID NO: 252023 - protein, 342 aa, unidentified
MDHFAGLDVSVKETSVCIVNDTGRIVREVKVASEPEALLAVLKNPAYHFERIGLEAGPLSQWLFSALAEAELPVVCVETRHMQAVLKAQINKTDRNDARGIAQMIRVGLYRSVHVKTLRSQKLRMLLTHRKLLQSKAIAIENDLRGTLRNFGLKVGMVGKVRFEARIQELVENLPDLAELVEPLLIVRRALREQIVILHRRLLAIVRDDEVCRRLMTTPGVGPVVALTYRATVDVPARFRKSKSVGAVFGLTCSKYQSGEIDRSGSISRCGDEMMRVMLYEAAQSMLRSKKWSWLKAWAMQIARRRGMKKAIVALARRLAVIMHRIWVDGTEFRWTREAAAA

SEQ ID NO: 252024 - protein, 430 aa, unidentified
MTDHSHSRAAAAAPEPAAEPAREFAAFVGIDWADEEHAVCVLDGERLRREVLPHTPEAIAAWAAGLARDFGGRPVAVMVEQSRGALLYALMQHAHLVLFPINPKQAARYREALVHSGKKDDPTDAECLARFVREHHRELRAWQPADAATRQLAQLVELRRKAVESRKQTAQQGKARLKQYFPLALDLGDAALTVAVVERWPTHQALARANPATLRKFFAQHGRRNADQVNELIARIRAATPLTTDRAIIDPNALAVKFLVKELRVLEAAVAEFDAAIAQCFAAHPDAGLFRSPPGAGAALAPRLLVAFGTDRGRFATADQVQAYSGIAPVTRRSGKSCHVTKRYFCNKFLRQTFHEFADHARKWSTWSKAFYDHLRARGHRHHAAVRCLAFKWIRILFRCWKNRQPYDEARYLQQLKSKGVPYFPNLQPT

SEQ ID NO: 252025 - protein, 472 aa, unidentified
MSYRNIGIDLGVTAQHKVHVRDDQGQKVRSDLSIDTAKQAFDQTASHALYGAEPDTKLRWICEPTGMSWFPLACYVKPRGYELVRVKTQMSCDLRKFYNKHNHSDSLDAKALAQLPVVNQDALEDLLLPDKHTFALDRRNRQYKKLTQQIAGIKTRIRDLFNWLQPGLIKVFSDPYGTRARAYYRHFGNPFKVKELGLEKLTKFLADNGRQQMDRQLAQQVWQIALQACELYELADEYVDFDELQDEITVELDVLESLETTRLTVKKAIERLYDKVHPSKNIETIPGVGEKMGAALVAKIGDPHRFSSHTKLKGFTGIVPRLDDSGESSKKGLPISHEGPSDFRRDIYLVADVARQWDVEAAKIYYDCMMEKGHCHTQAVCAVASHWLGRILRVLKDGRPYEQRDLQGNAITKKDAKKYIKVHLTVPEEVRQRTRNKKRIHDKFMAKRNRGLKKNRRKHSLTHFNNISFDLN

SEQ ID NO: 252026 - protein, 366 aa, unidentified
MENIIAFDSHKRYSLALVETKNGEKVAEQRINHQRGNIADFLLPYPPGTPVAVETIGNWYWIVDEIEQAGMNPRLVHARKAKLMLGSINKTDKLDVRGLNILQRTGTLPVVWIPPGDLRDKREIPRTRMVFAVQRTRLKNRIHSVLAKYGLQDQFEGLSDIFGKQGRQLLKCCMRQLPTQTRWTMRGLLHQLDAVEGEIGRIECRMEKVFNPTKDVELLRTMPGVGPILAVVISQEVGDVGRFGSSARLASYSGTTPRVYASGDKVRYGRLRPDTNRYLKWAFSEAGNSIVANRYKYPHRYVVGLYNRVRRRRGHATAVGALARHLAESTYWVLTKKEPYRERGISQPNEQKVKVFADESMRACVS

SEQ ID NO: 252027 - protein, 389 aa, unidentified
MQIRPDQPQAPSAIRIDLGAIFVSMELSRSSWLITSLSPGGGEKMSKHSVHAGDICALLTRFSALKQKALARTGKLFPIVVIQEAGLDGFWIHRVLQKEGIESHVVDPASIATSRRRRRAKTDKIDGEALLRALLAYKRGEPRVCAMVKAPTPEEEDRRRLCRERKVLIVERISHVNRIKGFLFCQGVSGYQPLRRDRRQRLDEIKTGDGRPLPNHLKLQINRELDRLELLLEQIKAVEAERDALLDAQRIVATSPAAMLLDFNGIGPEFAAILWLEGLFRHFDNRRQIASYAGLVPTPWQSGSIDREQGVSKSGNPRLRTTLIQLAWLWLRHQPKSALALWFEERVKRNGGRLKKSTIVALARKLLVVLWKYVTAGVVIEGAAMKTPR

SEQ ID NO: 252028 - protein, 402 aa, unidentified
MDVVHERCAGLDVHKKTVVACVLRSAPKGVIDKEVRTFGTMTADLEALREWLVECGCTHVAMEATGVYWKPVYNVLEQSEALTLLVINAQHLKTVPGRKTDVKDAEWIANLLRHGLLRASFIPDRHQRELRELVRYRTALIHQRAAEVNRLQKTLEGANIKLAAVLSDVTGVSGQRILEALLEGESDPQQLAELAHHRVLKHKREALEQAVVGRLSDVLRFVVQQQLQHLHDLEAQIAACDAKVEDLLRPFDAELERLRSITGVGPRTAQIILVEVGMAIERFPTARHVAAWAGMCPGNRQSGGKRQQARTRKGSPWLRAALAEAAWAASKSKDAYLPALFRRLSARRGKKRAIVAVGHSILVTAYYLLTRGAIYQDLGETYFDERDLPIHRPVRLAARPFS

SEQ ID NO: 252029 - protein, 286 aa, unidentified
MTEAGGFVGIDVAKAELEVVVRPSGARWTVTNNPAGLAQLQERLQASAPSLIVLEATGGYEVAVVAALATAALPVVVLNARQVRDFARATGRLAKTDAIDAGVLAHFAEVVRPPVRPLPDAMTQSLQAWLMRRRQLVEMLLAEEQRRSRAPRPIQRQIDQHVRWLRAQLGAVEKDLAQTLRESPVWREKDNLLRSVPGVGPVLTTTLLGDVPELGQLNRKQIAALIGVAPLNRDSGTYRGRRAVWGGRARVRATLYMATLTAARYNPVIRAFYERLVAAGKRRRSP

SEQ ID NO: 252030 - protein, 362 aa, unidentified
MQSTPLVAFDQHAATTVAAVLLPGQRTPALHTLTSDSPTILRFVRRLARQAGAVRCCYEAGPCGFELQRALSQQGIPCDVIAPALIPRRPGDRIKTDRRDAGHLAVLYRAGALTAIHIPTEQEEAARDLLRCREDIRADLLRARHRLSKFLLRHGRRFTATKKAWSKRHEGWLRAQTWPLPALEQTHRAYLRTVDEAVARLRAVEEDLRALLELAPLRPRVERLRCFRGIDDLTALTIAAELGDARRFATAPSLMAFVGLIPSEHSSGTKQARGAITKTGNAHLRRVLVEAAWHYRHHPFVGDTLRARQRGAPAAVIAQAWAAQQRLHRRYARLAARGKPKQHVVTAVARELTGFVWAALTQ

SEQ ID NO: 252031 - protein, 419 aa, unidentified
MSKSNTAKQLAQVQPGTLHTGVDLALEKNVAIVINEKAERLDHFSFPQDRGGYDYFLRRLEGLRQKYQASEVVVAMEPSNYFWKLLAKELEEKRITYHLVNAYTVKKHREGDQLDRSKDDQRDAGQIAELSRNGKYTETHLQKGAYEDLRQYATLHDQSVQGIRRERQVLWGLVGQVFPELSRVFKNLIGETSQALLMTCTSAVIIRQLSAEDFIAQVRAAYSGKNLSVSKLRRVHQLAATSIGVTEGLGAIQLAVQVHLAELQTFQKQLKWVTTAMTTCLATLPEAPYLLSVKSLGAVSAAIFMAEVGDPKRYQSAAQWVKLAGIQPAPNTSGKKQRSPTPMSHQGRARLRTMLYYTCLRLIQHDDHFAQLYSNLQRRQKNQLTKMQAIGVLMNKLLHILWALIQNQTLYNPSFAQSI

SEQ ID NO: 252032 - protein, 361 aa, unidentified
MRFVGIDVGAERHYLAIVDETGAVLQKPYAVSEEAAGYRQLRELLGQPEDCLVAMEATGHYWRNVFTFLVAEGFSIALLNPLRARRFAEEDLARTKTDAIDALGIARFATQKRPVSTASPEPAVEHLRELVRMRERTVLQLGDRVRHLHQAIDLTFPEFTRYVRGLDTELATAILSRYPTATALRRVSPKKLAMICFDGRRRIGATLALAIIAAAKISVGQHHDDPYKLQIRYACEDIVTLRQRARDLEREIEQKLDAHEVGKLLTTIQGIGPLTAACIIGETGDPARFRSAAALASYVGVVPRLHQSGKRKFSGRVGIPLGNARLRRALWMPVLVAIRINPWLGATIGVFVRMANAQKLR

SEQ ID NO: 252033 - protein, 431 aa, unidentified
MLKINPLSTLYVGIDVSSKSNYVCALDFFKNKYINSSFANNQPGAEELALKILECLNQHPDLTMVVAALESTSVYSIHIANYLSSCEELMRFKPYVFVLNPKCTANYKKSYIGLGKSDPIDAFVIADYARAGNIESEPWRGSQFLALKRLTRHRLHLVECMTREKTYLISNLYLKFSELQMLEGDDQPFCDIYGATSSSVLMEYLSPEEILVSSEEDLIAFLAEKSRNRIKDISKTADLLKKAARDSYRLDKALYEPLNVSIASSFNCIETFKREIKVIDNAIEKEIKGLNPNAFIILQSIDGIGPVFAGGIIAEIGDITAFHSSDALAKYAGLTWKSNQSGDFDGEDTPMIKAGNRYLRYYLGEAANSMRKHNVEYGAYYRKKYNEVPKHQHKRALALTSRKFVRLVYGLLARNQLYSGVSLDTSIKDSN

SEQ ID NO: 252034 - protein, 319 aa, unidentified
MTTACAAGIDAGKSYLDVGLAPSRRHFRVANGREGIEHIVDRLHEAGIARVVLEAIGPCAQPLVTRLVAAGFTVGVVNPRRIKAFREAEGRSAKTDRLDAALIARFAVKMTDALRPVPSADQQILKALATRRRQLVEMIAMEKTRLKQAAEPLLCESHRAAIATLTAERRRIEADLEARLAADPKQQRQRAILQSLPGFGAAVSTTLITDMPELGTIDRRAAASLAGVAPHPSQSGTGPSRNEIAGGRPCVRTAVYMAALSAIRCDPRFKAEYQAMRKAGKPAKVAIIAIARKLIVLANALLKSDVLYDPEHDRTAHAP

SEQ ID NO: 252035 - protein, 383 aa, unidentified
MASRRRGPGPSSVLITPDCAGNVVGVDPHKRTVSATVADPRGGIVASEHFRVSGDGHRALEVWARQFGPIARWGVEGASSWGRHTAVFLIARGHDVRDVCANRTPRSDRARQRGKSDQLDSERIARETLAHPLLPKAFKRAGQDRGPSEQHELLALRHNQRRSILTSRQHLINEAEHLLSSLPLELREQLPDTKTVRPRLTALAARNRRRRYDQPTTLRLKLLDDYRAQIAKLDAQDKQVTAELAALVKASGSTLGDLCGLSTVLVSELLVEVGDPRRFTIGGFARFNASAPLAASTAEGPGEPVRHRYNPGGNRRINRTLHLMAVTQLRCEPRAQALYDNARKRGHTKKEARRILKRHLSDVIYRHMIRDLASPSAQPLLIA

SEQ ID NO: 252036 - protein, 338 aa, unidentified
MSLYAGIDLHSNNSVLAVMDEAGKPLLQCRRPNDLSRILADFEPFRAELASVAVESTYNWYWLVDGLMEHGYDVRLVHTSAVPQYDGLKHGNDHSDALHLAQLLRLGLLPEGYIYPREQRATRDLLRRRFMLVRQAVQLMLAIQSSFSRSTGKQLSANALRRIAPDELEALFPDVSTRYGVLLQYKLWLTLQEQISSLEQWVRKDLPRPGDLMRLRSVPGIGPILGMTIALETGPIERFASVGEYASYCRMVESVRLSNGKKKGRGNRKSGNRYLCWAYIEAANYATRFHPQIRSWYDRKKATKHRVVAIKAVAHKLARACYHLLRDGTEFDPKRAFG

SEQ ID NO: 252037 - protein, 362 aa, unidentified
MRIIGCDLHARQQAVAMLDTETGEVMSMTLKHEGNNVREFYSKLPRPVRVGIEATGSMQWFVNLMEELRIECLVGHPAQIRAAEPRKQKHDRRDADLILKVLVENRFPAIWLPSKELQDLRALLRHRHQWVRMRTRIQNALQSIALANGLRRGSSLWSQVGQHTIASLPLAPHTAYRRSELQAMYAKFEAEIEKLNRRVEEQASQRPGARLLMTHPGVGPVTALATEVFLGDPARFADSKALASYVGMIPREYSSGGRQRLGGLTKQGNPLLRFLWGEAGAHAVRRDPELKRFYRRKLIQKGFGKASVAVARKLGIRLWIMLRDQIEYNEFCRRGQKQQKSSDACAGMPETPNGANSHRPVD

SEQ ID NO: 252038 - protein, 357 aa, unidentified
MEQFIGCDAHKKFSLFVAMNEDGEYGRAIRVGHDREVFRTFLEDLPPGSQIALETSGSYYWLVDEMERAGHRPQLAHALTAKRRMEGRHKTDERDARGLAMLLRNGTLPRVWIPPAELRDQREMLRLRMSLVRMKTQLKNRIHGVLLRYNLCIQASDLFGDQGRAELFSRQGELPAWSRESVREQLQMVDSVQSQIVDCEKQLEAILYPNAERDLLKTLPCVGKVLSAVIALEMGDVRRFGEAKYLVSYAGLVPSARESAERKRQGRCPRDCNVYLKWAFVEAANLIASKQKTWPERHAVRLYQRVKQNTKMHGKATMAVARHLAEASYWILTKQEVYREPKSKAASSFVDARVSAN

SEQ ID NO: 252039 - protein, 419 aa, unidentified
MSFKILKNNCCGLDVHKTWIYACIGITDSFKRTEYKQARFSSFTKGLQELCLWLAKYNCIDVCMESTGKYWIPVFNVLEKNNIFVTLSHPKYTKPQKGNKTDRKDAKWICDLYMCGMVKPSFIPPADIRQLRDLVRYRFKLTCMITGEKNRAHNCLTVSNLKLDDVFSDIFGKSSRSITEQILQHPGEVFDVAPFVDSRCKTPIEEIQAAVDGAISHEQAVKLRQCLKHIDELEMHKAEIEREIFRLSQKYESVLDLIRTIPGFDKNPLTAIQVLSEIGADMSVFPTAKNLVSWAGCCPRNDQSSRKIKSTRISRAGSYFKPVLVQIANALIKSKKHPEFTTRYRRIKARRGHKKAIIAICRMILTAIWHILTDLKPYTPEGFLESRPVNKEKVLTISQALNLIKQRGYIIKDDAVPVT

SEQ ID NO: 252040 - protein, 348 aa, unidentified
MSRMQEQIVKPPGACAGIDVGKDHLDIFIHPHATAMKVTNDRKAIAALIRKLGQHDVRIVALEATSKYHRLAHSMIHDAGICVAVINPFRSRQFADSIGLLAKTDTIDAQSLALFAQRMNPQATTPPEIQLKQLRDLQTARRQVLDEVCDLKRQLHTTDHPLAARQIKARILMGDRHKTALEKEIHSLIATHTDLKNKFDILISIPGIGRTSAAILLADLAELGQVNAKEVAALAGVAPMNWDSGAKNGNRMIRGGRKYVRNTLYMCAVSCIGRSNPLGLTYRNLVGRGKNPKVALTAVMRKMIIIANTLIAENRKWRAEGPDIGAGRGEQRYHQPQARDELQPSLAA

SEQ ID NO: 252041 - protein, 339 aa, unidentified
MDKMEPCGIEVSARELLVAVESGGRSRMYRLANTPAGHRKLLHTLTRGGRRVRVVMESTGLYGLDVALALSDCAGVELMVANPRAVRHFAQACMQRSKNDQLDAVVLREFARRMEFKPWTRPQGPVLALWSIARRLESLTNWSTAEKNHRHAAGISQTTPACVRKDIARSLRLHQQSLKELRREALACIAADAQMQRRYALLRTVRGIGEISAIQILAELMLLPEDRDVRQWVAYAGLDPKEHSSGTSVRKYTRISKVGNRHLRHALYMPALVASRFEPHLRAFYEHLLARGKKKRQALIAVARKLLHAIYGMFRSDRPFDGARLYALPAPPLITVQAS

SEQ ID NO: 252042 - protein, 426 aa, unidentified
MTARALYVRGNKMAAAETIWWFAGVDWGSEKHQVCLLDARGATVGEREFPHSGEGLAELGDWLLSMASAASTVAVAIEVPHGPVVDALIDRGFVVYAINPKQLDRLRDRFSVAGAKDDRRDAYVQADSLRTDRRLFRRLQVPDPRLIELRAWSRLTEELRTERVRLSNRVRHQLWRYYPQMQKLTNDLAAPWFLELWAIASTPAKAGRLRNSTVERLLKQHRIRRMDAETVLRILREPAIKVAEGVAEAASIHMRSLVARLRIVNRELREAERKLDELCTAVSEIEEASGESLQRRDVAILRSMPGIGRINLGTLLSEASGPISRRDYQGLRTLSGAAPVTKRSGKSLIVVRRYAAHVRLRDTVYHWARVATQRDPKCRARYTALRKRGHSHGRALRGVADRLLALACILLQRQTLFDPYFGRPTA

SEQ ID NO: 252043 - protein, 370 aa, unidentified
MNYNTVYVGMDVHKETFSLCCYTNEKEQAEYPQKVDAHYSKVLNYLEAMRFHYGDDVMFICGYEAGCLGFTLYHQLTSHNVKCIILAPTTMSKPTGRKKVKTDKRDAALIARCLAHHDYSPVHILTEQDEQVKEYIRMRQDHKLALKKIKQQILAFCLRHNYRYDTTKSHWTQAHLTWLRSLEPEGLYQEILTEYLATYDQLTDKLERLDKRIEELASKEDYQENVSHLSCLLGVKIQTALSTLVEVGDFKRFASAQQFASYLGLTPGEDSSGEDQNRLGITKAGNSHIRTLLVEAAQSYTRGKPGYKSKALKARQKGNPADIIAYADKANERLRRRYYQLVLGQHKKANVCSQNSNRQRTCVLYLGHDD

SEQ ID NO: 252044 - protein, 428 aa, unidentified
MAEDTTLTSQTWLVAIDIGKAFHAVLVEGGDGKRQQFRMANHVEDYDRLVVFLRGLPGPARIALEPTGDFHRTLAHRLLREGFSVVSVSSVAGARYREALFNSWDKNDPKDAHVILQLLKHGLVQHYHDPLLAGDHDLQELAKTYHQIVLARKRLADSLLNHYLPLYFPEMGRYWESTRVEWFVAFLEQFPTPAAVQALPKEAFVRAAWSVVGRKVNKQAKLEELYELAQRSIALPVAVDSVAIETFRLQLAQLRRLAELRQTLEARAHALLKDRADFQRLCSLPGVAAILALVILAEGGDLRRFPHHRQFLKYCGLDLAKCQSGQFRGREMLSKRGNARLRMAFWMAAQRAVRMNENSFRDKYERYTRHDSGNPDVRRKALTAVAAKMARVAYAVVKHDQPYHGYHEQALPSGSIPLKRAVGARATP

SEQ ID NO: 252045 - protein, 355 aa, unidentified
MSQEKYIGMDVHQATISVAVMDARGKLIMECLLETKAATILECIQGLRGTLALTFEEGTSAAWLHDLLKPHVSRLVVCDPRKNALLKDGNKSDRVDARKLAELLRTNQVKPVYHGKHGTRALKELGRSYLTITKDVTRVMNRIKAVYRSWAIPCAGTSVYAPRHRAEWLAKLLEPGVRIRAEHLYQQLDSLEPVRLEARRQLLLESRKHAAVKLLRQIPSIGPIRAALLVALLQTPHRFRTKRQLWAYSGFAVEIHDSGEYRSVRGKLQRNRERITVRGLNDNHNKDVKSLFKSAAISASTRPGPLHDFYVTRVESGMRPTMARLTLARKIAAITLTMWKKGVSFDPKQLQRQAA

SEQ ID NO: 252046 - protein, 392 aa, unidentified
MVVSVGIDVSKDKHDCFIVNSEGEVLANIFTIPNTMDGFNCLLQRIQDCTTPQDKMKVGLEATGHYSYNLLGFLLDNGLPTYVLNPLRTNLYRKSLSLRKTKTDRVDARTIAAMLLSDAGLKPYTDTAYHNEELKSLTRYRFDKVKERAKLKSSISRLVCILFPELEKLVPTLHMASVYALLEEFPGAKQIAAAHLTRLKTLLETASKGHYKRDMALEIRDAARNSIGSSMPAKSLELQHTIRLIRELDDEIAEIEEQIQAIMDELNSPITTIPGIGFRMAAMICAEVGDFTQFDSPDKLLAYAGMSPSTYQSGQLKNCYPHMEKRGSRYLRYALYNATKYVCHWDPTFADYLAKKRTEGKHYNVALSHAAKKLVRLIFAMEKSRQPYCAAA

SEQ ID NO: 252047 - protein, 405 aa, unidentified
MELTAIYRCVAALDIHQAKLTVCILYEDENGEIITELKEFGGFKKDRVAMAAWVASFHPNLVVMESTGIYWKSPYAALEKHGLKIEVVNARHVKQVPGRKTDIADAHWLAILARNGLLRGGFVPPKVQFRELRLVSRQLQKMTGILSGEKNRLHKVLSDTGVRLSVVVSDLHGKSARAMIKGLLAGETPQHVLQYASNRLKATEEELLDALEGDISAHHHFVMTEMMAHIEELEARIKTFQQYLLQGLALYRTILQSLQTIPGLDETGAALLLVEIGDDMSAFGSPARLASWAGVCPGNNESAGKKKSGKARKGNPYVRRVLCEAANAASRTRCCLQDKFKGIMLRRGRKRAIFAIAHKLLKTVYLLIERSDYYRDADTDYEALSVQRNAPRWIKKLKQYGYITA

SEQ ID NO: 252048 - protein, 408 aa, unidentified
MAAIEFPIYVERGCGLDVHQQTVVASIAGKDIEAQTKTFGTFTEELYQLVGWLQNNWITHIAMESTGVYWKPVYYILEDFFKILLVNARHIKNVPGHKTDKKDSEWIAKLLMSGLLKGSFVPPQHIRELRTLHRHRRKLTGQRTAEKNRLQNILEDANIKLGNVVSDVFGKTGKAIIEALIAGVTDPAQLAELARGSLVKKKDQLKKALNGKITDHHRFMLQLIVNTITHINNQIALLEAQMGIYIESMKQDVELLQTIPGVSIQIATGILAEIGNDMSVFPSHSHLSSWAGVCPGNNESAGKKKSSRVTHGNKFLKTTLIEAAWAASHSKTNPILAIKHRSIAMRRGAKKANLAIGHKILVAAYHILRDKTPFLPSERNQQILQVRRLKRIERLQKELTALKNTSEQ

SEQ ID NO: 252049 - protein, 364 aa, unidentified
MFHFTTLFIGMDVHKESFLLCYYDMMANQFKHSTKVGPNVSYIVNYVNELRRLYGQDAEVLCGYEAGCLGFTLYHQLQAHGIPCIVMAPTTVMKEGSKRVKTDKKDAAQLAKALAFRSYRPVHIPTAEDEQVKEYIRMRTDHKVALKKIKQQLLAFCLRHDFRYTEGRNNWTQKHVRWLHSLNPKGLYAEILTEYLLTYEKLVDQIARYDARIEQLGQSDSYQEEVSQLSCFIGVKTLTALSIVTEIGDFNRFATAQHSASYLGLTPSENSSGDKERRGAITKAGNSHVRRLLIEAAQSLAKGTIGYKSKELKRRQSGNRVEVIAYADKANERLRRRYRTLVLGKNKKQNVAKVAIARELSGFI

SEQ ID NO: 252050 - protein, 367 aa, unidentified
MKKVSTRAAAQSRNISQQKLTIGLDLGDRNSWYCVLDEAGQIQLEQRVRTNAKALQEVFGAMPRSRIALEIGTHSPWISRLLSELGHEVIVANARKVRLIGESRKKDDRLDAQTLARLARIDPELLYPVKHRSVQAQADLMLIRARAGLVRARTGLVNSARGLAKSYGERLRGCNVRNMNPEKAEGLSPELQTAMEPLLNAIEALSERIVEYNERIENLAQQSYPQVALLKQIKGVGTLIALTFLLTLEDPHRFGKSRDVGCYLGLQPGRRNSGRSEPQLHISKEGDPYLRTLLVQGAQHILGPFGVDCDLRRWGLKLAERGGRSGKKRAIVATARKLAVLLHHLWVSGEVYEPLHNSNQKAMPAAA

SEQ ID NO: 252051 - protein, 340 aa, unidentified
MTITTVGIDLAKNVFAVHGVDQNGRTVLVKPKVSRAALPELIASLPPCVIGMEACSGAHYWARLFRQYGHEPRLMAAKFVSPYRMAGKSGKNDAADAQAICEAVRRPHMRFVPVKDESQQAMQCLHRTRQGFIEEKTATYNRLRGLISEFGVIAPQSADALRHMVSVQKSSLPLQVQQCVDDLMEHVDRIEANITEYDRILSHIAKTDHRSQRLMELKGVGPTTACALVASIGNAHDFKNGRQLAARLGLTPSQYSSGGKSKLGRITKAGDSYLRTLLVQGARSVLIGAGKRTDSFSRWVCMLVERRGYWRAVVAIAAKNARLCWASLHYGDDFRLYSVN

SEQ ID NO: 252052 - protein, 380 aa, unidentified
MKKNTRYLGLDVHADTIAVAIADPDGEVRSLGTIPNRSLSIRRLLKKLEPTKSLKVCYEAGPTGYALYWELSRLGVDCTVIAPSLVPRKASDRVKTDRRDALMLARSFRNGDLTAVWVPDRAHEALRDLVRAREVAARDELRARHRLGKFLLRHARRPAEKVKAWSYQFWQWLPTVRFDFPAQEATLADYRSEVEHHKARIERLEKAIDAAVEGMPPELRAVVDALQCMRGIAKIVAVTAVTEVGSFSRFARPKQLMSYSGMCPSEYSSGTHTSRGGITKAGNSHLRRVLLEAAWCYRHQPAISKRLKKQHREQPNERIKEIAWKAQHRLHGRYWRLLNRGKPIGNVMTTVARELLGFMWAVAVQVESQGAHKVENQKAA

SEQ ID NO: 252053 - protein, 423 aa, unidentified
MKSSGTQTFRAYVGIDWADTKHDFCLQERGSDRREFGCIAHQVECIDEWAKSLQQRFGTPVAIALELAKGPIVYALQKYDFLVLFPINPLTLAKYREAFKPSRAKDDPSDAELALDLLMRHPERFAALRPQSVGMRTLISLTERRRELVNDKIRLTNRLTHTLKEYYPQALDWFDQHDTVLFCDFLTRWPTPLQARRAHQASLKAFFHAHNAHRPQIIAARLKAIKAAVPLTQDPGVVVPCRLHVLVLIEQLRLALQAIEQFDRHIAELAPTLLDYRLFAGLPGAGPHLAPRLLVAFGEDRERFQRAEELQKYAGIAPVTERSGKKTWVHWRWQCPTFLRQTFIEWAGQTINKSFWAGAYYYQQRARGSTYQAAVRALAFKWIRILYSCWKTRTLYDESKYLNALKRRQSPLLNNLVPIPQNA

SEQ ID NO: 252054 - protein, 316 aa, unidentified
MKSKSNQSINVGVDTGKSQLDIYIRPLDIYFTVTNDDKGIKEAVKTIKEHSPERIVIEATGRLEMPFIMACADEGLPFVIANPVHIKRFAGAIGQRAKTDKLDAQLIAHYGEAIKPTLSALKPETMQLMSDLVARRNQLLVMQTMEKNRLQILPKELVMTIKPILTALKNQIEKVEAKIIKLIESCPDYQAKNVILQSMKGIGKIAAASIISNLPELGYISNKQASSLVGVAPMNRESGRYKGVRKIQGGRHQVRTVLYMAMMSAIQSNPIFKETYQRLVAAGKPKKVAIIACIRKMVVILNSMLRDGVMWEAPKA

SEQ ID NO: 252055 - protein, 307 aa, unidentified
MNVCIGIDVSKHALEWSVGPEGRIQHTRNEPRPIAQLIRRLAELDAERIVVESTGGYERKLVLKLAEAGLPVVVVNPRRVRRFGEGMGILAKTDAIDARLLALFGEKVEPPIRLILQGTERLLADLVARRRQLIAMVVAEKNRRDTAAEPVRRTIDALLRTLDQHIRDLDRKIEKALLEDSERGELSELLQTVPGVGPGVARTLLIDLPELGHLGRREIASLVGVAPFAKDSGTIRGSRRIRGGRASVRTALYLAAMTASRFNPVLRDLYERLRQAGKPPKLAFVAVARKLLTILNAIAREKIAWQA

SEQ ID NO: 252056 - protein, 591 aa, unidentified
MRASSAVPLDCIGVGIDTARYGHRVSFLRPDRQPAAKPLTVLENHAGYQALQQRLEQLHGQHPQAHFHVRIDAAGQYAANLEHFLRGLALPLVISIGEPKRNKDYQKAHFPKRTTDDTESQAMARFAVVEQPGATAAVPPQLGLLREVAARLQAQVKQTTQAINRLHNLMARVFPELATLANDFAARWLLHLLERYPTAPRLAAAHLRSIEQVPYLPKEQAQPLHQAAKQSVGSLHGDVAETLVRELVTQVGHCLDHEAKLRQLLEDAFAQLPPSGHLQVRTVPGIGTATAAVLVAKIIDIERFSSPEQLVGYFGVFPEEDSSGVDKDGQPLPPGTLRMSHKGNDLARAYLWNAARSATQHNPAVRALYTRLRAKGKRGDVALGQCMRKLLHLVFAVWKSNRPFDENHFAWEPPTETQPAAALAAPAGAAVADTAVAPSQDKAVGPTQALPAQPGVTTAASSVEAGPMPVKPAAAAPLPRPQVDFAFVRKQITMEQVLRHLGLLEGLRGRGQQLRGCCPVHAQVGTKEHTFSVHLGKNAFQCFKADCGAKGNVLDLWAAVHRLPLYEATMHLAETFRLRRNREEEPVGRTR

SEQ ID NO: 252057 - protein, 334 aa, unidentified
MENIALIGIDLGKNSFHIHCQDHRGKAVYRKKFTRPKLIEFLATCPATTIAMEACGGSHFMARKLAELGHFPKLISPQFVRPFVKSNKNDFVDAEAICEAASRPSMRFVQPRTESQQAMRALHRVRESLVQDKVKTTNQMHAFLLEFGISVPRGAAVISRLSTLLEDSSLPLYLSQLLLKLQQHYHYLVEQIKDLESQLKRKLDEDEVGQRLLSIPCVGTLTASTISTEIGDGKQYASSRDFAAATGLVPRQYSTGGRTTLLGISKRGNKKIRTLLVQCARVFIQKLEHQSGKLADWVRELLCRKSNFIVTCALANKLARIAWALTARQQTYEA

SEQ ID NO: 252058 - protein, 392 aa, unidentified
MIFVGIDAASDKHDCCILGTDGGVLSAFSFSNDKSGFERFLVSVNEFCKEHGLSDAKVGLESTGHYSINLTNFLLAKRLSVKIFNPLQVNLLRKAQSLRKTKTDKSDARFLAQLLFSDDSLPYSQPLYHISELKTLTRNRYRLVQMRSKLKISVSRLITVLFPELPCVVWSVNQKSCYALLLEFPTAKQIAESHLTRLTNILSSSSKGKYGREKALEIRELASRSIGLNSRAAGFELRQTIRLIQGVQAEIDELDDEIKTVMLEIDSPILTIPGIGYILGAIILSEISSVENFDNPAKLLKFAGLEPSVYESGKYKASNTPMVKRGSKYLRWALLQAARLVAYRDKTFAEYMAKKRSEGKHFYVAVSHVAKKLVRVLFHLLRSGESFAPSFK

SEQ ID NO: 252059 - protein, 355 aa, unidentified
MKGRKRTSLEHFFEESFGREVWVGVDVHKRSYSVAICRDDGVMVSWKTAADNDALVRQLTTPGMVIKSLAYESGPTGFSLARTCFKAGIPAIVAAPSRITRPVSPTAKTDSLDCRKLAYLAAKDMIHPIAVPSEEEEALRALERRRHQLADNQRKVRQRIKGFLLFHGIEEPVGLERWTILAVQALAQMPLNEMLREVLDDYLEELRFVRHKILVLERKLAGYTAMLHQRRLVCLQSVPGVGRIVACSFLAELFRPERFHRGEEVAAYLGLAPFVKHSGERTPTGRLRPAGHSRLRSLLVEAAWVWKSKDSGIQALYTRILCNTGLAQKAITAVARKLSIILWRLACEIREYRPA

SEQ ID NO: 252060 - protein, 328 aa, unidentified
MWYAGIDWADQHHDAVVIDAAGTRVATTRVAHSAEGLSTLVTFLKGIGDVADHPDQLACIVETNRGLLIAAVLDAGLPVYPVNPKTVDRHRTPAGAKTDAIDAYLLARTGRSDLADLRRLTPDSPLVAELKALTRDQDTLIQSQTRLVNQLTACLKAYYPVALDLFGKLQQPTTLAFLQAFPTLAQARVASVEQITAVLKGTGHPTAEAKAHQIHDRLSQPQLAADPIVTRTKARLMLTLAGQLRVLLPEIAAYDEEITRLFRRHSDSRAFASLPRAGTRLAPRLLAEWGDDRGRYTDAASVQALAGTAPVPFQSGNFAKAHRRYACN

SEQ ID NO: 252061 - protein, 391 aa, unidentified
MTTQIDDLSRSLVALEQDNTLIAAVELSQSSWLVGAMVPGLERQPQKKLEPDPSALLALLERWRAAGVRAGWTIRRIVLAFEAGRDGFWLARWLRQRGVESHVIHSTSVAVSREHRRAKTDRLDLAMLLRVFLGWLRGERKHCSMVAIPTLEQEDAKRPSRERESLTREKTRIVNRMKGALARLGIRGFKPELRKAPQKLAALSTPEGVALPPNTLAEIERDMTRLAVVRGQIAVIERTRLERLHQAPADGPQAMVLLLARVIGIGVETADMLVQEILSRNLRDRRAVARYAGATGSPDESGSKRREKGLARAGNARVRRGLIQLAWRFLMLQKDSGLAQWYRARTEGIKGARKTTMIVALARKLLVALWRLATTGEVPAGVVLRPAARTA

SEQ ID NO: 252062 - protein, 355 aa, unidentified
MLFLGIDQHARQITISLRDENGDVLLARQVSTQPAKINEFFQQLTRRRLANGESFTAVLEVCGFNDWLIQMLRDYRCQKVILIQPDNREKRKTDRRDAAALSELLWVNRARLLQGKSVRGLRQVDISSTTDQENRRLTMLRKNAGQARTRIILQIKHMLRRHNLQWEMPTKTFPTQRAVAWLKKLVLAEVDRWEMDHLLADLEHAQRRVEDLEKLIAQRCATSDAAVLLATMPGVGAYTATALACRVGRVERFPRSHSLANYWGLTPGCRNSGENNQRLGSITKAGSGVARWLLAQMTRQVLRKDPRLREWFKRIKRRRGSSIARVAVMRKLATVIWHMLSKKKTYAECRALSAN

SEQ ID NO: 252063 - protein, 346 aa, unidentified
MKIIGCDFHPSWQQVAWLDAETGETGEGKLVNGDGEAERFYRGLPEPALVGVEACGNSQWFVDLLQQLGHEVWVGDAAQIRASYVRQQKTDKRDAAHILKLLLEERFPRLWRPSAEQRDTRQLLIHRHKLVEMRTRVKNALQHLAMNRGMQKKRQLWSEAGQQAFGELAMPGWAGCRRQDLLEMLAYLDKKIAPLDRAAEELSQRDKMAQLLRTQPGVGPITALAFAATLGDASRFQRGKQVASYVGLIPREYSSGGKQRLGGISKQGNRFLRQLLVEAAQSAVRCDESMRRPYLHRCHSKPKGVAKVAAARRLAVRLYWMLRTNTGYPEIVRIESSPRVPRVGAS

SEQ ID NO: 252064 - protein, 420 aa, unidentified
MYYVGIDIAKAFHIACVLDESNKLIVKNLRIESEISDFSLLNSELINITEDKTEFLIGMEATGLLFENLYLFLQNQGYNVVLLNPYQTNRFREMDTMKYVKNDNIDSQMIAALLKSGRYSQGYVSEDLYQAIKSLYRHKATLMQEMKSAKRQVSTTLAVVFPEFEQIIKDPFSVSGMALLEKYPTAKHYKGASADRILKVFRNIKGNNFNLQKANDLLDLARLTIYQGNAQEERAYVILSNLRRIRFLKEEIEACEAQMFTLLNESEQAVSSSISEDEEIYIADLVDNLRSIDGVADKTIFALLSECGDIARFKSGQAFIGFLGLYPTLYQSGNSTKYGKLAKRGARLAKLALYQAAIACVRHNDELKKVYLDKKSSGRAPKECVIIVARKLAMIIYSIYKHNTPYNPARVFNAQASLSH

SEQ ID NO: 252065 - protein, 350 aa, unidentified
MKKIVKQAVGIDVAQKELVVCLGCMHDDWTTQLYAHKTFANTAKGHTALLLWVKKQTNEAIAVRYIMEATGVYHESLAYFLDEQAQDLSIVLPNKISNYFKTLDVKTITDKSASEAIALFGLERKLENWKRPKAIFKKLKQLTRERDQIVEERATVKNQLHAEQTEAASNPSTITRFKQRIAFLNKQEKSIKEEIAALIKKDEDLKKTVLLICSISGIGLLTAAIVLAETNGLEHIRNKRQLVSYAGFDIKEKQSGTSVKGKSCISKRGNKYLRKSMHLPALSAIRHDERFKAIFVRLVSKHGIKMKAVVAVQRKLLEMIYTISKNQVPYNKNYLKEAEIENESMETAIA

SEQ ID NO: 252066 - protein, 342 aa, unidentified
MSNIQTIGVDLAKNVFSIHGVDAYGKCVLRKTVKRNKLLDTFANLPPCIIGMEACSGAHHWARELIKLGHHPKIMASKFVIPYRQNEKNDANDAEAICEAVSRPKTRFVSIKSEEQQAVLCLHRIRQGLIKTRTATINQLRGLLSEFGLVMPQGRYSAQQTIGSILEDAENGLPLLARELLQDLSNKIQSLNLEILHYDRRVSALVREMASAKALIDIPGVGEHSASAIVATVNDAKQFGSSRQFAAWIGLVPRQYSTGGHVHLGRISKRGEKHIRTLLIHGARAVIARCKEKTDRNSLWLQQLVERRGYKRAAVALAAKNARIIWALLTTGNEYKANYING

SEQ ID NO: 252067 - protein, 359 aa, unidentified
MREQRNEISFRGQKIYVGIDVHLKSWSVTVLSETSVLKKFSQRPSPEALHGFLTRSYPGAEYRSVYEAGFCGFWIHERLTALGIDNIVVNPADVPTKSSEKLRKSDAVDSGKLARGLRANELKGIYTPDSVSLEMRSLIRLKNSITKDTTRQKNRIKSQLRCLGIGIPQEFLEPFSNWSKRFFAWLKEVETLTPSGRQALDIQIRHWEELRRQKLEMTRALRTLAKTDRFREPLRLIMSIPGFGQATGMAFLSEICDITRFRNAEQLAAYIGMIPMCHSSGEKDGTGDITLRKHAVMRCNLIEAAWVAVRQDPAMNLFFTEQCKRMPKSKAIVKVARKLVNRLYFVLKHQTEYVNSVVS

SEQ ID NO: 252068 - protein, 434 aa, unidentified
MRRNRTYRAKSVENVDWKEVVTGRGRQAAHVGVDVGKRAVLAVVRWNRDEFERPWLVKNPDEIREFVRLLVDVKRGRELIVAMEPTGTYGDVLRQALFDAGICVERVSPKVAHDYAEVFDGVPSQFDGKDAAIVAELAALGKSQKWKYEMPSVADQEMAYWVDWMDAQRRQVAMWLGRLEALLARHWPEATQWLRPSSLTLLRILNHYGGPRGLADDSQAVAEVARWGGRYMAIEKTRGLVASARQTVGVRQGQIDVRRMQTYAATALAAHRELAQGKRRLRELARGNAVIQAQACAVGVVTACVLWTHLGDPREYFCAAAYRKAMGMNLTEYSSGEYQGRLHISKRGSAAVRRWMYFAALRWIRHGPGRRWYLRKRARDPEGAKRALVGVMRKLAKGLHYVGTTGEPFQPARLFSGRSSRSAKARNASLTRRS

SEQ ID NO: 252069 - protein, 352 aa, unidentified
MKALKLSIGIDVAKDNIVCCMGSLSVEGEVSFSRPQTFPNNLEGFGQLTDWVKTETGTEVAFVMEATGVYYESLAYWLDGMGKTVSVLLPGKVKHYGRSLNIKTKTDGVDAQLLSRMGLERKLDLWHMPSKAMRTIKFLSREYKELKAKLVVSKNQLHAKMHSYGCPSSVTKRLKKEIGLLETQLLEIEAELRTTAMADTALYDRINKVTTLPGVGFMTAIGILAETNAFALVKNAKQLVSYAGLDIKLNQSGLKEGKTRISKQGNSFIRSTLYMPALCASKHNVELNSFYKRLIERKPAKKIGVTAVARKLLILIYILWKNNEEFNPDITKKNKQTGLRLPAQDEQVVLLK

SEQ ID NO: 252070 - protein, 351 aa, unidentified
MKGMAVAIVESRVTGGVDTHLDVHVAAALDHIGGLLGVESFPTTAAGYQDLLGWVAGFGPVAMIGVEGTGSYGAGLARYLQAAGIMVVEVDRSDRQDRRRQGKSDPLDAISAARAAQSGRARGEPKGRDGAIEAIRTLMVAKRSARGDRTATLNQMRALISTAPDDVRARFAHHSVAQLVTATAAMRPRPGDIVGYATRVTLRELGQRAAYLADQIDRLNELITPLVTAHAPGLVALHGVGPDTAAILLIAAGDHPERLRNEAAWAHMCATAPIPASSGKVVRHRLNPAGDRQANHALWRIVITRMSSEPRTRAYVQRRTTEGLSKMEITRCLKRYVARETYRHLRPPVAD

SEQ ID NO: 252071 - protein, 429 aa, unidentified
MNYNTQNAKIASITEKTLIVGIDVGSETHYARAFNWRNYEYSKKPFAFSNDEAGFASFKAWMNDMVEKHGMETIIPGMEPTGHYWLNLGAYLQEQGMKPVHVNPHHVKKSKELDDNNPSKNDRKDPKTIAGLVNEGRFSYPYIPTGIYAEIRNLSNLRIQTQEEITRIKNRIARWFSIYFPEIKDVYRNPDAVSGLMVIKQAPLPCDIKELGVNGVNKIWRDARLKGAGIKRATTLVTAAEHSIGNTEAPRSARKEIRNLLNDYEIYKNRMDELMQEIKETLSEIPYIDKLMEINGIGIKTVSCFIAEVGDIGRFDNPKQVQKLAGYAIVADSSGKHNGESRISHRGRKRLRYALYEAAISVIGKNKEFKEIHSYYRTREKNPLKKMQSVIAVACKLIRIFYTILTKGVDYDSQKMLNDIVRPEIQLAA

SEQ ID NO: 252072 - protein, 352 aa, unidentified
MTILADRVEVVIGVDTHKHSHTAAAVSSVGGILGERTVVSDQQGYEQLLQFAKEHAGRRAWAIEGTASYGAGLVGFLRQRAEQVLEVDRPHRPARRMGAKTDALDAVRAAREALAHDHHAEPRVGEQRAALAVRLAARRSAVDAYTTAQRQLQDLLVTAPEPVRAKLRAQSGRRLVAACARLRLPARADTHTTAVITTLRALAQRVQLLAAEAREHERAILTIVRTWRPDLLALFGIGPIGAAVILCAWSHPGRLRSEAAFAMVAGVAPIPASSGQTVRHRLNRFGDRQLNRVLHLVVVHRLRRDPTTRAYAARRAADGKSSAEIRRCLTRYVARQVFRQLESTPPVVLDNR

SEQ ID NO: 252073 - protein, 317 aa, unidentified
MTITKQQEIFVGIDVSKDCLDVAMSSEKQVAQVGNDRKGIARLVAKMRRINPCLIVVEATGGYEQAVVVALFNAGLPVARVSPQRVRQYARARGILAKTDRIDAGNLADFGEHIRPRLFVAKGKEQEHLSALLTRRKQVGEMLQAERNRLRTAYPELRTSLETIIASLKQELERLDKEISSFLENHEELKAQEQLLRSARSIGPVTAATLLAELPELGQLDRKQIAALVGVAPMNQDSGRKRGYRKTKGGRPDVRRTLYMATLTGVRYNPVLKVNYERLVGRGKEKKVAITACMRKFLTILNAMMRDQKTFQSPAAA

SEQ ID NO: 252074 - protein, 317 aa, unidentified
MAGYVGIDVGKAYLDAAAVGADGAPGPAGRFANDAGGVEGLVAFAAGLGPALVAIEATGAYHRAALAALWGAGLPVSLVDPARARAFRQTERGRNKTDREDAKLLARFARTYADRLRRYEPPSAGRARLRALVRYREGLVKVRTQLLGQLEAARCGGDAEVAELLEARLGEVDAWIGEADGRVGSALADAPEAGVLVGIRGVGPKTAAAVLAYLPEAVLGDAKAAACYAGVHPSIEASGQSYASRMSKRGCPELRRYLYMAAMAAIRGEGEMRAYYLRLVGRGKAKKAALGAVMHKLLRTMVGRLREYHAAHPPQPA

SEQ ID NO: 252075 - protein, 379 aa, unidentified
MRRVCGLDVHKDSVFMCILSENGEKVQEKYGVLTKELDTLRDVLVENNVGEVAMESTSIYWMPIWRILESDFDVKLVNPYFIKQLPGKKSDVKDAEWIAICLQKGLIKGSFVPDAAIQRLRQYNRRIFDLNKDISYKLSKLDMTLQRCNIRISNYVSKTDSKSYKKVVDKLAGGQTDPEELEKCIHGRTVNRFGKDVITASLTGVVNETDIDIMSQLKSEIDLSEKHKRECLMKMREICMENYPEQMENIKSIPGIKEQSATAIIAEIGVDMRMFLTAAALVSWCGLRPRNEESAGKIKSRKIVHGNKYLRRTLIECAWAAAKTQGCFYNKFSYTQVSIRKKNVLKVRVAVARKMLVTIWNILSKGEAYREILDCTQPQ

SEQ ID NO: 252076 - protein, 349 aa, unidentified
MGEVSTIGVDIAKSVFQVHGVDADGTVVIRRRVGRAKVLEFFSKLRPCLVGMEACATAHHWARELKKLGHDARLMPPTYVKAYLKRGKNDAADAAAICEAVTRPSMRFVPIKSVEQQSTLMLHRTRDLLIRQRTQLINALRAHLAELGLVAAKGREGLRQLVTVVTECGDERLPSNARFACQAIVGQLHAVQTQISGLDKRITQTHRANPDSKRLDAIPGFGVILSTAVVATMTDPKAFKTGREFAAWIGLVPRQNSTGGKDRLGSISKQGDRYLRRLLVVGAISIVRTARMWPGKYPWVIELLGRRPAKVVAVALANKMARVAWAVLAKGETYRAPTRLSNAAITVAA

SEQ ID NO: 252077 - protein, 343 aa, unidentified
MVHYVGLDVSLKQTSICVVNQLGSIVREGVVDSEPEAIAAFVRLNAPGAVRIGLETGPTATWLWTELKQLGLPVICIDARHAKAVLKMQINKSDRNDAAGIARIMQTGWFKEVRVKGLDNHSVRALLASRALLVKIKRDLENQIRGLLKNVGLVIGRAKFNVFTVRAEELIADRPELIAVVGPLLKARQAIEQQTDDLDRKVLKLARYDAQVRRFMTVPGVGPITALCFKATIDDPTRFKRSRSVGAYVGLTTRRHASGEVDWTGRISKCGDAMLRSYLFEAAGVLLTRVPKWSALKAWGIRLAKRSGLRKAKVAVARKLAVILHRMWIDGTEFNWSTKKAAA

SEQ ID NO: 252078 - protein, 353 aa, unidentified
MTERSKEPITYVGIDLAKRSFHLYGADAAGRQVLSRKLTRKQLGALVAQLPACTIAMEACGSAHYWARRFRTHGHEVRLIAPQFVKPYVKSNKNDAADAEAICEAVQRPKMRFVAVKSVEQQDIQALHRMRSLAVDQRNAQVNQIRGLLLEYGIEIAKGRAAVRGRLAEILEDADNGLSELFRAELHGLAEQLRHLDERVSHYDRRIGQLAQDHAQARTLMTIPGVGPLGATALLAAVGEDPRLFKHGRGLAAWLGLVPRQHSTGGKPQLLGISKRGDAYLRNLLIHGARAVLRHVEKKDDEVSRWARALKARRHGNVAAVALANKMARIAYAVLSTGQPYNPQAAAISASAA

SEQ ID NO: 252079 - protein, 343 aa, unidentified
MEHFAGLDVSVKETSVCIVDDTGKITREVKVASEPDALLAVLTNPLYHFKRIGLEAGPLSQWLFSALAEAGFPVICVETRHMRAALTAQINKTDRNDARGIAQMMRAGLYRPVHVKTLRSQKLRMLLTHRKLLQSKAIAIENDLRATLRNFGLKVGVVGTVKFEARIRELVENVSDLVVLVEPLLLVRRVLREQIGILHRRLLVIVRDDDVCRRLMTVPGVGPVVALTYRATVDVPARFRNSKSVGAVFGLTCSRYQSGQVDRNGRISRCGDEMMRAMLYEAAHIMLVRSTKWSWLKAWAMQIAKRRGIKKAIVALARRLAVIMHRIWVDGTEFRWTREAAAA

SEQ ID NO: 252080 - protein, 320 aa, unidentified
MGRQSNYAGIDVSQATLDMAEHATGQQWSFGNDDAGIAETVAVLANLKPALVVLEATGGIEVPVVTELVAANLPVVVVNPRQVRDFAKATGRLAKTDALDAQVIAHFAAAVRPELRPLPDTQAQEFSAIMARRRQLQDMLTMEKNRLRAARRLVRGRIKAHIGWLENELTHTNADLERSIRESPVWREKDDLLRSVPGIGPVTSCTLIAGLPELGMLGRKQIATLVGVAPLNRDSGTLRGKRTIWGGRAQVRAVLYMAALASTRHNPVIKSLYRRLCAAGKVKKVALVACMHKLLLILNSMVKHNIRWHYTTAELIGPCS

SEQ ID NO: 252081 - protein, 420 aa, unidentified
MSFKILKNNCCGLDVHKTWIYACIGITDSFKRTEYKQARFSSFTKGLQELCLWLAKYNCIDVCMESTGKYWIPVFNVLEKNNIFVTLSHPKYTKPQKGNKTDRKDAKWICDLYMCGMVKPSFIPPADIRQLRDLVRYRFKLTCMITGEKNRAHNCLTVSNLKLDDVFSDIFGKSSRSITEQILQHPGEVFDVAPFVDSRCKTPIEEIQAAVDGAISHEQAVKLRQCLKHIDELEMHKAEIEREIFRLSQKYESVLDLIRTIPGFDKNPLTAIQVLSEIGADMSVFPTAKNLVSWAGCCPRNDQSSRKIKSTRISRAGSYFKPVLVQIANALIKSKKHPEFTTRYRRIKARRGHKKAIIAICRMILTAIWHILTDLKPYTPEGFLESRPVNEAKVLTASQALNLMRQRGYIIKDDMSPVMN

SEQ ID NO: 252082 - protein, 430 aa, unidentified
MMAAGIERCGGIDVGKKFLAVGILVGPLEGEPRIETRRFGTTVAEGKRLGDWLKHENITHVVMESTGSYWKPVFNVWEDAVKEYLANPQDGKNRKGQKTDHKDGWWWAHLRRHARIQPSFNPPRVIGELRDRTRRRRRLIHNGSSEKNRVQKILADAHGKLGNVWADVFGVSGPLMWEALRKGKAGPEEIAQLAQGRARKPIPEIVAALEEHPMSAPHRQMIRYRVEHMQLIEQQIIQLDKDIAEKIGESGLQAQWEHLPSVPGVQAISAATILAETGTEMQPFGDEQHCSSWAGVCPGNHGSAGKNQSSHTTGGDPWLRSALTECAWAAANTKACLRKEKFGRIATQCGGKKPPAVVAVAHPLAHLIYEVLAPGQPDHDQRRPALDPQQKERIIRHHVRRLGKLGVAVYRPRPAPNHPHKRAASNSVPE

SEQ ID NO: 252083 - protein, 387 aa, unidentified
MAQVNDLSRSLTAFDPISTLVVVVEMSKASWLVSGAVPGVERQPLKKLEPDATALLRLIERWRNEAVRAGRPISRIALAYEAGRDGFWLARWLIARGIEAHVIHSASVAVSRESKRAKTDRLDAAMLMRVFLGWLRGERGHCGMVAIPTMEEEDARRPSRERECLVNERSRITNRMKSALARLGVRGFKPHLRKAPERLAGLRTAEGTGLPTNIIEEFRRDMARLALVREQISSIEKTRAERLERAPDTGPHAMVRLLARVIGIGIETADMLVREILSRKLRDRRAVARYAGLTGSPDESGLKRREKGLAKAGNARVRRGLIQLAWRFLVFQKDSALARWYRTRTEGPSGARKTTMIVALARKLLIALWRLVTTGEVPDGVKLRPAL

SEQ ID NO: 252084 - protein, 387 aa, unidentified
MSSCGLGVLVLARQYDFRSEVGPTSGTIAGWPDSGQSRMLDHPASTSTGGQPCQPTTLFVSLDVHKDSIAVAHAEAHRDDPPHYVGSIGTRQADIDKLVRRLHAKTSKLVFAYEAGPCGYVLHRYLTGKGLDCWVVAPSLIPKRPGDKVKTDRRDAVEIARLLRSGDLTHVYVPSVEDEAVRDLCRARDAALRTLKAAKLRLKSFLLRLGLHYAGRADWNEAHRRYLAKVVCPTAPQQIVFQESVHAVDEQVERLRRVEKELLDVIPKWRLYPIVEAFQALRGVQWTVATIVASELGDMTRFDNPRQLAAFVGLIPSEYSSGEKRRQGGITKTGNGRARRALIEAAWAYRHNPKISVHIQKRIESLPKPIQDIGWKAQLRLCKRFRR

SEQ ID NO: 252085 - protein, 304 aa, unidentified
MKKYIGCDMHKKYSVFVTMDEHGHLSEPRKVANDSLELDSYLKTVEEATPVAVEASGSWYWFVDRLEQAGLDVRLVNPLEAKKRMAGRHKTDPRDAAGLAMLLRNGTLPEVWIPPAELRDLRGLLRTRLALRRHTTILKNRVHGAIRRYGQWEPGEAKNLFAGKGRVQLSVYVGALPPETRIATRHEWQLIDEIEQHIQELEKRIRLGLGQLGYVRLLRSLPGVGEILSAAIYLEIGEVHRFGCAAQLASYAGLTPTVHSSGGKTRMGPTSSIANHYLKWAFVEAANCIVMQKHRYAGRHVVQL

SEQ ID NO: 252086 - protein, 461 aa, unidentified
MQERRKDETSQSSRRQLHGLPVIRRNVAGIDLGSERHWVCAPTLDGGGREIADFGATTPELSRMVEWLKARQVESVAMESTGVYWIAPHEVLEAQGLEVLLVDTRQLARVPGRDKKTDPTDCEWIQRLHSCGLLRGSFRPAEAICMLRTLVRDKASLVAESGDWVRRMQKSLDQMNVRVHRAVSDVHGATGMAILRAIAEGERDAQKLAKLRDPHCHKSEEEIAEQLSGHWREDHLFSLHQALKMYDAIQERIAAYEKEILRKLGEMEGEEHRGQTAPPIQNINKARAIQKRGQEPKRQALFRMSGVDITQIDAVGVETVEVVVSEYGPDLSRFPTEKHFVSHATLAPHVAKSGGKPVKRKKRNSASTRVAAALRMAALSMRHSQTALGAYYRSIAKRIGGDIAVFATARKLATLIYRLLRWGQPYVDEGAEAYENRHRQQRVKSLVAKAKELGYQLMATT

SEQ ID NO: 252087 - protein, 405 aa, unidentified
MKHYCGIDWASDHHDVSIVNESGKEVNKIRIDDDLNGYYTLSNTLKSFEVEIPIAIEAKDNLLINFLIAEGYEVYSINPKSAERYKDRYNVAGNKTDEIDSFALADMLRTDMHKYRPLEYSSEEIRKLKILCGEYSKLMKDSNMLESQLYDVLSKYYPIILTLFSSYNCKTLYKLILKYSTYEELRKVSYEDLEKFLKENRYRKAHHIKKVYNKIQGNDYYALAIFDETFSHTARALVKMLLILEDEIKEIKNKMTKITTTHTLGAIFYSLPGSGEILAPKLLSIMGDNKKVYTSSSEIQAYSGVAPVIKRSGKSSRVKFRYACNKEYRNTLTYFAFCSLSWSPWARGYYDKARQKGKRHYESLRLLAYKWTRIIFKLWQTGELYSEEYHTKNLERFSKIILKIA

SEQ ID NO: 252088 - protein, 426 aa, unidentified
MSYMLAGIDVHKKKLAVVVADVEVEDEYKFERRWFGSNPEQLRLLSEWLSEQQVEEIVMESTAQYWKPVWGALERYWRPTRQKREGAAKMSGTLHLAQALSNRGRRGRKRDFVDAERLVKRLVSQELVLSFVPDVEQRLWRTVTRTKYQLTRAKVRLHNQLEALLEEAHIKLSSLVSDLLGLSARRMLQALADGETDPAALAALADRRLRTTSAQLCDALGACSELHPVYRQLVKMALEELQFIEQQMARLDQEIAGLLRQHQEAVERLAQVPGLGVDSAQQIIAEVGAKAATFATSKKLSSWVGACPGEEESAEVNYSARSPKGNRHMRRILNQAANAAVKHKGSIFEIVYRRLVPRLGHNQSIGAIGNRLCRLIWLILHQGVRYDERGPAVSRNSRQRRTAKMIRELRLLGYRIEPTVQLTNPA

SEQ ID NO: 252089 - protein, 343 aa, unidentified
MQIHSVGIDLGKTTFHLVALGDHGKVLLKKKFTQRQLITFTANLQSSLVGMEACSGAHFLGRALRAQGHEVKLIPAQFVRPFVKSNKNNFIDAEAIAEAVTRENMRFVPIKTDDQLDLQALHRVRERLMARRTSVINQIRAFLLERGIVFAKSPIRLREAIPDVLENSNENLTPRMRNLVAMLWSEWKYLELQIVEMNDEVERIASSDDACRRLRQIPGIGPLVATAIVASIGNGAAFHKGREFAAWMGLLPKQHSTGGKARLSGISKRGNRYLRKILVHGARAVVLRSKRDRIAMGAWITSLEMRAPRNVLIVAMANKLARIAWAVLSTGQDYRAVPDTVAA

SEQ ID NO: 252090 - protein, 340 aa, unidentified
MGEQYVGIDLHRRRSVIVRMTPQGEVLETIRIDNDPVALSLELAKAGPDPEVVLEATYGWYWAADLLQACGARVHLAHPLGVKMFGYQRVKTDARDSTNLAELLRMHRLPEAWLAPPLVRELRELVRYRAKLVALRSGLKAQVHAVLAKEGVRVPMSDLFGVGGTRLLDQLRLARAYALRIASLRSLITAYDQEIAMLGREISTALAGDVGYLAIQTIPGVGPVLAAVFVAEIGDVGRFAGAPPLCSWAGLTPRHRESDTTVRRGPITKQGPRLVRWAAVEAVQRLPGGSKQATDFHRIADRRGIGIGRVAAARKLLTLVYYGLRDGQVRCLASAPAEAA

SEQ ID NO: 252091 - protein, 405 aa, unidentified
MNSVGIDVSKDKSMIAVLRPFGEVVSTPFEIRHTASELRDLASSLKSLDGETRVIMEHTGRYYEPVAQTLCSAGIFISAVNPLLIKSYGNNSIRKIKTDKADALKIARYGLDNWSELREHTVMEKHREQLKILNRQFNLYTKNKTALKNNLIALLDQTYPGLKKFFDSPVRDDGSQKWVDFAADFWHVDCVRNLTEKAFTKLYQKWCKRHAYNFSTTKATTVYENSKELVPTLPKNDYTKILVCEAVNQLNAISRTVETLRAEMNRMAQQLPEYPIVMGLFGVGESLGPQLMAEIGDVLRFAHRGALTAFAGVDPSPNQSGDYERKSNPSSKRGSPYLRRSLFLVMTVLIQNAPDGDPVYRFLDKKRSEGKPYYVYMTAGANKFLRIYYGRVKEYLNSRNDTAGA

SEQ ID NO: 252092 - protein, 403 aa, unidentified
MNNVAGIDVSKGKSMVSVLRPFGEVVAKPFSIGHTGSELKELADYLKSLDGETRVVMEHTGRYYEPVARFLHDEGVFVSAVNPKLIKDYGNNTLRKVKTDKADSRKIARYGIDNWAELRQHTPMDTIRMQLKTLNRQQSLYTKTKTMMKNNLIALLDQTYPGVNALFDSPVREDGSQKWVDFATTFWHVDCVRNMSLTAFAERYRKWCKRHGYNFSQSKAVEVHAGAQDLIAMLPRDALTKTMVRQAIDALNAISASMERLKAEMQALAAQLPEYPVVMAMHGVGDSLGPQLMAELGDVTRFTHRNAITAFAGVDPGADQSGTHEAKSTRVSKSGAPELRRALFLVMDCLLKTQPQDDPVHRFMDKKRAEGKPYLVYMTAGANKFLRIYYGRVKEYLASLEGN

SEQ ID NO: 252093 - protein, 338 aa, unidentified
MTIVMGLDQHRAQITAEWLDTSTGEIARKRIAPADRTGVRAFAARFRGQELEVALEATTGWRFVVEEFQTIGARVRLAEPAETAARRGTKKRAKSDRADARHLRELVMVGRLPESWIPPEHLLELRARVRLRHTLVDQRREWQQRIQATLYHHGVPPRSWLLGAESRAWLTSLELPPAAREQITIALALIDAHDAQLGPLDQELREYAKRQPGGRALMRHYGIGPLTSITILAELGDARRFSSSRQAVRYSGLDITVHQSDARRAPGRLSRQGPPALRWALFEAAQCARRPGSPDHDYYLQTAARLGGNRACLAVARKLLKRSYHTLRELGEEALQPA

SEQ ID NO: 252094 - protein, 449 aa, unidentified
MNRPQVIDDEEHERVHERAAAIDVAKDSGMVCTRTPHPSRPGAWRSTVWTVKARMGAVRALGRQLKADGIEIVTLESTSDYWRIWFFVLEACGLAVQLVHAAQAKNLPGRPKTDKLDAMWLARLTEMGLLRASFVPPKAIRDLRDYTRARTRLVQERTRCWQRLEKLLESALVKVSSVASKLTTVSAQDMIKAMIAGQRDPRQLAALARGRMKAKHDDLVEALDGMFDDHHGELAQLLLDQITSLDAKIAQLGARAAELTAAMPAAWGIDADGTTGPAAGTTPDAPVLSAVARLAQIPGISPDLGRSIIAETGLDMSRFPTAAHLVSWAGLCPSARQSGPRARAGTKGQGDTWLRGSPGQAAIGAARTATFLGERYARIARRRGKAKAQVAVARSILVIIWHLLADPAARYTDLGYGYYQARTDTDRKLRNHIRQIQALGFAVTLTKAA

SEQ ID NO: 252095 - protein, 313 aa, unidentified
MDDAVIGIDVSKAQLDVAVWPSGQRSTVSNDDAGVATLMAQWPTPPTLVVLEASGGYEHTVVAGLALQGWPVVVANPRQVREFARARGRLAKTDALDAAALADFGATLRPTPRPLPDAATQDLVALVTRRRQLLEMLMAERQRLALARPAVRRSLQAHIRWLERRVRDADTDLRQFLRASPVWRDRDNLLQSVPGVGPTVACTLLAHVPELGTLSRRRIAALVGVAPFNDDSGGRRGQRHITGGRAPARAALYMATLVAVRHHPELRAFYQRLLSAGKKKKVALIAAMRKLLTLLNAILKHRRAWAPATPVAA

SEQ ID NO: 252096 - protein, 364 aa, unidentified
MQCISNNTELSSLEETRCQFNGSKADIKLGIDVHQHFYMVVMQMGGSNPKPGQRFAKEAFLHWAAKLKSQGAEVHAVYEACGFGFGLQRQLSALGIQCHVVCPQKLDEHNRRVKTDGLDAKALCLKLDRFVQGNRSALALVRVPTAKEEQLRAIHRQREQLVKARKRLEAQGRSLMVNHGMEPVTNWWKRRPFAVLQVPEWIKELLSNSQPILVALQEKICELTVQLQVAAGPEQPRGLGALTSVVIDREIGNWTRFSNRRQVGSYTGLCPGEYSSGNTRLQSCVTKHGNPRLRAALVELAWRLVRFQPNYKPVIKWRQTLCRGALATGAARKKAIVAVARQLAVDLWRIRTGRLSAEKLGLSN

SEQ ID NO: 252097 - protein, 339 aa, unidentified
MKKTDRPTYLGIDVSKESLDCCLYNGTEHKTRSFNSNKLSTVQKIITHFKISPDSCRVVLEATGVYHSAAFVGFVSQGFDVAVENPLRIHSFATMKNLLRTKTDPVDARTIAEYGFTNEPVSAKLKEAYQCEVQAKLKLIGFFKKHITQNRNYLEALNNNSFECNAPSLIAHVKNEINHLNVAIKEINRDVEKILTKHCPELYKQYKSIPGIGPTVAGAIICFYGDFSGFSNSKKAAAFAGLCPKVCKSGSSVDKKGSISKKGNSMLRTLFYMAALSASRCNDACQETYLRLRQAGKPAKVALIAVANKLLRQARALARKGESFTENYKEISLCRAKTT

SEQ ID NO: 252098 - protein, 339 aa, unidentified
MPTYNLGLDVHKVRTQYCLMDPAGKILGEGNVPTEAVAGLVPGADCAVVLEATGSWHAAYDALCATGAQVKLAHPSHVKAIASARVKTDKIDARILAHLLRTDLVPEAWAPPARTRELRDLVRLRWRFVAQRTTAKNRITNLLARRCLRYEGTDLFGRRGRAWLAALELDPHARALIELLLVSIEEADAHVAALTLRLHELLDGDDELRLLQTIPGVGFLTAATLIAELGDAHRFRTAGQVSAYFGLVPRVRASADVAHYGRITRAGSPHARRALVEAAHVAVRLPGPVRDRYASLVRRRGKKVALVAAARVLLELSWTLLSRGEVFRADGMGEPVQMR

SEQ ID NO: 252099 - protein, 344 aa, unidentified
MTYYAALDVSLRSVNICVIDEQGEICAETKLASEVEDIVAYLNDLDLNIVSVGLEAGTLTQYLIYGLQAAGYEAVCMEARQVKAALSAMRNKTDKKDARGIAQILRSGWYSRVHVKSIASHQVRALLSSRKAVLNKCIDLEQEVRGLFKVFGIKLPPKLGHGAFDKTVRPTIEADPALAHALLPLLEARLALYRSFRELDNRTRKLAMKDRVCQRLMSAPGVGYVTALTFKAAVDDPTRFKKSRTVAAHFGLTPRRFQSGEIDNPGRISRAGDANVRCTLYTAANAMMTRSSKWSSLKVWGMQLAKQRGHRRAVIAVARKLAVILHRMWIDDTQFRWGTEVARS

SEQ ID NO: 252100 - protein, 415 aa, unidentified
MLFIGDDWAEGHHDVVAQDDAGKTLARRRLPEGADGIARFHEMVASCLGEDAEPDPARVIVVIETDRGPWVKALAAAGYRVYPANPRQAARHKETVANSGKKDDFFDAGCLADMGRTRLHQMRELAADSDVAEAVKIAARAHQKLVWERTRHLLRMRSALREYFPAALEAYADLTLAGKDALELLAKAPDPESAARLTVTQITAALKRAGRRGDLAQRARDIQAALRAPHLDQPDVIAEAYAASVQAAAAVITALNEQVKIMEAKVSGLFRRHPDAGLHLSQPGIGDITGARILGEFGDAPGRYASAKARKNYAGTSPLTIQSGKKKTVHARYIRNRHLIDALHAQALSALSVSPGARAFYDDLRARETGHDDAMRRVASRLVGILHGCLKTGREYDEATAWSHRAETPEAAEAA

SEQ ID NO: 252101 - protein, 328 aa, unidentified
MFEQYIGIDLHQAFFQACAVSVTGDRVWEERFPRTDVGIAALVARCTRRTAMAVEASTPTWHFADAVSDRVGDLRIVDPVKTKLKAGYAAKTDRLDARRLADALRRDSVVGIYVPSVAIRELRELCRFRVTVVQIRTAVIQRLRAVLLRQGLVDRRRLARTPSDAWLETLTLPPRAAASVAGLRRLLTAVRAEAMIADAEVQSAAAADPIATTLQQIPGIGPVLSLMIRAEIGDIRRFPTGGHIASYAGVVPRVAASAGHVRHGRITRRGSPWLRWALIEAAMHGTKRTDRVGRWGRRLALRKGALKARVALARTLCDEVFRHWSAIG

SEQ ID NO: 252102 - protein, 416 aa, unidentified
MDVLRERSAGLDVHRSVIVACVLLSAAGERVSKEVKSFAATASGLAALTAWLSGFGVTHVGMEGTGVYWMPIYAALEAVSGLTPIVANARHIKAVPGRKTDVIDAEWIARLIRYGLVRASFVPPQPIRHLRDLTRYRRTLVEAQASERRRLIKLLEASDMKLAEVLSDVFGVTGRAILRALIAGESTPAQMAALAKGAARKKIAPLTVALGGQLAEHQRFMLRVQLHRIETTEQQVAQLDAQIQARLLPYRAQMELLVSIPGIDRVAAAAILAEIGPDMTAFASAGHLAAWAGACPGNNESAGKKKPANARCGNHHLLTILCNAAVSASRTKGSYFKAKYHSLKSRIGGGKAVLAIGHKLLTCIWHMLTNGEFYRDLGETYLDRRNQQQTLKRYARKLDALGFAIVPKPEAAAMAA

SEQ ID NO: 252103 - protein, 498 aa, unidentified
MKRSIYPERSQEASSILFDGDSRKTLVVPLDFAKREHAALVCLGTGEALSRPLRVFNTMEGVRFLVGKIERERNRLQIDRGRVLVGGEDPAAYAINFLEALRAERYMLLRVGAKEAKKYRSSTRASSDQIDMTGIAEAIIHHRARNLERHDGLWHKMRCASRARGRLVCDETALKNRIHRLVETLFPGFLDAARPPVAPFSDACLAILEKDFTIHKFRRTREATLAQRLASLGVHKPSEAATGLKALAENAIAPVEGEVAEYQARSLASKVESMRALRKSLWFEENEMARCLVQTPGFWLTTIPGVGVTLAGNVCAELGPTERWPDADHMASYAGIVSRQKQTGGQDSPPRKGGLPPDTNRRLRNYLLQVARHCGTTADPAGRLQWDLAEHVLMKKHKRIEAKGGRSRLATAKKFLDVARSLVRAGAYYMPERWLGSGFERVHEEEYHGYLAVMNDTLERKWREYDLAGIEPEVDYLVQWRILYECVAEHRSHRTRGS

SEQ ID NO: 252104 - protein, 402 aa, unidentified
MSLKKVLWWGRFPTEAGRCLRSVATPLRRAVDGEVNPEPADLRRRVRFSVRRAGPSVTARTVACAVLRARRQGRAYMNDRQVVYVGIDVSKDSLSVDAGALFKGDVPNTPAGIRSLVRKIRKRVGDGCVPHFCFESTGPYSESLFIECCGAGAAASVLNPVKVRRYAEAMSESAKTDPIDARVIRLFSEARKPDPTPPPSASEIALRKLVLARDALTKCVVQLSGTLEGASGDAGSVLRSSVVQLRGKIKKLDRLIAEALKSDARLAGLADALTGIAGVGVLSAAKIVALVPELGTLGRRRSAAIAGLAPFTRDSGRYKGKTFISGGRAEVRRALFMPATVAIKHNPVLKAAYQNLRKSGKAYKVAITAIMRRLFAHMDAVAAKWLRATAAAASSAASTALP

SEQ ID NO: 252105 - protein, 335 aa, unidentified
MGRAGVPPIAWIYAGDSIMSASDLFIGIDVSKAFLDVAMRPTGESERVANEADKLSALASALALRHPTLIVLEATGGFEAAAVAELAAKQLAVVVVNPRQVRDFARSLGKLAKTDALDAAVLAHFAQTVRPAVRPLPDAETQQLEAWLVRRRQLIEMITAERNRLLACRSAAVRVGIQASIDWLKKQLAKIDGDLDRAVRKSAVWREKEDLLRSVPGVGRIAATTLIAELPELGTLDRKPIAALVGVAPFNRDSGQWRGTRSIRGGRSSVRAALYRAALVASRRNPVLQKFYQRLVAGGKAKKLALVACMRKLLTILNSMVKANTRWQPAAAQSA

SEQ ID NO: 252106 - protein, 409 aa, unidentified
MEVLHERVAGLDVHRDTVAACVRLPGRGQPEVHKHRFPTTTAGVAQLGAWLTGWAVTVVSMEATGVYWKPVYYGLEDRFELWLCNAQHVKNVPGRKTDMSDAEWLADVVAHGMVRRSFVPPPEIRQLRELTRYRRTQIEARIREFERLDKLLQDASIKVSSVASSVKTQSVRAMVEALIDGHRDPEMLAGLAKGKMRSKIDALAQALAGNFDAHHAVAARQILDHVDFLTASITTLDTEIAARLRPHQAVVDLLGDIPGLGQRSIEVIVAETGADMTRFPSAAQLASWAGVCPANHESAGRRRHGGTPPGNRWLVTTLVEAARAAARTKHSYFRAQYRQIARRRGPNKAAVAVAHSLLVTIWHILTTGERYQDLGEDYFRARIDPDRQRRRLVHQLNALGYTVTLQTAS

SEQ ID NO: 252107 - protein, 320 aa, unidentified
MMYIGIDVSKNSFVAAYPTKSGYTTKSIPNTTSGVRKFISSLPKESHCVMEATGNYSMLLLYLLQQANITVSMENPQKIKHFARAMLSTTKTDEIDAKLIALYGEKMNPSPYKIPSESIILLKQKRTVLRQLKKQLTATLNLQHALSALPKQDPTSKVTVEKMISFLRKQISKMEEEITNLSNKEFNRQMMLLTSIKGISNTIASALITATGGFTYFSSAKQISRFLGLCPTYQQSGTSINVKGHINRNGDTYLRSQLYIAACASLRCNTACKETYERLRAKGKSGKGAIIAIANKLIRQAFAVVTNNRPYIDGYVSSFA

SEQ ID NO: 252108 - protein, 404 aa, unidentified
MWYAGIDWADQHHDVLVIDEKGRQVGSLRIDHSPQGFAKLNTFFEQIVGDAPKEQMACIIETTHGLLIAHLLEAGWPVYPVNPRTVDRRRAASGAKTDTIDAYLLAKTGRADLTDLHRLTPDSETMTELKLLTRDQDALIQMQTRLVNQLTACLKAYYPVALELFGKLQQKSTLQFLQAYPTPQEAMAASVEQIKVVLKHGRYPHPTAGAATIVEQLHQPHLQADAVITRAKSRLMLALVSQLLPLIEQIAQYDKEIETLFLTHPDHELFESLPRAGQHLAPRLLAEIGDDRLRYQDASSLQALGGTSPVLFQSGMYAKAHRRLGCIKPLRNVLHQFAWQTTLSEPWARDYYQRKRAEGKSHTVAVRALANVWVRIIFAMWQHYQCYQAATFVQAQHQHARRAA

SEQ ID NO: 252109 - protein, 332 aa, unidentified
MKNIIIGADVSKRTLDCVLYDADKQKMLGINHLKITNDQQGCDELMKWIKQKQISKKEVLFCMEYTGDYSYGFAELLADKSVSFCQIQPMKIKRATATLRGKNDKVDAVRIANYAYRYRDELVPSMLKDKAILRIRDLLNDRKLAVKCRRVFKTIVTEYKKQPENGRYQRAKQNVEMFNRQIDEMEAELLEIVNGDECLSKNYMLLTSIPGISLVNALNFIVVTCNFTSFKTARQLAAYCGIAPYEYTSGTSVNKGTHVSKIGNKDIKADLTMAARAAIVWDSDLRLYYARKRAEGKSFGCVLNAVKFKLVCRMFAVIKRGSEYVDTKKFAS

SEQ ID NO: 252110 - protein, 439 aa, unidentified
MQHINLNAAGIDVGSDRHLVAVPEGRDTVSVREFGTFTVDLQAIADWLEQCGVTTVAMESTGVYWIPLYEILEQRGFEVYLVDARRVKNVSGRKSDVLDCQWVQELHTYGLLAKAFRPAEEVCVLRGYLRQKEMLVQTAAMHIQHMQKALQQMNLLLHNVVSDITGATGMKILKAIIAGERNPQVLAKERDPRCRNSTETIAKSLVGNYRPEHLFALRQAVELYEIYQTKIADCEAAIVAYLEQPDHRTEDEPPSPPKPISARDRLRGGTDVRAKLYKMTAVDLFAIPGLAADTLLTLASEVGLDISPWQSEKHFTSWLALCPGTRRSGRRVLSRKTRPSANRAAQAFRMAAATQARAKTALGAFYRRIRARSGGREAITATAHKIARIFYSMLKNRTEYVEVGQAAYEQKFKERRLRSLKHQATALGYQLTPIATGSF

SEQ ID NO: 252111 - protein, 348 aa, unidentified
MLIIGCDFHPGFQQIAFVDTESGELGERRLTHREEAEEFYETLKERKVRVGMEASGHARWFERLLKGLQFELWIGDAAEIRAKRVRKQKTDRQDAQLLLRLMVEDRFPRIWVADAANRDLRQLLWHRHRLVQMRTRIMNQLHVVALNEGVRRKKALWRPAGRNELESLNLAPWARRRRQDLLDLLDQLTPKIQESTRALEEEAAKRPVARRLMTHPGVGVLTALAFELVIGTPDRFHCGKQIASYVGLVPSEESSGDRRRLGHISKQGNSLLRFLLVEAAQVTVRSQVRWRSKFFHLAMRRGRKIAKVAMARKLAVHLYWMWRKGWDYGQFEKLGSHAGEPGNRHGVQ

SEQ ID NO: 252112 - protein, 340 aa, unidentified
MNLTTLGIDLAKTSFSLVGMDQQGKVVLRNTLSRAKLLPFIAQCPTCLIGMEACSGAHYWAREFTKLGHKVGIIASKFIAPFRKGGKNDNNDAEAICEAVGRANIWFVPIKTAEQQAQLCVHRVRQGLVSERTALINQLRGLLSEFGIVMPKGRYPAQREIPLILEDANNGLPMLARQMISNLWDRIKIANEQVLFYDRELHKQAHHHPVAKRLLTIPGVGEQVASAVVASVPDPSLFKDSRQFAAWFGLVPKQHTTGGNVRLGRITKQGDRYLRMCLVHGARSVLANLKDKQDKISCWARELIARRGYLRAVVAMAARNARLIWTLMVKQEDYKVIAAN

SEQ ID NO: 252113 - protein, 349 aa, unidentified
MKNAITIGVDLGDKSHIAVVFDAHGNELEVAKVSNTRMGIAKFFKRYPDSTVAIEAGTHSPWISRELEQLGCKVYVGNPRKLRFIWDSNDKSDERDARMLGMVCRFDPKLLWPLRHRSSQAHADLARVKSRDILVHSRTQLINHARAMVKTAGERLPSCSSVSFAKRCAGHVPEPLWPALEAIFKAIDHINEQIRDLDKKIDQLCQEQYPETQRLQQVPGVGPITALSFILSIEDPKRFTKSRQLGPFLGLTPRRDQSGKTDKQLHITKAGNRYLRRLLVGSSQYILGPFGPDSALRRHGLSIAARGGKNGKRRATVAVARKLAVLLHRLWVSEKDYEPFSNKGYKKAA

SEQ ID NO: 252114 - protein, 356 aa, unidentified
MNSTKYIGMDVHKEATTIAVMNAAGKLVMESIVETKAATIVQFLEGLRGELYVTFEEGTWAAWLYDLLKPHVTKVVVCNPRKNALLKAGNKSDRIDARKLAELLRAGLLSPVYHGETGLRTLKELSRSYLAISKDLTRTMNRIKALYRSWSIPCGGISVYAPRHRAEWLSKITEPGVRRRAELFYQQLDGLQKLRQQARCDLLAESRKHGAAKLLERIPYIGPIRSALLIALLQTPHRFRTKRQLWAYSGLALETHSSGEYHYVQGQLQRSKRSIALRGLNQNHNHDLKSIFKGAATKASSTKGPFHDFYTGLVAKGMKPTMARLTLARKIATITLLVWKKGVCFDAQQLKRQVSV

SEQ ID NO: 252115 - protein, 371 aa, unidentified
MKSDSTIKFIGLDVHSKTISVAIADEGRKGEVRHYGTIENTFEAIDKVIKSLTATGIELRFIYEAGPCGFALYRYLSGNGFTCIVTSPAMIPRPKNVRIKNDRRDALTLARLYRAGELTGIYVPDPEDEAIRDLGRARDDARMAERKAKQRLNSFLIRNNLIYPGKTKWNRTYFNWLGSVGMKYPAQKVALQEYIEAVNECTGRVARLREQIGLAVEEWRMAPMVKALQALRGVSLICATITVAELGDLSRFQNPKELMAYLGLVPSEHSSGESIRRGGITKTGNGHARRVLVEGAWTYKHHARVTYPLIKRQRELPKSICQISWKAQLRLCARYRKMVARKKPNNVVVIAIARELAAFMWAIAQEVRAAA

SEQ ID NO: 252116 - protein, 425 aa, unidentified
MKTYLLRDAHPVEPQSARRTPRTRPAATPAATASEVRGRAAHPPNGPVLFIGLDVHTDSIAVSLAPSDGSEVRRYGLIGGTHDDVLKLARKLQAAHPGVTLKFCYEAGPHGYPLGRCLQAHGYECILVAPSKIPRPPGDRVKTNRRDADQLARLYRAGELTAIHVPDPQDEAVRDLIRARYQVLKQQHRARQQLKMFLLRHNFRYAGTKAWTQKHLNYLATVKLPFPEQQFLFQEMVNVISEAGERLERYDAQIPRAVAGWRWEPVVKALMSLRGMAVLTAATLVAELGDLKRFATARQLMGYLGLVPSEDSTGDKRQQGGITKMGNGIARRALIEAAWNYRAPARLSRELLKRQAGLSKEVKDLAWAAQTRLHHRYQHLTKVKHKKSTVAAAALGRELSGFVWALGQLVRPHARKVEAAPPVAA

SEQ ID NO: 252117 - protein, 397 aa, unidentified
MYIVGIDIAKRKHEAAVIDGDGAVIIKPFSFTNNCSGYNRLLAMLTKAKLPLDEVSFAMEATGHYWLALFTRLQKEGFRVQVINPVQTNSIRSFYIRQAKTDPRDALLIAEVIRFGHFSESTLHPENIYELRELCRGRHAIVSMQADVKRKVVALLDQVFPEYETAFTNLFGDTSMAILQTCPTPKELSEMPLEELCHLIEVSSRKRFRMVKAQELQELARNSFGFAMAGDVFSTMIRLYAKHLDFLKQQVQEMDRKIAEIMDTLDTPITTITGIGPTLGAYILSEIGDISRFSSAAKLAAYAGIDPTMRQSGEYNGVRNRMSKRGSPYLRHAIWLAASSAVLHDPALKLYFQKKRDEGKPYMASVGHACRKMVSIIYAVMRDNKAYTPYIPNEISA

SEQ ID NO: 252118 - protein, 347 aa, unidentified
MRIVSHSCAVYGVDLGKTTFHIAGADQHGRPTLRIKLRRDALLQFFATASPALVGMEACPGSHWLARKLIAFGHDVKLIPAQFVKPYLKSNKNDTLDAEAIAEAVTRPTMRFVPVKRHEQLDMQALHRVRAQFVHQRKALVSQFRCFLLEYGIAIHTGIGMFRRDATRILADDSNDLTPTMRQLLMDLWSDFLRIDERVTALSGQIEVSAKHDDVVQRLTTIPGIGPLGASALCAAIGNGKQFRSGRDLAAWIGLVPRQHTTGGKPTLLGISKRGNTYLRRLLVLGAQSCLMHLDRSRDRLGRWLDTLESRMHHNKVVIALANKLARVAWVVLTRPGALYEKMDPRF

SEQ ID NO: 252119 - protein, 302 aa, unidentified
MEHFIGCDAHKKFSVFASMNEKGEYGRTIQVRHDLEMFREFLKELPAGSKIALETSGCYYWMVDEMERAGHLPQLAHALTAKRRMEGRHKTNDRDARGLAMLLRNGTLPVVWIPPAELRDQREMLRWRMYLSRMRTQVKNRIHGVLQRYNVDIAVSDLFGDGGRVKLLARLGELPPHNQESVLGQLKTIDSVETQIGECERILGEILYPSVERDLLDSLPCVGKILSAVMALEIGDVRRFSGPDRLVSYAGVVPVARESADKKRKDKCPRDCNVYLKFKWQVLSSTHEYVPPQLETERPFCR

SEQ ID NO: 252120 - protein, 330 aa, unidentified
MQFVGIDVSKKHLHLSWLRDPERGLARSKAVNNTPAGHAQALAWAMQHSGAAPAELCFVLEATGVYHEAVALYLHQAEAQVVVANPLHIKRFAESHGFKTKNDRHDGQILARFGHERRPKPWQPAPEPVRQLRALLARLEALEEDRQRETNRLEKAQVQGVPAPVLDSLQAMLGTLKEQIETLSRQIDQHIDSDPGLKGQREDLKSIPGVGEKLSAHFLALFATKRFVDAKQAAAFLGLVPVERQSGTSVRARPRLAKNGDPRWRARLFLPAMVAARFNPDVSVLYQRLLKAGKTKMSALGAAMRKLVQIAFGVFKHGLAYQSQCTPAPV

SEQ ID NO: 252121 - protein, 444 aa, unidentified
MSKKRSAHLRGDRGQAFADLVRGIPPEQILCVSMDISKYFHVAMIHNGLGEIVTPIFEVDIYQSGFDQLCQKIDAARLQAQAQVVLVGMEPTSHYFENLARHLLEHSQPVKLINSFSVKQNREQQLMRREKTDQIDVAAIGDLLRRGEGTPYQPPSRVYLQLQQIDRVRLGKLKIETMLKNQIIGHLDRIFPGLILIGEAAQERYQPFFNVDLWQCRTLQALIRICPNPHQLVGMSPEQLIQLFHDQKCRMGPAMAAKIIAQTQKTLLPDPELAAIRCELLQHDLALLETVQAHIASLELRLTSLLPQTPYQVWTKFKGISAVQAASLAAAIGDPAHYTEAAQVFRRSGLVNGRNDSGTHQRKGRGNPILKVGDVYLRRSLMNAVSTLLIHQPVLYSYYKRLALSKPAGVARVATARKTIGLLWAAQRDQFSNPLIKCKGADMR

SEQ ID NO: 252122 - protein, 383 aa, unidentified
MENSSSDYCPKTSVIVSVELSKRNWLVASLSPGAAKPSLRTIPAGNSAELISHLRNLECKAADRIGEPAAIRLCFEIGYDGFWLARLLRSNDIDTYVLDPASFLVSRRGRRAKTDRIDAEAMIGILKAYLAGDKSVCRVVDVPSPEEEDARRVMRERGDLVHERTRIISRIRGLLALQGIRTVKAIKGGDWSKQLDDTRTGDGRPLPPNLRRQIERCFERLALLNDQIKDIERNRAEVVLHEESTFPCREKAVRLEQLKGIGPNSAAMLVAEVFCRKFESRRHVAAFLGLAPAPFASGDVSRDQGISKAGNRSTRVQMVELAWCWLKYQPSSELTVWYRNRFKGNGARAAKVGIVALARKLLIALWRFVETGLVPQGAELRAA

SEQ ID NO: 252123 - protein, 411 aa, unidentified
MKLFVGLDVSSFDIKACFLNGEGDKLSSFTVGNDLPGATQLRDKILNALQGKSVSELRIGLESTSVYSFHPSMFLHNDESIQALGGQVFVMNPKQIANFKKSYSDMDKTDEIDAFVIADYMRFGRLPMSVVKEEQYVALQQLTRARYQIIRQITQEKQRFLQYLSYKCNTFTEDVESSVFGKAMMDLFQEYYSLEELSQISLEDLADYLREKGKNRFPDAKLVAKSIQKAARTSYRLDKVVEDSIDTILGTSITLIRTFEKQIKELDKSIERIMKAVPQTLQTIPGIGPVFTAGIIAEIGQIERFEDETKIAKYAGLYWRKRQSGRFTADNTSLSRNGNQYLRYYLVEAANSVRRQIPEFSDYYTKKYKEVPKHQHKRALVLTARKFVRLVDALLRKNQIYTPKRSEINEA

SEQ ID NO: 252124 - protein, 411 aa, unidentified
MRRVIGIDVHRTFGEVVIWEDGIIRHAGRVDMTRTALEGMGKSLRSTDEVVIEATGNSMAVSRVLAPFVARVIIANPLQVKAIAQAHVKTDKIDAGTLASLQAAGYLPQIWTPDAETERKRRLVARRYQVVRHRTRLKNEVHSILHAHLIPKCPHADLFNARGRAWLAAQQLPDDERAAIDRHVRELDRLAEDLALLDREIAQDAIDDSAVNRLMTITGVNVAVAAGIVAAIGDIRRFRSPQKLVSYFGLNPRVRQSGLGVAHHGRISKIGRSHARAMLVEAAWAAAKAPGPLHAFFVRIRARRGHQIAAVAVARKLTVLCWHLLTRGEDYLWARPALVANKTRAMQLQAGHPQQKGNRRGPAYAYNIKALRDREMSIAAQAERSYERFVSQWKPRRPKTGARAPQSGRTK

SEQ ID NO: 252125 - protein, 322 aa, unidentified
MSTSVLGIDIAKQRFEAALLVNSKIKNKSFKNTTEGFESLSLWLDKQGSQKVHACLEATGNYGEDLAIYLHEAGHTVSIVNPARIKGFAQSELIRTKTDKIDAGIIARFCLAMRPDPWIPPSAEIRVLRALVRRADSLIDMRSQEKNRLSTAHESVIHLIVEHIEYLDEEIEKIRREIAGLIDRDPTLRQKKELLASIPGIGKVTIAAILAELDDMEKFHHVRELVAFIGLAPKETLSGSSIKGKPRLCKIGHVRLRKALYMPALVSIQCNPVMIAFYNRLKEKGKNGKVIVCAIMRKLVHIIFGILKSGKKYDPNYKPAFA

SEQ ID NO: 252126 - protein, 343 aa, unidentified
MEKSLFIGIDFSKKTFDVSLIDGNNLNGIPGYKQFDNTKEGCNQLLKWVKLWSKIPVSEWLFCGEHTGLYSVLLSEFLIKKNLFVWLENPLQIKLSTGIKRDKNDKVDSREIALYALRFQDKAKESQLSDKSLKSLELLLGFRDRLIGNKHALLVSAAELRTVLNRDVTARYIYEQSQKDIERINKEIKCVEAKMKEVVDSNDAIKETYEVVSSIKGVALINTVAIIVATKNFSRFENSRQFACYAGMAPFGKQSGTSIKTGPHVSHLANKRIKTLLTQAAQCAIRHNSDLKQYYTRKVAEGKNKWIVLNNVRNKLIHCIFALVRDKQLYQEGFLQHMEKSIA

SEQ ID NO: 252127 - protein, 354 aa, unidentified
MKRTTKYVAFDVHQATTVASVREESGRVIARSVLPTDRGALTEFVRGMRGARHVTFEEGTQAQWLYELLAPLVDRVIVCDRRGAPRQGNKGDQVDADQLSELLRRGALRAVYHGSADRATLKELTRTYRNLVEDATRVMLRLKALFRARGIATAGTAVYHPRHRARWLAQLLEDGARFRAEALYAELDVLRTLRPKAKAVMVTEARRDPAWRVLRTIPFLGPVRVALLLATMQTPWRFRTKRHLWAYAGLAVVTRSSADYTLVAGAPMRRRRAPMTRGLNRNHNRVLKDVFKGAATAATARPGPLQDFYHGVLARGTREELARLTLTRKLAALTLRLWKKGERYDPTQLTTPAR

SEQ ID NO: 252128 - protein, 342 aa, unidentified
MSKITVGLDVGDRFSQVCAVNIDGVIIQEGRVATTREALRDRLPARPSCRVILETGPHAGWISRELSAAGHEVLVANGRKLRWLYANEHKTDRVDAQYLARVGRWDPTLLSPIRVRSASADGALRLLRARASLVRARTRLINHVRGAVKSVGCQLPAADATSFARRMASRLPAELHDALQPLLTQIAALTQLIANYDRHVEQLATRYPETARLRQVTGVGALTALAFVLTIDDPARFRNGRAVGAYFGLTPRRADSGAQRPQLGITKCGDGLVRQLLVQAAHYILGPFGPDCRLRRWGMALSERGGKNAKKRAIIAVARKLAALLVSLWIHQSDYEPEPLEQ

SEQ ID NO: 252129 - protein, 421 aa, unidentified
MEPIVERSCGLDVHQATVVACLLVGGAHQKPKKEVRTFGTKTRELMDLRDWLRDSGCTHVAMESTGIYWKPVYAVLEDDFNLVVGNAHHIKNVPGRKTDVKDSEWIADLLRHGLIAKSFVPPKPIRELRDLLRYRRKLVESRTAERNRLQKLLETANIKLASVASDVFGVSGMAMLKALVRGDSTPQEMAQLAKRRLRQKLPELELALEGRVEEHHRFVLEMQLARLEQLDEHIAKLDERVDSKLAPYREQHVRLTKIPGVDRILAAVLVAELGTDMTVFKSGAHLAAWAGVCPGNNESAGKRKRADTRKGNVHLMTALVEAAHGASRTKGSYFKDKFFRLKARRGYLRAAVAIAHKTLRAVYTMLSTGAEYRDLGAAYLDVIDAKRVTGNLVRRLQRLGYEVTIAPRLAPALPAPPEPAG

SEQ ID NO: 252130 - protein, 338 aa, unidentified
MNIVFLGIDLAKNVFQLCGLNQAGKPVYTKRTGRKELLQTLANIPACLIGIEASTGAFYWQREFEKLGHKVKVISPQYVKPFVRGQKNDGNDAQAIAVALMQPTMQFVPPKSPEQQDIQALHRARQRIVNHRTATVCQIRGLLLDRGIPIGSAASRARRAIPLIPEDAENGLSSRMRRTIVELYDLFNDLKRRIHFFDKEIETVFRQSEACQRIAKVKGIGPETATAVVAAIGKGTEFKNGRHFAAWLGLVPRQHSSGDRQVLMNMTKKGDKHLRTLFIHGARAVVRVATNNNDGHMNQWVNQLKERRGFNKTTVAVANKNARIIWSMLRNDTGYQVV

SEQ ID NO: 252131 - protein, 384 aa, unidentified
MNNSFSVAQLIVAWVGLDWADQKHDICLRASGSAEVERTVVEHQPEALHSWVADLRRRFPQGQVALALEQSRGSLFYPLMNYEFLVLYPLPPKALADYRKALYPSGSKDDPTDAQLLLEFLRQHPERFRPWVADDVQTRQIALRSEHRRPRVDDRTALTNRLTALLKGYFPEARGWAGDLAAPRAWDFLAQFPSLERAQRASRLEVLKLYRAHTRRTPEQLEELGEQIRTALPLTTDRAVIATSGLMVQTLVEQWRVVQAGVERLEHQLRDLFAAHPDHEIFPSFPGAGKARAPRLLAAWGSDRQRFAGADNRPCFAGPAPITVRSGKSEWVHRRFAGPSFLCQTFHEFAAPSRLRSPWAKAYYQQMRERGADHHAAVRALAYK

SEQ ID NO: 252132 - protein, 417 aa, unidentified
MEYARSTLRAIPVNGLACGIDWAREDHAAAIVDGGGRQVHRSIVEHSSAGLRALVTVLARAGVTEVAIERPDGPVVDALLGAGITVVVISPNQLKNLRGRYGSAGNKDDRFDAFVLADTLRTDRARLRPLVPDSESTVALRALCRARKDLVAHRVRVANQLREHLNRVFPGAVGLFTKLDSPISLRFLSRFDCQDRADWLTPRRLQAWLASAGYCGRTDPAVVFGRLSAAPRGLPAAAGAAPIPITRALVATLDNLVKQIATLSEQIGQQLNAHADAHIFTNLPHVGTVRAARLLAEIGDCRGRFPTPEALACLAGVAPSTRQSGKMRSVGFRWACDKQLRDAVCDFADGSRRSNLWAADLYGRARARGHDHPHAVRILARAWIYIIWTCWQNDTAYNPAQHRALQTVLHQDQPPAA

SEQ ID NO: 252133 - protein, 416 aa, unidentified
MIFVGDDWAKGHHDIHVEDADGNKLARCRFSESVEGVTQFHELVARHATEPSDVVIGIETDHGLFVEALVAGGYQVYGINPLSASRYRDRHGLSGAKSDSADAKLLADIVRTDRHNHRKIADNSDDVNAIKVLERSHQNLIWARQANTNVLGASLKEYYQGALEAFGEDLSSSDALFVLKAAPTPSAGKKLSITQIEAALRRGGRKRNVVSRAKEIQAHLRKDHLQAAPVLAKAFGSSVVATVGLLTTYNTQIKVLEAELAANFDVHPDSEIIRSLPGPGPILGARVLGEFGDDPNRYHDAKARKNYASTSPITKASGKSKVVLARFTKNRRLADACDQWAFCSTNNSSGARALYDAHRAKKESHHQALRVVANRLVGILHGCLKHGTCYDEAVAWPVPASTQQPVQTPKKQAAAA

SEQ ID NO: 252134 - protein, 387 aa, unidentified
MTPSCKLAPRTAALDYDSTLIGALELSSKKWVFAVQLPGSKKHTRQVVEPSGSALVEMIERLKARSLAAGRPILRMILTYEAGRDGFWLARFLQRRGVEVHVMQASSLPVDRRARRAKTDMIDVEMLLRTLLAWLRGEPRVCSMVPIPSEADEEARRAHREREDLTGSRRSLVNKIDGILATLGISGFRALRRDRREQLANLRQPDGAPVPPAAQERIERLLDRLELVLKQIKTVEAARDAVVKKSSAQDESERMIRDLVQLCGIGAESATLLVREAFCRDFANRRSLGAYAGLTGTPFASGGMQREQGISKDGNRRLRALVVELAWFWLRFQPDSALAKWFRARVIGAKGRVAKIMIVALARKLLIALWRFAKDGVIPEGATMKAA

SEQ ID NO: 252135 - protein, 429 aa, unidentified
MEFMSEIEVMGEEPQFAAFVGLDWADQKHAWCLQAAGATQRENGEVEHTPETVEAWVGQLCRRFGNRPIAVAVEQVKGALVFMLSKYELLHLFPVPPAMSASMRDALYPSGAKDDPRDAELLLDLLLKHRDKLRRLAPDSEATRRIQNLVEERRNLVGEKTAQTNRLTNHLKIYFPQMLGWFDRLDTELVCALLERWPTLEELQKVPPARLRTFFRKHRCRDQELIERRMVGIQQAIPATRDRAVIEAKSAMVKVSTQLIRSLVRGIADLDRKIEEAAAAHPDFFIFESLPGAGAALAPRLLVAFGSQRERYANAEEVQAYTGIAPVTERSGKKKRVHFRWACPKFLRQTFHEWAGHSIAHSHWARSYYQQQRERGKGHHAAVRGLAFKWIRIVFRCWKDEVVYDENKYLAALAKRHSPLAAVVAEIIL

SEQ ID NO: 252136 - protein, 327 aa, unidentified
MSNPEIPTSVLGIDVSKNRFNAALLKGGKYKHKAFPNNRDGFERLSGWLQALEIKELHACMESTGVYCEELAEYLYDQGFSVSVVNPARIKGFAQSELIRSKTDKVDASLIARFCAAMRPSLWTPDPREIRELRSLVRRIDALVSMRQQERNRLTVSDEVLKKSIQRHILFISKEIEELKEEINTHIDRNPELRDKRKLLESIPAVGEATIHIILSHFASIERFKNAKSLTSFLGIAPRHYQSGSSINRRTRMSKVGRSSLRKAFYMPAVVALRYNPVIMDLKVKLSNAGKHNMLIIGAAMRKLVHIIYGVLKNKIPFDPNHALKSS

SEQ ID NO: 252137 - protein, 340 aa, unidentified
MANNPHSFIGIDVSKDHFDASLLVVLDHKKQSPISSVFHNTPQGIQGFHRWLTANGVTMDGNSLVVMENTGIYHRLIWSFCSQQQLPLHIGNAAHIKWSFGIARGKNDKIDSIRLANYAFKEADALRASAPLDRELLLLKDLIAARTKLLKQRGSISVTMKELECGHDGLSMKIMEKSLRAAIDGIAQSILSIEQQIRKLINSNRAFRENYDLLMSIPGIGKVTATYLISCTANFAARPTGKQLACYAGVVPFEHTSGSSVRGRTRVHRMANKELKRLLHMGAMSVKNNNREFREYFIRKKEEGKHSMSILNAIKNKLALRIAAVIRDRSKYMDRDKAQI

SEQ ID NO: 252138 - protein, 331 aa, unidentified
MKNFFIGADVSKKTLDCVLYDTNKEKMRASYIKINNNKIGLENLIKWMKERKVVKNQALVCMEYTGKYSFDFAELLERKKIDFVLVPALKIKGSFAGARGKNDKMDAERIATYAYRYRDELVPTSLKDDKIVRLRDLMNDRKLAVKHAAAYKTIMTEYKEKKSALRYKRAERIVAEYKKQIAAIEKEVKELINSDEKMKKNYELLTSIPGISLVNAINLIVFTGNFEFFADARKFASYSGVAPFEYSSGTSVNKGTHVSKMANKMLKADLTQAAKVAINFDPWLKDYYERKRKEGKSYGCVLNAVKFKLIERVFAIVKRGTPYVNTMKHSA

SEQ ID NO: 252139 - protein, 427 aa, unidentified
MTARDDCTPTPTWVAIDVAKQWNVVLVEGAEGRRRFRVANSKEDHDRLVGFLHGRTGPCRIGLEPTGNYHRPLAYRLLIEGFEVFLISSLAAARYREALFNSWDKNDPKDAAVILEMLKEGRVLHYHDPVVNGIHDLQELSKTYMHVSLTRTRLQHSLLTHYLPLCWPEFARYWRTTRNDWFVTFLQRFPTPASVRALDEESFIKEAWPLVGRKVSKRAKLEEMYELAAETIGLPLDPDGLAIRTFKLQLSRYLSLNHQRAQLNTWAQEALDDHGDAQLLRTIPGIGAVLALMILAEGGDLRRFGHHRQFLKFCGLDLAKSQSGNTRGRERLSKRGNARLRYAFWFAGTVAVRQRENSFRDKYQRYIRPDPDDPDRKRKALTAVAAKMARVAYGIVKTGVPYRAYFESVVPSGSIPIKGAVEAVRTS

SEQ ID NO: 252140 - protein, 321 aa, unidentified
MNKNTEIFGIDISKDVFDVYSHQKGHQSFKNDAQGFKSFLKEITKEALVVMEATGYYHYLFAQFLHKNEVQVSVVNPLSVKRFIQMKLAKVKTDKSDAKAICEYGHMNEVPLYTALTDVQAECLQLFRLLDNYLKKRTQTKNKLHGEEVLGVPSKYVHQSLKRDLKHLDKEVKGIEARLLELVKQDQQHQLTLLKSIPGMGIKTALFLIVVTDGFSKFETASQLCSYVGITPTIRESGSSVRGRSRISKVGNKKLRNLLFLCAFSACKHNKACREIYERIVNKGKSKKLALIAVANKLLKQAFAIAKSGRPYDENFVSKLV

SEQ ID NO: 252141 - protein, 393 aa, unidentified
MEIRYFCGTDVSKNSFSVAVKNGQFLIKNKSFSMDKEGFREFEELILSYKNSLITGMEATGIYHQNLFNFLKKRRYNSCVVDPYRVSKFFKFRSNKPTKTDRKDNKTISEFLEEEVKNNPSLLQEKQDERFNLRYLVREKERITHQIAKTKTEIRRTVSLVFPELEAKTSIFSKEILDILYEFGSADRIRKLTFKEFINRAQVYIPNGKGRKTSLRKEEIYKLAKDSISFSYPAYEKLLKIKIKRLKNLMEERKEIEEIIKKGADKLFRREIEILTSIPGIAKESAIYFMAEVVDIRRFPNKAKLIGFCGLDPVIKQSGNYKGHFKISKRGNSHTRRIAFIMAGCVKRSCPQFREYYLKKRAEGKSYKEAVIATSTKLLRTVYSLLKEDRLFK

SEQ ID NO: 252142 - protein, 459 aa, unidentified
MAKIPKTKKTKNKTKREWDEGLSALNRNAAGIDVGSAEHYVAVPGGRDPQPVQTFGSFTSDLHRMAQWLKVCGIETVVMQATGVYWIALFQILESYGFQVNVVNARHTKTLPGRKTDVLECQWLQKLHTFGLLNNSFRPTEEIQILRTYLRQRENLVAAGSTCIQHMQKTLTQMNVQLANVISDISGVTGMAILRAIVAGERDPDRLSTLKHGRVRASRGEIARSLEGNWREELLFVLEQSLELYDLYVLKIAVCDQRIEQHLKTMKSKSEAGTSSDPAVLPAPKQGPRFSLKDHLYRITGVDLTKVAGLQVQTVQTIISEVGVDMSRWKTEKQFASWLGLCPDNRISGGKILKSGTRQVVNRAATALRLAAWSLIRSQSALGANFRRLRSKLGAPKAITAMAHKLARLIYRMMKFGTEYFDKGMAAYEARYRQHQMKWLSRQAASLNLQLIPVPEVTG

SEQ ID NO: 252143 - protein, 314 aa, unidentified
MNQVIGIDVSKKTFDVSYSRDQRAVFGNDTPGVAAFIAALEPSDHVVMEATGTYFLKLATRVHDAGFNVTVVNPAVITYFARMRLARAKTDRADAEIIRQYGQHAELPRWAPTEDIFIELNQLDSHLNGLQRDRNAVIGRLEALRQCETISELVAEDLQSQLDDLVVRIKRCEKVLVQQTEHHFPELISLLRSIQGIGKRTAVMFIVLTRGFTRFESAKSFVAYLGLSSFIKTSGTSVRGSGAISKMGNPRMRQLLYMAALTAKRRNLACQAFAQRLTDNGKPPKVVRIAVANKLIRQAFAVCSKQQPYSECYA

SEQ ID NO: 252144 - protein, 339 aa, unidentified
MEKTQFFIGIDVSKPHFDVSLLEVVDHIKGAVISDRFNNTAQGIRKFGQWLRSKKVPFNEHTLIVIENTGIYHRLLWAYCSRKNLQLHIGNAAHIKWSFGIARGKSDKIDSQRLCYYACKESDMLKSTPALNPVLLQLKDLMTARTKLLSQVNSIKTFIGELKNVSEKGTQKTLEQSYKKAIEGMLSSIKSLEVEIKKLIAENQDIQKNYKLLLSVPGIGHFTAVYLIGCTNNFAGKISGKQLASYAGVVPFEYSSGISVRGRKKVHPMANKELKSMLYMCAMSAIQHYPEFKQYYERKEKEGKHGWSIMNAVKNKIVLRVVAVVNKQEPYVNKEPIAA

SEQ ID NO: 252145 - protein, 400 aa, unidentified
MEVFCGIDWSEQHHDVAVVDPAGRVLAQQRVNDDPAGFATLTTVLGRLASSRGQVGIALETDRGLFVHALRDAGYQVFAINPKAVDRYRDRYRVSRAKSDLVDAIVLANLLRTDADRHREIPANSEQASVVSVLARAQQDAVRERRRQTARLRSQLREFYPAALRAFPDLTTKTALTVLSAAPTPGQALNLTSDDLHSLARSCGRWGISLREVTRLHNVLHQPQLRQPPWVEQAMGMVVLQLVLGLRILSLTIGRLEADLAEQLDRHADTAILRSLPGVGTVLAGRILSEFGDDAARFTDAASRRDYAGTAPITKASGKGRAVLMRRVRNTRLFDTCRDWSFSAVNASPGARALYQHRRRLGDGHEKALRRVGNKLVGQLDHCLRYHEPYREETAWTLTA

SEQ ID NO: 252146 - protein, 311 aa, unidentified
MPTETVHVGVDIAKAAFVVRFVTKELTYPNNPAGHAGFCAELAAGPGPAHVVCEATGGYERALVLALHEAGVALSVLNPRQVRDYARARGQLSKTDRVDAAILADYGATLRPAADPVPSERQLTLAALVSARQDLLELLGTEHNRAEHLTLALLRRQHTARQRLLERQLKALDRQIDALIQADAALAAKSARLQAVDGVGRVMALTALALMPELGQITDKQAAALAGVAPFARDSGEFRGHRHIAGGRAVVRRVLYMAALSASQHNRILRDYYQALLARGKPGKVALTALMRKLIVLLNRLLADPDFVLSN

SEQ ID NO: 252147 - protein, 386 aa, unidentified
MQTLNDLSRSLITLEPAGTLIAVIEMSLSSWLVAGIVPGIERQPLKKLAVDESALLKLLHRWREEAEKAGSKIERIVVAFEAGRDGFWLARWLKARSIEAHVIHAASVAVSREHRRAKTDRLDTELLKRAVLGWLRGERDHCKMVAIPTIKDEDAKRPNRERESLVGEQSRIINRMKAALVRLGIRGFNPKLKRAARRLDSLRTPEGEPIPPNTLAELRRDMERRRLVRDQIREIEEARQERIQQAPSDGPHAMVRLLARVIGVGVETADMLVHEVLSRNMRDRRAVARYAGLTGSPDESGRRRREKGLARSGNGRVRRGMIQLAWRFLLHQKNSALTRWFRARTENARGTRKRMIVALARKLLIALWRLVREGVVPDGVVLRPAQ

SEQ ID NO: 252148 - protein, 346 aa, unidentified
MASSTIAEPTVAVTGGVDTHSDVNVAVALDQRGVLLGTASFPTTAAGHERLEAWLAGFGPIDAVGIEGTGAWGAGIARHLTAAGHRVVEVDRPDRKTRYRKGKSDTIDAEAAARAVQAGTATGTPKTRTGLVESIRALRVARRSAVKDRSAAAHQIHSLVSTAPDELRSQLRSLPLCKLVAVCAALRPGDLTDPTQATKAALRSIARRHQRLADDIAELDAQLEPLVRKAAPPSLLERSGVGIDVAGQLLVTAGDNPDRLRSPAAFAHLCGVAPIPIASGRSSAYRLNRGGDRAANAALYRIVLCRLRWDPNSRAFIDKKIKEGKTKKGAIRNLSRGLRHGVMRIG

SEQ ID NO: 252149 - protein, 347 aa, unidentified
MTIVETARPVTGGVDTHLDVHVAAAVDANGGVLGVESFATTPVGFGELRRWLAGFGTIDRIGVEGTGAYGAGLARHLRGQGLIVIEVDRPNRQERRRNGKSDELDAIEAARAVLSGRASGIAKSADGDVEAIRALLVVRRSGRSVRIKYLNQIRHLGFTAPDELRERLRGVHRDRLARTAAALRPTVGSDTIVYATKLAIATLGRRVLALEADAERLDRELETLVRRTAPSLLEVYGVGINTAAILLVAAGDNPHRLKSEAAFAHLCGVAPLPASSGKTQKRFRLNPGGNRQANHALWRIVFTRMSGDERTRKYVARRTAEGRSTREVMRVLKRYVARELYPHLVQA

SEQ ID NO: 252150 - protein, 355 aa, unidentified
MSKTNPVKIIIGVDTHKDIHVAVAINGIGAHIGTLTIPVSPKGYQNLETWARAFGSIHAFGIEGTGSYGAGLARFLQAKGHTVVEVNRPNRQLRHQNGKSDPLDAESAARAVLGGQANARPKSADSSVEMIRHLKVARDTAVKSRTQAMVTLKTIIINAPAALRQALDRIIGKMALIRHLAARPGPILSVTASAKGALRAIARRWLTLDAEIRAHDADLEALTASCVPAMLEAHGISTGTAAEMLILVGDNPERIRSEAAFAKLCGVCPVPASSGKTNRHRLNRGGNRQANAALYRVVIVRMRNHQPTLDYVKKRKADGKGKMEIIRCLKRFVAREIFGYLCGAQRSVPSISKAT

SEQ ID NO: 252151 - protein, 323 aa, unidentified
MRVVFGIDVSKASSEVAILINGEKVHGYTIPNDAIGFNRLLGDLKTVHQPEIVFEATGVYSRRLQAFFEDNSYAYTRLNPLESKKQLDSLRVRKTDKIDAEKLATSQFILNRKPSYIQESIYQELRDLSRFYQNITEDIVCAKNRLHKVLQVTFPELENILSAPTGEQYWNLVMTFPCNSFVLELDDAALRAIIRQSTSKRISEKRVTYLVDKLTKLANQSYCAVKKTSPMMEEVKYYAGELLRLSEHRQSVLEEMVTLAQPLPEYEILLSIPGIAETTATSIIGELGDIRRFHSANQINAFIGIDLRHYESGDFLAKEHMAL

SEQ ID NO: 252152 - protein, 369 aa, unidentified
MSKASTFVGLDVHKSSIVVALLRPGASTPLEWKVANEPGAVHRLIRKLEREDDVQCCYEAGPTGYVLKRQLDRAGIACQVIAPSLIPVKPGSAIKTDRRDARKLAELLRAGMLTEVAPPTEEEEAVRDLTRSRDDAQRDLTRARNRLSKFLLRRGCVYAIDRKPTWSQKYRSWLRALRFEHVADQVIFEDYLLAVEQVEGRLEALTDRIEHFAEQAPWRERVQALRCFHGINTVTALALVAEIHDPRRFAHPRRLMSYLGLVPRESSSGMRERRGGITGAGNRHVRRLLVEAAWHYRHKPVVGRALRLRRREQDPKAIALADRALRRLALRQRRMLYQGKHPNLVNIAVARELVGFVWNVLHTNAIAQA

SEQ ID NO: 252153 - protein, 348 aa, unidentified
MQIAVLGIDLGKNSCSAVGLDKAGRVVLRRRLSRNSLIKLAMQLPSCVMAMEACCGAHHLGRVLRAHGHHVRLMPPEYVQPYVKAQKNDERDAEAIAEAATRPTMRFVDLKSEDQFDMQTLHRARSRLVSERTALVNQLRAVLLERGITVAQGRRRLARYLTEGLEADDTEGTQLSSRIRVLIEDMRAQWHDLDQRIAAFDIEFAAAARSEESARRLSTIPGIGAINATALVAAVGDARGFARARDLSAWLGLVPRQATTGGRPRLLGITKRGNKYLRTLLIHGARAALPLLLTVESPLGNWLRGLSARAHRNTVIVALASKLARIAWAVLRSSATYNATTGSRLVGA

SEQ ID NO: 252154 - protein, 325 aa, unidentified
MEEKNNYCGIDVSNETLDAYFKNKKGIEQHLQVSNSVAGFRELLKESGKEIHFVMESTGVYHLRFIFFLNKKNIKFSVVNALQIKRYIQMHLERNKSDKKDAKHIYEYGLNRNPELYQMPDNTYFECRSLNNAIHDLTKEITKFSNQIHSLKKCPFDTKSVEKSFQKIIKELRQEKQNIELELQEKLVQWEGETLKLVQSVKGIGSRASAELIIYTKGFKDMNSYKQLISYAGLSPTEYQSGSSIRGRVRICKQGGKQLRNILYMCALNAKKTNSHCRDLYDRLVAKGKNKKAALIAVCNKLLKIVFGVVKNRTLYQDIYLQKTT

SEQ ID NO: 252155 - protein, 416 aa, unidentified
MEVIVSRCAGLDVHKNTVMACVRVPGPNGGRTSTVRQFRTFTAGLRQLRDWLVAEQVSQVVMEATGVCWKPVWHVLDATPGLELMLVNAHAVKNMPGRKTDVADAVWLAELGECGLLRPSFVPPPVIAQLRDLTRYRKKLIEERARETQRIQKLLEDAGIKLDSVVSDILGVSARQMLEALIAGVRDVAALAELARTRMRPKIPQLRQALEGRFGAHHALMLRMHLEHLDQLSVSIDRLDSEVDRVIRPFSSALQRLITIPGVGRRTAEVIIAETGADMRRFRTAGHLASWAGMCPGNHESGGKRRSGRARKGNAALRAALCEAAWAASHARSGYLPAQYRHLLRTFGKKGQTRAVFAVGHSILVIAWHLMAHDRDYADLGGDHFTRATDAEARERYLVRQLEALGHKVTLEPAAA

SEQ ID NO: 252156 - protein, 347 aa, unidentified
MRFYTRQHRHDGGIDLHVKTMDVCLLDAGGQVLVHRNVKATPEAFLETVRPYRDDLVVAAECMFTWYWLADLCASEAIPFVLGHALAMRAIHGGKAKNDRLDSQKIAALLRGGLLPQAYVYPAAMRSTRDLLRRRLHLVRQRGQLLAHIQNTRAQYQLPEFGRRLASPATRAGVSDQFTDPRVRKSIDVDLARLECYDDLITDLELTIVREAKRHDGDAFHRRRSGPGIGKILALTILSEIHDVTRFDRVQQFASYARLVTCAHESAGKTYGTGGATMGNVHLTWAVSDAAGLCLRQAPGGKKLLAETATKHGKGKALSILAHKIGRAVFYMLSRGTVFSMEKFRAA

SEQ ID NO: 252157 - protein, 355 aa, unidentified
MNAIKYIGMDVHLATISIAVLDAMGKLIMEVTIATQASALLDFIRGLSGTLYVTFEEGTSAHWLYTLLEPQVAKVVVCDPRQNPRRLGEKKSDRLDARKLAELLRLGTLKPVYHGNALGPALKELARSYRTLMSDTTRVMNRLKALYRARGIRCAGTRVYSPRGRDQWLAQLREPGVRGRAERLYKQLDLLLPLRHEARAALLAESRKHPAQKILRSIPALGPVRVALLLALLQTPYRFRGKRQLWAYAGLALVTRSSADYRMVEGQLERSRRPALVLGLNANHNHVLKGLFKDAAVTTLTRPGPFKDFYTTRVAQGMKPELARLTLARKIAAITLNLWKKGECFNAEHLKAQAA

SEQ ID NO: 252158 - protein, 523 aa, unidentified
MARAFRSKKRSSLASQSIHKPRGVISPRVQAVGPEHFGIVCVDCAKARSKWMLSDFYARVLVPPTEVEHTQACLASMIRDLRTALEQARIRDQIVVIERTGRYHRPIQRAFDQAGFEVRIMHPLTTKQHRQPANPGNKTDDTDLSAMQRGAVNGFGLLEPPADPLSVRLQLLARHRRDLVEKTVALRSQIHEHLHAIMPGYSKCFEDIYDAQIPLWIARRFGSATAILQAGAPELIVQLRRAELRLHQPTLDKIIAWARSAPAAEDESAIHLKILSELDDDRLSKVRAVRAIEAELAGLLVQTPYLLLMGIPGINVVSAAEFAGEMGPIERYPTARAITGRAGLFPSRYQSDRVDYPDGQLVRCANRTLRRAIMMIADNLIKWNDHFRVLATGWQLHGRDARAARVQVAGRFSRIAYQMVAGRKAYRHPCCQQRDYILNKLLRFHTNNDIGYDQLMINLDAAVAQLPRSVYREEAAPLADELDRVLKKRGKGPRPLSEILPVVLAKLGVKPVRSPKSGEAILT

SEQ ID NO: 252159 - protein, 349 aa, unidentified
MDHYAGIDVSLELSSVCVVDAKGKIIKEAKISSEPGALIIFLRGLGMVVERIGLEAGPLSQWLHAGLTQAGFEVVLLETRHVKAALSAMTVKTDRKDARGIAQLIRMGWFRPVHCKSIGSQEVRALLVGRKLLLGKLLDVEFSIRGILRGFGLKMGMVTRRSFEARVRELCAGQSMLEQIFAAMLVARSALQTEYTKLHKAMLTIVRKDEVCRRLMTTPGVGPLVAITFKTGVDDPSRIGKSKAVGALFGLTPKKYQSGETDLTGGITRVGDEMVRTALYEAANILLSRVTRFSTLKRWGMDVAKRRGAKRAKVALARKIGVILHRMWVDSTNFRWTKEAPTAPRLIQA

SEQ ID NO: 252160 - protein, 335 aa, unidentified
MDKITTVGLDLAKSVFSLHGVDAQGRTVLRKTVRRDRLMELIAALPPCLIGMEACGGAHEWARQFQHHGHRIGIMMARFVAPYRKSSKNDGNDAEAICEAVGRPNMRFVPVKSAEQQAILSLHRVRQGYVEQRTATINRIRGLLAEFGIVLPQRAAEVRRAAVVLAEQLPILAREAITDLRAHLTHLDARIAHYEQQLTSLNRECEPARRIMTMPGIGPLTASAITASVASGHEFSNGRQFAAWLGLVPRQHSTGGKTRLGRITKRGDAYLRTLLMLGARAVLQTAAQKSDRLSRWALALRERRGYHRAVIAIAAKNARIIWALLTGESSFVPVN

SEQ ID NO: 252161 - protein, 431 aa, unidentified
MAKTKTSRTVDIVYPVCCGMDIHKDFLVACVAVTDERSHTEHHIKRFSTYTKGLRSLAAWLNTFGCRDVCMESAGKYWVPIFNILEAAGLRVCLTHPKYVKAIKGKKTDKKDAKWISELFKCDLVRSSFIPPADIRQLRDLCRYYVKLTYISVSEKNRAQNCLTMCNFKLDAVFSDLFGVSATRVLDALLGHGSAGFEIAPLLDKHCKATVEEVADALDGELIPEQVAKLSLVRQHREEIVKLQAALESLILQLSEKYSHQIDLLLTVPGISDRLTAIRILAEIGADMTVFETSKQLCSWAGLTPQNQESAGKKKTTRIGRAGAYLKPLLVQIALAVSKSDKHVELKSKYQALKKHRGGKKATIAIARRLLTAMFHMLSKGETYNAELYRRADKPPKERVMTPEQAIDFARRHGFIIEGLDPPPEPPNTAA

SEQ ID NO: 252162 - protein, 399 aa, unidentified
MLAVGIDISKSKSVAAILNQDGSMHTSPFEFHHTKPELDAFIKYILNSNQSATILMENTGHYHYPVLKAFREAGLPVCMVNAYQIKKFGDMDLRKAKTDKKDAVRIARYALEKSYSLVPYTSMEQKYEDLKFLARQYNQRMLTLKTNKVFLLNLLDETMPGITNILPLTTRTPETSLSVLFINRFKSYDRIKKMGKIRFLDAFEKIARKSRNRQTKTCGLAIYEAALRNITTRGENEYTLGAQDQCLELVCESQKAADSIILKMQTLAETLPEYAVLRSMAGVGDRLGPLILAEIGDIRRFHSGKALNAYAGNDAPPYQSGTFESHNRHISKRGNAALRKYCFEVMQALKLTRPQNDPVYLFLLKKEQEGKPYNVAKMAGVNKFLRIYYARAMETLKQQ

SEQ ID NO: 252163 - protein, 430 aa, unidentified
MKYALTQVLPDVPAGGVCAGIDWATADHVACVVDMAGRVTDRFSAAHDRAGITALITRLRKNKVTEVAIERGDGALVDALLAAGLTVVVITSRQVKNLRSRFGAAGAKDDRFDAFVLADTLRTDRARLRPLVPDTPATISLRMAVRARRNLVAHRVAGGNQLRAHLAVAFPAGTRLFHDLDSPLSLAFLARFGSQDAAAVLDEPAIQAWLATIAVRGRPAPVSVLHARLHAAPPGATGPDGAAQAGVTAALTATLTALSAQIKALETQIAGQLAAHPDAHIFTSLPRPGTVRAARLLAEIGDCRSRFPDPESLAGLAGVAPVTRRSGTRISHGFRWAVNRQLRDAVCDFAADSRHASPWAAAIYDDARARGKDHPLAVRITARAWIYVIWRCWRDGTAYDPAKHHALQAIVARQQASDHTAAGPGPQEAR

SEQ ID NO: 252164 - protein, 419 aa, unidentified
MTKKSDEQFVSIIHPICCGLDVHKKKISACLITVDSFGNEESIVKEFGTFTNELLELRDWLLEYDCPIVAMESTGVYWRPVHNVLEGFMEVVLVNARHIKNVPGRKTDISDSKWLAGLLRHGLVKGSFIPDKDVRQWRELTRLRRTYTESLGDYKRRVHKLFETANIKIDSVVSDLFGVTGRNLISLLCTNESQMTLEAIEQCTRGSLKSKVEELYLSIQGFFEEHHRFQLIGLMETISVFESRQSEITERLTQLMAPHQDILARLDEIPGIDKKSAQSILSEIGVELDEFISTAALASWAGLCPGNNESAGKRKSGKSPVHNHPFKTILIEVAWAAVKKKGSYYRDKYYRLKSRRGAKRAIVAIAHRISKAIFHIIKYGGSFQDLGEDYLVNKNKKLKLNNLKRQAKQIGFDLVPCAK

SEQ ID NO: 252165 - protein, 408 aa, unidentified
MEVLYPRCAGLDGHAATVVACVRLAAGATVTYEHRTFATNTPGLLELSEWLTTHELTHVAMEATGVFWKPVWHVLEDHFTLVLANAMHIRNIPGRKSDKNDATWIADLLALGLIRSSFVPPAPIQELRDLTRTRKQLVRESNRHTQRIQKTLEDANIKLTEVISDILGVSGRAILQALVAGETDPERLADLSAGRLKAPRAQLIEALRGRVTAHHRFMLKLHLAQIAALELAIADVEAQIRERLAPFRAAVSLLTTMPGLRETAVAVTLAEIGDDMSQFPSAGHLLSWAGLCPRLDESAGKHRSTRTRQGAPWLKTTLVQAAWAAARHKDSYFHGQFLRLKSRRGPKKAILAVAASMLTDIYYMLRDGVEFRDLGDQYFVQRDKQRLANRLLQRLRDLGVDVEVKNAA

SEQ ID NO: 252166 - protein, 418 aa, unidentified
MKVIYRRCAGLDVHEKSVFVCARILRGKQLEIIEATFPTFTEDLEALRAWLIKHRIQRVAMESTGVYWRPVWNILEQSKLDLILLNPFHVKALPGHKTDRVDAARIAELVQYDLVRASFVPPVEIRELRDLLRRRLHLAQDRNRVSNRIHRLLELQNIKLSSVLGKVTGATSRSILEGLATEMTMKPEKLALLAVHKRVRDKREQLAKALRCQPTDHFRFLLRELLEELDRLTGKIQLLETRIEERMRPCQELIERLCAIPGVERLTAWTLISEIGLDMERFPSSGHLASWCGLCPGNAESAGKRHSGKTNKGNRYVRRVLVQSAWAAARIVRKRNFFTTFFFRVSQRAGMKKAAIAVAHRILTIIYSMVRSGDSYREQGADYFDRLHPIRTTNRLTARLERLGFLVHLEPKLSPETS

SEQ ID NO: 252167 - protein, 383 aa, unidentified
MRKIQEILQAQSTTIQDIMYIAFELSNSTWRLAFSDSNKKRHVTIKARDVKQLEIEIIKAKSRFGLKDNVQIKSCYEAGRDGFWLHRYLLSKGIDNLVVDSSSIEVNRRKRRVKSDRLDAGNLLRLLMRYHGNERQVWKVVTAPTVKEEDARHLHREIETLLRERTRYRNRIKALLVQHGLDVKNPSRKNFLKVLNALRTWDGQVLPESMKARVVREHERLRMIEDHIKLLKKEREQRVKSKETASFQQVAQLRELCGIGVNSSWVFVMEFFGWRKFRNRREVAALAGLTPTPYDSGGSQREQGISKAGNKRIRTMAVEIAWCWLRFQPHSKFSRWFNERFASGGSRMRRIGIVALARKLLISLWRYLEHGVIPEGAIIKSAS

SEQ ID NO: 252168 - protein, 322 aa, unidentified
MRYIGIDVSKATFVVAYSSDKGGEIRTFNNTTTGIKQFIGALPKDGSIHCVMEATGNYSALLLYMLNVAGITVSMENPLKVKNFAKAMLSTIKTDKSDARLITLYGEKMNPRPFKVQGEAILRLRQKRTVIRQLTKQITAMSNLRGSLVCLPVPDKGATHTVDETIKFLEKKRDRLQSELTDLVEVEFSRQLALLTTIKGIGITLATALIITTGGFTYFQNAKQVSRYLGICPTYEQSGTSVNIRGHINRNGDAYTRGLLYVAAWTASRFNTKCGETYTRLRQNGKPGKLAMIAVANKLVRQAFAVVTHDKEYVDGFVSNRP

SEQ ID NO: 252169 - protein, 397 aa, unidentified
MTQSTTQGLHVSVDTGCYQHHAAVGLSNGKYLGSFEFPHTKLGFAEFFSKIDRYKKHSNGKVCVAMEGYNGHARPLDRMVQIRGYRLFNINNVKLARFKEIFPGAAKTDPIDARKGLELFQLQQTLPLAKTVVEEVSPVGEVEQQLKRLSRRRRRLVDERTRYINTLQADLRAVSPGLIEITADVGNVWFLNFLASAKDFRQMKQRKESRLLKIKQVGKRYVAAILAWQENALFSDDIAFVWPLVHQDVLRIIELRKMVKTIDKQLICLMEQSTLARHLLSIKGFGDTSCAELAGEIGCIERFAKEASLALYLGMAALDNSSGTYQGSKRSKQVNQRAKMAMMNALDKHRRWVEQSSSYYRKKRNEGKKHNQALRSLGRHVVRVIFKMLKEDRDYYL

SEQ ID NO: 252170 - protein, 313 aa, unidentified
MATSNYVGIDVSKDRLDVAVLGEKQEKQVNNTLEGIPQLVQQMQALQPELIVVEATGGYQRAVVEALFHAGLAVAVVNPARVRQFARACGLLAKTDKLDAQMLAVFGQRVQPRCYEAKSAAGKLLSARLVRRRQLEEMLKAEQNRQRTLPESLKNSVARVIACLKAEKKTLDEQIHELMKEQEEWQEQAEILSSAPGVGPVTIATLLAELPELGKLDRKKIAALVGVAPMNYDSGKKRGYRKTKGGRGDVRSVLYMSTLVATRYNPMIQAQYQQLLKRGKVKKVALTACMRKFLTILNAMVRDKVPFRQTVIV

SEQ ID NO: 252171 - protein, 338 aa, unidentified
MAIVTVGIDLAKNVFAVHGVDEAGKAVLVRPEVPRGKLLELIANLPPCLIGMEACSGAHHWAREFAALGHTVRLMAPKFVAPYRMSGKRGKNDAADAAAICEAVTRPTMRFVPVKSIDQQSRLFVHRARQGYVEQRTALINRIRGLLSELGVVLPLKAATVRREAHKHLEDLPGWCNTVVGDALSELTHLDARIKQYDQYIEQSAKEDAQAKQLMQLGGIGPTTASAIVATVGKGHDFNCGRQFCAWLGLVPGQYSSGGKQRLGRITKAGDPYLRTLLIMGGKAVLAAAKNKTDPVSRWALSVQERRGYWKAVVAIAAKNARMCWAMLQRGEAFKLPA

SEQ ID NO: 252172 - protein, 425 aa, unidentified
MEEHILEQPTPFAALIGLDWADCKHDLCLVDAATGSRELCVVAHSPESLNEWARALRARFNGAQVALCLEQSRGSLIYALMKYDFMVLYPVNPQTLSRFREAFTPSRAKNDPTDAEFLVELLMHHRERLKAWQPDEEQTRTLQLLVEHRRRLVGDQTRISNRLTALLKGYFPQVLQWFPDIRTKMVCDFLRRWSSLDAMKGVRRQTLEKFFREHNSLHKEAVERRLDAIKAAVPLTTDKAVINASVVMVKALTSQMQTTLTAVKEFDRQIEALCRSHEDFELFASLPGAGEVYASRLLVAMGSNRERWATAAELLCFSGVAPVIERSGKSSWTRWRYFCPKFLRQAFVEYAGESIRHSEWAEAFYVSQKAKGKSHQAAVRALAYKWIRIIWKCWQTRTKYSEARYVECLRRKGSKLVREVTSEAT

SEQ ID NO: 252173 - protein, 320 aa, unidentified
MNPAPIYLGIDVAKDRLDVAQRPGTEAWCVSNDERGIADLVARFKVLRPALVLVEATGGIELALVGALAVASLPVVVVNPRQTREFARATGRLAKTDAIDAQVLAKFAEAVRPPLRPLPDAATQELSGLVTRRRQVIEMLTAEKNRLRTAAPAVRAHIKEHIRWLERSLSDLDSELGQVIHSSDIWRAQDDLLQSTPGVGPVLSITLLAELSELGSLNRKEIAALVGVAPLNRDSGRLRGRRSVWGGRSQVRTALYMAALVAARFNPAIRAFYQRLQAAGKPKKVALTACMRKLLTILNAMKRHQTPWQYALHLDRQDSC

SEQ ID NO: 252174 - protein, 345 aa, unidentified
MKKVVAGMDLHGNNVVIGVMDMDGKRVAHRKVPCELKEVVKFLAPYKKRLEQVAVESTYNWYWLVDGLRGLKYSVVLANPAGMQQYSGIKHADDTNDAFFLAELLRLKILPTGYIYDEQLRPVRDLLRRRMTLVHHRSALLLSFKSLYTRTTGQEMSLSELKGLEVKAAQELYDHPANQLIAGMQVGHIEQLTESIEKIEKVVLASARELPYYAKLATLPGVGRILGMTITLEVGDIKRFAGAGNFASYCRTVEARRTSNSKQKGENNSKCGNKYLAWAFVEAANFARRYDEQCRKWYDRKAAKTSKVIATKALACKLAKAAWHVMSQETDYDARRVFGQPSSTK

SEQ ID NO: 252175 - protein, 312 aa, unidentified
MKIICGVDVSKARLDACIEPGAIFASFDNDPAGIAELAAFCRQHQAGLVAMEATGGYERRAFSLLWEAAMPCAMTNPRSVRRYAEAMGVLEKTDRLDAHIIARFAHAKNLQPTPAPTPAQQRLKALVARLRQVTDDLTVQKQRRASLADNAEMLASINEVIALLKRQSRTLEGEIASMIDDDPLWAHLAEAWRSVKGVAGRTVARLMADLPEIGTYSNKAIAKLVGLAPLADDSGKRQGKRSIRGGRASVRSILFLVAAIAAKYDKTLAEFRDRLLAAGKEKMVVRIALAHKLLVRLNAKARDARAQYANAT

SEQ ID NO: 252176 - protein, 361 aa, unidentified
MYESIPIIAFDQHAASVMAAVLLPGDRTPALHQLAADLPTIGRFVARVGRPDVRCCYEAGPGGFELQRFLAARHIACDVIAPALIPRRPGDRIKTDRRDASHLAVLYRAGTLTAVPVPTEQEEAARDLLRCREDIRADLLRARHRLSKFLLRHGRRFTGTKKAWSKRHDVWLRAQTWPLPALDQTHRAYLRTLDEAVARLRTVETELRDLLTLEPLQARVTRLRCFRGIDDLTALTIAAELGDPRRFPGAPSAMAFVGLVPSEHSSGATRARGAITKTGNAHLRRVLVEAAWHYRHHPFVGRALRLRQQGAPDTVVQRAWTAQQRLYHRYRRLAGRGKPTQLVVTAVARELTGFVWAVLTQ

SEQ ID NO: 252177 - protein, 389 aa, unidentified
MIYVGIDVAKDKHDCCILGSEADKLFPVFTIPNNKAGFDELYEKMFSVTDDKTKIKVGLEATGHYSLNLLGSLIDKGLPTCVINPLHTNLYRKGLSLRKTKTDKVDARSIAMMLMTNKTLKPYSDTSYHSEELKSLTRYRFDKVQERAKLKSSVARLVNILFPELEKLVPSLHMASVYSLLSKLPGASYITECHLTHLKNLLETASKGHYGRDMAITLRNTARDSIGSVIPAKSMELKHTIHLIKVMTEEIDEIEDSIKSIMDTCNSPIMTIPGISYRMGAMILAEIGDFTRFNYADQILAFAGLSPSTYQSGQLDSSYSHMEKRGSRYLRYALFNAAKFVCKWDENFGAYLSKKIGEGKHYNVAIGHATKKLVRTIYRMELTGEAYRR

SEQ ID NO: 252178 - protein, 357 aa, unidentified
MPMLEGVVDGVIGVDTHKHTLTAAAVDPVGAVLDQRTDRAEPAGYQRLLTFGRTRVPGRRVWALEGTGSYGAGLAVFLAGHGEQVVEIDRPARPARRSGAKSDLLDAARAAREALAREHLASPRARGTREALRVLLTCRHGAVTARTATINQLKALLVSAPAQLRSQLASVDAGELVGVCARLRGHPTRPIEHTATVRALRSTARRILALQAEVDEVGEQLGRLVAATMPALLEVVGIGPVVAAQLLVSWSHPGRLRSEAAFAALAGAAPIPASSGKTVRYRLNRSGDRQLNRALHTIVLARRAHHPETRAYVARRTTQGKTSKEINRCLKRALARRLYKLLEATTHADQINRLATT

SEQ ID NO: 252179 - protein, 372 aa, unidentified
MDQHSRLFIGLDVSKLKISVAVADGERGGEVRFFGDIPSDPASVSSIVHKLAKRGAKLHFCYEAGPTGYELYRQLTAMGHECVVVAPALIPKRPGDRVKTNRRDAVSLARLHRAGELTAVWVPDRGHEAMRDLVRAREAAQEAQKRARQQLQSFLLRHGRVYSGRSSWSLAHRRWISTLTFEHPAHFIVLQEYCQAIEDAEVRLKRLTDLIAETVKSWTMAPVVEAYQALRGVSLMAAVVFVAEIGDIRRFENPRQLMAFLGLVPSESSTGEHVKRGGITKAGNSRARRMLVEGAWAYRFPARVSRSKQAQLEGLSRAVREIAWKGQLRLCSRYRTMILSGKHKAIAITAIAREMAAFLWAIGQEVQPAHHA

SEQ ID NO: 252180 - protein, 331 aa, unidentified
MDFKETIGIDVSKPFIDAAIHTARKHRRFKNTAEGFCQMLLWVSENTNVKRQHTLFAFEHTGLYSLPLSAFLSERHLSYVLIPGLELKRSMGIARGKDDRMDAKAIALYAYRRREEVTPYTLPSKRLLELRKLLSLREKLVKQRTGFKATNTEIKGFLTRTDNAMYFAVHEAMIKALNQQILAVERQLELVIQAEEPLKRMFDLIVGIKGVGTQTALFMIAFTNGFTLFPNFRKFASYAGIAPFPYQSGISIKGKSQVHCFANKKFKSLLSSCATIAIRCNPEMRMYYQRRISEGKGKMSTLNIIRNKLLSRIFAVVQRGTPYVDTMAYAS

SEQ ID NO: 252181 - protein, 351 aa, unidentified
MPRKSSVCTVTAIGIDMGKTTLHMVGLDSYGAIVLREKVSRGRIASRFANLPPCLIGIEAGMATHYVARELAALGHDVKQVPPAYAKPFRQGHKNDFRDALAVAEAVQRPTTRFVPPKSNEQLDLQALHRVRSRLVSQRTAVINQIRGFLLERGIIVRQGLRFLRQLLPDILAKRTDVLSPRMVRIVSDLAGDWRQLDDRIEIVTDEIETLAKADDSCRRVMTVPGIGPIISSAMVAAIGNGSAFSRGRDYSAWLGLVPKQMSTGDRTILGRLSKRGNIYLRMLFIQAARVILLRPANWPKHGFGAWLVRAIQRLHPNVLAAALANKLARIAWTVLAQERSYEARVTKAEA

SEQ ID NO: 252182 - protein, 314 aa, unidentified
MTISSAAGVDVGRDWLDVAIAPSGRHFRIANTPTIVAGLPARLRRAGVERVVLESTGAPAALLVRTLAADGMPTGVVDPRRICALRAAEGRRAKTDRLDAGLIARFALMMTDAAHPAPTPAMLELRALSTRRRQLVEMIAAEKTRLKQAFEPVILDSLRQTIRRLGEEREQIEARIEARTRATAEDRRKGELLRSIPGIGPTIAATLMADLPELGARNNKAIASLAGVAPHIQQSGAQAARAHIQGGRPCVRAAFYMAALSAVRHNPGFKADYQAMRNAGKPAKVALIAIARKLVVAANAIIKHDTPWENQKQA

SEQ ID NO: 252183 - protein, 369 aa, unidentified
MTDLTLFVGLDVHKKTISVAVVEAAAGAVVRFYGTIANTPDSVRTLCRKLSKEGQQLHFCYEAGPCGYGVHRQLTRLGHRCDVVAPALIPRKVGDRVKTDRRDAMMLAQTLRAGQLTAVWVPDEAHEAMRDLVRLRTQAMRDLRKARQQLLSFLLRHGRNSPYGHWTKMHRRWLGELVFAHPAQHLALEEMLQRIERAEALCDRLKAAILELVPQWSLAPVVQAIQALRGVSLIVAAAIVAEVGCFSRFESPRALMAYLGLNPSEHSSGATIRRGAITKTGNTLARTCLVEAAWTYRFPPRVSQIIRDRLKELPEPIRAVARKAQVRLSARYRKLTAAGKPEPKVVVAIARELVGFIWAIARMVEPKFA

SEQ ID NO: 252184 - protein, 349 aa, unidentified
MIIVGCDYHPSFQQIAFVDTETGELKEQRLMHREGAEEFYRALTATGLPVRVGMEASGHARWFERLLAELQFELWMGDASEIRRKRGRKQKTDRQDAQHILHLLLKDDFPKIWVPSWENRDVRQLLWHRHRMVQARTRIMNQLQAVALNEGLRCKKRLWREHGRQQLEAFRLAPWASRRRRDLLELMDRLNPMIAGLSQEIEKQATGSAHVQRLMTHPGVGALTALAFVLIIGEVERFHCGKQVASYIGLVPLEDSSGNRRRLGHITKQGSSMLRFLLVEAAQVTVRSDPQWRRQYFHLMMRRGRKTAKVAMARRLAIRLYWMWRRGWDYEQVSRFGSHAGQPGNRHGV

SEQ ID NO: 252185 - protein, 349 aa, unidentified
MEITTVAIDLAKDVFQVALANRVGRIIDRQRLTRRQFERFLETLTGDIEVIMESCGTSHYWGRRLQSRGVHVRLLPVQYVRPYVRRNKTDRADTDALLEAARCGEIRPVPVKTIEQQTLQAIHRIRTQWQTARVARINAMRGLLAEHGHAIPVGARTVLRRVTAILSDPDAAIPDMLRHSIALVVDEVHGLEEKIAGLDRQLGQIAATHPVATRLQTIPGVGVLTATALVGSVGHIHAFRRGRDFASWLGLTPRESSTGARRYLGRISKRGDVHLRCLLTHGARAVLRVALQLAQRAPDRLTRLQQWAVSIATHRGRHKATIAVANKLARIVWAVWHYDVAFEPQPRVA

SEQ ID NO: 252186 - protein, 391 aa, unidentified
MIQQAEQVIIGVDPHKLSATIEVVDKREQLLGSGRFTTDRAGYAAMRTYAKTWPNRVWAVEGSNGAGRPLAQRLLEDGEQVVDVPAKLAARVRLFDTGHNRKTDAHDAHAVAAVAVRTPTLRVLQLDGELEALRMLTDRREALTRRRVQTVDRLQALLAELLPGQAKRDITTGQAKAMLASIRPRDIAGKTRRRIAAEELAELTAVEAKIKKATAELKAIVLARGSRLMDIHGVGPVVAARVLADVGAVTRFADRNRFASWTGTAPLDASSGEQNRHRLSRAGNRRMNHMIHIAAISQIRLDTDGRAYYRRKRAEGKKSLEAIRCLKRRISDAIYRQLLEDAQRAAEDVGTGPGGHCRASQESSAVDLPLLIDTSDQPLPGPAEKTLRRTG

SEQ ID NO: 252187 - protein, 380 aa, unidentified
MTRATRGGEYTGPTEKILHLAFELGLKDWKLGFTTDLGTKAGLRVMPARDLGRLEREIAEAKKSFGLAATARVRSCYEAGRDGFWLHRYLVSRGIDNGVVDSSSIEVNRRQRRAKSDGLDARKLLTMLVRYHAGERKVWSVVRVPTVEEEDRRQLHRELRTLKKERTRTTNRIKGLLANQGIRLIKSGDLSRRLERLRLWDGSPLPAGLLARLQREREHAEFLHGKILELERERRQAILEGRSPALEKVRQLMLLKAIGASGSWVYVHEFFGWRRFRNRKEVGAAAGLTPTPYQSGDGSREQGISKAGSRHIRAVAIEMAWCWLRYQPRSKLSLWYQERFGRGGQRARKVGIVAVARKLLIDLWRFLEHGVIPEGAALKA

SEQ ID NO: 252188 - protein, 359 aa, unidentified
MRERRNEISFKGQKIYVGIDVHLKSWSVTVLSETSVLKKFSQHPSPEALYGFLTRSYPGAEYHSVYEAGFCGFWIHERLTALGIDNIVVNPADVPTKSSEKLRKTDTVDSGKLARSLRANELKGIYTPDSVSLEMRSLIRLKNSITKDTTRQKNRLKSQLRYLGIEIPQEFLTPFSNWSKRFFAWLKEIETLTPSGRQALDIHIRHLEELRRQKLEMTRALRTLAKTDRFREPLRLIMSVPGFGQATGMAFLSEICDITRFRNAEQLAAYIGMIPMCHSSGEKDGTGDITIRKHAVMRCNLIEAAWVAVRQDPAMNLFYTEQCKRMPKSKAIVKVARKLVNRLFFVLKHQTEYVNSIVS

SEQ ID NO: 252189 - protein, 345 aa, unidentified
MPIVGGLDIHRKQLTFDYLDTVTGEVKRGQIAPADRVHLRAWLARFAGRDDVAFALEGCTGWRYVAEELAGAGVAAHVAEPADTAFARGRKRHAKTDKTDCRHLRMLLAEGRLPECWIPPGHILECRALLETYHDLRAEHTAWVQRIHAVLFHQGAPALGEGALRTEQGLAALRAVSAAHLSPAGQLQVATALDMTDMLETRLHELRHQLLDAARHLAGAKVLAARLYGVGPVTALAMTCWLAGAGRFSSSRKAVRFAGLDVTVHSSDRKGPPGRLSRQGPPVLRWAVYEAGKTHARSSAPDHDYYAQVKDRCNGKRAALSEARKILRQACHILAELGDDALAAA

SEQ ID NO: 252190 - protein, 339 aa, unidentified
MKYTPVGVDIAKHLIQVHFIDENTGEVVDKQLRSRDFLEYFSNREPCLIGMEACGGSQHWARELTKLGHKVRLLQARFVKAFVMGNKNDVMDARAIWMAVQQPGKEIAVKTEEQQSVLVLHRTRMQLVKFRTAQINALHGTLLEFGETIHKGRAAMEREFPEALERMKERLPPYLITVLENQYKRLNEMDSLIEDIEKQLASVAKQNETCKRLLDIPGVGPLIATAAVATMGEASAFKSGREFAAYVGLVPKQTGSGGKIRLLGISKRGDTYLRTLFIHGARAAALLNRPGFPGECFICELRLPDHRFRWKHNKLFLLLPEEYGPAFPAIVDCYTSPPT

SEQ ID NO: 252191 - protein, 342 aa, unidentified
MQITTIGLDIAKNVFQVHGIDATERVVVRKQLRRRQVLEFFKALAPCLVGMEACATAHYWARELTKLGHLVRLMPAKDVKAYVKRNKNDAADAEAICEAVRRPTMRFVQIKSAEQQGRLMLHRTRDLLMRQRTQVINALRAHLAELGIVAPQGRQGVKELLMIIACEGDERLPVDAHASLVVLAAEFTAMQTMIGSIEKRIMAQHRSNEASRRLETIPGIGVAGATAIVATVPDPTVFRSGRDFAAWIGIVPREDSTGGKRRLGPISKRGDRYLRRILVVGAVAVLRYARQNPEKYPWLTRLLARKPFKVAAVALANKTARIAWALLAKGGTYRAPALVAAA

SEQ ID NO: 252192 - protein, 349 aa, unidentified
MANLTIGVDLGDRYSELYVVDAAGACVETGRIRTTVAGLEQWFGGRAPARVVLEAGTHSPWASRVLQRLGHEVLVANPRKLRALYENDSKDDRVDAEYLARVGRLDPALLKPITHRGEAAQADLAVLSSRDVLVRTRTLLINHTRGVVKAMGGRLPRCSAESFARRVGPHVPPALRPALAPVLAQLQQLTAAIRGVDREVERRCAEQYPATAQLRQVSGVGPVTALAYVLVLEDPRRFPRSRAVGAYLGLRPRRSQSGEQDPQLRITKAGHPFLRRLVVQAAHYILGPHGPDCDLRRHGERIAARGGKNAKKRAVIAVARKLAVLLHVLWISGEVYEPLRQRLVLAQAS

SEQ ID NO: 252193 - protein, 348 aa, unidentified
MTMVCGLDLHRRQITFDAFEVESGEVWTGRVWQPDRERFRRWLRADVTERAHGGAVSMAVEGCTGWRYVVEEVVAAGFEAHLAEPADTQAARGRKRRAKTDRSDCRLLRELLQDGRLPASWIAPTIVLEWRERARLYKTLVDQRSTWVQRIHAELYQHGVTLPETSIRWAKTRELLEDDRLEISAAGRQRVLTAYRMIDAITSESRPLKADLQRFGRRQPGCRALAEHQYGIGGLLAVVMWSELGDCQRFARSEQVVRHSRLDVTVDQSDRRRAGGFLSRQGPQTLRWALYEAAKNASHQRSPDHDYYADVKDHLNGKLATISMARKLARRCFHVLRAVDPNAVYATP

SEQ ID NO: 252194 - protein, 326 aa, unidentified
MTAFVGIDIAKEKLDVCLVAEAGNQHQASMDNSKSGINKLHKWLKKHGAKTAHVCLEATGVYGDLLAETLHARGYIVSVVNPARIKAYANSQMQRNKTDSLDAALIADFCRTQLPTAWTPPPPEMKELRALVRHLDDLKQEKQRTHNRLEAQSVSPAVRQQLRSHIRFLDKQMVQTKQLIDHHINRFPDLKQQRDLLMSIPGIGDITACHLIAELGDWRRFDDVRQIVAFVGLNPRQHQSGNTRSTHGISRIGRASLRAALYMPAIVAKRHNPHLVAWADTLKQRGLTGKQVIVAVMRKLLHLAYGVLKSGRPFDLNFGQSMPIAA

SEQ ID NO: 252195 - protein, 375 aa, unidentified
MRQDRAGEVIASYYGIDLHKDQITWHCIHKTGNGETARENGRISTDRILEVLVPMLSVNDSYLIVEASGSSFFFYSLVESHCKKALVVNPVAFRELYMTGKKTDRIDAKKLAERLKYHIECGDTESGFPEVFVPDAEIVKIRKMVTAYELVVKQGTQIKNQAKSVFRSKLMSVAVDIMEKGLEDALEDKRIDEADRSILIMLKRIYDTLMEEKEEIKKQILLLGSFRFREEVKLLMSIPGISLMSATVFMADICTVERFKSEKKMTSYLASVGTVDSSGGITRNGGLSRRGRRTSYRYILQGLEHIVNGNKDFQKFKERHALTRSNKVRAAIVRKTFVSMYFMLKNKETYRYLNEAIYTRKIRDLKKYGIDFKCA

SEQ ID NO: 252196 - protein, 408 aa, unidentified
MTVVGIDVSKGKSMVAAMKPGGELVTTPYEVKHSDIELSRFALDVLCMEPDTRVVMEATGRYHEPVAALLHSEGIFVSVLNPLLIKQSGAGSLRKVKSDPKDALKIAKYGLDNWSTLREYTPMEAIRQQLKLCARQCDLYSKNIVMLTNNLISLSDKTFPGVNELFSSPEKENGHLKWVDFYRTFWHCDCINRMSPDAFEERYKKWCKRKGYHFSANAADALYAASCGLYTTLPRDNNAKLLVTVATDQLIALRENQSKLEAEMLNLCKQLPEYETVMAMYGVGKSTGPHLMAELGDIRRFPHRSSIVAFAGVDPGVVGSGKMQLSSVATSKRGSPQLRKALFQVVSAYVKRKPENEAVYQFYAKKRDEGKPYYVCTTAAANKFLRIYYARVKECLNAAESATQAEES

SEQ ID NO: 252197 - protein, 343 aa, unidentified
MQTITTIGLDIAKSVFQVHGVDAGGQVIVRRQLKRRYVLTYFQKLSPCLVGIEACASSHHWSRELQALGHTVRLMPPAYVKPYVKRQKNDATDAEAICEAVTRANMRFVPTKTPEQQSGLLLHRTRHLFIRQQTAVINAIRGHLAEFGIVAPVGRHGVEELLNVVADPSDRRVPEMARACLLAFGAQLRRIKEQILEFDRLIRAWHRSNETSMRLDEAPGVGPVLATAVVATVADPKAFRSGRNFSAWIGLVPKQHSSGGKNRLGGISKQGDRYLRGLFVAGALAVIRYAKIHGTKHRPWLTALLARRPTKVAAIALANKIARMVWAMMVKGERYKEPVALAT

SEQ ID NO: 252198 - protein, 363 aa, unidentified
MVGNRTSVGLDVHARSVVACGLDGQTGELFERRLTPDRGEVAAWIEGLPGPAVVTYEAGPTGFGLARFLAGRGIECRVAAPSKLQRPSGDRVKTDVRDARHLARLLHLGEIVAVSVPSVEQEAARDLVRAREDVRGDLMSARHRLSKLLLRQGIVYYGGKPWTANHDLWLRAQRRAEVFTLPGLGLAFDTAYDTLLATVARRDRLDAAIAQMAADSAVTPVVIRLGCLRGVSTLTAFGLAVEIGDWHRLSGRSIGAYLGLVPTESSSGGSRSRGSITKTGNAHARRLLIEAAWHHRKPYRMGVDLQRRQDRAGPAARDRGQRANQRLHARWAGFDARRKPAVVANTAIARELAGWCWSLAVLD

SEQ ID NO: 252199 - protein, 362 aa, unidentified
MIETMPRAGLDVHAHQTHLFAFDAISGEFERRRISGPPENALAHLERLGPNLLAVYEAGPTGFGLARTARERGIDLRIAAPGLIPRGSSDRVKTDARDAERLARLLAAGELHFVWVPTIAEERFRDLIRCREDLRGDLMRARHRISKLLLRHGLRFGGPGGNWTRVHQRWLRSLRFEDPASGFAFGDYLAAIEALSERRSTLDRAIAELAPESPHAETIPRLRCFRGIDTLSAAGLCAEIGRFGRFAHPRQLAGYLGIVPSERTSDEKRHQGAITKAGSVHARRLLVEASHHYRHRPAIGAALRNRQEGQDPRVVAIAWRAQLRLNKRWADLRERRRKPAGVVAIACARELSAFVWEAATLE

SEQ ID NO: 252200 - protein, 398 aa, unidentified
MDDRRLVGIDLGITSAHTVRVLSGDGTIVCRRKAVPTLASLVEVEQAALVGAMPGVCLEVVVEPTGPSWLPIAVFFGARGHTVYRVSSAKAHDLRRVLSRHAKSNGIDADTLARLPLVDPAGLHPLQLPDAPRAALDRRVRACDRLTQAAACHKRRIKDLVRQLMPMTPLAGELGQADLAVLERYADPRTLLAAGRARLTRVIVKASHGQQGAARAEQWLGAARAALELYADHPAVAFQDLAAEVTTELRLLAATQAELDRHATEREFCYRWVDPAGLARSLPGLAEIGGPALVATMGPATRFATAAKFRSFTGLAPRRQRRARPTAKASRSARRAIGCCGPPSTAPPTTPAASTRSWPAATTCRWSNAAKTISVRSAWSPRVWPSAPGSPLIAACPM

SEQ ID NO: 252201 - protein, 358 aa, unidentified
MSRYATLEKKNNVVKQPVPTFCGIDYAKRFSYITIGDEEGRVLHQGPVPNEVGRLEKFFEQYPKLTIAIEACRGHEWLVDWLRDRKYVVHVGNVYAIKQIAQSRCKTDKIDSQILMELLAKEFLPTTYQPTRKERDYRELVRWRAQLVKSQTKYKLRVHALLDKENKGIASPFSAAGREALKQVELIGQKQAILKESMEVIEFIEQQIHEQDLKIRKLAKSNPDVYRLKHIPGFDVLTAMIFVAEVGDVKRFRSAEQLAAFTGLVPRVYASGGKMNTGRITKTGPGLLRQMLVQSAWAAIRCCPVLRSRHASISRRRGKKIAIIAIARMLAEIAYHVYLEKTPFDEMRLGAGLVRAVF

SEQ ID NO: 252202 - protein, 346 aa, unidentified
MKKCNTISIELAKSVFQVAIINPRGKILSNKEMSRKRFLSFMANQKTSRIVMEACGSSNYWGRLFKEMGHEVLLVAAQHVKPFVKGNKNDANDAIAIYEASCRPKMRFVSIKSLEQQDIQAIHRVRQRLIDTRKGLMNHARGILAEYGIVFNVGISQLRAGFVSILCGDNSSKEITSTLVELTKEWYDELSILDKEIAHKDKTIVKLARQSDATRRLMKVEGIGPVIATALVGSFGDKPTEFKNGRDMAAVLGLTPNQYSSGGKTNLGPITKRGDKYIRTLLVNGATSVINALGDKSDPKSQWLRKMLARKSDNKVRIALANKMARIAWAILAKNEDYKPELACAC

SEQ ID NO: 252203 - protein, 345 aa, unidentified
MKQYAGIDVSLEYSSVCVVDADGRIVREAKVLSEPDALIAWFAEHGVAMERIGLEAGPLSQWLHAGMTKAGLTVEQIETRHVRAAFKTMPVKTDKKDARGIAQLMRLGWFRPVHCKSLPAQEVRALLTARKLIQGKLHDIEMSMRGILRGFGLKVGPTTRRTYALRIRELIEGHPTLEAIAASLLKVRDALADEFAGFERKLRGMARQDDKARRLMTTPGVGVLVALTFVSAVDAPERFRSSRAVGPHFGLAPKKYQAGETDYSGSISKIGDVGVRTALYEAANVILTRPVKGSDLKTWALAVARRAGPRKARVALARKLAVVLHHMLRDGTKFIPHKPMRAMAA

SEQ ID NO: 252204 - protein, 420 aa, unidentified
MQQSTPFAALIGIDWADQKHDVCLVDTTTGSQQSSVIKHSPETLDEWARALRQRFGGRHIAVCLEQSRGPLIYALLKYDFLVLYPVNPKTLAKFREAFSPSRAKDDPTDAEYLVELLAHHRDRLRAWLPDDEQTRTLQLLVEHRRRLIGDQTRISNRLTALLKGYFPQVLAWFPDIRTTLVCDFLLRWSSLDALKGVRRQTLEKFFRDHNSHRKDTLEKRLEAIKDAVPLTTDQAVINSSVLMVKALAAQLQTTLAAGKEFDSQIAELCQAHADCELFASLPGAGAVYTSRLLAALGSRRERWTSADELLRYSGVAPVIERSGKSEWIRWRYFCPKFLRQSFVEYAGESVRHSVWAKAYYEGLRAKGKSHQAAVRALAYKWIRIIYRCWQTRTNYDEARYMKVLRNKGSQLVPAVATAEA

SEQ ID NO: 252205 - protein, 388 aa, unidentified
MFCERTSVGLDVHARSVVAAAIDGRSGEVFRARLTPSHEEVIEWVGKLPGPCAVVYEAGPTGFGLARALSAAGLRCEVAASSKLLRPAGDRVKTDARDALNLARLLRLDEVVPVRIPSAAEEAARDLVRTRDAARADLMRARHRLSKLLLRHGIVYYDGKAWTERHDRWLHHQRFDAAPTQSAFEDAYEAVVLATARRARLDEKITALAADSEFSPMTRRLACLRGISTLSGFALAVEIGDWDRFTGASIGAYLGLVPSEYSSGTSRAQGAITKTGNTHVRRLLVEAAWHHRSTYRPGAVLRHRWDQAPAAARARAHAGNQRLHARWVGLNLRRKAASDRQRRCRPRTCRLVLVAGGAARLENPGPEPTVEGSNHPGQQREEQRAPRL

SEQ ID NO: 252206 - protein, 309 aa, unidentified
MKQSVVYIGIDVAKAHLDVAWAGTFRRWPNERSGHAALVRWIKQSATPVQLICEASGGYEQALLESLQKSQVKVTLVQAVRVRQYARAAGILAKTDRIDAKVLAAFGSAMQPQPTPPLSAEQKRLRQYEAQRRHLSRILVAEENRLAQISCTELRTLSRSLISKIKTQIKTLDRGISDLIAQDQTLCVKAQKLTAISGVGVRTAALLLAQMPELGQLNRRQAAALAGLAPFNHDSGSVRGKRAIFGGRPALRSGLYMAALSAARFNPILSNFYQRLRAKGKPHKLALTAVMRKLLLALNQTLKPLPCSA

SEQ ID NO: 252207 - protein, 383 aa, unidentified
MKAVCGLDVHKDSIYLCILHPDGELFEQVFGVLTFQLHEMCKLLKKHHVSEVSMESTSIYWIPIWRVLSPHFTLRLVNPYFIKQLPGHKSDVKDAQWIAECTMKELVNGSFVPPEIIQQLRQYDRRIFDLNEEIVRKESKVDAVLQRCNIRLSNYVSNIECKSYRTVVRRLSEGVTDPQELIKEIHGRIINKHGRETILASMEGVVSQAEIDVLRQLREEIDIAESHKKECQDKMSEICQKYFPEELRRLQTIPGIKERAATSLIAEIGTDMSKFETANHLAAWSGLRPRNDESNKKVKSRKTTHGNSYLRRTIIQCAWAASRQKDYFFSWFSYHQTVVRRKNKMKVIVAVARKMLVAVWHVLHDNVEYFDFKHDCEESANNG

SEQ ID NO: 252208 - protein, 349 aa, unidentified
MKQTVAYIGLDAHARNCAMAVMNDAGEIIAERQFQTSEENLIEALKAVTAKVKYFAVEENTLAAWIGQVARPYVTDVLIADPCENALISRNARKRDPDDARKLCRLLRLGELKRVYHAETDLRALFKAAAQHYLDLRDQQVALKQKIKAMYRHWGVIDVEGKTVYSPKGRVVYLRRVCHPVVRHQLLHLYALMDETERQEAAAARELRQLGRSFPEIKQFKKIPGIGPINALIFDALIQTPHRFDNKHRLWRYCRLGITDRSSDGKPLGYQRLDRSGLGDLKSLSYWAWLAALRGTNEVRKFFEASLARTHDSTNARLNTQRKILAVMYGLWKHGGEYRAECFLGSSPA

SEQ ID NO: 252209 - protein, 335 aa, unidentified
MKQEMNILGIDIAKRVFHAVGMDERGNVVVRKRLSRHDLMPFMAKLPPVLIGMEACGGAHDWARRFRAPGHAVKLMAPQFVKPYVKSNKNDMRDAEGIAEAVTRPTMRFVPIKDIDQQDLQALHRLRDRLMSARTALVNEVRGPLHEYGIVIPKGVAKFRQAVVGKLESEKDKLTSLSREMFWKLVDEFALLEKQLAYDQEKRDTVATTHPECQRLMTIPGIGPFTATALVAAISDASAFKNGRQCAACLGLVPRQHTTDGKERLLGISKRGDTSLRKLLGHGARTTLRWVGRKTDRRSQWMRQLLERRGKNRTAVAVANKNARMVWALLTSHQD

SEQ ID NO: 252210 - protein, 434 aa, unidentified
MGAVRVLYSRCAVIDVHKDQVTVAVRTPGEGPRGRQTQVRKFQAFYGVLTDMARWLASLQVTQVAMEATGIYTMPVYHVLIEHGQFEQVLVCNAAHVKNVPGRKTDAVDAAWLAELLECGLLRGSFIPEPKIKAVRDVIRYRKKLVGARTSEFQRLGGVLQDAGIKLDSVASSIATMSGRAMIEALIDGERRGAILAELARGRMRAKISDLTLALQGRFDDHHALMCQLHLEHIDHLEDMIARLDAQVEHMMIPFARHRDLLVTIPGIGPVAAAAILSEIGTSPGEYFASGAHLASWTGLCPGNHESAGKRKHGTPRKGNQHLQSLLVEAAWAAVHTNGRLRARYHRLVLRFGGYRNPAAKKKAAIAIAHTLIVIIWNVLTTDTPYTELGADFYDRRTDPERETRRLIAKLEALGHTVTINPQPLTRLRSRSAG

SEQ ID NO: 252211 - protein, 350 aa, unidentified
MIIIGVDFHPEFQQIALLNTTTGEVEEKRLAHPDEVEKFYRAHASAGETVRLGMEASGHARWFERLIAELQFELWIGDAAEIRAKRGRKQKTDRQDAQHILKLMLKDDFPKIWVPSWENRDLRQLLWHRHRMVQARTRVMNQLQAVALNEGLHCRKKLWRERGRQQLESFALAPWASRRRRDLLELLDRLNPSIADLTQAIEREVENYPAAQRLKTHPGVGVLTALAFVLILGDAERFRCGKQVASYLGLVPLEESSGNRRRLGHITKQGSSIVRFLLVEAAQVTVRSLPEWRSKYFHLALRRGRKIAKVAMARRLAVQLFWMMRKQWDYEQLKKFGSHAGQPGHRDGVQ

SEQ ID NO: 252212 - protein, 364 aa, unidentified
MFERTSVGLDVHARTVVSCALDAQTGEIIMHRMTPDHGEILAWILSLPAPVRVVYEAGPTGFGLARFLLAAGIDTVVAAPSKLQRPSGDRVKTDAKDALHLARLLKLGEVTGIRVPSQDQEAARDLVRSREDLRGDLMRSRHRISKLLLRQGIVYSGGQAWTGTHELWLAPQRFDAPARQLTYESSLEAMHEISDRRDRLDQAITSMAYSSEYTPVVRALQCLRGISTLTAFGLAVEIGDWDRFTGSTIGAYLGLVPTEHSSGQSRSLGSITKTGNSHARRLLVEAAWHHRRPYNNPSRLMRSRWEEATSEARTRGHAGNRRLHERWISYLERRKRPVIANVAIARELSGWCWSLATGTHSASP

SEQ ID NO: 252213 - protein, 354 aa, unidentified
MSQTPNTAIAVIGIDIGKNSFHVVGHDARGAVVLRQKWSRGQVEARLANIPPCLIGMEACVGAHHLSRKLASLGHDARLMPAKYVRPYSKGQKNDFNDAEAIAEAVQRPTMKFVATKTAEQLDLQALHRVRERLVSQRTGIINQIRAFMLERGIAVRQGIGFLRTELPTVLATRTDALSPRMLRVIEELAGDWRRLDQRIDGLSGEIEALARQDQACSRLMTVPGIGPIISSAMVAAIGTGDVFSKGRDFGAWLGLVPKQISTGDRTILGKISRRGNRYLRVLFVQAAWVVLVRIKNWERYGLKSWIEAAKRRLHHNVLAIALANKLARIAWAVLAKGRAFELTRTDDAGVRPA

SEQ ID NO: 252214 - protein, 354 aa, unidentified
MKHLQLKDGDRLRRQCIGIDVSKKKFTFCLCQSTEQDLHFYTKPKEFENSEPGFRHLLAWSGNEVDSSVPYSFLMETTGCYHESLALFLARKGMTVIIVHANKAKNFARLNGQRTKTDPVDSKMLATMGCDTPGLKPWPIPDEKYLQLRDMSRLSEQLEKTRTQVLGRMESVTYSGYVTKSVLKAHKTLLKSIEKVQAANEQDMAELVNGDPVIKAGVDNMESIKCIGKKTAILVTAETLGFHQMTSAKQVASYAGLDVKKEQSGDSDKKGHMTKRGNAHLRAGLYFPAMVASWSNPQLMEDYNRICASHPQSKNIALVALERKLLCLMYSLWKNGKQWDPEHGQDKKQEEAMS

SEQ ID NO: 252215 - protein, 344 aa, unidentified
MSTEAVAKYYAGLDLHKRNVFCAIKDQEGKPICRRRLPAELPTILQALEPYRPQLSAVAVESTFNWYWLVDGLQAAGYPVRLANPAGMEAYSGLKQTDDETDAMWIAEMLRLGILPCGYIYPKAERPVRDMLRRRMLIVHQATQTVLSLQSMVTRQTGQTVNTAKLQKWTHEEVNEMFADSYSQETAVALLELLREQRRIQHSLEKKVLTAVKLQGPFQRLLTMPGIGQILGITITLETGPIERFGSAGQYASYCRTVNSRCESDGKKKGENNRKNGNKYLAWAFVEAANFAQRYSPRAQAWFASKTARVGRVVAVKALACKLAKAAYYVVRDDVEFNEAKMFG

SEQ ID NO: 252216 - protein, 433 aa, unidentified
MQDVHDEPLFAERVAGLDIAKAEVEVTIRVPSDTTAGRRQQETRTFGTTRRELESLGDWLTCWGVTKIGMEATSDYWKPVFFLLESRGFDCQLYNAAQVKALPGRPKTDRADSIWLAKIVERGMISSSFVPPEPIRRLRTHTRYRRHLTQARTAEKQRVEKLLEDGHLKLSSVISDIHGVSGRDMLEAIAAGQHDPKALAQLARGTMRGKIRRLEEALDCSFFTGEHAAVLAMMLAAIDGCTAQIEALTARIEELIEPYLPQVEQLDEVHGIGTICAQDVIAEIGVDMTVFPTAGHLVSWARWSPQVKQSAGKRKGSNATGRGNPYLSAALGEAAISAGRTQSFLGAKYRRLARRMPKKKALVATGNSMLTIVHALLSDPDARYTDLGADYYEQRMHACRQARNHVRSLERLGYKVTVQAINPETGELLPAAS

SEQ ID NO: 252217 - protein, 434 aa, unidentified
MTASDSTARSRNLVAIDIAKAKHEVLVELPTGKRRKMIVRNQLSDFRQLAGYLKRLEGALEIALEPTADYHRNLAYFLKVQGFAVKLVSSIAVARTREALHNSWDKNDPKDAQVILHLLRNGNTQYFYDPVIEQTNDLQELSKTHFQVSLRKTRVQHSLLNHYLPLYFPEAERFLSNSRSSWFARLLLEFPTPQAITQLTEKGFLEKASQLLWRKQSKAPILRALYAKAQESVALPVPLESQAIATFRLTLAQHLELCRIRAELEETAHELLQDQLDYQILRSVPGVGPIIALTVLAEAGDLRRFSHERQFLKFCGLDLATSQSGAYRGRTQLSKRGNSRLRSALWMAARRATHMQENTFRQKFSRYLRADPTNTDLRRKAYTACTAKMARTIYGLIKHEQFYRAYREDAIPEPGGRTRSHGPLRQAASGGLTS

SEQ ID NO: 252218 - protein, 392 aa, unidentified
MIYVGIDVAKDKHDCFVTNSDGEVLFKPFTISNNREGFDTLFQRISSVSEDLTKVKVGLEATGHYSYNLLGFLLDKGLPTYVINPLHTNLYRKSLSLRKTKTDKVDSRTIATMMMSDVNLKSYSDTSYHNEELKSLTRYRFDKVKERAKLKSSVSRLVCILFPELEKLVPTLHMASIYALLSEFPGADAVANAHLTRLSNLLSESSKGRYGKDTAVMFRDAARGSIGSHMPAKSLELKHTIKLIQELTVEIDEIEAAIKRIMDEEIHSPILTIPGISYRMGAMIIAEIGDFSRFDSADKILAYAGMSPSTYQSGQLDNCYSHMEKRGSRYLRYALYNTTKYVCHWDDSFGAYLAKKRSEGKHYNVALSHATKKLVRLIFAMEKSGRAYLTTT

SEQ ID NO: 252219 - protein, 349 aa, unidentified
MAEPRISYTGERIDVGIDVHKETYTVTCLRQRQIVKTATVPADPARLAESLPRWFPGARLFSAYEAGFAGFVLHRVLTTAGITNIVVNPASVAVAANDKVKTDRRDAKKLARELADGRLRGIYIPTEAEELARLLPRTRAQLVAHRATITRQIKAKLHQFGLITPGSRRLMSSRYLREIAAWELPPELHVSLTLLADQWRFATRQLLEVRRLLREQAKAQAALETVYRSVPGIGEVVARTLATALGDMTRCANERALLSYTGLTPSEYSSGAAIRRGHMSRQGVSRLRHVLVETAWRALSGDPILQAMFDRIAATRGKQRAIVAIARRLIGRIRACFRHGTPYAVGTVG

SEQ ID NO: 252220 - protein, 391 aa, unidentified
MSMYFVGIDISKYKHDCCIISAVDQQIVSKFTITNDKDGFEQLLISLNSLSNPEDIKIGFESTAHYALNLELFLENANHSFMEVNPVLIKEYKKSTTLRRTKTDSVDCESIARWLMTVEYKPHSKGFYHAYSLKSLTRLRDRLIRQRSFYLVKITNVLDHTFPEFKPFFNERLSKTAIYLLENYGSAEKMAHMNSASYDKLRCISRGKFSIQQFLHLKELAANTVGVNNSIFDIELNSLLTLYNSLCKEIKNLKAEITRLIEEVHPHYMSIPGIGPISAAVIYAEYGDISNFSNPSQMLAFAGIEPGINDSGTESHGGRMVKHGSSQLRYVLLNACLPLIRFDLTFATYYAKKRAEGKKHRVAITHVAKKLIRVIYALERQDVDFNAQKIR

SEQ ID NO: 252221 - protein, 339 aa, unidentified
MKYTPVGVDIAKHLIQVHFINEHTGEVVDKQLRNKALLTFFSNREPCLIGMEACGGSQYWARELEKLGHKVRLMQGRFVKAFVMGNKNDVMDARAIWMAVQQPGKDIAVKTEEQQSVLVLHRSRRQLVKFRTAQINALHGTLLEFGETLHKGRAAIDRELPAALDRMKSTLPPYLITVLEEQYNRLNELDMLIEGLEKQLISVARQSETCKRLMEIPGVGPLIATAAVATMGEASAFKSGREFAAYVGLVPKQTGSGGKVRLLGISKRGDTYLRTLFIHGARSVSLVAKEPGPWITELKKRRPASVAIVAMANKLARTVWAIAAHERQYDKNHVSIRPY

SEQ ID NO: 252222 - protein, 366 aa, unidentified
MNTIYIGVDFHARQQTICYLKTETGELVTRELKHRDKEQVRDFYGHFQGQVVIGLEASGYSAWFEAMLEQLGCEVWLGDATEIRRRARWRQKNDRRDAELILDLMVHDEFPRLHRPAVASREVLRMLRYRQKLTKLRTISKNSLQALALQAGLAKGKHLFTRDGQQELSAVAMSPVMQWQCEHWLQLMEPLNQQLLETMVWCKEQSKGDLRITRLRTHPGIGLLTALCVVHSLEPVSRFRNQRKVVAYAGFDPVERSSAERKHFLGISKAGSRLLRWLMVEAAHTAIRYDEDLKRFYKRLAERRGRPKAKVAAARKLLIRAYIMLRDEIDYAEFQRRAVAAALARRSQGPTSVPEVLIGQPASPGR

SEQ ID NO: 252223 - protein, 373 aa, unidentified
MNYSTVYVGMDVHKESFSLCCYTNEKEQAEYPQKINAHYSKVINYLEAMRFHYGDDVLFICGYEAGCLGFTLYHELTAHNVKCVILAPTSMPVPGGKKRVKTDKRDAAMIARCLAHHDYSPVHIPTQKDEQVKEFIRMRDDHRLALKKIKQQILAFCLRHGYHYDGTKNHWTQTHLTWLRTLCVEELYQEILEEYLLTYDYLTAKLSRLEKRIEALASEEEYRENVHKLTCFLGIKTQTALSVITETGDFRRFPDACHYAAFLGLTPGEDSSGGDQKRLGITKAGNRHVRMLLVEAAQSFARGKIGYKSSVLAARQEGNSPTVIEYADKANERLRRKYYRMTLKNGKKSNVAKTAVARELACFIWGMMMEHYA

SEQ ID NO: 252224 - protein, 461 aa, unidentified
MAKKQKIQQTTKSSALKITHPHTAGIDVGKDLMQVSVPEESCEQSNRCFGAYTKDLREIVDWLRQCGIKRVVMESTGIYWINLFLLLQEAGMEPLLVNAKEVKNMTGRKSDVCDADWLRFLGSCDLIKPCYQVDAVSRRLREYSRLRNIKIRDMARELNRMQKAMEQMNIKLGSVLSDVDGISGMKIIHAIIDGERDPQNLASLASDRCKKSKGEIASSLEGTWDPEHIFSLRLSVETYEYLKRQVEECDGMMRTFLDSYPIEARVDEAVKPLERSKKQIARKNKMDFDIESYAYRTFGVNLMKVPGISHATLLTLMSELGPGFTDKFPSASKFCRWCNLTPVDKITGGEIKSSNVPKRKNLVGQAFRQCVMSLQKKDVPLGYFYRRIKSRLGGAQAVVATAHKIAEIVYLMVKRQEEYREEITAQSEKEQITQKIANLNKKRIHLENQLSKLSQSTKAEN

SEQ ID NO: 252225 - protein, 356 aa, unidentified
MKYYTSTTEFNCGIDLHAHQMYVCVMDRQGKKLVHCNIKNNDFEYFLKLIQPYRHNLTVCAECMFGWYWLADACQEAGITFVLAHALYLHLIHGGKNKNDRIDSEKLAHLLRSNLIPPSYVYPSAKRPLRALLRQRLFYVWRRAELLARIHSHQLAHNRAPVKQTRRVRDFWEEQLLKAENHPLRQLALKNDLAMIRHFDQQIFQLEEELQRQTKRVACREFTLLKTIPGIGESLGLTILYEIGDVERFPSIKDFLSYCRLVKGTVASAGKIKGLRGAKLGNPYLRWAFGEAAVIAKRDHYQLKPLAQRLEARMNGNKFKANTLIAIKLARAAYFMLKNKTVFDPERLTAALAKAA

SEQ ID NO: 252226 - protein, 411 aa, unidentified
MAKRFEAGAEEDRAVAQALKLGCRLAPPSHLRLVKSNRIQRKIYPRKSAHTSMSPMPGVLEKPTALASSQAANEPKRKIGKENKTMNSTDSVAAALPVLGLDVAKASVQAELRSSGNKVRFGFDNNLKGFAQLAGILKEHNVPKVWAGLEATGPYSHALALWLHGQAHRLSLLNPRRVKQYARSAGKRNKTDLLDAAIIADFVCAHEPAPWQPPTLEVAQLQALVRRREELSSMLQAEKNRLEGVAPNVRSSLERILATLSAEKARLEKLITQQIRSHPQLSRDHQLLCSIKGIGSLTAAILLAEMARPGQVERARQAAAHAGLVPRREQSGTSVRRNRGLGKEGNRYLRKALYMPALVAIKYNAPLRHFASRLRAAGKPKMSVVCAVMRKLIHIAFGVLKHQKPFNPSLA

SEQ ID NO: 252227 - protein, 404 aa, unidentified
MELIALYKRVIGLDVHQAQITACAVIEEAEGLVRIEHRQFGAFKRDRRALAEWVAALQPDEVVMESTGIYWKSPYAALEAVGIRAKVVNARHVKNVPGRKTDMADAQWLATLARAGLLRGSFVPPAKLRELRLIGRQRQKLVGQLAAEKNRLHKVLSDSGVRLGVVVSDLHGQSARAMVKAIIAGQPVHEVLKLATRRLKASREELFEALQGEPTITHRFVLDELMQHIEELEARIGRFEARLLSELDSERNALSLLQTLPGVDLIGAALLIVEIGSDMEAFGSADRLASWVGICPGNNESAGKRRSGHLRKGNAHVRRLLCEFAHSASRTTSAFKTKFQTLVIRRGYKRAIIALAHKLLRTVYYMLKRREHYRDSAVDYEALSVKRNSARWLRALEKFGYLPS

SEQ ID NO: 252228 - protein, 323 aa, unidentified
MEQYVGLDVSQEQTSVCVVDGGGKVIWEGKCTSTPEAIAATLRTRAPEAVRIGLESGPLSAWHWHELRKLDLPVVCLDARHAKAALALQLNKSDRNDARGLAQIVRTGWYREVAVKSVDNHLVRSLLTTRAQLVRMRVDLANQIRGVLKPFGLIAGKGGGRPFAERVRALVAGGPLQEVAGALLAAWQAIGEQIAVLGRRLVTVARQNKAARRLMTAPGVGVLVALAYVSVVDAPERFAKSSSVGAYIGLTPRRYQSGEADYTGHISRCGDKLLRTYLYEAAGIILHRVPRWSALKAWGTRLARRIGTRKATVAVARKLSVTC

SEQ ID NO: 252229 - protein, 403 aa, unidentified
MNSVGIDISKGRSTVAVMRPFGEVVISPFKVRHTDSELSELARQLKSLDGETRVVMEATGNYHTPVAKLLHDAGLYVSVVNAKLVHDYGNNDLRRVKTDKKDAVKLANYGLDRWLTLPRYITEEDTRLLLKNCYRQYRQYSKVQTVLKNNLISLLDTVFPNANRLFSSPIRGDGSEKWVDFVAEFWHCRCVSEKSERAFTSKYLRWCRKHGYNFSEAKAHTIYAEANGHIGVMPKSETTKLLVEQAVAQLRATSTALAALKHEMQALTSMLPEYPVVMDLFGVGPTLGPQLIAEIGDVRRFYSKKALVAYAGLDAPPNDSGDVTGRHKSMSKIGASSLRRTLFLVMSVYLQNAPLDEPVYQFMDRKRAEGKPYRVYMMASANKFLRIYYATVKAYLESLEHTA

SEQ ID NO: 252230 - protein, 349 aa, unidentified
MNLHAIGIDLGKTVFHLVGLNQIGEIVVRKKFSRTQLLRFTSNVQVDLIGMEACPGSHFLGKALREQGHEARLIPAQYVKPFVKTNKNDFIDAAAIAEAVCRPSMRFVPVKTDEQSDMQSLHRVRERWIMRRTAVVNQIRGLLLERGITIRMGRCHLAAALPGILEDGSTSLSGTLRFLLVELKQELEQLAGHIEQAEALIQRAAQQSEACQRLDAIPGIGPLTATALIAAIGNGAAFRKGREFAAWVGLVPREHSTGGKQKLLGISKRGNSYLRKLFVQGARAVLRYRDKQCSGLKHWLAELSSRSHYNVVGVALANKLARMAWAVLAKGEAYRPPVLDMTGLQMAAV

SEQ ID NO: 252231 - protein, 402 aa, unidentified
MNAVGIDVSKGKSMVAIMRPFGEIVSTPFEIKHTTSDIHSLVELINSVEGESRIVMEHTGRYYEVLAHQLSEANLFVSTINPKLIKDFDNDSLRKVKSDKADAVKIARYALDKWQNLKQYSVMDELRNQLKTMNRQFGFYMKHKTAMKNNLISILDQTYPGVNTYFDSPARSDGSQKWVDFASTYWHVDCVRKMSLNAFIDHYQNWCKRKKYNFSQSKAEEIYGKAKELVPVLPKDAITKLIIKQAVDQLNSASTTVESLRTLMNETASKLPEYPVVMAMKGVGTSLGPQLMAEIGDVSRFTHKSAITAFAGVDPGVNESGTYERKSVPTSKRGSADLRKALFQVMDVLIKTHPQDDPVYQFLDKKRAQGKPYYVYMTAGANKFLRIYYGRVKEYLSSLPES

SEQ ID NO: 252232 - protein, 363 aa, unidentified
MRIIGCDLHARQQTLAILDTATGEVVNETLAHEGESVREFYSKLPGPVRVGIEATGSMKWFLNLMEELGIDCQVGHPATIRAAEPRRQKHDRRDAELLLKLLVENRFPSIWQPSKELLDLRALLLHRHQWVRLRTRIQNALQAIALANGLRRGSSLWSESGQEAIASLPLATHTAQRRSELQSMYARFEAEIEQLNERVLERAGERPTAGLLMTHPGVGPITALATDVFLGDPKRFRDGKALASYIGIIPRENSSGGRQRLGGLTKQGNPLLRFLWCEAAAHAVRRDDPELRQFYRRKLVQKGLGKARVAAARKLGIRLWIMLRDQIDYQEFCRRGQMQQKSGAACAGMPGRRYGAKSHRLID

SEQ ID NO: 252233 - protein, 342 aa, unidentified
MQVTTIGLDVAKRVFQIHGVEAAGAVVIRRKLRRSELLQFFAHLAPCLVGIEACATAHFWARELGAFGHQVRLVPPSYVKAYLKRGKNDAADAEAICEAVTRPNMRFVPVKTVEQQGVLVLHRARELLVRQRTMLVNGLRAHMAEFGIVVPQGIQRLPELVALLEDEKTGIPQIAHEVLAAMVVQINNLTTSIRQMEKRIVAWCRTNAAARRLSTIPGVGPITASALAATITDPTLFRSGRHLAAWLGLVPRQHSTGGKAKLGRITKMGDQYLRKLLIVGMTAVIRSARRTRAPAFAWVNALLERRPARLVSVALANKAARIAWAILIRGETYRAPAITAAA

SEQ ID NO: 252234 - protein, 446 aa, unidentified
MAKPDKRRYVGLDVHKKFLQFAIIDQDGQLLQEGKVPMDRRALQQFAEGLLQPSDEVALESTTNAWAVADLLEPYVAKVVVSNALATKAIAWAKVKTDKVDARVLAQLLRCDYLPEVWRPDETTRRMRRLSNRRMALVKQTTMARNRIHAALAQCLIHPEKALFSKAGQRWLEQLLQSDTLPEDVREAITHDLDLLRLLEQQIQAVERSMAQAGHESEDVRLLLTMHGIGLVAAVGLSAVIGPIDRFTRAEQLVSYLGLCPQTKQSGARSYHGPITKQGSALGRFLLIEAAHHYRTHPGPLGVFFRRLKARKGYNKAVTAVARKLAVIIFWMLKQREPYRYAYPTSTQQKLSRLRIVATGVRRRSGLKRGQKKSARLPGGSRVIKSLDRVYEEENLPRRRPLPAGEQRVIRETGAGAFVASIAQEHIVPRKGSRAWHRTPQHEVSL

SEQ ID NO: 252235 - protein, 353 aa, unidentified
MLIIGCDFHPSFQQVAIFDNRTGEIEEKRLQHREEAEQFYRSLAGQQVRVGMEACGHYPWFERLLAELGYELWLGDAAEIRATVVRKQKTDRRDAEHLLTLLREDRFPRIWVPSLEERDVRQLLVHRHKQVQARTRVKNQLQAMALSQGVQKKRKLWTEVGRAELEKLELLPYAAQRRKQLLQSLDGLEAEIEQLNRRVETEVAKRPAAVKLQTHPGVGPVTALAMVLTLGPAQRFPSGKEVGSYFGLIPSEYSSGGRQQLGHISKQGSSFLRFLLVEAGQTAARYDAELGRFYRRLAVRKHRALAKVAVARKLAVRLYLMLREDWTYAQLCRAVVQASPSHPVVEGQNRPLE

SEQ ID NO: 252236 - protein, 414 aa, unidentified
MLKIVYRICCGMDVHKSFVVACIASTNEQGVTSYKSKRFSSFTGDLHRCATWLAENGCRDVCMESTGKYWIPIYNILEPTCNVVLAHPKYVKAIRGKKTDKRDAKWIADIFKHDLVAGSFIPPADIRQLRDLVRYRWKLTNFTTGEKNRAQNCLTVSNFKLDDVFSDVFGKAASAITTRILQDPTEKITDVSGFRTKGMKATNEQVLAAVDGEMCEEQAEKLRIIRSHMDSLELCKLNLESLILSTAEQYLPQLNLVMTVPGIQSFAAIGIISEIGVDMSVFPTSKHLCSWAGLTPQNNESAGKKKTTRISRAGAYIKPLLVQCALCAIRAKQFPELRNRYLALKKRRGHKKAIIAIARMLLTAIYNMLKKNETYNPEIYRKGDRPPAHREVSVEEAIFILQRQGYLVTAPPTS

SEQ ID NO: 252237 - protein, 319 aa, unidentified
MNTTSKIQQKHQQRHVGIDVGKTTLDIFIYEKDDYFQVNNNPSGITQLIKKLKRYKLTRVLVEATGGYERAVAEACAEQGLPIIIITPIRIRQFARAQGIIAKTDKIDARLIAHFGVVMQPEVRQLPTKNVRKVRDLNARKRQLMESRTQELNRQHKAQPYMQSTHRRMLKMLDKEIEWINQQLEKEVAKIEEWKLTKDILLSAPGIGCGVAYTLLGELPELGQLSHRKIAALCGLAPFNHESGSMMKKRRIRGGRAPIRTILYMAMMSAIQHNPIMKTFFNRLVAKGKHKKVALTACMRKMITILNAMVRNNQEWNMA

SEQ ID NO: 252238 - protein, 352 aa, unidentified
MKLYTAFDLHANNSYAAIIDQEGHKVAGKKLINDPQVVLEFLKPHQKDIMGIVVESTFNWYWLVDNLMDCGYRVHLANTTAIQKYNGLKHSGDKEDAFWLAELLRLNILPEGHIYPKEERPIRDLLRKRSHLVRLRTSLILSLQNIVDRNCGKRIKVKDIKKRKEDLVAPFFEGNDDLSLTGKISKEAIDFFTAKILTVENFVEDKLELKKPYQYLLSIPGIGKILGLTIMLETGPVERFEKVGNYVSYCRKVSTRWTSNDKTKGKGNKKNGNKYLAWAFSEAAEFSRRYDEKAKAFYNRKMQKTNFMVAHNALAHKLARAAYHIMKDQVPFMPINYLVHKMVGTLNQYRGW

SEQ ID NO: 252239 - protein, 285 aa, unidentified
MKHWIGIDVSSATLDFALLDEHGVHLESLQVSNGRTAVMTLMNSWKKRYGVDTGECLVCLEPTGHYTLMLLNLIVEQHWHAWLAHPLDIQKSMGIKRVKNDKVDALRIAQYARTFREKTRLFTAQNLKLDKLKHLLTRRQHLVRVRAMYKKHLSDLNRYMDKDIKKAFDQLDKRLIVASDRAVIRVEQLIMAQIKADDITSEQYNLLLTIPGVGPQLASYLIALTNGFHRFTNPRELACHAGVAPFERSSGSSIRGRTQVSHQANKILRPCSTWLHLPTCNAKEN

SEQ ID NO: 252240 - protein, 395 aa, unidentified
MYFLGIDIGKRTHVASIMNEEGKVLLKGFSFPNTTEGAESLIERMVDYSGAPSDFVIGMEATGHYWLSIFSYLHESDYLIHVVNPLQTDGWRKGTEIRKRKNDIIDSVLIADLMRYGSFVETVLSDENVFSLKQLSRYRTYLVGTASDFKRKIIAVLDQVFPEYATIFTKQGVFGKASKELLLAFSAPIDLENISSETLAQYLAELSRNRIKAEKADQLKQAASNSFGVKFAQEAFTFQLRSMIEQLKFIESQIKETEGEIKHIMDTLNSVILTIPGIGPINGATILGEIGDIQKFSNPKKLVAYAGIDASVTQSGQYEATHNVMSKRGSPYLRKALFSAALVASQCDPVFSAFYQKKVSEGKHHLTALGAVSRKLCYVIHAILTKNEPYIIVSD

SEQ ID NO: 252241 - protein, 394 aa, unidentified
MILVGIDIGKNQHTFSIIDKGTGEILSNPSVFNNNQEGFLSLIKKLSDYAKSELLIGMEDTGHYHFALLKYLLDSHYTVALINPATTDLTRKLQGGITKNDSLDSLTICDVISSNHRKKPYRITKVNRFDLYEQKQLTRHHHNLKEELNIYKNRLQKCIDIVFPEFNSLFRSKYGIVYMNVLKAFASAKKIADSDIQTIRECFEYNRRGKRISLSAEQLKAAAKTSVGIHSVAEEIQIRHLVRQIEMIEKQLSETDKKIEEFSLQNDSPILSIPGISHFSGTSILAELGDICNYTKASQIIKFAGVAPYHHESSQFTAQHTAITKKGSRYLRKTLYQIILTVINNNKVFTAYYNKKLAEGKGHRCAQGHCIRKLLRIIYHLLSTGQTFDPDLLR

SEQ ID NO: 252242 - protein, 421 aa, unidentified
MQQCTSHPDDFAAFVGLDWADAKHDICLQAADADKCEARVLEHKPEAIDEWVRTLRQRFQGKPIAIALELDKGPIVAALQKYDGLVLFPINPLTLARYREAFATSRAKDDPSDAQLQLELLLKHRDKLKRLQPQSAEMRALSQLVEDRRTLVNDKVRLLNRLTSALKNYYPQPLQWFSEKDTTLFCDFLERWPTLKAAQLARRSTLERFLHEHHVRSADVIDQRLQAIKSATPLTTDEGIIMPRVLLVHALLGQLRATRQAVESFDEAIAERAHSHRDFALFDTLPGAGAVLAPRLLVAFGEQRERYADAAAVQKYCGIAPVTKRSGTACSVHWRYQCPKFLRQTFVEWSGASIQKSFWARAYYDQQRQKGKSHHVAVRGLAFKWIRILFRCWQTRIPYDEVRYLNALQRRGSPLIRNQTQ

SEQ ID NO: 252243 - protein, 455 aa, unidentified
MPKQKRTRNARTLPVARVLEPNAAGIDIAATEVYVAVPTGRDPQPVRRFSTFTDDLHRLADWLQACRVQSVAMESTGVFWIPLFQILEDHGFRVCLVNARHVKNVPGRKTDVSDCQWLQYLHSVGLLRASHRPTQTICAVRSIWRHRESLVQMAAVHIQHMQKALDQMNLQLHHVISDITGTTGLAIISAVLDGERNPENLATLRDPRIVASRETIARALVGDYRVEHLFTLRQSLQAYRQYQQWIAACDSEIERQLQVLPGNLPDDPKALSKPRDHHKPRRNEPRFDLRSQLYRIFGVDLTAVPGVSSLTAHTLLTEVGPDLRRFPNAAAFASWLGLCPDNRISGGRVLSVVTRKVKNRLTIALRMAAQSLHRSQSYLGQYFRRMRIRLGTPPAITAAAHKLARVLYHLITTRQPYEESTFAAMEERARQRQLLRLTKQAARFGFQLVPGRSVP

SEQ ID NO: 252244 - protein, 419 aa, unidentified
MTVNSLVRKRSLIKSDTLIVGIDVAKFRHVARGLLPDGAASRPYPFPNAREGFLALAAEIEGWKPTPASTVVVGLESSGIYWVNLARWLSEQGYKVVQVSGLHVCRSKELLDNCRGTSDGKDALLIADLVAQGKYLGFVQPAGVLADLRQLVGLRHRLVQERTARRNLLHQSVGLLFPEFAAVFAEVTGLSARLVLHRFPTPGSVLAQSPAKMRRLLAADGRAWVSVAKLEQLQAVARQSIGAREGAAGMERALRDTLLELDSLETRLEQIEEEISRLPVQVDETRIITSVPYVGSMTAAVLLGETGGLGQYSCAAAVLKLAGLNLYQLSSGIFRGDRRVSKRGRPLLRQALYLAALQHTKPGAPLYSYYSELVRRGKPKPVALVALSCRLVRLLYALVRDGRCYSAQPPERNAKAQAA

SEQ ID NO: 252245 - protein, 454 aa, unidentified
MAPRHKKTNKKVHVQLPTLHPNAAGIDIGAREIWVAVPPDADPNPVRQFETFTDALLQLRDWLKATGVTSVAMESTGVYWIPLFQILEAAGLEVFLVNARHCKNLPGRKTDVQDCQWLQYLHSVGLLRGSFRPPETICAIRSVLRHRNRLLRCAADQVRLLHKALTQMNIQLHHVISDLTGVTGQAILQAILAGERNPLALATLKDPRIKASRDIIARSLHGNWLPEHLFTLRQSHDTWLHYQQQVAACDQHLQTQLAELDSRVDLQAQPLSAPRTTHRTPQRNEPRFDARSECYRVLGVDLTAVPSFQTPTVLVLVAELGPGFAEKFPSAKHFSSWLGVCPDNRISGGKILSVATRSVKSRVAEALRLAAQSLVHAKNYFGDLYRRWKAKLGAPKAITAMAHKLARIIWHLVKFKQPFDPEVFRKEEEHQQKKKLKRLHHTATNLGFTLVPIQ

SEQ ID NO: 252246 - protein, 412 aa, unidentified
METLVERGCGLDVHQATVVACLLIVRKDGKVQKQVRTFGTTTRELFSMREWLLSQGCTHVAMESTGVYWKPVYAILEGAFQIVVANAQHVKKVPGRKTDVKDAEWIADLLCHGLLRSSFVPPKAIRELRDLTRYRRKLVESQSAERNRLLKLLESANIKLASVATDVFGTSGRLMLRALIEGKATPQEMADLAQRKLRSKIPQLQLALEGKLEEHHRFLLKLQLDRLERAEGDLAVLEQRIQQKLEPYTTQLALLDEIPGVDWTLAAVIIAELGVDMSVFQSVSQLASWAGVCPGNNESAGKRKSSRIPKGNVYLKTALVEAAHAAARTKGTYLRDKFYRLKARRGYKRAVVAIGHKILVSIYHMISQNVSYNDLGDLYLDKLNKNHLTRNLVHRLERLGYSVTLSLQQKAA

SEQ ID NO: 252247 - protein, 314 aa, unidentified
MPQELAYVAVDVSKKTLEIGGPDTDRTWSTANSAAGWRKLTAWIEGLDRPAVVGLEPSGGYERGLVDALLEAGVDVRWCDPARVRALAKALGAPAKTDRIDVVMIRCFLAQTGGRPVRRDPERVRLRSALSARKAAQDAAQALEAQALALPEGAAREALQALAVQARLTAKAQQQAAFDQLRRTPALEVLWRRLQTAPGIGPLVAAELVAHMPELGAVTSKAIAKLAGLAPFVRRSGQWQGRAVCSGGRPWPRQLLYLAVITCLRRPSKTKAIYQQLTAAGKPPKLAITACMRRLLVTLNAMIRDEADWNAAAT

SEQ ID NO: 252248 - protein, 346 aa, unidentified
MSTVYIGIDLAAKECVAAVIDRKGKLICVREFPTSEKHLAAFMQDYEGRAVVLLEECDLAYWARRVILPYAQKVEVADPVRNAWIHKDPIKNDKIDARKLAEIAQMGNYHPVYHTPDERIYALHMAVKAYEQLTKDAVAEKNRIKAKLRAQGIISEGARIYGVRGRAEALARVGDPEVRGIIAADYEHLDFLLSERAKAKRRFLSLAAHIPVVRAFQEIPGVGPVVAAVFCAYVKCPQRFSDVRKLWRYSRLGITQCISGGKELRRQRLDRRGCGALKDASMTAFLGAMHAGGDNRFKRAYAQTLENTGSATHARLTVQRKILAVMWAMWLYGTPYDDGNMPHKWA

SEQ ID NO: 252249 - protein, 470 aa, unidentified
MNTKGRRLDRRPGRKGGRSSPSVLERINANAAGIDCGAAEHYVAVPVGRDPNPVQSFATFTSDLHRLADWLLACGVTTVAMEATGVYWIPVYEILEERGIEVLLVNARHVRNVPGRKSDVVDCEWLRDLHSVGLLRGSFRPAAAIVGLRSYLRHREILVQSAATHVQRMQKALVEMNLQLHRVIADVTGVTGLKIIRDIVAGRTDPAELAKHRDVRCSASEEEIAAALTGHYKPEQLFVLKQNLALFDAYQQQLVECDRAIEACLKTLAEDSTEPSDPLPPPRSKRKPHDNEPRFEIRGPLHRVSGTDLAQLDGIGPYNALRLISEIGTDMSRWATEGHFTSWLTLAPRNKVSGGRVLSSRTQPSANRAAAILRLAVMSLSRGQTALGASYRRLAYRIGRAKAITAIARKLAVLVYRTLKGGFLYKDPGAEAYDKRYRDHAVRRLRQRAEFLGFALISRQTGEVFEAGVS

SEQ ID NO: 252250 - protein, 341 aa, unidentified
MAESVGLDVSMKETAVSIRRDGKRIWRGKCGSDPKLVAEVIRRRAPDAARVVFETGPLSVWFFHALTAEGLPAICIDARHAKAALDMAPNKTDANDADGLAQLAEVGFFREVRVKGFDSMLGRTLVAARNRLVQITTELSNQIRGLMKTFGLVVPAGKGSRFEAHVRALLADQEGLAPIMLPLLDAWRAVRVRAAELGRQLVASARQSAACQILMSVPGVGAVTATSFATAVEDPENFRRSRSVGAWLGLTTRRYQSGEVDYDGHISRRGDTHLRGLLYEAATVLLTRTSAESSLRTWGLKLQERIGFKRAAVAVARKLAVVMHAMLRSGQLFDRTAGVAA

SEQ ID NO: 252251 - protein, 415 aa, unidentified
MASDWSEAVIFVGIDWAEEHHDVHVMNPDGQPLGRARVPEGIDGIARLHALVADHADDPGEVVVGIETDRGLLVTTLVAAGYQVYGINPRAVDRYRDRHAMSGAKSDGADAKVLADLVRTDRHNHRQVAGDSDLAEAIKVTARAHQNLVWARQRQVNQLRSALREYYPGALATFGTDLAHRDVVAVLVKAPTPELGRRLSTAQIAAALRRAGRVRNVDARAAAIRDGLRAPQLAAPDVVADAYGTSAKALISVIATLTAQIDELESALADRFEQHPDADILRSLPGLAVILGARVLGEFGDDPNRYADAKARKNYAGSSPITKQSGSRKLALARYVRNRRLADAITLWAFSSLQSSPGARMLYDRRRAAGDTHHKALRALSNRWVGILHGCLRHRTPYDERIAWGHLTDNLPTAA

SEQ ID NO: 252252 - protein, 470 aa, unidentified
MGFEPGDNRWPPLRLARVCREHVSVVVVSPLLLREFNNQEEDEVRSVGRAIGLDVHRDFCEVAIAQDGEVRSAGRVDTTPEQLELFGASLDPRDRVALEVSGGAWEVARILERHVARVVVVSPADTGIRQARAKTDRLDARTLARLLAAGELDGVWSPDERCRVMRRRLARREQLVRARSRSKNEIHAVLVRRLVGRPPVSDLFGVKGRRWLAELDLPLEETETIQACMRHVEFLDGEIAAVERQIAAQALDSPEIRRLMTVPGVNMVCAATFMAAVGDIRRFSDPRSLVGYLGLDPRVYQSGSTPATGGHISKQGSASTRWALVEAAWSAVRQPGPQHAFYQRVRARRGHGIAIVASARKLACLFWFLLTRSEDYAHQQPSLTAKKLRLLEIRAGAPTVKGTPTGVWATRQAMRDGERRLAEQAEASYKRIVRDWQAATPKKKAGASVTPGRASQKPSKGKVARQTTSP

SEQ ID NO: 252253 - protein, 358 aa, unidentified
MADKVTVAAVVGSVDTHKDLHVAAVVDQNNKVLGTQYFATTRQGYRLMLTWMTSFGALKRIGVECTGTYGSGLLRYLQNAGLEVLEVTAPDRMERRKRGKSDTIDAECAAHAAFSGIRTVTPKTRNGMIESLRVLKTCRKTAISARRVALQIIHSNIISAPDDLREQLRNMTRMQLIRTLGSWRPDASEYRNVTNVYRISLKSLARRYLELHDEIADLDVMIAAIVDELVPELIKRNAIGYESASQLLITAGDNPQRLRSESGFAALCGVSPVPVSSGKMNRYRLNRGGDRAANSALHIIAIGRLRTDDKTKEYVARRVAEGHTKMEAIRCLKRYISREVYTLLRNQNRQVNSIPIMA

SEQ ID NO: 252254 - protein, 349 aa, unidentified
MLADELDYVVGVDTHLDEHVLAVVAAATGAVLARRVVQANERGYQAALRFAGEAAHGARAWAVEGTGSYGAGLARYLAECAETVLEVSRTPRTERRLRGKDDALDAVRTARAALSSEELALPRSGERREALRLLLVARRSAVDVRREALGQLRGVIVTAPDRLREELRVLPTGRLLERCSRLRRSSTARADELATRLVLRSLARRIDAATREAAELEREILAHVRTLAPALLDEPGVGPIVAAQLIVAWSHRGRLRSEAAFARLAGVAPVPASSGQTTRHRLSRGGDRQLNRALHTVVLHRRQHDPATKDYIAKRIAEGKSRRDATRLIKRYLARHLYRLLQNQEPLLA

SEQ ID NO: 252255 - protein, 349 aa, unidentified
MTRKNTLKSLPTDTEFRVVGLDLAKSDVSVAAIPVDDNTPSLVDQMTYADLLDWAGKISPTLFAMEPCNGYSLLCLQLENLGHEIKVISGSTVSMWINTHLSGQKTDLNDAIALARLAVSDAELTPIRHKSITEIRIQTVQAVRQQLMSQRSKSIVSFKALAQQWGIPCAAGHRNLKKLRESIEAKVDLITRPVANAMLFLLDAVKSLDRQIGQLNQTLQELVMSDERGRLLQSVLGVGTQISARVITVVGNVERFNSPRSLVAYVGVAPRNFITGHKNLTKKKHGNCPDLSHKGQGKISRRGDKLLRSLFIQGAACLTRSANHQWFSVRTFLPGCQIFKRRTLHRIFP

SEQ ID NO: 252256 - protein, 347 aa, unidentified
MRFYTKQHPFYCGIDLHARTMYVCILSQGGEVVLHRNMKAGPDALLKALAPYRDQIVIAVECVFTWYWLADLCAREGIPFVLGHALSMKAIHGGKAKNDKIDAQKIAVLLRGGMLPQAYVYPAEMRATRDLLRRRMSLTRKRAELLAHIQNTNSQYNLPEVGKKLAYKANRTGVAERFPDPAVHKSMDVDLALIGSYEPLLRDVELTIVQAAKQHDAQTLYLLQTIPGIGKILSLVLLYEMHDIQRFPRVQDFVSYCRLVKCAKESAGKRYGFSGTKIGNAYLKWAFSEAAVLFLRENPPGQKYLTRLEKKHGQGKALTVLAQKLARAVYYMLTHEKAFDMQKFLQS

SEQ ID NO: 252257 - protein, 367 aa, unidentified
MKDSSTVVGLDVHKNSIEIVVADTDGAMEVRHFGRIGGTLDALDRAVRKLASQGSTLRFVYEAGPCGYEIYRHLTRKGFLCKVVAPSKTPKKRGDRIKNDRRDAETLARMERAGELTAIYVPREEDEAMRDLTRAREDAVKALRTARHQLNAFLLRYGKRYPGKASWTPSHLRWLSDVPLPHPSQQIVLQESIMTVTGCTERTTRLTDQIMKLLPEWRMFPVVQALQALRGVAPIVAATTIAEIGDLSRFQNPRQLMAYLGLVPSEDSSGESTHRGSITKTGNGHVRRVLIEAAHAYGFPARVSRHLLKRHEGLPQAVLAIAWKAQVRLCGRFRRLMGRGKLRTKVVTAIARELCGFMWAIAREVKV

SEQ ID NO: 252258 - protein, 405 aa, unidentified
MLFVGDDWAEDHHDIEVQDETGRRLAKARFTEGLAGVAQLHELVAQHLDEDEADQVVVGIETDRGPWVLALIAAGYRVFAINPLQVARYRERQSVSGAKSDAADAHALADMVRTDSHQLRSVAGDSDQAEAVKVVARAHKSLIWERTRHAQRLRNVLREFFPAALQAFDDLTAADALELLAKAPDPDAAARLTIAQISAALKHAHRHHASDKARVIRAAPRTEQLRQPAAVTTAYAATVRAQVAVIGTLNAQIKTMGAQVEAHFGQHPDAEIYLSQPGMGPILGARVLAEFGDDDHRYADARSRKNYAGTSPITRASGKKKTVLARYVHNNRLIDALGQQAFSALTGSPGARSYYDELRRRGTGHRAALRQLANRLVGILHGCLKTGTVYDEAAAWSHHTHTAAA

SEQ ID NO: 252259 - protein, 324 aa, unidentified
MASNENTLVFVGIDVSKANLDVAIRPTGESWQMSNDLEGIGRLVEQLGQVSPALIILEATGGYEAACASALAVAGLPVAVINPRQARDFAKSLGRLAKTDRIDAAVLAHFGEAVRPEVRKLADEQTVQLQALIVRRRQLIEMLVAEKNRVALAHRTVRPHLLEHVNWLEKELDQIDKGLREQLQKSPIWRENDDLLRSVPGVGLVTSTTLLAELPELGKLNRKKIAALVGVAPYNCDSGQMHGKRAIWGGRATVRSALYMATLSGIRYNPVIRAHYQHLRHLGKSAKVALVACMRKLLTILNAIIFSKSTWKETLAAPKSMNTP

SEQ ID NO: 252260 - protein, 340 aa, unidentified
MRLYTAFDLHANNSYGAIIGEQGQRVKRQRLANDPELIFQFLSPYKAEIVGVVVESTYNWYWLVDALMSEGYKVHLANTAGIQKYKGLKHSDDQDDAFWLAEMLRLNILPEGHIYPKEERPIRDLLRKRGHLVKLRTSLIISLQNIIDRNCGTRIKVNDVKRLKENMVAPFVEGNEDLALAGLVSKEAIDFLTVKIRAIESSIESRIKLKEPYKYLLTIPGIGKILSLTIMLETGAMDRFEKVGNYVSYCRKVSTRWTSNDKKKGKGNKKNGNKYLAWAFSEAAEFARRYDPQARAFYNRKLQKTNFMVAHNALAHKLARAAYHVIKEQTPFMPEKLFAS

SEQ ID NO: 252261 - protein, 418 aa, unidentified
MNEDGDTRGSRRYVALDIHKHYCIIAAVDREGRVVLQAVRVEHADLEGWLKKNLRASDHVVLESTTNAWHVYDLLVPVAERVVVANPLKVKQIANARVKTDIRDTLILARLLAANLVPDVWVPPAHVRELRQLLSQRRQLVETHTQIVNRMHSVAHRHHLKHERGKRFNEKNTLWQKDKRLSKIEQFQLELELENRAYIEKQIGRIGKEVAKMSHQKPWAQSMMYLMQLPGFGVITGMTVLAAIGEIQRFDSARHLASYSGLTPGLEQSGTKYNEKGITKEGRKELRWALVEVAQRAVKSDPVWKARFQEMQKRMHRNQAIVAIARRLLELVWYVLTRRQPYRHFSQERIAYKYLTWAWQMDDEARDGLTRQQFTRYYLMRLGIGHDLTRIALDPKHPRKISSEAELLALRPELKQTE

SEQ ID NO: 252262 - protein, 325 aa, unidentified
MAETHVCVVTRNGTIIHKAKVPSMPADIAAELAQVPACRRVLFETGRMAPMLYHGLSQLPVVCVESRQAYQAVKSLATHKTDRNDARGLAHLARTGFFKPVHVKSLPAHAVRSLIIARKKLVGQRVTLENQIRGLAVVFGIRLPRALSPTFIRHALQSSEGIPGLSAAMRGLVAARAAVLAAVVAIDGDVRKMARASGACRRLMSIPGVGQLTALAFTAAVDDPRRFRRSRDIGAYLGLVPRRYQSGEVDYTGGISKCGDRQVRTLLYEAANVMLTRYKGPLKLKAWALAIANRSTMRKARIALARRLAIIMHAMLRHGTEFEPV

SEQ ID NO: 252263 - protein, 343 aa, unidentified
MEHFAGIDVSLEHSSVCVVDGVGKIVREAKVASEPEALVRFFRGLETGVTRIGLEAGPLSQWLHAGLVAAGFEVVLLETRHVKAALSAMVIKTDRKDARGIAQLLRMGWFRPVHAKSPRSQEVRALLVARKLLQTKLLDVEFSIRGILRGFGLKMGEVSKGRFAARVRELAAGHAMLERITEPMLRAREALRTEYAKLHGEMLAVVKPDPVCRRLMTVPGVGALVAITFKSAVDDPARFARSRVLGAHFGLTPRKYQSGETDVTGAISRVGDAMVRMALYEAAHIMLSRVTRFSSLKRWALDVVRRRGLKRAKVALARKLATVLHRMWVDGTSFRWGKQAASV

SEQ ID NO: 252264 - protein, 359 aa, unidentified
MNRVKPQGKERKEIVLEALERVWVAADTHKRSYHVAVYSDQRGMLATWVQPARAEVLVRRLEPIAAHVVQVVYEAGPNGFGLARALKSAGFAVLVAAPSRIPSAPGRQNKTDRLDCRKLAVLAAKGMLQAVHVPEEGEEADRQVMRRRGQVVDKLKQAKHQIKSFLLCYGIAEPPGLKNWTQAGVRALREVALADELRWCLEDMLDELEVLQTRLRRINAKVRELSRSPRHREAVAVLTSAPSVGLITAMTWRTEVLAPERFTAEELASHLGLAPSVYQTGNTRRGGPIIKAGNRRVRAMMVEAAWRWIRIDPWARACYARLVGNTGDSRKAIVGLARRLALRLWAMTLRGERYRPAAA

SEQ ID NO: 252265 - protein, 185 aa, unidentified
MRSPGARANQRHTEVRTFATTTNALLELRDWLIEQKVTLVAMEATGDYWRPPLYLLEDDVNVILVNPVSVAKGLPGRKSDVSDSMWLAQLAECGLLKASFVPPQPIRELRDLTRYRTTLAREHTREASRLARLDTIPGVGRDVAEVIIAETGGDMSRFPTPGHLASWAGVAPGLNQSGERRKPGP

SEQ ID NO: 252266 - protein, 469 aa, unidentified
MSIIYVGVDVSKGYVDVVFLNDAGSVLGEPYLFDDTPKGHKAMMSVLTELVRRDKEISFMIGVESSGGLEKNWLKFFSSISVQLPVSPYYLNPFCVKKFMARELHGGKTDILSANAIALYLKRGLRLSDKPYVEENTSDRLRFNLIRSFSKHCALMTNQLHILLIQVQPYLVQYCRSGFPDWILNLLVKYPTAKKLAAAKPEKIAKIPYITLSKAQDLIAQAKESVGALTDSNTARTIELLASELLRNQKLVEDEKKSLIKSNSNNMDKEILTSIPGFGEWIAIGFLTLIGDISKFQKASSLIAYIGSEPVVEISGDLKINRGISHHGSKELRALLYPATLAAISFNKVIRNFYDRLREKGKSHLVAMMACMNKLIRIAYSCLKTRMKFDASYGEKRRQEIETRAQLERKQNVRKRYKVSISLESPISARKAKERREMRKATENITRSHASKIYGVKHHKTQCLPHPSL

SEQ ID NO: 252267 - protein, 331 aa, unidentified
MSTQNYAGIDIAKRHFVIGIHGRDKTKTETNNPKGFTHTIDYLHKHNVGLVVMESTGGLEIPLAKTLHRAGFQVVIANPRCTKNYANGFSLAKTDHLDAKMLADYAQALEIKGLVANMLYIPPSEAEEKLEALVKRRSQLVDIRAAEKNRLEQIHESQQQSVKDLIAHLDKLIAELDKDIDSNADAFGGKGQVLTAIKGIGSTTSATLLSMLPELGTVPHKRIAMLAGVVPPPNQSGDTDKKTGCIGGRMAVRNMLYMAALTASRFEPKIKAFYERLRAKGKPFKVAINACMHKLLRILNARMRDYLASLQTKSERQSEQQSEQQPAPQCA

SEQ ID NO: 252268 - protein, 337 aa, unidentified
MKKNEFSNFVGIDVSKQTLDAVFIFNNEINNPIHQQFSNDESGIRKMLEVIKKHKEVSTENILFCYEHTGIYGKKLSYTLVEKRYCVWIEMPLAILRSIGLQRGKNDKVDAKRIAIYAMKNNKQAKLWESPRKEVATLRQLLTTRASLINGLKALKMPIKEYKETGNKELAELMQKSTKNAVQGIEKDIKKIEQAIDALIKNDERLSKLFTLLISIPGVGKITSTELICFTNEFKNYTEAKQLACYCGVAPFEHSSGSSIRGKTRVNNMANKSLKTKLHLCAMAAIQHDAELKAYYERKVKDGKNKMLVINAVRNKLVHRITAVVKRQTPFIYKTAA

SEQ ID NO: 252269 - protein, 412 aa, unidentified
MTAKDQFAAHVGLDWADKKHDVCVQFKNGDRIFHVIEHTPEALDIWLNELHQRAKGRIAIAVELKKGPVVYALQKYPFVTVFPVHALSLARYRQAFWPSGAKDDPQDAELALDLMLRYPHKIKAIEVDNPDIRLLQQLVEQRRLLVEDKRRFVNRLINTLKQYYPQPLEWFSHRDSSLFCELIIRWPSLQQLKRARSDTVRHFMNAKGGPAVAYTEQRVASIASAIPLTTDKTVIEANALMATALASQIKLTGDLIRTYDERIESLFDTLPDAELFKSLPGMGPCMGPRMLAALGDNRDRFNSAEEIQNYAGIAPVTERSGQKSWVHWRWQCAKFVRQTFVEWTAKTVNSSYWARLYYQSQREKGKSHQSAIRALAFKWIRIIYRCWKARTQYDEAKYLLALEARHSPLLKP

SEQ ID NO: 252270 - protein, 391 aa, unidentified
MIYVGIDVAKDKHDCFITNSDSEVLFKSFSILNNREGFDTLFQKVQSVSDDLTKVKVGLEATGHYSYNLLGFLLDKGLTTFVINPLHTNLYRKSLSLRQTKTDKVDARTIASMLMSDMNLKSYSDTSYHNEELKSLTRYRFDKVKERAKLKSSVSRLVCILFPELEKLVPTLHMASVYALLSEFPSARAVASAHLTRLTNLLSENSKGRYGKDTAIMFRDAARNSIGSDMPAKSLELKHTIRLIQELTSEIDEIEVEIKSIMDEINSPILTIPGISYNMGAMIIAEIGDFHRFDSADKILAYAGMSPSTYQSGQLDNCYSHMEKRGSRYLRYALYNATKYVCHWDESFGAYLTKKRAEGKHYNVAISHATKKLVRTIYAMEKSGQAYKHVA

SEQ ID NO: 252271 - protein, 346 aa, unidentified
MNYIGMDCHISTLDFAVVNDAGQLVKAGSVATSVNRFIEFVKKIPLPRTIYIEESTLAAWVLEICIRYGEKLVITDPKKNLWIASSGQKGDSIDALKLAQLARGGYIKEIHHPVGQRHRFRELMEAYHDTVRSEVRIKCKIKAKFRQNGIQCTGDTVYAKNHRQEWKDKLPQEATLLLILEGLWLQLEQLEQTEKEILKAAKAQAKHYPEIKHFEDIPGIGFINAATISAILETPYRFPNKRKVWMYAGLGLMKRSSGGKLYSEKLSTDYNRLLKYTIKQAAEAAIRAEDNPLRRKYLDMTLLHGIAPNLAKLTIARGMLASMWAMWEKGEKYNPEIRERATHKQG

SEQ ID NO: 252272 - protein, 449 aa, unidentified
MGNGSGVSRGDRNRNARLERLRALVPVTNAIAGIDLAGSKQMVVVTDHDSKVIARRTFRCRAWDLGSALDWAAGRAAAAGWAGVTVSCEPTGHRWRVLGQLAADRSMPFVCVQPLVTSWSRRTEDLTGDKTDERDAVLIARLTAQLRCYVPEPVDETWGRLRHLGTRREQLITEAGSQIQQMRDLLECAWPAALDTARQPFRSGTWTAGLPVIAGRDGGDFARTRRLGAARFEQAVRREITRRGGQKPCLRIVRGLFTALADPAGVIAHRPGAPERVQLLLEDGRHTRDRLAETERRMTAVLDELGLTALVTSMTGLSAIGAAAILAETGDPRRFATARAVVKHAGVAPREKLSGAFTGRTRLTGQGRPGLRLAAWRAVWGAQRANPVYAARYQYLISREQNKLTPTQAQTVIAAAILRHLHAVITTGQAWNPVTAAHGTRRDNRALAA

SEQ ID NO: 252273 - protein, 364 aa, unidentified
MANSTSIVIGGVDTHKHTHYAAAIDDNGRLLGHQEFPATASGYRGLLAWLRSHGRVVTIGVEGTGNFGAALTRHLSAEGEHVLEVNKPNRQARHMDGKSDRLDSEQIARAVLAETGIATPKSKSGPVEVIRMLRAARSSAIRARTQAFNLMFHTMISGPSEVRDGLVDLTKRTLVNRCLELEPETEELLALADEPHRMVLASVKFTLRDLARRWKVLDAEVKELSRQIKKLVDHVAPELVELFGVSTELAGQFLVTAGDNPDRIRNEAAFAKLCGVSPKPASSGRTSGRHRLSRGGDRAANSALYIITIVRLRHHEATRDYVARRTAEGLSKREIIRCLKRYIAREVFAALPRSRAPGVLDRAA

SEQ ID NO: 252274 - protein, 356 aa, unidentified
MVIVAIESHLGALYMQISTIGLDIAKNVFQVHGIDAAEKVVVRKRLRRRQVLEFFKALPRCLIGMEACATAHYWARELTKLGHEVRLMPAKDVKAYVKRNKNDAADAEAICEAVRRPTMRFVRIKSAEQQGQLMQHRTRDVLIRQRTQIINALRAHLAELGLVAAQGNAGVNELRAIVTDEQDTRLPIDARASVIVLAAQLEALESVIGAIEKRIKMQHRSSEASQRVEAIPGIGVIGATAIVATVADPTIFRSGRDFAAWIGLVPRQDSTGGKQKLGPISKQGDRYLRRILVVGAIAVLRRAQENPGKYPWLTQLLARRPFKVVAVALANKMARMAWALLAHGGTYRAPELAETA

SEQ ID NO: 252275 - protein, 363 aa, unidentified
MKAEKRRFVGIDLGKREYTMAVIGKTGKMSIHEGKTSIQGRQSLYKKLEKTDKVALEAGNLAFIMAREIQEQVGSDVRVLNSAKLPFIWDAPTKTDKEDAMKLAHLVEERRDEKLPLVPLPSEKEMARRKLLANYKREVKGRSRLINLLHSLFVHQGHTTVVKKNLSTAEKRLSAITVLWGQEREEAVWVLRHLELYELRLKELKEKIQQEAKTDEDMRCLQTITGVGPVVAYAYVAHVGDGSRFNTVSQVGNYLGFVPRLDYSGATKRHGHITKRGNGYLRGLLVQAAWCMVRSKKGGALREMYLYKTSVKGLSKKKTIVSVGRRMAELMYSLLRSKTSFEQRPWKGTRDKTAVLVKQAMCA

SEQ ID NO: 252276 - protein, 372 aa, unidentified
MKTNTTKTSPVPSVVSTSTPAVVSGFTLGLDLGDRAHHVCVLDAAGNIVREASLPNTRPALAQLLAEFPRATVALEAGTHSPWISRYLTGRGATVLVANPRKLHAISRSERKCDRRDAQMLARLARVDAALLHPIQHGSAQAQHDLLGLKLRDALVRNRVSLINAIRFTLKSLGHPVRNPSSESFHKTVLADIPADCLPVVQPLLTVLAQVTEQIKAMERDLVQRSQKDYPVTQRLQQIAGVGPLTALCFVLKVGDPERFRRGRDVGAYLGLCPRRDQSGGTDKQLRISKCGDGLLRRLLVSAAHYVLGPFGPACALREHGQRLTGTGSSREKKRAVVAVARKLAVLLLSLWKHGTDYEPRVTTPKLGLTPA

SEQ ID NO: 252277 - protein, 337 aa, unidentified
MEQYVGLDVSQETTSIAVRQDGRRVWRGKCPTDPKALSEVIRGQAPHAVRVVFETGPLATWLYHALQAENLPVVCIDARHAKAALDMAPNKTDANDADGLAQIAEIGFYREVRVKGYGPMLTRTLVGARSQLLRISVQLSNQIRGIMKTFGLIVPKGAGRIFERNARALLETNEAVARVVLPLLETWRVVRARAAELDRQLIAAARTGSSYRLLMTIPGVGAITAVSFVAAIGVPENFKRSRAVGAWLGLTTRRYQSGETDYDGHISRRGDRYLRALVYEAAVAVLTRTRTDCALRSWGLKLKAKVGFKRAAIAVARKLSVIMHTMLKTGAAFAAAA

SEQ ID NO: 252278 - protein, 346 aa, unidentified
MEQISRIGMDTSKRFFQLHGVNTAETVVLRKKLRRKEMVTFFEKLAPTVVGIEACGASHHWARLLQSFGHTVKLIPAQLVKPYVKRGKNDMADAEALCEAMSRPTMRFVPIKTAEQQAALMLVGLRDRLIRNRTQLSNAIRGYAAEFGFTAAKGVANLRPLLERIQADEGVPDLARELFAAQAEEYTQLEEQIAEISGKLMAWHKADECSRRLAKIPGIGPIGAALLMMKTPAPELFRSGRQFAAWIGLTPRDHSTAGKVKLGVITRAGDEALRAVLVSGATAVIRHAVGRKGRASPWLIDLLKRKPPKLAAVALANKLARIAWKLMVTGENYAATSTPIASAAAV

SEQ ID NO: 252279 - protein, 339 aa, unidentified
MPHIAALGIDAAKNIFHLHGVDAHGKVVLKKRLVRTKVLPFVAGLAPCLIGLEASGSAHYWARELTKLGHTVQLISPQFVKPYVQGNKNDPKDAAGICEAVSRPHMRFVPIKSVDQQDMQALHRIRERQIKARTALVNQIRGLLAEYGVVMPKGVAQVRQKLPFILEEAENGLTMLAREWLQALAAELQALDQRIRETNTQIQRVFESHEACQRLAQLEGVGPLTATALVAAVGEAATFKNGREFAAWLGLVPRQHSTGGKPLLLGISKRGDRYLRKLLIHGARAVVRTVDGKQDGRSRWLQGLIVRRGKNRAGVAQANKTARVAWALLAKGERYRPAA

SEQ ID NO: 252280 - protein, 331 aa, unidentified
MFPVGIDVSKNTLDLCMLYDGIKGRIKTRNIQNNRHSVENILRWLRLQHCSPEDVHVVMEATGVYHERLATELHDAGFRVSLANPHRSREFARGMGIMTKTDKVDAYMLACYAFLKKPHRWEPPAPEIRYLGALLRRRDVLLGDALREENRLEKYLSTDTPADIISSCRRMAQLLREEVSNIERQIKAHIKASPALRRDYTLLTSIKSLGPQLGMHMLVVLRSHNFVSAEQAAAFLGVVPIEKRSGTSVRRRPRMSKIGPPQLRAKLYMSALCGKIYNKRMRNIYDEMCLRGKPKMVAIGALMRKLVHWCYGVLKTGTVFNDEDLKPVLST

SEQ ID NO: 252281 - protein, 404 aa, unidentified
MNNVAGVDVSKGKSMVSVLRPFGEVVAKPFSVGHTGSELKELADYLKSLDGETRVVMEHTGRYYEPVARFLHEEGIFVSTVNPKLIKDYGNNTLRKVKTDKADARKIARYGLDNWVELRQHTPMDTIRMQLKTLNRQQSLYSKTKTMMKNNLIALLDQTYPGVNDLFDSPVREDGSQKWVDFATTFWHVDCVRSMDLAAFTERYCKWCKRHGYNFSQSRAIEIHTEAQELIAMLPKDALTKTMIRQAIDALNAVSTSLERLKAEMRTLAAQLPEYPVVMAMRGVGDSLGPQLMAELGDVTRFTHRNAITAFAGVDPGADQSGNHDAKSNRTSKSGPPELRKALFLVMDCLLKTQPQDDPVYRFMDKKRAEGKPYLVYMTAGANKFLRIYYGRIREYLVSLDNAD

SEQ ID NO: 252282 - protein, 349 aa, unidentified
MRYFQPPADTRFYAGVDLHARSLFLVVLDHHGQTRYARNLPAAPQPFRKAITPFRDRLVVGCECMHCWYWLADACRDDNIPFLLGHAWGMKAVHGSKTKCDRKDAEAIARLLKGGNFPLAYAYPKERRGLRDLLRARLRLVRQRAELYGHLHTARRQLNLPPVSSDVKYKSKRGGVLDGIDDACVRRRVEADLSLLEPLDTTIRRLEKDIEATARQHYATEMAVLQSTPGVGLVIALTILLEIDTLERFDTRQQFCSYARLCGARQESGGKTVGTGNAKQGNAWLKWAFSEAAVLSAQKNERIAKYLDKLSGRLGKGKALSALAHKLGRAFYHMLHNKEVFNIDKFLRH

SEQ ID NO: 252283 - protein, 397 aa, unidentified
MYIVGIDIAKRKHEAAVIDGEGTVIIKPFSFTNNCSGYNRLLAMLAKAKLPLDEVSFAMEATGHYWLALFTRLQKEGFRVQVINPVQTNSIRSFYIRQAKTDPRDALLIAEVIRFGHFSESTLHPENIYELRELCRGRHAIVSMQADVKRKVVALLDQVFPEYETAFTNMFGDTSMAILQTCPTPKELSEMPLEELCHLIEVSSRKRFRMAKAQELQALARGSFGFAMAGDVFSTMIRLYAKHLDFLKQQVREMDRKIAEIMDTLDTPITTITGIGPTLGAYILSEIGDISRFSSAAKLAAYAGIDPTMRQSGEYNGVRNRMSKRGSPYLRHAIWLAASSAVLHDPALKLYFQKKRDEGKPYMASVGHACRKMVSIIYAVMRDNKAYTPCIPNEISA

SEQ ID NO: 252284 - protein, 342 aa, unidentified
MGSVKRAGRSRHVMSASVCGLDVHKDSTYATILNPEGKIINQTRMSNERVLPYLSHFNVGKVGMESSNQIAPLFRQLTAKGYDVVVSHPKKTRYIAEAKIKSDRVDSKAIAELVRLDALPLAYFPNGEIAKLREKVRRRAFLVRERVKLRVKIKSVLTYEGLKWPSDHGLFTQKGVEWLHGLNLDSVESYLRVLKPLDEEIKLLSKELQGIAEDDEEVKLLMTIPGIGYYSAVLMKSEIGNIDRFPFGERLCSYAGLVPSTHASGRVVRHGGITKEGSKWLRWVMVEAAQTHVHKYDTSITRAYNRIAEKRGKKIAVIAAARRLLMCSYSVLKNKKPYYDQA

SEQ ID NO: 252285 - protein, 388 aa, unidentified
MNVGTAKSEPLTAIRTDLGAIFVSLELSRSSWLITSLSPGGGEKMSKHSVRGGDFAGLMQRFAQLQDKAKLRTGRSFRIIVVQEAGLDGFWLHRALQNEGIESHVVDAASIATSRRRRRAKTDKIDGETLVRTLLAYKRGEPRVCAMVKAPTPDEEDRRHLCRERKALTAERVRHVNRIKGLLFSQGISGYQPLRRDRRQRLEELQTGDGRAFPRHLKALVNRELDRLELLLKQIKTVEAARDALLAMEQTAKPATAAMLLDIRGIGPEFAAILWSEGLFRHFENRRQIAAYAGLAPTPWQSGAVDREQGVSKAGNPRLRTTLIQLAWLWLRNQPRSALSLWFHERVSRNGGRLRKTTIVALARKLLVALWKYVTTGVVIEGVTMKVA

SEQ ID NO: 252286 - protein, 344 aa, unidentified
MQIVSVGIGLGKTTFHLVALGVAGKVLLRKKFTQRQLLTYTVNMQTSLIGLEACSGAHFLGRELRKQGHDVRLIAAQFVKPFVKSNKNDFVDAEAIAEAVERKNMRFVPIKTDDQLDLQAIHRVRDRLISRRTAVINQLRAFLLERGLVFAKTPAKLQAALPEILENADLDLTPQMRNLIDLLWKEWKTVEDQIEGLSLELERISAADPGCTRIRQIPGIGPIVATAIVAAIGNGAAFRKGRDFAAWLGVVPRQYSTGGKARLFGISKRGNVYLRKILIHGARAAVLRIKRDRAPIGAWLDALDARAPKNVVVVAMANKLARIAWAVLSGGEDYRPNSNTVTAS

SEQ ID NO: 252287 - protein, 353 aa, unidentified
MIKNNTFFIGVDLGDKYSHLTMIDQEGQLIEESRLLSTRQAFERKFSNSEKCRVAMEVGAHSRWASHLLDEMGHDVLVANARKLRAIYDNPRKGDRADSETLARLARLDPKLLSPIHHRSPQAQADLAVIRSRYALVRSRTKLINHARGMVKASGARLSSCSAASFPTKVAGAIPDRLQSSLLPIVEIIALVTRQIREYDRKIEQLCEESYPETWHLQQIDGVGSLTALAFVLTLETPDRFRKSRDVGPALGLIPKRDQSGDHDPQLRITKCGDPYLRQLLVHSAHYVLGPFGPDCDLRRWGLKLAERGGKNGKKRALVAVARKLAVLLHHLWKSGETYDPFYQSQKTAAVAA

SEQ ID NO: 252288 - protein, 340 aa, unidentified
MLIRKVRQRTATGKSAVEYDHYVAIEWSLKTMAVAHMSQRDQIPRIFERPSNLKELKTYLGSLKGRTMITFEESGTAHWLYLELVDCADRVLICDPFQNRLLFHGPKTDKIDAGKLCELLRTGLLKEVYHSDSALYELRLLVSAYEDVVRSGVRVLNQKEALQLGHRDKGNGAVFVGEILKENIDLYRRSKEQYEQRFHGFARRNKLVRFQREIDGIGTIGAVKIVACVVDARRFPHSAKYLSYCGLVKHEKLSGGRTYGWRKPRYSRVLKSVYKTAALAALKGNNPIREYYDHLLAQGVAEHNARHAVARYIARISYGMLKSGTHYEPYRWRDAERKSA

SEQ ID NO: 252289 - protein, 392 aa, unidentified
MYIVGIDIGKNHHEASIVSPEGKQIGRSLRFATTHKGADSLMSFIFKNIGNSPCVFGMEATGHYWYPIYSFLKAKGYTICVINPIQSDSLRKMYIRQTKNDSIDSFLIAEVIRFGQFGTTSMADENILAMRQLCRYRDSVISSRTEIKLRIGTIMEQIFPEYEKQFSSLWVSTSMGILEKYLTPENIENAPIDELFEIIKDKSHNRLTKAKAISIKEAAADTFGIKIAQDAFSFQLKQLIDRMNFLDKQIEALDCQILEYYEKFDCYLHTIPGIGMIGAATILAEIGDISRFKNSSSLIAFAGIDPTVRQSGEFNSTHNHMSKRGSPYLRHAIFLAATTCSFHNSPLNAYYKKKRDQGKHHLTATGAVARKLTTVIYAVLRDSKPYEPKKFC

SEQ ID NO: 252290 - protein, 324 aa, unidentified
MQNIVSVGIDVSKAKVDAGLLTTDQTGQTRSFDNSNAGLREMMKWFKKQGVGKATPCVIESTGDLHLLSAITLTNAGFTVNVINPIITKQYQRSSIRDAKTDQIDALRLARIGLMETGLRRFTTNMQALGAKKALSLIATLERTRQQLERSTKQFRDTQKLLGLPINCDAMDIVIKGMTAQIERLYRQVQQLAPDEVKQLAKATPGISERQMAVLATAVAGAHFTNRDQLVAFVGLDIKKRQSGNWQGREKISKRGNAFVRKVLFQIGWSLKQNNTLYRDYFEKLKQKGKHYFTCILAVARKFLRFFFAYYLREDSALVLSTTI

SEQ ID NO: 252291 - protein, 314 aa, unidentified
MAEAVFVGIDVSKLELVVAVRPSGESLQLPNDRRGIKRLVEQLRKLVPELVVIEATGGMQRAVVAALWAAEIKVAVINPAWIRNFARGAGALAKTDKIDARMLALYAERERPQAKAPADAETRALQELVMRREQLLEMVGAEKNRLASAEGRTLREGIKHHIAYLRGRLDDADKQIDKTVRRSEPWRRKSELLQSVPGVGKVLSAMLLAKLPELGELNRKQTAALVGVAPVANESGKWRGYRAIAGGRWEVRNKLYMSALSAVQANPVLKPLYQRLLARGKSPKVALVAAMRKLILILNAMLRTNTPWNPTCAA

SEQ ID NO: 252292 - protein, 338 aa, unidentified
MNILFLGIDLAKNVFQLCGLNQAGKPVYTKRTGRKELLQTLANIPACLIGIEASTGAFYWQRVFEKLGHKVKVISPQYVKPFVRGQKNDGNDAQAIAVALMQPTMQFVPPKSPEQQDIQTLHRARQRIVNHRTATVCQIRGLLLDRGIPIGSAVSRARRAIPLILEDAENGLSSRMRRTIAELYDLFNDLGRRIHFFDKEIETVFRQSETCQRIAKVKGIGPKTATAVVAAIGKGTEFKNGRHFAAWLGLVPRQHSSGDRQVLMNMTKKGDKHLRTLFIYGARAVVRVATNNNDGHMNQWVNQLKERRGFNKTTVAVANKNARIIWSMLRNDTGYQVV

SEQ ID NO: 252293 - protein, 347 aa, unidentified
MRPKLLMENGYILRQCVGIDVSKETLVVTMCMFSFAEEAHYSDVKTFKNNKTGFNQLVKWSRKEAYTDKPLRYVMEATGVYHEELASHLVKIGCTVIIMMPNKAREFAIWEGMISKNDTIDSRVLALVGCVKRSMRPWQPSKEIYHELRAMTRFAQDTKKLRLALKNHLEALEHSHQAEKSVVKHYEAMVSYLDKRLEMNLKNMKEKVASDEALNKKVENIITAPSLGFTSVITVIAETNGFALIQNRKQLTSYAGFDVKDNQSGNVEGTSRISKKGNSRIRAILYMPAVQAQLRSKHLKEAYDRIVQKHPDKKMIAVTAMERRLLLLIYALWKSDKPYDEDHNKKK

SEQ ID NO: 252294 - protein, 327 aa, unidentified
MNITRVGVDIAKSVFHVHGVDRHDQVHWQGKYSRETWLEALSKRVPTGAEIGMEACASSHHWARELQQRGYRVKLVAAQFVKPYVKSNKNDRVDAEAICEAMSRPSMRFVAVKTATQQDIQAAHRIREELVGQRTAKANQIRGLIGEYGLVAPTGVQRLRCALPRWLEDAENGLSDAFRALLAGLAEDLRYLDERIAILDERIARSVKDDPVAQRLLALRGIGPLTASALSGALGDGRAFRRGRDFAASLGLTPRQHSTGGRDRLLGISKRGDSYVRKLLVHGARAVLRHAAAKDADTDGPAHDEFHSAGPYTGCPPSSGSAAGCAC

SEQ ID NO: 252295 - protein, 286 aa, unidentified
MYLGIDVHKRYAQVAVMDETGEIVEEVRVENANLDDLAQRYAGADAAIKATSNYYHIHDTLSKHLDVTVAHPKNLNQIADSDKKTDRVDAKELARMVRLNSVPESYVPTDEVREARALVRGRQTLVENRTKYANKIHGLLSDHGITGDVKPLSVEGREFLQELSLPTPWDALLASYLDVIETLTEEIQKLEETIEERAGSLKETQLLMTIPGVSYFTALTIYAELGEISRFDGDKAVVSYVGLNPTIRESATRGSREVSRNVVLVVFGGCSYKLLILQYMPLMMNI

SEQ ID NO: 252296 - protein, 408 aa, unidentified
MFCGIDWSKRHHDVAVVDQDGNLVAKRRIGDDAAGLTELLTMLAELGDHEQDPVPVAIETPRGLLVAAPCHRAARVCDQPDGGGPLSGRWTPARSKSDHADAMVLANILRTDQQRHRPLPADSELVRSVAVLARAHQDATWRRTRAVQELRSLLREYYPGFLAAFAEKGPANLASADARAVLAIAPTPADGVRLTRPRITAALRRGGRQRNIEAVTDNVHRVLRQPQLRHPALVEQAMGQQALALLAMLNAACDGADQLGQATAAAFRQHPDYGIVTSFPGLGELTGARVLAEIGDDRTRFADARSLRAYAGSAPVTRASGRSHIVTHRRIKNDRLAAAGFNWAFMAITHSSPARAHYDRRRGVGDGHPAALRNLFNRFLGQLYHCLGTGQIYDPVKAFGTHQPAVAA

SEQ ID NO: 252297 - protein, 345 aa, unidentified
MKEISVIGLDLAKNVFQVYGVNRNGERSASRRLRRKQVHHYFSQVPPCLIGMEACSSSHYWARELIALGHRVKLMNPRFVKPYLKGNKNDQNDAEAICEAVQRPNMRFVELKTTEQQSVLHLHKSRQLLIKERVGLSNHIRALLSEFGIVLAVGVKVFEAQVPVLLTEDDNALPALSRRTLNLMWTAYRDLRSLIHELDRELACWHKDNEVSCRLAEVPGIGVQTATALVAKLGAGRSFHNGREVAAFVGLVPKQASSGDREKLLGISKRGDGYLRRLLVQGAKSVIRHVRRRQMAGLAGGNPWVESLLERKHPNKVAIALANKMARVAWVVIAREEHYIKASTC

SEQ ID NO: 252298 - protein, 429 aa, unidentified
MIMGFTKPIEHFNPQRKKVITMNTLYVGIDVSSKSNVVFLMLPNGDKHSNFSVANSQEGSTQLVKRIYSALTSHSLDTVLIGLEATSVYGDNLVYFLREDATLAPFNRKIHVLNPKQVKKFHDSYNDLPKNDYVDSFVIADCLRFGRINKEVYMEDYRYKALQNLTRARFFAVQNLVKEKQRFMNVLFKKYSTMTQEKVFSDTFSSTALAVYDEFESAEALANMDLHELTDFIIEKGKNRFPDPDAVAKAIQKAARSSYRLPKTVNDSVNQVLSISITSMKALEVQIKEFDKAIKAQMELLPNVLVSIPGIGPVYSAGIMAEIGDINRFDNQAALAKYAGLAWKQHQSGGFEAEVTKLIPSGNRFLKYYLCEAAFSLVRCDKEYSDFYRLKYKEVNRCQHKRALALTARKFVRLVFRLLKDNRLYSPAK

SEQ ID NO: 252299 - protein, 334 aa, unidentified
MKSKTFIGIDISKKVIDLCFLDSEQHDFIHCKNEIRVITKNLKQLFKKKDLNIEETVICAEYTGMYIYPLIKVCQSLGVNLWLESGATIKWSSGIQRGKNDKVDSERIAVYASRFIDKAKFYTYHDEQMDELLYLNSERELLVSDRAKYKSQIKDQKGYMPGPVYKSKKGRLSSLVNYLSKSIDEIEEKMSQLIKGNEQLQGQYTIITSIGGIGQQIAMQTIIATRGFTKFTDARKFCCHVGVAPFAYTSGSSQTSRWKVSQRANKKLKSLFHLAAISTIRMNGEFTQYYERKVGEGKNKMSVINAMRSKLIHRIFALIRDGRMYEEKYLNSLV

SEQ ID NO: 252300 - protein, 403 aa, unidentified
MNAVGIDVSKGKSMVTILRPFGEIVSSPFEIKHTSSDIHSLIKLIHSIEGESRVVMEHTGRYYEALAHQLSAADLFVSAVNPKLVKDFNNDSLRKIKSDKADSVKIARYALDKWQSLEPYSITDKLRAQLKVMNRQFHFYVKQKTAMKNNLIGLIDQTYPNANTYFNSPTRSDGSQKWVDFVSTYWHVDCIRKMSLNAFVEHYQNWCKRKKYAFNKSKAEEIYTKTKELVPVFPKNEITKHIIRQAIDQLNSTSVTVETIRTLMNETASKLPEYSIVMQFKGIGPSLGPQLMAEIGDVTRFTHKGALTAFAGVDPGVNESGSYAQKSVPTSKRGSSNLRKTLFQVMDVLIKTMPQDDPVYQFMDRKRTQGKPYYVYMTAGANKFLRIYYGRVKEYLSVLPDPS

SEQ ID NO: 252301 - protein, 343 aa, unidentified
MEHYVGLDVSLKQTSICVVNQAGSVLREGVVDSDPDAIGAFVRSNAAGVVRIGLETGPTATWLWTELKRLGLPVICIDARHAKAVLKMQINKSDRNDAAGIARIMQTGWFKEVRVKDIDSHSVRALLASRALLVKIKRDLENQIRGLLKNLGLVIGRAKFNVFAMRAEELIEDRPELIAAVRPLLEARKAIEQQVGDLDRKVLKLARYNAEVRRFMTVPGVGPITALCFKATIDDPTRFKRSRSVGAYVGLTTRRHASGEVDWSGRISKCGDAMLRTYLFEAANVLLTRVPKWSALKAWGMRLAKRNGLRKAKVAVARKLAVILHRMWIDGTEFNWSKKEVAA

SEQ ID NO: 252302 - protein, 349 aa, unidentified
MPKSNTAVVTIGIDPGKNTLHLVGLDARGAIVLRERVARARIVSRLANVPPCLIGIEVGMGTHYVTRELLALGHDVRQVPPVYAKPFRQTHKNDFRDAHAIAEAVQRPTTRCVPPKTDEQLDLQALHRVRYRLVGQRTAIINQIRCFLLEHGITVRQRLHWLRHALPNILAQTTDVLSPRMVRILEDLAQDWRHLDDRIETVSGEIEALSKNTEPCRHLMTIPGIGPIISSAVVAAIGNGTAFTRGRDFAAWLGLVPKQISTGDRTILGRITKRGNRYLRMLFMQAARVVLLRPRNWMKHSYGPWLAAAAQRLHHNVLATALANKLARIAWSVLAQHRVYEARLSLAAV

SEQ ID NO: 252303 - protein, 318 aa, unidentified
MTITTIGLDTSKSWFQVHCIDADGRTVLRRKLARSKVLSFFANIPSCLVGLEACGGSHFWARELAKLGHDARLMPARYVRAYVKTNKHDAADAEACCEAVQRPGMRFVPVKTEEQQSMLMIHRARDLLVRQRTAAVNALRGHLAEFGIVAAKGTAKAHELMRLAGDDERLPAMAREALGYIVAQIHDIESRLKVFEQMILSLAREDEVCRRLMTVQSIGPYLAAAIAAIVGDPRNFASGRHFAAWLGLTPKQHSTGGKEKLGGISKRGDSYIRRLLIHGARATVARVRSGQMKNAWLSGLLSRRHFNVATVALANKTA

SEQ ID NO: 252304 - protein, 412 aa, unidentified
MHYKQTHIYVGLDLHKAHHTAVIIDCWNTKLDEIQIENKPSSFDDLMKAVKKHCKKGMTPVYGLEDTGGNGRALAVHLVERKQIVKEVNSALSYNERKSYATTQKSDSWDAYCIAKVLLSRLDELPNANPQDIYWTIGQLVARRNALVKHASSLKNQLHQQLSYHYPSYKKFFCDVDGKAALAFWENYPAPHHLESVAADELATYLRKASHNTCSTRKAEEILELVKKDGETKRKFQTSRDFIIVNMVQDMKRSRELIKQTEEQLRQVLPETDYKLESMDGISTVTAAELIAEIGDIRRFSNADKLARFAGIAPVRFSSGGKGKDQASGQGNRVLNAIFHNLAVQQIQVAKGGNKKQRNPIFYDYYHRKLAEGKTKKQALICVMRRLVNIIYSMMKHKTEYRAATLIERQAS

SEQ ID NO: 252305 - protein, 400 aa, unidentified
MRAVFGIDVSKVSSEVAILVNGEKVHGYTMSNDAIGFSRLLGDLKTVHKPEIIFEATGIYSRRLQAFLEDDGYAYTRLNPLEAKKQLDSLRVRKTDKIDAEKLAQSQFVLNRKPTYVQEEVYQDLRDLSRFYQNLTEDIVRAKNRLHKVLQVTFPELENILSTPTGEQYWNLVTAFPCKDFVLELSKDELSKSIRLSTSKRISDKRVAYLAEKLTVLANQSYCAVKKTSPMLEEVRYYAKELLRLSEQRQAVLDKMVTLAKPLPEYDILLSIPGIAETTATSIIGELGDIRRFQSANQINAFIGIDLRHYESGNFLAKEHITKRGNPYARKILFKCIHNIASASHTNPCHVADFYEKRKRQSQTTSTKPHTIASIHRLIRTMYYLITHNKLYDYTSTQNQ

SEQ ID NO: 252306 - protein, 364 aa, unidentified
MDVHTTNYTLCCYTVDSDDAFAVVNVKPDYHEILKYMERVRSTRGGNCDFICGYEAGCLGYSLYHQLAKHGVACIILAPSTMPQQKGKSIKTDKRDAKNIAKCLAFNLYSPVYVPTAEDDAIKEYIRMRDDVKADLKRTKQQIISFCTRHGFHYEGKSRWTQAYFKWLDSLVFENALYKETLQEYLALYYTLDEKIAVYDARIEELAHQKRYEENVRKLCCFKGVSTHTALSLLVEVGDFHRFRTAQHFSAYLGLVPGESSSGEKVIHTNITKAGNSHLRTLLVESANSYSRGVVGKKSKVMKDKQGGNSPEIIAYADKANERLHRKFYKIAIRSKKNVAKTAIARELSCFVWGMMTNHISRAV

SEQ ID NO: 252307 - protein, 343 aa, unidentified
MGEVSTIGLDIAKLVFQIHGVDAAGAVVIRKRISRAKLLEFFAALPACLVGIEACPTAHHWSRQLQALGHTVRLLPPSYVKAYLKRSKNDANDAAAICEAVTRPSMRFVPTKSEQQQCGLMLHRSRQLLVCQRTMLSNAIRGHMAELGIISAKGRNGTAGLLEIIANEQDGRIPAAARFSLGILARQYTLVRAEIVAIEKRIHAWHRSCEESRRLEEIPGVGPIVATALVAEVGDWKTFSSGRSLAAWIGLVPRQHSTGGKERLGRISKQGNRHLRWLLVAGAMAVIRYARQHGTKRLWLMRLMDRRPIKVAAVALANKIARMAWAMMVRGEQFKEPKLLPAA

SEQ ID NO: 252308 - protein, 413 aa, unidentified
MSVTPETPPARVCAGLDWAKDDHAVCVIDADGQVLDRFTIEHTAAGLKRLIRNLLTAGVDEIGIERGDGPMVEALLQAELTVLVISPNQVKNLRSRYGSSGNKDDRFDAYVLADVVRTDRRRLTPLTRSTAQTRALRSSVRARRDLVEHRVGLANQLRAHLQIVFPAAASLFTAIDSAISLSFIERYPTQTKADWLTPTRMADWLRKVAYSGRTSPEVLHARLLAAPRGTTDTDAEAHVSTTVAFVAILRALNTQIDTLEDAIAAQLDVHPDARIVTSLPRSGMLRAARLLAEIGDARGRFPTADSLACLAGVAPSTRQSGKVKAVTFRWSADHQLRDALCDFAGDSRHANPWAADLYNRARARGHDHPHAVRILGRAWADIIWRCWQEGLAYDPDRHNALQRILNEHAQKVA

SEQ ID NO: 252309 - protein, 317 aa, unidentified
MGGVNAAIEVGKHELKVCLGSEGELFSEPNQPRAINRIIKRLSSAGCARVLIEGGSYQSVLIAALRAAELPVVIVNPRRVREFAKSIGRLAKTDEIDARVLALYGERTEPPLRELADEQTQSLRTLSVRREQLIEMLVMEENRLEHLPAKAKAVRHNLRSHIDYLRKQMKQADDDLDREVRNSPLWDKYEMLSSVPGVGRVLSVALLSDLPELGRLNRGEIAALAGVAPFNCDSGTLRGQRKIAGGRTRLRRALYMAALSSVRCNPVLKPFYLRLRGAGKPAKVALVAVMRKLLLILNAILKTNTAWRALPCPTANS

SEQ ID NO: 252310 - protein, 321 aa, unidentified
MEPTIVGIDIAKKKFDVALPQGEKVKSGTFHNTAAGFDMFARWLTRHGVEHIHACMEATGTYGEELALYLHRTGHVVSVVNPAKIKGFAQSELSRTKTDKADAALIARFCRAMKPEAWQPPAPEVKELQSLVRRLESLNDMLTQERNRLPITEGRVSASIERTIRHLETEIQTTRRLIREHIDQDPGLRSKRDLLESIPGIGPATSAMILAEFGDVARFGDAPRMASFCGLTPRHRQSGSSVRGKSRLSKTGSARIRKALYMPALSAIRYNPVIAAFRARLLANGKPRMVIVAAIMRKLVHIIFGVLKSGRPFDAAIAAQA

SEQ ID NO: 252311 - protein, 344 aa, unidentified
MKIMTGIDLHGNNAVLGLMDMEGRKILHKRVPCELPKVLDVLEPYREQIDTIAVESTFNWYWLVDGLQENHYKVVLANPAKIDQYDGLKHLDDKSEAYFLAKLLCLEILPTGYIYNKKTRPVRDILRRRMSLVRHRTSLLLSFKGLYTRNTGKTLSLSKVKSIEVEEAKKLFTHSADQLIAEEQVGLIKQFDQTIGRIEEAVLKVVNGLPNYQRLQTIPGIGKILGLTITLETGEIQRFASAGDYASYCRCVKSQRLSNEKQKGRNNAKCGNKYLGWAFIEGANFARRFNPECQQFMDRKKSKTNGVVAIKAMACKLSKAAWHMMAKDIDFDLEKVFPNMKTKK

SEQ ID NO: 252312 - protein, 343 aa, unidentified
MQAITTIGLDIGKSVFQVHGVDAAGQVVMRRQLKRRYVLKFFEKLAPCLVGIEACASSHHWSRELHALGHIVRLMPPAYVKPYVKRHKNDATDAEAICEAVTRANMRFVATKTPAQQSCLTLHRTRHLFIRQQTSVINAIRAHLAEFGIVAPIGRNGVEQLLSVAADANDKRLPEVARACVAALGAQLQTLKAQILEFDRMIMAWHRSSEASRRLDDIPGVGPVLATALVASIADPSVFRSGRDFSAWIGLVPRQNSSGGKDRLGTISKRGDRYLRSLFTTGALAVIRYAKIHGTRRRPWLTALLTRRPTKVAAIALANKIARMAWAILAKDERYKEPAALAA

SEQ ID NO: 252313 - protein, 318 aa, unidentified
MLIHYIDIAKRNFVIAVSSLSKTKTETNNPKGIAHTIEYLKKHKVALVVTESTGGLEIPAAKAIRRAGIAVIIANPRQTHQFAQSQPLTKTDAKDAKMPAFFAQMTAQKEDSQTMPYQPPTEAEEVLEALVNRRNQPADMRTAEKNRLHQVHETQVGSVKQLIAHFDRLIDELDKQIDDHTRTHFDGKDQVAEQIKGIGSITTATLMAMLPELGRLSHKRIAGLAGIAPHPREGGETKFKSRCFGGRSAVRKALYMATVAATRFEPLIRDFHQRPLSEGKPYKVAVTACMRKLLTISNARMRDYFAENDTAENGIRTA

SEQ ID NO: 252314 - protein, 354 aa, unidentified
MIIIGADYHPGFQQIAFVDTDTGEFQERRLQHREEAEKFYRDLAAQGMQVHVGMEASGQARWFERLLSEVHFELWIGDAAEIRAKRVRKQKTDRQDAQLILQLMLEDRFPKIWVPSWENRDLRQLLWHRHRMVQARTRIMNQLQAVALNEGLRCKKRLWRKHGRQQLESFRLAPWASRRRRDLLELLDRLNPTIAELSQAIEQEAEKFPEARCLMTHPGVGALTALAFVLIIGRADRFQCGKQIASYLGLVPLEDSSGNRRRLGHITKQGSSMLRFLLVEAAQVTARNLPEWRSKYFHLAMRRGRKIAKVAMARRLAVALYWMWRKGWDYERVKKFGSHAGQLEPGHGVQSNTE

SEQ ID NO: 252315 - protein, 345 aa, unidentified
MTNMNYIGLDVHKKTISYCVKDVSGRIQQEGKIGSTRRELDCWMKTLPQPWTVAMEATIFSGWIYDHLLPHATQIKVAHPLMLRAIAAAKKKNDQIDASKLADCLRCDFLPECHMMPRAIRDRRRTLRYRHLLVRQMVQMKNRVSGLLMETGVEYNKQRLHKVSYFRELLSANGEVDPSIRPLLKLSRETIERCQKTEYALVSSLQRDPVLADRIKRLRTVPGVGPITALTWTLEIGDVSRFGSIKKAISYCGLCGDERSSADKAMRMPLSKQRNKHIQRALVEAAKLAPRQSHELAVIYDQERQKGNSNRATLAVARKMVAYLLAVDRQQRDFVPAEERRTSAA

SEQ ID NO: 252316 - protein, 343 aa, unidentified
MKDTTISVDVAKTVFEIAVSLHPGHVSETHRLSRPRFAPFFAERQPTTVVMEACGMAHHWGRELQNQGHRVVLLPPHAVRPYVPRNKTDRTDAKGILEAFRNQAIHPVPVKTVSQQALAALHRLRSRWMATRTSRINTVRGVLREFGVPISLGSRQVVPAVRAALEDADSGLPDAIRPALATACEEIRDLEAHIASVEHQIEALARETPVVPTLRSVPGIGLLTATALVAVVGDAARFPSGRHFASFIGITPRESSTGLRRRLGAISKRGDSYLRMLLIHGARSVLCHAKKAGTHDRLRTWALDREQHRGHNKAAVALANKMARIVWAVWTKGVPYQDTATAE

SEQ ID NO: 252317 - protein, 336 aa, unidentified
MLLYCAIDLHSNNNVPVVIDQHDNILFQRRLPNDLDTVLLALEPYKQHLFGVAVESTFNWYWLVDGLSDAGYPTCLVNTTKVKQYSGLKHTDDKDDAFWLAHLMRLGILPTGYIYPKEQRATRDLLRKRAQLVRHRTTHVLSIQNQYWRNTGVKLKADFIKRSNDYLGEVEDEDIRLAMESNHLVIQALDKQIKQIECRVKEQVKLLPEYELLLTVDGIGDILALTVMLETGGIGRFREVGHYASYCRCVDSQLRSNDKKKGEGNEKNGNKYLAWAFIEAANFAKRYNEKARRFHQRKKAKTNNVVATKALAHKLARACYYIIRDQVPFDENKLFA

SEQ ID NO: 252318 - protein, 337 aa, unidentified
MKVTLIEIDLAKNIFQVCGVNQAGKSVFNRSIKRAQLLTFLRTYPDATIAMEACGGSNYWGRELLSLGHDVKLIPPQHVKPFVKGNKNDRNDAFAICEAAQRPNLIFVQPRTLAQVDIIITHRIRERRIRIRTALTNQIRGLLSEYGIALPKGRNPLNLLLPELLEDASNQLTTIARQYMRELMEELRAINVAIGSLEKDIKLQARTHPDAKRLMGIRGVAEIIATAAVSFAGDGSGYHGARHFSANLGLVPKEFSSGGKQKLGGITKRGNSYLRRQLIQGAWSIIRYASKSNDRISVWALKVIERRGKQKAAVAIANKLARIIWAMLFHRSEYRPC

SEQ ID NO: 252319 - protein, 468 aa, unidentified
MRTAKTLWQNRKEKKEWTRRLQSEDPGLEVVHPHAAGIDVGNSAHYVAVRPDRDPEPVRRFECFTADLYRLSDWLKSCGVNTIALQSTGVYWIPLYDILEERGFEVYVVNARHTKNLPGRKSDVQESQWLLKLHTYGLLNNSFCPPSAIRTLRTYWRQRAEHVEGAATCILRMQKALTQMNLQLANVISDLSGVTGQKIVRAIVAGERDPRKLAELRDARIQASQEEIAKSLEGNWRPELVFVLKQEVDIYDTYQQRIAECDQQLQKHLATFANNATPGQPPSPKGEPKKKKKKPTQNAPAFDLSHELERISGVDLTRIDGIEVMVAQTILSEVGLDMGRWKTEAHFSSWLGLCPDNRISGDRVLRRGTRRVINRAATALRMAATTLIRSRSYLGAQYRRLRSKLGAPKAITAMAHRLARLVYRMLKYGQQYVDKGMEYHDQRYRNQQIHLLQKKAAQLGLQLVPALA

SEQ ID NO: 252320 - protein, 318 aa, unidentified
MDKPSIGIDVSKAHLDVYVYPSERRFHVAYDEGGVRELVAALDSVREGIVVLEATGGLEVMIAASLGAAGFDVAVVNPRQVRDFARAIGRLAKTDRIDAEVLALFGDRVRPEPRPLPDSALRALEALITRRRQLVEMITAESNRLRQTGDRAVSKQIQRHIKWLQQELKSVDTNLDDTVRRSPLWRAKDDLLRSMKGIGSVTSYTLIAELPQLGTMSRRQAAALGGLAPFNADSGTFVGRRRIWGGRSSVRTVLYMAALSAIRWNPVIRAFYQRLLRAGKPKKVALLACARKLLVILNAMLRNQTPWGISALDPQHGC

SEQ ID NO: 252321 - protein, 346 aa, unidentified
MEHYAGIDVSLERSSVCVVDARGKIVKEGKISSEPAALVAFFETLSFAVKRIGLEAGPLSQWLHAGLTRAGFEAVLLETRHVKAALSAMTVKTDRKDARGLAQLIRMGWFRPVHAKSIRSQEVRALLVARKQLLGRLIDVELSIRGILRGFGLKVGPVTRKGFDARIRELVTGQATLERIAGAMLSARLALKAEYERLHKTVLAIVREDAVCRRLMTVPSVGPVVAITYKSAIDDPNRITKSKAAGALFGLTPRKYQSGEKDVTSGITRAGDEMVRTALYEAANVLLARITRFSKLKRWAMDVAKRRGSKRAKVALARKIAVILHRMWVDGSTYRWTETQPIAAQT

SEQ ID NO: 252322 - protein, 386 aa, unidentified
MKVIFGIDVSKSTSTVCELINDSKSITTITNDRPGFLELLNDLKAFTHHPQIIFEATGVYSRRLQTFLDDYGYEYVVLNPLKAKKEMDLRLRHNKTDRTDAYHLALIQKLYHHPVSQLQAEQYHQLNALSRFYDQLTSDIVMAKNRLHKVLQFTFPELEQLFNTAKGFNYWSIVKMYPHCEIVNDLTELEIYTKLIKLPGFQVKKANKFTLKLIALSQKTYPVAPCKSVESDEVRYYAQRLIDLNKRRQDLVNQMVRIAKSLPNRYLEILESIPGIAQTTAVRILGELGDLRRFSNPNKINAFIGIDPGRYQSGEMDASLSITKHGNAVARKILYRAIDQIDQAAKTQHCHIADYYENKKLSSQTKGFKKIAIASIHKLINYMITT

SEQ ID NO: 252323 - protein, 348 aa, unidentified
MTIVAEKYDYVIGIDTHARTHTYAIINTRTGAREHCQTFPVTTPGMNRAVAWLQRNIHGESIAAVEGTRSYGATIAHTLVGAHIEVVEAKPPRRKDQASRGKSDEIDATAAAISILGKDISKLLRPRSEGARAALSILSASRGRIDTQRTINRNSLSALLRTFDLGIDARQSLTARQIKQISVWRQRSSDSIDQRFAREEAKFLASSILAADQLLKENSKAMSDLDEQLAPELQQVFGLGPVTTAWILMAYSHPGRVHSEAAFAGLAGVSPLQASSGNHERYRLNRRGDRLLNKALDVVARTRMGHDEATKKYVEKRTAEGLSPKEIKRILKRYIARSIYRKLEVLMG

SEQ ID NO: 252324 - protein, 344 aa, unidentified
MQSNITIGLDIAKHVFQVHAVDAAGTIVIRRKLRRTDLLSFFEGLEPSLVGIEACATAHHWARSIMALGHQVKLMPPAYVKPYVKRQKNDAADAAAICEAVSRPSMRFVPVKEVDQQGVLVLHRTRDLLIRQRTMLINALRAHLAEFGIIMRQGRAGVTALVASVEEGRAEHLPELARTAMMSLIAQLRDAHARANEIEREILTWHRNDERSRRLETIPGVGPITASAVVATVTDPSMFASGRELAAWIGLVPRQSSSGGKERLGRISKKGDPYVRRLLVVGAHSVLRIARAKKPGSSNLITWGAALAARKPYKLAAVALANKMARIVWALMAKSEVYRREMPA

SEQ ID NO: 252325 - protein, 386 aa, unidentified
MPKPNDLSRSFTAFEQDSTLVAIIEMSLTSWLVGGILPGIERHPLKKLDVDEEALLQLLHRWRDEAINAGRKITRIVLAFEAGRDGFWLARWLRVRNIEAYVIHPNSVAVSREHRRVKTDRLDTELLKRVFLGWLRGESDHCSMAAIPTLGEEDARRPNRERENLLGERTRIVNRVKACLVRFGVRNFKPTLRKAPERLEALRTPEGGPLPPNSFAELRRDMVRLRFVMGQIKEIEETRLQRLENTPNEGSHAMVRLLARVIGVGIETADMLVHEILSRNLRDQRAVARYAGLTGSPDESGKRRREKGLARAGNARVRRGMIQLAWRFLMFQKESALAQWYRSVTNEARGAIRKTMIVALARKLLIALWRMVRTGEIPQGVALRTA

SEQ ID NO: 252326 - protein, 325 aa, unidentified
MTYIGIDISKATFVAAFLHGKSYRTETFPNDAKGIRRFISKLDPAIHHCVMEATGNYCFLLLYLLDKSGIRASLINPKKIKNYARVMMSVTKTDSKDACLIADFGERFKPEPYKFPSEQIMILKQKKTVLRQLHKQLTATKNLLSSLEPLPVKDKKCVNSLKQTITFLEKQIKYMQQEMEAVVTEVFDRQLKLLTSIKGIGVTLATALIIATGGFTYFDNAKQLSRFIGICPTIEQSGTSINIRGHINRNGDETLRSMLYVAAWSASQHNKACKECYQRLRGSGKSGKVAMIAVANKLVRQAFAVVTSNNSYIDGFVSTKPDTTV

SEQ ID NO: 252327 - protein, 422 aa, unidentified
MQNTAARKRKQVPEGYLIIGIDPHKKKHAAAAITQDFTVRDRFKFDNTREGLEAMLGRARTEMLKSGCRGVMFAIETGGHYWRNVAYFLDEWGIPFRFINQYTLKRRREGKDLNRRKNDYRDSEVAAQLLCTGEFVESTIPKGVYAELRAAHNTYRRLVRERTRITNIIEGLLDSVFPEFTLVFKDPCGLTALNVLRNCVIPGVIARKTEEEFVATIEANHHGRRLMRRKLRALHDVARASIGIAAGAMSVSCEIAFLVEKLDLIRGQVCIIDKVLIRLVDETEEGKYLLSIRGLNYIAVAGLLAELGCFKSYRTAKQMIKMAGSNPTESESAGKRGTHTPMSKQGRPVLRYCAWTSVIPMLRLNPDFRAWAKRRRERPFHANPLNGKEIVGAALNRLLRLAFALVRNKTLYRSPQLAQLTG

SEQ ID NO: 252328 - protein, 340 aa, unidentified
MKLSRVGVDLAKNVFQLHGVDRSETVVWRRRLRREDWIEVLRERAEPGCEIAMEACSGAHHWARLLQGLGYQVKLIAPQFVKPYVKSNKNDAADAEAICEAMGRPGMRFVPVKTVEQQDLQALHRVRASLVEQRGAKANQIRGLVAEYGLVAPRELLHLRRALPHWLEEQSNGLTARFRALLQGLRDELIALDERIAELDREIERIARSEPAAKRLMQLRGVGPVIATAMLATVGDARQFRNGRQMSASLGLTPKQHSSGGKERLLGISKRGDAYLRSLLIHGARAVIRTARAKDDRLSQWVIRLADRRHPNVAAAALANKTTRIAWAMLSRGTNYQPAI

SEQ ID NO: 252329 - protein, 428 aa, unidentified
MIDQQHSTAASNLVAIDIAKDWNVALVQDISGRRHRFKFANRRVDHDQFVQFLHSLSGPVKIGLEPTGDYHRPIAHRLLTEGFRVVSISSLALARFREARFGTWDKNDPKDAQVIIAMMEQELVQVYWDPLSSGAHDWQELSNTYFQITLARTRLQHSLLLHHLPLYFPEFLRYWYSTRSTWFVHFLERFPTPAAVRALDRQTFIAEAWKVAGRKVDKLAKLEEIYDLAAESIGIPVSLESPAIEVFRLQLSRYAELNRQRAHVERRAQELLAGHPDFHRLQTLPGIAAITALTILAEAGDLRRFQHHRQFLKYCGLDLAKSQSGKSKGHEVLSKRGNKRLRLAFWMAGLVAIHQRENVFRDKYERYLRATPFDADRKRKALTAVAAKMARVAYALVKHGSDYQRFFEQRIPSGSIPLARAVEASSTS

SEQ ID NO: 252330 - protein, 326 aa, unidentified
MEHGLHYIGIDTAKEKLDVDVLRPDGRHRTKKFANTTKGHDELVSWLKGHKIDHAHICIEATGTYMEPVAECLYDAGYIVSVINPALGKAFAQSEGLRNKTDTVDARMLAEFCRQKRPAAWEAPHPLERALRALVVRHQALTDMHTQELNRTETAREVQRPSIDAHLLWLEAELKRLEKQIKDLTDDDPDMKHRRKLLESIPGIGEKTSAVLLAYIGLKDRFAHARQFAAFAGLTPRRYESGSSVRGASRMSKAGHVSLRRALYMPAMVATSKTEWGRAFRDRLAANGKKGKVILGAMMRKLAQVAYGVLKSGVPFDASRHNPVAA

SEQ ID NO: 252331 - protein, 416 aa, unidentified
MVDVVHERCAGIDISKTDVKVCIRVPGQGRRRRCEVRTFTTMTGDLLAMRDWLLSERVTVVGMEATGAYWKPVYYLLEFDMECWLLNARHMAAVPGRKTDVKDSQWIAELVEHGLVRPSFVPPEPIRQLRDVTRYRTEIIRERTREIQRLEKLLEDAGVKLSVVVSDLTGKSARAMLAALIAGERDVEVLADLALGSMRRKKPWLAQALTGRFADHHAFLAQAMLDRIDACIAMEARLSAQIDAQVAPFRRQLDLMVTIPGVSIRAAEVLLAEIGADMARFPTAGQLASWAGMCPGNNQSGAKTRSAPARPGDPWLKAALGQIAIAASRTKGTYLAARFRRVASRRGKKRAMVAAGHSVLIAIWAMLTHDVAYHDLGGDYFTERLDPKAKARQARRLLDQLSQLGYEAILQPAALT

SEQ ID NO: 252332 - protein, 358 aa, unidentified
MQRNKISFKGQKIFIGIDVHKKNWDVAIAPEVGNVKRHTQKASAKELFDFLKKHYSDGDYLAVYESGFSGFSTYYALKDVGIECKVIHAADVPTTQYEEVMKTDRVDSIKLVRSLKAGLLKGIYIREKENIDDRSVVRIRKTIQKQLSGYKARVKHMLHCNGVSFPERFEKPGSHWSKAFLKWLKEDVTLLSSTRNSLDLLIRQVETIRLTLLEATKMMRSLSQTERYKHKCDLLMTVPGIGFIVSMCILTEIYDVKRFHNEKEFAAYLGLIPTSHSSGDKVVHGEMTFRGNKQLGPMIIETAWISICKDAGLGSLYLRYKERMKPQEAIVRIARKLSNIIFAVLKNETQYVSYNMCK

SEQ ID NO: 252333 - protein, 411 aa, unidentified
MVSREGRVAAPTPLLPQGRGQTRRGCDFIGPCSECPVTVVSARPGLVIQHNEVNGDTTIMTTSSLARQPEVIIGVDAHKNTHHAVIITDTGNRIADQEFPANTHGYADMLSWAHDHGTIQAFGVESTGSYAAGLARFLIDHQVEVREVNTPHAHTKARVGKDDAIDAEAAARKVLAGVASAIPKRTDSVIESIRFLTLTRDSAVKARTAAIVQLQDILVTAPANLRENVPSGGLAAARHCRKFRIDRARLNDPVQAVKLALRTLAARIADLDAEITELERSLTTLVHATAPTLVSRVGIGAIHAAQLLITVGENVERFHSEAAFARLCGVAPVPVSSGKSHRMRLHRGGDRKANRALHMIAIVRLRYDARTIDYMQRRLAEGLSKKDVLRCLKRFIAREVYNDLRHDLIAA

SEQ ID NO: 252334 - protein, 375 aa, unidentified
MRERITEMQMMIEGQSHFQPFGLSYWGFEDLNKGVGSMTASYEYHIGVDYHKSYSHLVVQDSSGKTLRSGRVKNDRQSLGGFLERYRENSHAVVEATRNWMVMYDWLDDICDDVVLAHPLKVKAIADAKIKTDKIDATVLAHLLRADLVPEAWAPSERSRDLRVALRERMFYVRLRTMTKNRIVTVFDRYPEQTAQLKKLGDLFGKAGRVQLAQVNVSEIDRIQIDRGLAFIGDIDMRIKQSEATIRAMTKANANVKLLKTIPGIGECFARLIDAEIDDISRFRHSKKLAAYAGLVPSTHSSGGKTFHGKIIKQGNKWLRWAFVEAVAPAIASDPQLRAQYEHLKIKGINKARVAIARKLLTITMEGASTISRLS

SEQ ID NO: 252335 - protein, 391 aa, unidentified
MIYVGIDVAKDKHDCFITNSDGEVLFNVFTIANNLDGFNDLCQKIASVMEDVTKVKVGLEATGHYSYNLLGYLIDKGLPTYVINPLHTNLYRKSLSLRQTKTDKVDARTIASMLMSDVNLKSYSDTSYHNEELKSLTRYRFDKVKERAKLKTSVSRLVCILFPELEKLVPTLHMASVYALLSEFPSAKHVATAHLTRLTNLLSESSKGRYGKDTAVTFRDSARASIGSNMPAKSLELKHTIKLIQELDSEIDEIENEIKIIMDEINSPILSIPGINYRMGAMIIAEIGDFNRFDSPDKILAYAGFSPSTYQSGQLDGAYAHMEKRGSRYLRYALYNATKYVCRWDPTFAAYLAKKRAEGKHYNVAISHAVKKLVRVIYHLEKTKQQYIKAA

SEQ ID NO: 252336 - protein, 306 aa, unidentified
MNITTIGLDLAKNVFQVHGVDERAKAGLKKQLKRAQVLPFFANLPPCLIGMEACGSAHYWARKLKELGHTVKLMAPQFVKPYVKTNKNDAADAEAICEAVSRPSMRFVPVKTGEQQAVLSLHRAREGFVKARTAQANQIRGLLAEYGIVIPVGIANIAKHLPDILEDGENDLPGVFRQLLQRLSEHLKELDRQVDELNEQIQLWHKENELSRKLADIPGIGPITASALVASIGDAKSFENGRQLAVWLGLVPRQHSTGGKQTLLGISKRGDCYLRTLLIHGARAVIRVSERKIDQADSWVTVRIAS

SEQ ID NO: 252337 - protein, 418 aa, unidentified
MKIVYPVCCGVDVHKNVIVATIAITDKSNITQYVVESFSTINTDLYRFRTWLLSYQCFNVCMESTGKYWIPVFNILEEANIKVLLTHPKYVRAIKGKKTDKKDSKWIADLFKFDMVRSSFIPPKDIRALRELARYRYKLVCMRSSERNRYQNCMTVSNIGLASVLSDPFGKSASDIMRYVLSSSIFDEEYCKKLIQKSAKKKTELILESIRGSRIESDQRFKMKEAAAHMDYLEQAILRTEAELYTRIQPHYHFVEHISNQLPGISQLSAALIISEIGVDMSVFESAKHLNSWAGLAPANNESAGKKKSVRISKAGQFLKPLLVQCALAAIKSNKQPYFATKYHKLKKRRGHKKAIIAIARMLLTCIYHMVQTGETFNPSDYDSFDMPALRKVVLTDENAIAFLAAQGYDVSSICKTA

SEQ ID NO: 252338 - protein, 482 aa, unidentified
MAKRKLSTFERLRQGEPLNRQERRELQRRLESADPGLEIIHEDAAGIDVGQDSHHVAVPPGRDEHPIREFGCWTAALEEMAQWLLGCGIRTVVMQSTGVYWMAVHDVLQQHGLEVNVVDARGTKNVPGRKSDVQESEWLRKLHRYGLLRSCFLPQPEIHAVRTVWRLRIQHVRDAGRCIQHMHDALTEMNVQLHIALSDISGVSGQAIIRALLAGQRDPRALAALRDCRCQASEEEFVHSLQGNWKEDVLFALQQAVDAYDFYQGQIAKCDRQLQQYLSVLPSRPSGSTPAAAAPDGPGKKRRSRKKKHPVGNEPNFDVAAELERILGVNALGIDGLGVITIQTILAEVGPDLSAWKTERHWVSWLKLAPLRDVSGGRVLRHVRQKHTNRVGIAFRNAAQSLVRSDSYLGARYRYLNAKLGALKAVKAMARTLACLYYRLITKGQAWVDRGAAEFERRRQQREFISLERKARSLGMQLVPVA

SEQ ID NO: 252339 - protein, 444 aa, unidentified
MDQTKMKCAGIDWAKDENALCIIDEAGRVLSERRFAYEEDGIAELCGSLVEHGVGRVAIERPEGVLVERVLEAGVVVIPIHPNQLKAARPRFRATGYRAKSDSFDALCLAELARTDNHRFRRLIPDSDETKALKALTRSREDLVGRRVALANRLRAELEAFWPGAAIMFNEIDSAISLAFLKRYPSPKEATRLGEKRLLGFLRRNRYCGRKSASELLRRLREAPQGRASEAEMEARREAVLALVAALETLVGRIKRLEGRIAEAVRAHPDGEVFLSLFLGHKSTLTAACLLAEIGDRRERYPTNEAMAADAGMSPVAVESGKRKVAGFRRACDKRLRKAVGSLAESTRHHNRWAKDIYQRARARGCDHAHAIRILGRAWVRVIFRMWREGQPYDPARHGGLRRLQSQEGLPQGVWQAKPERADLLTCVCKEVEALCSSGRPGYL

SEQ ID NO: 252340 - protein, 355 aa, unidentified
MKQGTQLDFSGQKIFVGIDVHKKSWKVCLRTAQMELKTFSQNPSVANLSKHLKENYPAATYHVVYEAGFCGFSYQRDFSDQGINCIVVHPADVPTTDKEKQRKSDTVDCRKLSKSLSDNGLKGIFIPGIEQQDDRGVIRVYQQMIKDQTRFKNRIKGRLHFQGITIPGGDDHKYWSANFIQWLKGLPLAPSAKVGLDILLLGYEQSRSMVLAATKQVRILSRQDRHKEGITLLRSIPGIGEITALLFSTEIGDMSRFKELDDLCDYVGLVPRVSGSGEKETVMGLTHRGHHQLREKLIEASWVAIRLDPAMTMAFNDYCKRMKKNKAIIKIARKLLNRIRFVMKNQMQYVTAVVK

SEQ ID NO: 252341 - protein, 421 aa, unidentified
MKKIKPKTTKAVNQKVLIATVDGGKDKHYGYYRCPDATESKAFDFWNNGRGFQEFWERISSAARTQGLEEIIVGFESTGPYMEPLVQFLRSSKSVRLVQVNPMHTKRLKELTGNSPLKTDRKDPKVIADIIELGHALTVVIPEGPAADLRRLTQGRERTIESRTRLLNQLQSLLVISFPEFLQVMTDVKTASAQHLLRHYPTAEEIVALGEASLVTLLRKVSRGKLREDRARALFEAASESVGVQEGRSSMLLEIRLMLETIASYDRFIDGLEAEMVRHLEQIPYSRIILSLKGIGPVTAAGLIGEVGDFTKFSTISEVMKLAGLDLYEVSSGKHRGKRRISKRGRPLIRKLLYFAALSAVRKGGTMHEWYQRALGRGMIKTKALVAVSRKLLGIIFALVRNHSVYVENYMKQEPILQEAA

SEQ ID NO: 252342 - protein, 341 aa, unidentified
MQSTKATELYAGADLHGNNVFLSVCADGNAQFKRRVKTNLTAVNAALDPYWSRIKAMGVESTFNWYWLVDGLREQNRDVRLGNPAKMKQYKGLKHADDASDARWLAELVRLDIFPDSYIYPKDVRSVRDALRRRQLFVRRRTQVLLSLQSLLERYGLNAPGSRAIQQWTEAEIVATGLDPFVQLQLRTLLEAVHCSDRLAKQIETEVLKFVEPNESFDRVQIVPGIGKTLGMCIVLESGEFSRFPNAGCYASYCRAVKSERSSNSKKKGENNKRNGNPYLAWAFIEAASFAPRYYPEIQSWYDRKKKKRNTIVAKKALASKLSKAVWHVMNGEEFKMKMMF

SEQ ID NO: 252343 - protein, 421 aa, unidentified
MLGVGIDWAEEFHVVALGRPGGGVIEVVRVEHRPGAVSALVERIAGLEADPAEVRVVIETRHGLLVEALVEAGYTVLPVNPELVSRRRGPARKKDDAEDARICCLLALDRHAGLRRLIPHGELAGELRSIARDDERACRDERRLLNRLRADLLVTFPAALAIAGEDLGATRILRLLEHWPTAAALAAASREEIIEFGRAQRTGYLARFADRIAAALAEDHFTAPPHLVRAKAGTIRLTARQLLLIDSQRRTWEKQMGELLLGTPGQPAEDQPGQAFPGGEIYLSFPGLGRRLAARIAGEVGEHIEQFTTPNSLQCYAGRAPVTRRSGKRDLVVAHRLACNRYLADAVHKWAFASLRRSAWARAFYDAQRARGKNHHAALRAVGNRWLEVLWHCLTHGVPYDEATHVANRNKALAAITAPAA

SEQ ID NO: 252344 - protein, 421 aa, unidentified
MSYRIAAIDIHKKVLMVVVVTAAEEVADATGEALEFECRRFGTGSSERSQLVAWLQQRGVVEVVMESTAQYWKPVWLDLEPHFAKLHLAQAHSNRAPKGRKNDFGDAKRLGRRLLAGELLLSFVPDAEQRNWRTLTRSKQQLVRDRVQLHNQLEALLEEMRIKLSSVISDLLGVSGRRILTALAEGEADPVKLAQLGDERLKCTQAELTDALRGAPMPVHLAVLRLFLKRLTLLDEQIRELDKLVAEELKKHEEAVLRVTEIPGFGVDSAQQIIAEVGVDAETFPSAGEFSSWVGVCPGSNVSAEQNHSSRSPKGNRFVRRILTQAAQAAVRKKGCHFQSVFRRFLPKLGYNGAIWAIAHRLAGVLWKILHNGVRYIEQGNETNPRAKKRRAQKLAQALRRLGYAVTLTPISPDAPVADQG

SEQ ID NO: 252345 - protein, 374 aa, unidentified
MLGWTAPDGIVMCQNEVVEDLKQGRPSVDKLIRIGMDTSKSVFQLHGVNEAEQPVLLKKLRRNQVLAFFAGLAPLKIGMEACGSAHYWARELRALGHEVVLLPPQYVKPYVKRSKSDAADAEAICEAMSRPGMRFVPARSANQQAAQMLAKLRAQFIGRRTQLANSMRGFAAEFGLIAPKGLSRLGDLLADIRADATLPDMARDMFETLAHDYAHISAQIVALDEKLLALHRQSELSRRLVAVPAIGPVGATLLAIKVPDAHGFKSGRDFAAWLGLTPKNHSTAGKNRLGVITRAGDEMLRSVLVTGATALIQHMRRGSKRIWPWLQALIARKPAKLAAVALANKLARIAWKLMVSGEHYRPAAALPVTVPAQP

SEQ ID NO: 252346 - protein, 335 aa, unidentified
MTKVMGPVFVGIDVSARTLVVALERDHQPGRQRREFLNTAVGHEGLIQWLSKSATAVQVCIEATGLYSLDLALALHRAEGIEVMVANPRAIADFAKALLQRSKTDQLDAEVMLEFARRMPFVAWQPPSSPQLDLRALMRRITGLKLVSQQEKNRLHSVSQSAEITPLVRKDIQSHLVQLERHIEKLEHQAETIVQADRELARQFCHLVSVRGIARVSALHLLAELVVLAPDMTARPWVAHAGLDPRHHESGTSVHKPTRISRAGNRYLRSALFMPALVATQHDPNIRAFYQKLVDHGKTKMQAIVAVMRKLLHALHGMLRTDSDFVGEKFFVIPS

SEQ ID NO: 252347 - protein, 414 aa, unidentified
MDEAVKPTTNSEGKHMIIHKYLGLDVHQDDTVIAVAEGDRTGEVRLYGKVSSDLSATEKALRKIRGEHGVLHVAYEAGPTGFVLYRRLQQLGIECIVVAPSKTPQPKGGRQKTNRRDALQLARLHRAGELTGIHVPDAVDESIRDLTRARSDASRDLKRAKQRLKSFLLRQGYHYTGKANWSEAHQRYLRELVLPLPALKAVLEEYLQAIDRGTERLTRLEELLVAQVPPWRLYPAVQALMCLRGFELVAASILVAEINDVRRFAHPRGLMAYLGLVPSEASTGNTRRLGAITKQGNAQARWILVEAVQSADNPPKVSAPLALRQQGQPEAYRVLGWKTQVRLYKRYWHLTRRGVMAAKVRVALARELVGFVWDLLRQVPAMADSAKAAALAPGSRSATRRHPPGAPLPALVGN

SEQ ID NO: 252348 - protein, 316 aa, unidentified
MTDTSMICAGIDVAKSHLDIAIFPCGESLRVGYDADGLKQLDAFLRQHGVCRVGFEASGGYEGRLMVHLRMRAWPAVRLQPAQVRAYARSRLQRAKNDRLDAMLIARFTESLERLPALPQARFDALAAELTYLEQIEQQIALIKTFAETTPSPLIRRRHDRDITRLETLRRTYLLRLEKAVRRDLELSRRLDLMISIKGIGLRSAVCLVIRMPELGSASRAEIAALAGVAPNDDDSGKRRGRRHIQGGRERLRKSLFMCAFTATRHNPDLAAFYARLRQNGKEHLCAVIAVARKLIILANTVIARDAPWTPQYKAE

SEQ ID NO: 252349 - protein, 401 aa, unidentified
MQDTQQRDAVDVFVGVDVGKGHHHAVALDRNGKRLYNKALPNDEAKLRALITELKTHGRLLFVVDQPSTIGALPVAVARAEGVLVAYLPGLAMRRIADLHAGEAKTDARDAAIIAEAARSMPHTLRSLRLADEQLAELTMLCGFDDDLAAQITQTSNRIRGLLTQIHPALEHVLGPRLDHPAVLDLLERYPSPAALAGTSEKTLANRLTKLAPRMGKGLAAEIVQALSEQAVTVPGTQAATIVMPRLAQQLAALRQQRDEVAAEVERLVLAHPLWPVLTSMPGVGVRTAARLLTEVAHKAFASAAHLAAYAGLAPVTRRSGSSIRGEHPSRRGNKVLKRALFLSAFAALRDPVSRAYYSRKIQQGKRHNQALIALARRRCDVLFAMLRDGTIYQPRSAPNA

SEQ ID NO: 252350 - protein, 369 aa, unidentified
MAKSITYIGLDVHKDTIAVALAEAGLRGEVREHGKIPNAPAALKALAMKLASAGRELRFCYEAGPCGYGIQRQLAGMGHDCAVVAPSLIPRKPGERIKTDRRDAINLAKLHRAGELTPVWVPDQAHEAIRDLVRARQAAVRTLRQARQQLSGFLLRHGYHYHRPAWTQLHRRWLASLRFEQAVHHIVLEDCIAAVEAATARRDRLEAHIEAALPEWPLAPAVQALQALRGVGLVAAATLLAELGDITRFPNPRQLMAYLGLVPSEHSSGRTRRQGGITKAGNGAARRMLIEAAWSYRFPARVSREQLLRQERLTKPIRNIAWKAQERLCRRYRKLARAGKLATVITAAIARELAGFIWAIARQAQSTAS

SEQ ID NO: 252351 - protein, 403 aa, unidentified
MSFNGAPVTAAAVVAVDVGKKKAALAMTSADRHRLFGPVEFAMTAPALAAVLQRVCAVLPAGPIKVGVEAAGHYHRPLLGSGVWPRGWEVLELSPARVAEQRRVQGRRRVKTDVIDLEAITELVLAGHGVAVKPRAAAVTELTGWAMQRGRRVLTRTATKNQLLAQLDRCFPGLAMVLPDVLGTKVGRLVAAEFADPHRLAAFGVTRFVRFAGNRGLRVRRSAAERLVAAARAALPSPQAQVARQVLADDLVLLACLDAQIVVTEAKLAQLLPDTPFAPLTTVPGWGTVRVANYGAAVGNLDRWPGARQLYRASGLSPAQYESAGKRRDGSISREGSVALRRALIDLGIGLWHADPAARRYGQQLRARGKKGGVIGCAMAHRANKIAYALVRDQSSYDPGRWA

SEQ ID NO: 252352 - protein, 326 aa, unidentified
MTLSHLTGNIFVGIDVGGAGLDVAWHRGDSAHYANRPDAIATLVERLRTGPEVTRIVLEPTGGYEKALVKALRQAQLPVEVIHTTRFNAYRTLVGVKAKSDTSDAKLLASYAAAPDEVRGRKAGYVELPEDAIREELSELASRRDQLKHMIHAETCRLGTMRKAELRQMVTAHLETLRAEDKQVHRMMLEMVGRRIDLRRDQRLLKTIKGIGVKSALVLLASVPELGRIDNKAAAALIGVAPFVRRSGTMIAPARIHGGRAAVRSVLYMAAVTACRHNPVLRPFYERLIAKGKPPKVALIAVLRRLVVFANAVLRSGQPWRGAVAS

SEQ ID NO: 252353 - protein, 377 aa, unidentified
MNYIGVDLHKDNMTIVGVNEKGEIFIKERIAPKCIGKIDQFFSQDFIHPCKVVCESIGFYHWFYDLICEKVEQFILANPIETKKYSWNNPKTDFKDATKLAFLLAGGEFERNSSLSCYIPDKIERTFRETTRTRFNLVRRKTSIINSARRIFLKNNLAGPKILNYSTLSQFVNKYGYRFNETHRKFLYMFAENLFYLEKQISDIERDIYNFLSMDRFKNIHQILITIPGVGDMVSAVLISEIGNFKRFPDPKFLASYAGVVPRVFQSDTKLRYGKITKQGSVYIRYALINASWVAVREDRKIREIFIRIAKRAGRKKAIVAIGRKILVWSWHLVINNESWQSFNDKFATENRSGMTLKRVLNEIEKRDEIIKKSSIK

SEQ ID NO: 252354 - protein, 345 aa, unidentified
MTSIDYIGFDIHKKTISFCVKAQDGQILDEGVIPARREELSAWAKKHTRPWVGAMEATLFTGWIYDHLKPRAQELKVAHPPMLKAIAASKKKNDQVDARKIADLLRCDLLPECYMAPSAIRELRRVLRYRNLVVRQATRMKNRISGLLMETGTPYNKERLHGKAYFNELLGSLRETPCSVVDLLKLSRKQLEFFTTIQKRLLKGLNEHPQLKERVERLQSIRGVGEILALTWALEIGEVERIPSVSQGVSYCGLTSAQRNSAGKEQRGPISKQRNKHLQTMLIEAAKLAPRYNPQLAAVHERELKRGDCNQATLAVARKLVAYLMAVDKSGKPFEIRTGAAAEGV

SEQ ID NO: 252355 - protein, 316 aa, unidentified
MQASPLFIGVDVSKSELVIATPEHQLGCVPNKASSIKAWLGKVPADALIAMESTGRYHGLLAQLSVQAGRKVYVLNARDVYYYARALGTRAKTDRVDAGVIARYLAEQHVRLHPWEPGSAVQQQLQCLLKRRAQAVVHHAALRQSFTEVEISGDALQALQGAFDALLKAIDAQVNRLIASDVQMAQGYKRLNTIVGIGPQTGALLTVLLSRFAFANADALVAYSGLDPRPNDSGAKRGRRRLSKKGPALLRRQMYLAGLSTTHSKLFGPYYQGLRARGLKSTEAIVILGRKLLRVAFAVWKSGEVFDPARVGVKMA

SEQ ID NO: 252356 - protein, 346 aa, unidentified
MNQIIRIGMDTSKHFFQLHGVDAAERPVLRRKLRRNEVLAFFAKLPPTVIGMEACGAGHYWARELRKLGHEVKLIAPQHVKAYIKRNKNDGRDAEGLCEAMSRPTMQFVPVKTEEQQAALMLAGVRQQLITRRTQLGNAIRGHATEFGLITAKGLDKLEPLLARIAQDESLPELAREIFAMQGRDYARLQVELKAIEARLLAWHRANADSRRLAQIPGIGPIGATALVMKAPDPRLFPSGRHFAAWIGLTPKDHSTAGKTRIGKITRAGDEMLRSVLVAGATAVIQQAKKGRGHPSPWLLGLLARKSPKLAAVALANKTARIAWKLLVTGESYDGARMPGASVLAA

SEQ ID NO: 252357 - protein, 389 aa, unidentified
MIYVGIDVAKDKHDCCILGSEADNLYPVFTIPNNKAGFDELYEKIFSVTDDMTEIKVGLEATGHYSLNLLGSLIDKGLATCVINPLHTNLYRKGLSLRKTKTDKVDAGSIAMMLMTDKTLKPYSDTSYHSEELKSLTRYRFDKVQERAKLKTSVTRLINILFPELEKLVPNLHMASVYALLYEFPGASYIADSHLTHLKNVIETASKGRYGRDMAVTLRNAAKDSIGSVMPAKSMELKHTINLIEVITGEIDEIESSIKSIMDANNSPITTIPGINYRMGAMILAEVGDFTRFSNADQILAFAGLSPSTYQSGQLDSCHSHMEKRGSKYLRYALFNATKFVCHWDETFRAYLSKKISEGKHYNVAVSHAAKKLIRTIYRMELTGEAYRK

SEQ ID NO: 252358 - protein, 434 aa, unidentified
MGHRFRTDPDELDTLWARLPKDAERIEVVMEPTRNAWVALAAWFRRHGATVVMVPPEQSADLRDYYNKHTKTDRLDSKVLARLPLLHPEGLHREDSLGPGDELKRAVKIRSGLVHRRTACMARLDALLEILGPAWIAALGSDMTLTALRFLARYANPVQVKRLGKARLAAFFRRCSRQAWADERADAVIEAAATTLRLWGADGGELDFDALAADIAAEARLALTLTDEINGFDKRIGALYDKADPAGIVRSVPGAGRVCAPQILGRLGDPTRFANLAAVRSFAGLVPAADSSGQADGHRGPTKAGDSCLREALFIAADHARKVDPTLAVRYQRLMLAGKHHDSAVCTLATVLLTRIAACLRAGTHYLLRDTDGRVITEAQGRAIVAERYTVPPEVRAARRKVTPHRHPRRNERNERAKTGVATRSKASPVPQPA

SEQ ID NO: 252359 - protein, 377 aa, unidentified
MVKEMVIQNNQNGYRYLKNYIKHLDSLFILFESTGIYSRGMKRFCEIHKIDYLEMNPLEAKFKTSSLRSWKTDKSDAHKLALLAFRMKDSKVQRQSEEIYFELRERARFHLEMEINQNRLKVELVETLHQTFPGLEKLFTNRYSKIALNIAKAFPHPDFVSTLTHDELVEKVLHSTDKGISVNKAHKYIQKLIEIKNNSFPNVDKSSFLLQKVQYLCDKLLIGIEEMKEFDQEMIDLAENTTEFENIISIPGIGELTAALLIGELGNIREFKTNKQLNAFVGIDIKRYQSGTSKSRDTINKRGNKKARRLLYLIIMNIIRGRNHYQSHIVDYYYKLREQPHGKTHKTAVIASINRLLKTIHYLIVNNKLYDYQKAPH

SEQ ID NO: 252360 - protein, 428 aa, unidentified
MKQDDLIRVEQFRQLRKQIRGSEDYLIVGIDVAKHKHHAFFGTATGKTLFKRLVFDNGREGFDRLLIQTEAIKVQHGLEEAVFGLEPTANYHKPLGEFLIKRGHSVGLISSVAVKRNRELLDGRWDKHDTKDAANVADLISQGKFLFYELPCQELRDLRSLLSLKRKLKKLEHGLRIRIRNHLVAQYFPELDRLYGQRESENLAIVRWCLNPAVIGALGYEKFFQLVTTRDRGISQHKRLRAIWEKAAASIGCDVGEAVEFEAEVLVETLKGLREAIKTTDYRIKNIGCSLPEFNYLLTIPGFGPDVSAKVIAAIGNPFRFYSAKQVIKLAGFDLSADRSGNRSDAAIPVISKRGKTYLRYALYQAAFIASIRDRHFIVYYTNTLRGRERERGIRTKMRVKLAAKMLVIAWTLMKKKEPFDPDYLNIG

SEQ ID NO: 252361 - protein, 391 aa, unidentified
MFYIGIDIAKHNHEVSIIDDNGKALGKSFSISNSQKGVDKFNTYLDSFNITSENCVIGMESTGHYWINLFSFLVNLKFNVFVINPIQSDAFRKMYIRKTKNDSKDSYIIAQIMRFGEYSSSNISDENIFALRQLSRYRTSLVDECSSWKRKIISILDQVFPEYSNLFSDTFGVTSKELLSKYPLPENMLELSTEELTNLLNKASKGRLGNEKAQEIKESAKNSFGVSFAKQTFSFQIKQIINQISFIESQLKELDNEISNMLKELNSEITTITGIGDTLGACILSEIGDISRFEKASQLVAFAGLDVAVKQSGEFTGTEMKITKRGSPYLRRAIWLAATVASFKDPALSIYYKSLIARGKKHLTAIGAVSRKMCNIIFSVLKNKKAYTPNI

SEQ ID NO: 252362 - protein, 328 aa, unidentified
MQKNKEYVGVDVSKESLDMVVYSTGETRSFGNDDAGIAKATTWLKQVNSAIIVMEATGGMEVSLYIALQEANLPVAVINPRQIRDFAKSMGILAKTDKVDAKVLARYAATIQPEARPLPDEEARQVNTLVTRRCQLVEMITAESNRATIIRNKTMKQRIHAHIDWLKQELAGIDKDISQMIKENPVWHAKDELLQSVPGVGPVLSATLIAELSELGILNRKKIAALVGVAPFNRDSGKHRGERSIWGGRCRVRQHLYMATLSAVRFNPTIRIFYERLLANGKEKKVALTACMHKLLIILNVMLKHNSYWSCNYAIFNNTCIPDAKTVA

SEQ ID NO: 252363 - protein, 316 aa, unidentified
MKKHSTVCAGIDTGKRKLDVALAGADERLELANTEQGHGKLTAWLRQHQVRRVGIEASGGYEQAVVSRLRRDGFVVIVFQPMQVRAYARFHGLRAKNDKIDAVLIADCTAAAKKIHAPPDPRLVVLAAHQTLIDQIIDQIARCKNYRESSRDAQRQFWNDEIKRLRGLFKQQLKNLVAAIRRYRDLAERLDLIASIDGIALRTAVAILVRVPEIGRISRQQIAALAGLAPYDKDSGDQSAARHIEGGRQRLRNNVYNAAFAASFHWNAELTALYRRLTAAGKGHKVALVACARKLLIYANAVVARGTPWVSRAVAP

SEQ ID NO: 252364 - protein, 342 aa, unidentified
MDHYAGIDVSLECSSICVVDASGKIAREGKVASEPEALIAYFGSLRLCVVRIGLEAGPLSQWLYAAMKEAGLAVELLETRHVRKALETMPVKSDRNDARGIAQLIRLGWFRPVHCKSIGAQETRAVLTARKLVQSKLLDVENSVRGILRGFGLKVGHTTNRSFAGRVENLVVNHASLHMIAAALLSVHAVLLRELKAFDKRVRSMARVDVKAKLLMSAPAVGPIVALTYASAIDDPGRFTSSRRVGAHFGLTPKKYQSGETDYTGRISKIGDATVRTALYEAAHIMLIKPIKGCAPLKSWAMRIARRSGMKKAKVALARKLAVILHRMLANATPFNAAMAAA

SEQ ID NO: 252365 - protein, 366 aa, unidentified
MRWQADSPWVLKTVESKVATSRKKKPEQLPGPGMSPYQQGRARRRKLNKDKTYVGVDVSKENLDIAIARSDSKWRFNNNPGGIKRAIEMIKGVTPVLVVFEATGGLELSLWSALTEAGIDAAPTNPRQVRDFARAKGRLAKTDTIDAQVIAQYGQAMQPRPQPFPDTQELKEMIARRSQLIEMITAEKNRLKAARRKRIQEDIKANIEWLKSRLDGVDKDLRQAIKANPEWQEKFELLNSAPGIGNVTAAALVSEFPELGTLNRHQVAALGGVAPLNRDSGMMRGKRTVWGGRARVRSILYMATLVATRRNSIIKAFYQRLCAAGKPKKVALIACMRKLLIILNSMLKHKTPWRYTYSSASIGPCH

SEQ ID NO: 252366 - protein, 405 aa, unidentified
MTSPRRVVIGADTHLDTIHVAAITDTGGLLGDAEFRTNPSGYWAAICWARSFGEVVAVGVEGTSSYGAGLTQALQINDIHVVEVNRPDRSARRRQGKSDPLDAYSAARAVLAGHGLAVPKDSRTGALKALLIARRGAIKARTAAIQQIKDLLVTAPADLRERYRRYPTTLRLVEALADCRPRAHEDPTTVSVLIACKALAQRIGYLERQDRELTAELDALTAALNPALRAAYGVGPDTAAQLLITAGTNSHRLRSEAAFAMLTGVAPIPASSGKTNRHRLSRGGDRAANNALHRIALVRWSHDRRTRDYVARQLAAGRSKNDVLRLLKRAIAREMFRHLTEPCPIDDYSDLRPTRQARNITLTAAAAHFNVWPITISRLERGLKRDDTLATNYRQWLNTLTIDAA

SEQ ID NO: 252367 - protein, 421 aa, unidentified
MQVLYERCAGIDVHKDQVTVAVRLPGAGPGGRDTRVRKFAAFYGVLREMVRWLASQGVTHVAMEATGIYTMPVYHALLEAGCFDQVLVCNAAHVKNVPGRKTDAVDASWLAELLECGLLKGSFIPPAQIKAVRDVVRYRRKIVQERASETQRLGGVLQDAGIKLDSVASSVDTVSGLAMIRALIDGERRGQVLAELARGVMRAKIADLSRALEGRFDDHHALMCQLHLDHVAHLNEMIATLDAQVEAMMVPFARQRDLLATIPGIGPKAAAAVISEIGISPGDFFTTSAHLASWAGLCPGNHESAGKRKHGKPRKGSQHLQPLLVECAWSAVRTNGRLQSRYHRLVRRFGGYRNPAAKKRAIVAIAHTLAVVIWHVLATGKPYTDLGPDFYTNRADPAKETERLIAKLQALGHKVTLAPAA

SEQ ID NO: 252368 - protein, 318 aa, unidentified
MRKTFFCGVDVSKDKIDVCFLTSVASEKAKFETLPNNYELIKVYFDSFKNDEILVVFEATSNYHLALQKALSDLNIRYNVTNPYKTSLFLKHLSTIKTDVSDSYGLAVYARIFKSEILPDKYNAEYLQIKSYNSTLNLLQKLNTQLKNFKQSQKNVNNSVIDDVIENLIKEIAKLQSMLQKLAFDLVKKTIPETEEIIKSNKGFGIDLALNLFPQLHFNRDKSEKQFISFLGLSPRIFQSGSSVYKSQKINKMGNSNIRRILFMSALCAVRFNEKFKARYDRLIANGKKKMVAIVAVMCAIVRYLKSLFPFNAEIKAI

SEQ ID NO: 252369 - protein, 485 aa, unidentified
MRRNKQSTARKATKAPKATPSPSGRGWDQMNRKQRREMARKIQAQDLSLEVVHPDAAGIDIGNEAHYVAVPPARDSQPVRRFGCTTVELKEMAAWLKQCGIRTVAMQSTGVYWTPVYDILEEAGLEVYLVNARETKNLPCKKTDVQESQWLMKLHTYGLLRNSFRPPQEIRQLRTYWRQRNDLVQSAGRYIQRMQKVLTQMNVQLANVISDLSGATGQAIVKAILAGERDPQALAALRDVRVKASEEQIARSLEGNWQEDLLFVLQQEQDGYEFCQKQMAECDKRLEQYLQQRADRSAGADLPEETRKGRRRRKKGNAPQFDMREALFRMAGVDLTRIDGIDVMTAATILSEAGWDMSKWPNEHHFVSWLRLCPDNQISGGKVIGKGRLPTTHRLTQALKVAASSLLRSDSYLGAQFRRLRTRLGAPVAIKAMAAKLARLVYRMLRYGMQFVDKGAWYYEQKHRQRQISSLKRKAAELGFQLVAA

SEQ ID NO: 252370 - protein, 378 aa, unidentified
MNYNTVYVGMDVHKESFTLRYYTFDMDEPSTAVKTQADYKQVLKYLDSVRRILGEECRFLCGYEAGCLGYTLYHQLQSHDIECVILAPTTIPETRGKKKVKNDKRDAGNIATCLANRSYRPVHIPSEQDEEIKEYIRMRSDHKTALKKVKQQILSFCLRHGYRYTDTKKTWTQAHIKWLKNLPAEGVYKEVMEEYMGTFTYLTDKIERLDRQIEEYAQKEEYQEPVKKLCCFMGIKTMTALTTLVEVGDFKRFPSPANFASYLGLMPGEDSSGPSEKRLGITKAGNAHVRRLLVEAAQSYGRGTAGYKSQALKKRQQGNPPAVIAYADRANERMRRKYYHMVLGNGKKPNVAKTAIARELSCFIWGMMTDHIQMQKAA

SEQ ID NO: 252371 - protein, 369 aa, unidentified
MGKYSEAFVAFDVAKKKHAVAVAEGGRTGEVRFLGDVENSPLPIERTIKRLTERYDRLHVCFEAGPTGYGLYRQVQALGHDCMVVAPALIPKRSGERIKTNRRDAVTLARLHRAGELTGVWAPEEAHEAVRDLVRAREAAADELRRKRQQLLSFLLRHSRIYSGGGHWTLAHRRWLANQKFEHAAQQIVFQEGVDAIEDALQRLRRLEKQLTLIVPEWSMAPVVEAYQAMRGASFLVAVTFAAEIGDVRRFDTPRQLMAFLGLVPAESSTGETIRRKGLTLAGNRRARRALVEAAWTYRYPARVSDTLRARLEGLPKPVRDIAWKAQVRLCARYRRLCATGKKLPIVVAAIAREMAAFLWAIGREVAPR

SEQ ID NO: 252372 - protein, 366 aa, unidentified
MKKISTVQVFGNEILKEQKLTIGLDLGDRWSFYCVLHEAGKILLEQKVATTPEAMKQTFGKIPRSLIAMETGTHSPWVSRLLTELGHEVIVAHAQKVELITKSNRKDDRHDARTLARLARIDRELLGPVRHRSAKAQIHLTVIRARAELVSARTALVSAARGLVKSYGQRLPKRGTYQVSRELATGLSAELRDVLGPLLKEVESLNERIQEYDERMEKIAKEEYPEVSLLKQVKGVGTQISLTYVLTIEDPYRFPKSRAVGCFLGLRPGRRNSGESEPQKGISKEGDRYLRTMMVQGAHYILGPFGEDSDLRRWGLKLAERGGKNAKKRAVVAVARKLAVLLHRLWVSGEVYEPLRNSQKAMRAVA

SEQ ID NO: 252373 - protein, 343 aa, unidentified
MKQLFIGLDVHKKTWAVTIQEDHLILKRFTIEADADLLIGYVTRHFPQHQVQCCYECCCCGYHIYHSLTAAGWEVLVVNPGDIARGNKQVTTKTDKVDSAHLARELQAGRLKGIYIPNHKQEQFRSLFRRRNDLVKSLRRIKCHIKSMLLYYGIVLPETYDNVNWSKDMIQWVYKQRWSYAPATEAMKSRLEEYLFLRKQYLHVGNELRSYARKHFKKDYYLLRSVPGIGPLTAIGMLAEVGDIRRFRNIDHLSSYIGLVPSLHSSGEKTYSRGITYRSKRLLRSYLVEGAWVAAKQDPSLMVYYEERKGCDHKKLIIKLAAKTLSRIYHVIKTGEPYELLKP

SEQ ID NO: 252374 - protein, 516 aa, unidentified
MVATVVRRPRRVFQVHKPNGQLSPRVQAVGPERFGIIAVDPAKKRSRLLLANFYGTVLVPPITVEHERGPIEAALAALRGAIREHNLGDVVVALERTGTYHRPLQRAFQAAGFETRLVHPFTSKQFRLPADPDNKTDDTDLAGIVRAVTQGFGLLEPVWPELYASIQMLRRHRRDLVDKAALLQNQIRETLHSAMPGFEAAFTHLWQSPAPLAIARQFSSAADILQAGADGLRAALKDAGVRPRHDTIAKVLDWARNAPQGHPLNALQRRIFTALDDDRREKTRLINAIEVDLARLAVQTPYAILLAIPGINIVTVADLAGEMGPMEFYLNANHITGRAGLVPCRYQSDQVDRSGPLVKRANRRLRAVLMQTASNLINCNNTYNARAAAWRRQGKDERWIRVKVAKSFSRLLFAMVAGRRIFPHPALQPRHYVLGKLLEFHMEHKVAPEQMRADLEALCDQLPTHARAAEIPPLQERLDELTRRRAHGPRPLAEILPIVLVRLQGVQSTPRSEDPS

SEQ ID NO: 252375 - protein, 340 aa, unidentified
MQVTTIGLDLAKNIFQAHGIASDGTVAFNRALRRGQVLPFFAKLAPCLVGMEACGTSHYWARELSKLGHEVRLMPPIYVKPYVKRGKTDAADAAAICEAVTRPTMRFVAIKSPDQQALLSQHRARQLMIGQRTQLSNMIRGLIGEFGCIVAKGLNHITAFAEALRSGEGPSLLATAQDVIVSLCEQLLALHQRIRMLEKKIFAASRKDARVRLLETIPGIGPVTASAIVATVGTPDQFRTGRAFAAWLGLTPLNRSSGGKERLGRISKMGDRYLRRLLVAGMTSRVRAARARPDRVEPWLASLLERKPVRLATVAMANKAARIVWAVLTRNEPYKQPVAA

SEQ ID NO: 252376 - protein, 350 aa, unidentified
MLKYSLGLDISKKDVHACLSVIDARQQVKVKASSKFGNRPNGFKAMQLWLARHKKESNIPLVITMEATGVYYEECALFLFKAGFEVAVVLPNNAKNYMKAVGLKTKNDKIDAAGLARMGAQQCLELWQPLDEFFYTLRALTRHHQSLQELKTNVNNQLHADQHSIYSSKTVVKQLKKLIDGIDKQLNEIELEIHKHLYSDNEVAEKTDHIIAIKGLGYMTVAAILAETNGFALFRSIPQLVSYAGYDVIENQSGDHKGKTKISKKGNSHIRRALHMPAFNMIRYDVGDFKPFFERILEKHHLKMKAYVAVQKKLLVLIYTLWKKNEAFKPKQERDVKNTSGDRELVPSFA

SEQ ID NO: 252377 - protein, 374 aa, unidentified
MSSDGITWVGLDAHKKSIHVAMLVPGREEPVSWQEANEESAVRRLARRLNREGPGEVRACYEAGPLGYTLQRELEAQGVICEVVAPSLIPIKPGERIKTDGRDARKLAEMLRSGMLTAVQPPNEADESLRDLCRGRDSVRQDLARSRHRMSKFLLRRGYRYHDTQRHWGVRHMKWLRPLRFEHAAAQAIFDHYLLTIDHLDERQRQVDAQLGLFGSQEPYCQPVAWLRCFRGIDTVTAVSLVAELHDFRRFRSARSLRAYLGLVPSERSSGEQRRQGSITRAGNHHVRRLLVEAAWHHRHRPVLSQPLRKRREGQPAHVIAIADRAQERLHGRFIRMTRRGIHYNKTVVAMARELVGYLWATLYPRETEAPPSA

SEQ ID NO: 252378 - protein, 350 aa, unidentified
MLIIGCDYHPAFQQIAFVDTATGDCGERRLEHREEAEKFYGELAARGIKVRVGMEASGQARWFERLLAELNFELWIGDATVIHAKRVRKQKTDRQDAQLILGLLLEDRFPQIWVPNWENRDLRQLLWHRHRMVQARTRIMNQLQAVAINEGLRCKKRLWGESGREQLEAFRLAPWASRRREDLLKLLDGLNPTIAELTQAVEQEVEKYPAAQRLRTHPGVGPLTALAFVLIIGRADRFQYGKQIASYLGLVPLEDSSGNRRRLGHITKQGNALLRFLLVEAAQVTARSLPEWRSQYLHLTMRRGRKIAKVAMARKLAVRLYWMMRKEWDFGKLTKFGSHAGKPGTGDGVK

SEQ ID NO: 252379 - protein, 310 aa, unidentified
MNQEKYVGMDVHQATISVAVMDGNGKIIMECILETKAATILQFIQGLHGTLSVTFEEGTSAAWLHDLLKPHVSHLVVCDPRKNALLKDGSKSDRVDARKLAELLRGNQLKPVYHGEHGMRTLKELGRSYLTITQDVTRVMSRIKALYRSWAIPCSGTTVYAPRHRAEWLAKIQEPGVRLRAERFYQQLDLLQPVRQQARYDLLRESHKHHAVKLLRQIPSIGPIRAALLVALLQTPHRFRTKRQLWAYSGFAVETHDSGEYRYVRGKLQRNRERITVRGLNDNHNHDLKNLFKGAAISASTRPGPLLLTS

SEQ ID NO: 252380 - protein, 404 aa, unidentified
MNKRFIGLDVHQNVIYVTILSITDGTVEQYQISTQERDLNGFLATLNPGDEVALEATRGSNFYVDQISWRVAKVAVANPSKMKTNKNAKNDRNDSLALALQLANGTLPTVWVPEQETRQDRELIRHRMNTVQEQTRLRNRIRASLAEHGLSWRGSDIQSAGAQLFLAKLSIRLPEVTRGILADQLARLNFLGGRLQQIEQVIEVRAARWPQLSLLMTIRGINVLTAFTILATIGRIDRFPNAASLANYSGLVPREYSSGGKSRYGGITKAGSKALRWALTEAVQSLCRVDGPYRNLCKRLDRKKKGKGISATACARKLLESIWCMLTRSETFRLSEPGLIEEKARRREQRLNAARTVVQARQERQREFLISQLATLQDLACRGAQMPVPTKLLASFGRSLAETG

SEQ ID NO: 252381 - protein, 343 aa, unidentified
MQIHSVGIDLGKATFHLVALSAAGKVLLRKKFTQKQLITFTANMQTSLIGMEACSGAHFLGRVLREQGHDVKLIPAQFVKPFVKSNKNDFLDAEAIAEAVDRQNMRFVPIKTDDQLDLQALHRVRDRLIARRTSVINQLRAFLLERGMTFAKTPAKLKLAMSEIFENADANLTPRMRNLVSLLWNEWKDLEQQIVSMNEEVEQIASSDPACQRLRKIPGIGPLVATAIVAAIGNGAAFDKGREFASWLGLVPRQHSTGGKARLLGISKRGNSYLRKILVHGARSAVLRVKRERSPFSGWLDALEQRAPINVVITAAANKLARIAWAVLSSGQEYRPTVSPTAA

SEQ ID NO: 252382 - protein, 341 aa, unidentified
MPTITIGLDLAKHVFQVHGVDATGQVVIRKKLRRSELLEFFKELPPCLVGMEACGTAHHWGRELTALGHDARLMPAGYVKPYVKRGKNDAVDAEAICEAVTRPTMRFVEIKSAEQQSVLMLHRTRELLVRQRTALINSLRGQLAEFGLIAPQGVWRIPQLHALAQGATSSVLPDAMRACVELIMGQIEDLQMRIGTIGKSILACHRASEMSQRLQTIPGIGVITATAIAATVANANVFKSGRHFAAWIGLVPRQTGTGGRIHLGPISKKGDPYLRKLLVLGATAVIRYAKSKPELAAWINALLERRPARVVTVAVANKLARIAWAVMSRGETFRQASSAIA

SEQ ID NO: 252383 - protein, 354 aa, unidentified
MTGTTILAIDLGKYKCVSCTYDRVTAAAEFRTITTSRAEVERLIRGTSPSVVVIEACTLAGWVSDLCGELGVRVKVANTAAEAWKYKHTKRKTDRDDAVRLAQLEALGQLPTVVVPAKRVREWRALIAHRQALVTQRVAAQNRIRAVLVGQGLPAPRGAKAWTAAGLAGIAQFARPLAECEPDDLWRGLLDLALTAYRQADELVAVAEAKLDTIGKADARVRLLDTVPGLGPRTAEAVVAHLDDPTRFRNGRQVGAYGGLVPRQFQSGEDDRRGRITKRGPAVLRKLLVQCAWCMLRYNRWARAVFDRLSRGKARRKQAVVALARRVLVRCWAMLRDNQPWRADPDPAPAATAA

SEQ ID NO: 252384 - protein, 320 aa, unidentified
MRNAVGLDISQNTFDAAAIVNGQCKQALFDNSINGFESFKAWLDGFGCELHICMEATGNYFEDVADYIGQFYTVSVINPYKISEYGKSRFHRTKTDKQDARLIAEYCHTAMLKDLPARQKISIGHYRLKRLLALYEQLKTQKTAQKNRLKVAKDEFVRKIHQAQIQELDQHIQQVEAEIQAITNSNQDLKAVSDRLQTIPAIGKLTAAILTNYLLSGDFKTANQFTAFAGLNPQQKESGTSVKGRSSMTRYGNRRLKSALFMPAMVALNRNYFPDFVKRLNAKNKPKMLILGALMRKLLVVAYYVYKTQKPYNPERYKPA

SEQ ID NO: 252385 - protein, 362 aa, unidentified
MEYFAGLDVSIEETAICVVGDDGKVVLESEVPTEPELIAEALERFAGRLRRVGHEAGSISPWLHDGMLALGLPAVCLETRHVRAALSAQRNKTDAADALGIAHIMRTGWYRQAHIKTEECYRIRLLLVQRRNLKRKFLDIENAIRHSLKVFGIRLGKVGRGSMEKAVREAVAGDAMTAGLMDCMLRARAALWEEYLILHKLVTQLAMRDELCRRFMAIPGVGPVTSLSFKSAIDDPARFRRSRNVAAYFGLTSRRWQSGSSIDVKGRISKAGDPDVRRALYEAASAMLTRFKGRDTIKSWGLKLAKTKCHAKARVAVARKLAIVMHAMWRDGTFYVGDPDRDAHEIDSVNASKLRRLSYARS

SEQ ID NO: 252386 - protein, 350 aa, unidentified
MNYVGVDLHKEQSWFYVMNETGKKIDSRSISNSIEVLRGYFETIPKPFTLAVESTFNWYFFVDLAEEYAEKVYLANSYELKAFAKRNKKTDKIDARLIADVMRKGYLPTVTIPGKEIREIKEILRFRMNIVKDRTRNISRLRNILSKLGENPHGDFTTYKKLKEIPMGHLPDSYQEIISGYIEKVGQLHEKLYSTEKYVKEKVIQDEDVVNLTSIPGISYFGAALIKSEIIDIGRFKSFNKLCSYAGLAPRVHQSAERTINGPLNINRRKKLQWILIESVLHFMKSSPERKRKQESITKKKGYNTARVSLARDMLKIIYHVLKEKRPYYIAKPNYYNSVQPGVAPALMCV

SEQ ID NO: 252387 - protein, 403 aa, unidentified
MQDLKQLAFVGVDIHKDQHTVCLTDCFSRNLTTFEIPNDPRRFPELTSRINAISGENGLKPVFGLEDTHYFGQRLAQFLISTGNYVKEIPAYKTERKRFLSAHHDKSDPDDALAIAKVLVQDFDKLQTVNTFDELHLAIRELVNQRESLIKEQTRVKNRLHAVIYRQYPRYERMFKYPFTKSALAFWERFSHPSYLKGTTVKSLAHFLKRHSNHTLSTRAAQRILSIVSSDAPAYESELVRAKVLQSLIRHLRFLQNEIELIEQELKTFVPKAGLKLESLTGVNTVMAAKLISYIGNINRFSSSDKLAKCAGIAPTNKSSGKRTRYRKSKGGHRQLNATIYYIALTQVSKDRVGRPLNLKAKEYYLKKIAEGKSKKEALTCLMRRLCDIIYAMMKNKSEYRKS

SEQ ID NO: 252388 - protein, 349 aa, unidentified
MHNDTLIAVDVAKSVFEIAVSELPGKVTQRCRLPRSKFVSFFANRPAATVIMEACGSSHHWGRQIARLGHRIQLLPPQHVRPYVRGNKTDRSDVKGMLEAYRNADIHPVPVKSIEQQILATLHRLRSSWVAERTAKSNTLRGLLRELGVVIPVGARHVVPHAWALIEDAESVLPEALRAPFAEVCEELRTLGQRIEQIETQLKALAEQMPEVTRLRSIPGVGLLIATAVVAFVGDVHRFRSARHFASYLGLTPREYSSGSKRRLGRISKRGDVYLRMLIIHGARSILGHAKRQEAHGVDRLRRWAVQLEKRVGHNKAAVALANKLARLLWALCTSERTYTPAHEAGVAA

SEQ ID NO: 252389 - protein, 355 aa, unidentified
MDNCTIIGIDLGDKKHAVVGLDDKANVVLKRWIPNTKADLEALFRRNRRAVFGMETGTHCRWVSALCGQCGCEVYVGNAHHLRSIFGNSHKNDMRDAEEIARLLHGDKRHFHPVQLRDAEHQNLVQLVKMREIVVSQRTKSANAIRGMAKANGVRLPDSDADSLHKKLAAVVDTLPESLQTLLGPQVGLLEKLCAAIEEYDRAIRDYRNAHFRKECDLLETIPGVGPVNAAAFVAFTGDVTRFRHARDVGPYYGLTAGRDQSSSKDEPKKITKEGNGFVRHLLVNAANLIMQGRGRNTELRQFGLRVWGNRGKVAKRKAKVALARKLAVTMAAMLRSGAPYNGIMEENENGQSNA

SEQ ID NO: 252390 - protein, 339 aa, unidentified
MENFVGVDLHKKVSQLATLREPKPASQVRFPNHTVTVEKVLKKLPQGSKIALEATGSWWWFVDLAQRTGHEVVMWHPKQTKAIASARLKSDKVDALMLAKLLKADLLPTVWIPPAAQRYVRELLTHRARLVRQRTSVINELHALYAKRNIDAGMIFHRVRPPAFRAEDLSGYGPRIVEEDVALLGFLNRQVQGLDKELKAIAEKDPESKRLMTIPGVGPVNAVAGSCWIGTIERFSNSKKLSSYFGLAPRVRQSGERERHGHITKEGNRMVRSLLIQAALWHIRRGPVSSRRHYLGVCKRRGKSIARVAAANKLLGIIFQMMKEKIDYEEFLRRGGNAQ

SEQ ID NO: 252391 - protein, 388 aa, unidentified
MYLIGIDISKYKHDCFIATEAGIQVKAFSFDNNRLGFDLFLEVLKSLDQSKEIRIGLESTGHYGSNLKQFITSNSYTYLEFNPYLTHMFSKALSLRKTKTDKVDAKTISSMLGSVDYKTLHTKFYHINELKQLVRYRHVQMVSRSKTLIELTNILDRIFPEYKPFFNERLSGSAIFILKKFKSRARISKLSNKDYEAIRSYSKGRLSYVRVQKLKSLAKSSVGYETQSDLLLLKHSIKHYEDLTEIIESVEFEIIQLMQNINQTLTTIPGLNILSAAIIIAELGDFKNFTSPAQIVSFSGLDTSVNQSGTIETRGHIVKRGSGLLRMTFWQITFASLRLNPTLYDYYLKKRAEGKHHKVAMVHSVRKLIRTIYYLGVNQMTFDHSQFK

SEQ ID NO: 252392 - protein, 404 aa, unidentified
MKQFTPELEEVKSHSALNLILNHRTLDDYCAYIGLDVHKESIAVAVATRGRGKVSYRNEIPNRPKSIKKMVDKLSKEFHGELLLFSYEAGPCGYDVYHQLMALGQDCEVVAPSLIPQKAGDRVKTDRRDAMGLARLSRSGELTAVWVPEPEQEAMRDLTRSREDSKAIELRTKQQLGAFLLRHGRVYETGKSRWTKGHFNWLETVKFDSAIQQIVLQEYINAVKDAVQRVAGIVTEMQKALQTWSLRPVVEGLIALRGIDIITAMTIMAELGDISRFDKPRQLMAFLGLVPSEYSSGGKRRLGSITKTGNGHVRRVLVESSWSYRFPARKTRHLRQKESKASGPVQSIAWEAQKRLCGRYQHLLESGKAKQQACTAVARELSGFIWAIVCEVMNKPHASKCTAM

SEQ ID NO: 252393 - protein, 344 aa, unidentified
MNPIKILGIDLGKSSFHVIGRDKHDIPIFRKKFSRTQLIEYLSNLPACLVAFEACGGAHWLGRKCQAMGHKVKLIPPQYVKPFVKGNKNDFIDAEAISEAATRPNMRFVSIKSEEAQVISAIYRIRQGYIKERTVCMNRIGSLLLEFGISLPRGHSKMRGLFSWLALQRCPFPPMLMQEVVGQHEYYLHLNIQIKEQDKKLIQLVKQHPLGALLKSIPGVGDMTASLCIANISSATDFKSGRNMAAWLGLVPRQHSTGGKPTLLGISKRGNKALRTLFIHGARAVMSKPEKVGKVYGDWLVRLRQTKSFNVATVALANKLARIAWAVMTTKQPFNEKSLHPNLQ

SEQ ID NO: 252394 - protein, 314 aa, unidentified
MSKSLYFIGIDVSKDHLDVAIRPTDQRMQFGNDDDGIDKVIEALNPVSPTLIVLEATGSYHRLVLSRLIAAGLPAIAINPRQARDFARAIGRLAKSDAIDADILAAFGEKIRPELRAVADEASKQLEAICTRRRQLVGMLTAEKNRFHSSPSSMRSLIRKHIQWLEKHIAELEKDLDNQIRSSPAWREKDDLLRSCKGIGPTTSYTMLACLPELGQLNRHQIAALVGVAPFNRDTGLHRGRRHIQAGRHDVRSVLYMATLAAIRSNTVIRRFHQRLIAAGKLKKVAITACMRKLLTILNAMIRSHKPWNVDFVC

SEQ ID NO: 252395 - protein, 344 aa, unidentified
MWIIGCDFHSGFQQVAIFDNQTGEIEEKKLLHPAQATEFYRGLQGEVRVGMESGCGCQWFRRLLQECGHELWMGDAARIRAAETRQQKTDRRDAELILKLMLEERFPRIWVPTEAERDVRQLLMDRHHRMRMRTKVKNQLQAMALNQGMQKGRRLWTDEGLQQLRQLPLLEHAGRRRDQLLKLLTELNQQVAALDGLVRAEAEGREEARRLMTHPGVGPQTALGMVLTVGDVSRFAGSKQLASYLGLTPREHSSGGKQRLGHISKQGSSFMRFLLVEAGQTAVRGDDQLRRAYRRLAAKKSRGVAKVMVARRLAIRLYWMLRNQWTYAELARHAGKPGSSCGEQ

SEQ ID NO: 252396 - protein, 370 aa, unidentified
MMGWTPRPTASMCQSGGAEHHLREASVSEVSMIGLDISKHVFHAHGVDGRGRAMFRKRISRGKLLDFFATQPSCTVALEACGGAHHWARQLAQLGHQVRLIPPAYVKPFVKRQKNDAIDAEAICEAAQRPSMRCVAVKSEEQQAAGMVFRTRDLLVRQRTQLINAIRGHLTEYGWVAPKGPSHVAMLAGLIDEEEMANSLPGAARMMFRVMLDLLSGLSRKIADLDKEIARRAREDEVSRRLMTVPGIGPISATAIVALAPPAESFAKGRDFAAWLGLTPLQRSTGGKQKLGAISKMGERTLRRLLIIGSSAVVKQASKRGAPRGSWLEQMLARKPRMLVTVALANKMARIVWALLVKQETYRAPVATRA

SEQ ID NO: 252397 - protein, 316 aa, unidentified
MGEDVTRVLGVDVSKASLDVAWSGDGEVQRLANDTAGISAVVAKAQELEVQRITVEASGGWQLPLVAALLHAGLPVVVVNPRQVREYARATGTLAKTDRIDARVLCAFTLAVQPPLRALKDQQAEALSALLARRQQLLGMRTAEKNRLTLGATGLVRKNLKAHIKWLDRHLRDTDRELKQLIEASPAWQAKEDLLTSAPGIGNTTARVLIGQLPELGQLNHKQIAALAGLAPFNRDSGTLRGQRMIWGGRHDVRTALYMATVSAIRANPPIRDFYERLKSNGKPSKVALTACMRKLLVTLNAMLRDQTPWQNTAKA

SEQ ID NO: 252398 - protein, 309 aa, unidentified
MKQSVVYIGIDVAKAHLDVAWAGTFRRLPNERSGHAVLVRWIKQSATPVQLICEASGGYEQGLLESLEKSEVKVTLVQAVRVRQYARAAGILAKTDQMDAKVLAAFGSAMQPPPTPPLCAEQKRLRQYEAQRRHLSKVLVAEQNRLAQLSCAELRTLSRGLISKIKKQIETIDTRIGDLIAQDQTLREKAQKLTAIRGVGVRTAALLLAQMPELGQLNRRQAAALAGLAPFNHDSGSICGKRAIFGGRRALRSGLYMAALSAARFNPILSRFYRRLRTKGKPHKLALTAVMRKLLLALNQTLKPIPSLA

SEQ ID NO: 252399 - protein, 346 aa, unidentified
MPETEVNTFAGIDVSARELSVALRRGEGEDKPAMAKFSNHPSGHKALIAHLLRGSRRVRVCLEASGNYSLDLALTLQAHRQVEISVINPRRARRFAESLGQRSKTDPVDARVLCDYAARMPWVAWQPPSSVALHLRAVARAIADLGVIHTQQNNRAHASAASQALPVLVVKEMQRHQKYLEQRMTRLRREALRLIAGDSELDRRFRLMLTTTGIAETSALQILGELAVLPDMLDARQWVAFSGLDPRLFKSGKSVEKRPRISRGGSRHLRRALYMPALVALRRDPCLRRFYQNLLARGKARLQAVVAVMRKLLHALFAMFRTNQLYDGSKLCCAIEVAGHAIASCA

SEQ ID NO: 252400 - protein, 329 aa, unidentified
MQTILHNCCGLDIHKDSVVACILKTREPLSTERGKEESTKELRVFKTFHDDLVQLRNWIESEDCRHVAMESTGVYWYPIYDALEGACGGEIELIVTNARHMRNVPGKKTDIKDAEWIASLLRAGLLRGSFIPPLDVRELRQLTRYRKNVVEDISTQKNRIEKSLQQAGFKLSSFLSDVFGTSGRNLLRILIQKGKITPTDVEYATTRISPAKKAEIKLAISGQLTKHQRQFLKLQINHLDELLTHLATVEQSISDLSKPFEDETARLDTIPGIAVTSATAIIAEIGTDMNKFPTAEHFCSWAGVVPGDYMSAGKKKVPESLLAIPTSKV

SEQ ID NO: 252401 - protein, 423 aa, unidentified
MEVLHECVAGLDVHKDSVVGCVRTVSGDKTTREHRTFDATTDGLLALLEWLTSCRCELVAMEATGVYWMPVWRILSDGAFKLIVVNAAHIKAVPGRKTDMKDSTWLADLAAFGLLKASFVPDEEQHELRALMRTRKQLVREQTRHVQRIQKTLTEANIKLDSVISDIMGRNGRRMIEAMITGVRDPRKLAALADQRLKATPKQLYDALHGRLTDHHRFLLQLHLGQWDTLDATIKGVDREVATRVFRMDTEVTAAKANFSDLIDQLVTIPGVSRLSALTILSEIGTDMSRFATAGHLVAWAGMCPGQNESAGKRKRTRLRKGAPWLKTMLVQCAWAAKRKKDSYYKAQFFRLQSRRGPQKAICAVAASLLTAIYHMLKDGTIHQDLGSGYFDQRPPEIKVKRLVNQIAKLGFEVTLQPIAKAA

SEQ ID NO: 252402 - protein, 311 aa, unidentified
MAQMVATAGIDVSKDRLDVGVHPSGEQFSVTNDEEGWRALVRRLRPIGLRAIGIEASGGYERGVAVALLQAGLPVRSVNAWKLRQFARAAGLLAKNDRLDARAIAWFVASLPSREIRHDPVVARLAELVHARRQLVDAIHQVGNQSEHLQDAGLRRLQARRIRQLERDLAQLDLRVAQTIAGDPALRARRDLVCSMPGVGPVLAATLIALLPELGGLSNRSAAALVGVAPYDFDSGRMKGLRCIFGGRAAIRRVLFMAAQAAALFNATLRAFKQRLIAAGKKPKVAIVAVMRKMIITLNAMVRADTPWKQA

SEQ ID NO: 252403 - protein, 344 aa, unidentified
MAIAVLGIDLGKNSCSVAGLDGTGRVVLRRRLTRESVVRLAGTLPACVVAMEACCGAHHLGRVLREQGHEVRLMSPEYVQPYVKAQKNDERDAEAIAEAATRPTMRFVELKSEAQLDAQILHRARSRLVGQRTALINQLRAVLLERGIVVAKGRRRLEEYLIGLLDGDRPATLSHRICLLIEDMRLEWSELDQRIAALTAEFVARAREDQAARRLATIPGFGALNATALVAAIGTGETFRRARDLAAWLGLVPRQATTGGKPRLLGITKRGNTYLRTLLIHGARAALPSLSASQSPMGEWLRGLIGRAHKNKVIVALAGKLARIAWAVLRSGETYVKEGRPVAA

SEQ ID NO: 252404 - protein, 351 aa, unidentified
MMIIGVDYHPSFQAMAFLMEETGECGEQELNHSDGQAEKFYRDLKQRGIGVRVGMEATGYSRWFERLLAELGFEVWIGDPAEIQAKRVKKLKYDRYDARLLRRLMLENNFPRIWVPDPENRDLRQLLWHRHRLVQMRTRIMNQLQALAMNEGYRWKKKLFSEQGRAQLEKLALAPWASRRRQELLELLDRMNPTIEELTAAVEREARKRPEVQRLMTHPGVGPLTALAYVLIIGTPTRFQRGKQIGTYVGMIPSEDSSARKQRLGHISKQGNSLLRFLLVEAAQAAARSNPEWRRRYIHLAMRRHRSIAKVAMGRRLAVRLYWMWRNGCEYSPSFEFGSYAGKLGTGHGAK

SEQ ID NO: 252405 - protein, 335 aa, unidentified
MYYVGLDVHKNQVTMCVLDRGGNVVLRRTIRGNVGKVIKALRRLDGPRRVIFEASQGAGYLRDRLRELAVVVVVANPSKIPLIYKSKRKNDRVDAETLATLLILNLAPESYIPEEPTRLHRETIEHRRRLLGVRTAAKNRIRSFLHGRGIEAPKSLWSRAGLAWLRELEFAGPLAAARRDLLLKQLRAAAEDLREITRALDAYAEGHAAIGLLMTIPGVGVRTAEAVVAYIDDPRRFRRSGQIGTYFGLVPTQDQSGSVNRLGHITRQGPSVAQWLLTEAVWQGVRRSARLRARYDRVLKGDPDRKKLAAVATAHFLARAMLTMLKTGEVWNEAA

SEQ ID NO: 252406 - protein, 343 aa, unidentified
MTEVITIGVDLAKNVFQVHGVDAAGGVVFRRQLRRGQMLPFFKKQRPCLVGMEACATSHHWGRELRALGHRVRLMPPRYVKPYVKRNKNDMADAEAICEAVTRPTMRFVEIKTIDQQSVLMLHRTRHLFVRQRTTLINALRAHLAELGIVAGVGRNGLDRLLKIIEDGDDDRVPPAARDCLLALRDQLEMVKHQILDADRRILAWHRMSEVSRRLDDIPGVGPLIATALVASIPDPHAFKSGRDLAAWIGLVPRQNSTGGKERLGHISKAGNRYLRMMLVVGALSVIRRAKQVGYTRRPWLTKLLDRRSTKIAAIALANKNARTAWAMMAHGTCYQEPASQAA

SEQ ID NO: 252407 - protein, 443 aa, unidentified
MSRKKHTHLRGERGQAFADKIRGLPMEQILCVSLDIHKYFHVVMIHNALGEIVTMTFEIDIFQVGFDRLCRAIDEAVARTNAQVVLVGMEPTGHYFENLARHLDQRPQPVTLINSFAVSRNREQQMMRREKDDEIDVAAIGDLLRRGEGTSFQPVSGLYLEMQHLSRVRFSKVKMRTALKNQIIGHLDRIFPGLVIKGKGARERYELLFVTDFWSCQTLQHLIRVCPDPGKLATMAPQDLRSAFHKQGFVLGPKTAAKIITYAQKVLLPDPEVIAIRCQLLAHDLALLAEVERLIAELEDRLHTLLQQTPYWVWTQVRGLSLTQVASLAAAIGDPTHYTYAAQVFRRSGLVSGRNDSGTRRHKGKGKRVVKTGDVYLRRALMTAIMSLIRHQPVLHDYFTELHRTKHAGVARVATARRAMGILWAIQRDQHSRTLVLKRGVEM

SEQ ID NO: 252408 - protein, 412 aa, unidentified
MSCAGLCDPGGEGGRSSASNGIVGARGLRPRGRPIERRYRPWLTVCDVVRAWLVVGVCWLTSGLSRGGGGRVSLVMGMDQHRAQISAEWIDTITGEISRARVAPADRAGVRRFLTRFKGEGLEVALEARTGWRFLAEELDRVVAEVHLAEVVQTSGLKGRGKRPKTDWADARHLRELLLIGRLPESWIAPAHLLDLRARVRCRHTLVHQRTERQQRMQAVLFHHGCPHSRKLLTLANRERIAALKLPSAAREQLTIALQMIDAIDVQLAPFDRSLRAYARQQPGCRTLIDQLYGIGELTSVTILAELGDTRRFQNSRDAVRYGGLDITIHESDQRRAPGHLSRQGPPALRWALYEAAQAARRPSSPDRAYYEQLAERIGGNRACIAISRKLLKRSYHLLRALGDHALQPVGT

SEQ ID NO: 252409 - protein, 335 aa, unidentified
MQIYGIDLAKEKFDVSFFDLTSKKVSNQPSHKVVKNNFKSIGRFLETLPSDAVLVAEHTGVYGDTLLKCCMDSNVKIAFVGGYVIHRYRATPDRAKTDVLDCALLRDFGERYPDKLKYKTFPEEALYELRQLARHREMLVEQRKQLITADKSEDCRPIRSLAVKRSMDRIKEMLDTEIAETEKEMLKVINGHDSIHHNYELVKSVDGVGLITAVELLVKTENFTKITTARQYSAYAGTAPYEKSSGKMDKGAHISKIGNRRSKTLLYICAESARLHNKEIKLYYERRTLIDKKPRHYVLNAIANKLLRIIFTLVEKGEYYDANFIRQDPRVVKYN

SEQ ID NO: 252410 - protein, 421 aa, unidentified
MRFYTTPHRYYCGIDLHARRMYICVLDAEGQIRVHRNGPATPEHFLTTIAAYREDLVVAVECIFTWYWLADLCAQEGIAFVLGHALYMKAIHGGKAKNDKIDAHKIAVLVRGGMLPMAYVYPREMRATRDLLRRRCHFTRKRAELLTHIQNTASQYLLPTLGKIAYHGNRVGVAEHFRDPEVRKSVETNLALIDEYDRLLTELELHLTQTAKVHDVNAFYRLRSVPGIGKILALVLLYEIHDIHRFPRVQDFVSYCRLVKCAKQSDGKHYGYSGTKIGNAHLKWAFSEAAVLCLRKNPPAQRYVARLAHKHGKGKALTILAHKLARAVYYMLHRGQAFEVTKFFSGTAGGDRPPRAENGRGAGGDSHDASRSRLTRHDLDGGRYLDPPEIMRRGSRRRGHERDGVTTERVIDAAARVAEER

SEQ ID NO: 252411 - protein, 349 aa, unidentified
MIIIGVDFHPEFQQIASVDTESGELQEQRLQHREEAESFYRELAARGVRVRVGMEASGHARWFERLLGELPIELWIGDAAEIQRKRVRKQKTDRQDAQLILKLMLKDDFPRIWVPSWENRDLRQLLWHRHRMVQARTRIMNQLQAVALNEGLRCKKRLWRRERQRLESFPLAPWASRRRHELLELLDRLNPTIAELSQAVEQEVEKFPEAQRLATHPGVGPLTALAFVLIIGEAERFQCGKQLASYLGLIPLEDSSGNRRRLGHITKQGSSILRFLLVEAAQVTVRSLPEWRSRYFHLMMRRGRKIAKVAMARRLAVSLYWMMRQGWDYQQWVEFGSHAGQPGNRHGVQ

SEQ ID NO: 252412 - protein, 493 aa, unidentified
MKTKPDQDPKRPKARRSKKRRQKRGRTPEALPVVRPDTAGIDLAVTADIWVAVPPDREGETVRPFSPMSHGLEKLVAFVLASRVKAVAMEATGVYWSALYSKLMEAGVDVTLVQPRDVRRLNRPKSDIADCQWLQYLHSVGLLKKSFVPPPQILAVRAIARQRERLVQEAARHVQHAQQALDEMNLHLHHVLSDLVGTSGQAIIEAILAGERNAEKLAALCHHRVLTDRAIIAQALTGQWRDEHIFVLGQAYESWQQTQKQMGACDQQLWKLAQALEVRIDEQALAAARPVRGAGRPRKEAAGTAAATPPPRRKGHSRNGLNREEDWPARFHALFGVDLLAVPGVNLLLMLTLLVEVGTDWSAFSTSAYFASWLGLCPHNDRSGKKVLRRRTADGQSRLKAMLRMAAQSLWQSHSPLGTQYRKLKARLGAPSANTAMAHRLARILWHMVHHQKAYDESIFEQIDQKQTDRQMSRLRKQAKALGFELTALPKAA

SEQ ID NO: 252413 - protein, 351 aa, unidentified
MDATTVGVDLAKNVFVACVADCTGRIVERREFNRASFLSWLGTLPAGTVIGMEACGSAHHWGRTAQRLGLAPRLMAAEFVRPYRKRQSVKNDRADAEAILVALLSPGMRFIPVKTEAQQQRLAWHSLRVGWVEERTALLNRIRGLLAEFGLIVDPGPKHLRALLAERERDTASPPALRGLIHSVRDQLDALDARIGECDRQITAQQANDPLAKRARDLPGVGLITADAVTASVGDASMFKNGRQFAAWLGLTPSQSGSGGKTKLGRITRRGDDYLRTLLVQGARSVLAATLRKQRRESPDQLTRLQQWIVVLNGRIGYHKTLVAIANKHARQLWAVLAKGESYNPQAWQRA

SEQ ID NO: 252414 - protein, 415 aa, unidentified
MKTYILRQPKAVEPQKSVRSPRPNPAAPATTGVLLGRPDATAKGPFLFIGLDVHNDSIAVSLAPSDSAEVRRYGIIGGEHEDVLRLAKKLAAAHPGTTLKFCYEAGPRGFALCRCLQTHHWNCILVCPSKIPRKPGERVKTDRRDADDLARLYRAGELTGIYVPEPEDEAMRDLLRARFQVGRQQHRARQQLKMYLLRHNLRYTGATAWSPAHLRYLAKIKMPFPVQQIVFQEMLGVITEATARLERYDAEIERAVPGWRWAPAVRALMSLRGMALLHAATLVAELGDFNRFEHPGQLMGYLGLVPSEHTTGKDRQQGGITKMGNAPARRALVEAAWQYRIPARLSPHLKKRQEGLPKTITDIAWEAQRRLHHRYTHLTRVGKKKSQVAVTAVARELTGFVWAIARQVKPVATTP

SEQ ID NO: 252415 - protein, 435 aa, unidentified
MEEVTDEPLYRDRVCGIDIGKAGLVATIRVPSDRDPARRMQETRSFGTTKREVLALADWLRSWQVPAVVMEATGDYWKGPFYRLEAEGFDCVLADAKQVKNLPGRPKRDPADSRWLAACFERGAITSCFVATPEFRIIRLHTRYRRDLTEERTREKQRAEKLLESAAIKISAVLTDLHGVTGRDIMDHLIAGERNPKVLAQLARAAARRKISQLEEAVEGAEFFTAEHAALLAKVLARIDRLSADIDDLSQVIERLLAPYEEQLQQAESMPGWGRRAAQDAVAETGVDMSRFRTGPHLVSWAGRAPQDHQSGKRKGRAKAKKGNRYLGAITGETAVAAGRTQTREGARHRRLARRRGTAKACVATGNTQLKVYHKLLSNPGMRYADLGPDYYERQRDTRRQVAHHVGKLGALGFEVTLCRIPEPDPDGTDPAQAA

SEQ ID NO: 252416 - protein, 416 aa, unidentified
MNTSKYVASLSLDWGDTAHAFVLAHGGSKERGTISASAEALHTWLDQLGERFGGQPVSVVVEAGRNAVIHALFEHPWLEIYPVHPAASARFRKALIPSGAKDDAPDAEVLLTLFEHHRDRLRRLNRDSVQTRRLQLLVNARREAVNLRSLFTNQLRSTLKSHFPQFFDLIGDEVYTPLPLDFLNRWPSLAAVQAARPSTLRRFYQTHNSRRPALIEERLACIATARALTTDAAVIDVAIAQTTLLVAQLRPLQTSIDDLENRIAEAFAAHPDAALFAQLPGAGPILAPRLLAAFGSDRSRYPDPASLQKYSGVAPIREKSGRLMWVHWRWNCPKFLRQSFVEWVGQTVPRSIWAKAFYRQQQRAGKGHQAILRALAFKWIRILWKCWQDHTPYNESRYLISLHKRCSPLAHSCPLP

SEQ ID NO: 252417 - protein, 327 aa, unidentified
MSQFYVGIDISKATFDVALLGGAQTARSQFANDQSGFQKLAGWLQRQGASQVHACLEATGRYWVELALFLHEQGHAVSVVNPKLIKKHSEAIMQRNKTDRQDALTIADYCAKQQPDLWTPPTAAYRQLQEMVRHLYTLKGDRTRVSNRRQSGLTSQEVLALLDEQLALLHRQIEQLQARIAQHIDNDPQLKADKELLLTIPGIGQTTAAVFLAEVPDVTLFKSGDQVAAFAGLTPGQQLSGTSLRRPARLVKWGNAHLRTALYMPALSAHRHNPIAAALRERLLQRGKSKMTTVVAVMRKLLILCYGVLKTRKPFDPHHAHRGLAMA

SEQ ID NO: 252418 - protein, 396 aa, unidentified
MLSTNLQNPIDFNGQKFYVGLDVHKKSWAVTIRSLGIEIARFTQPPSADALSSYLQRNFPGGQYYSAYEAGFCGTSVHEQLCKLGIKNILVHAADIPSTDKQKKNKTDLHDSRSIAGYLEKGSLHSIHVLTQEQQELRSLFRFRESKVIEVTRSNNRLKSFLMYYDIKIPETVSTKEYLSLKALAWLNFELTTAAGTIALQELVEELKYQRKRLFEITKQLRKQIQVLHAESYKYLLSVPGIGAVTAMGLIAEIADFGRFDDPDEYCSFLGLCPWEDSSGETIKTKGMQPRCNQHLRPILIEASWTAIKKSRTLFAYYSKHAGKDSKKAIVKVARKLALTVRGVVLKQQLYQEDYLQKKKAEQSIQKGTSNKRFSSGITEQHINKQPGNVLASWPG

SEQ ID NO: 252419 - protein, 439 aa, unidentified
MLQTLPMLDPLAAFVDIGSEHMHVSVGGNRPEVFGTVTSQLHALRDWLLAQGVHSVAMEATGVYWLPLYGVLESAGLDVRMVNGRQTRNLPGRKTDMADSQWGATLHMHGLLHAGFVPPADIRRLQDYLRLRADHVAAAAGCVQLMQKAFERMNIKLHDVISSLAGVSGMAVTRAIVAGERSPEALVALCDVQIRRKKEQAVIEALRGTWADEHIFALGQALQSWDHYQKLIADCDRRIAAVLPPHDEAQPPLPRSTRQTGVNAPEISRLREILAQMCGGRDLTKLPALSSYGVLQLIGEVGTDLSVWPTEKHFTAWTGLAPGSSDSGKRRKGVKRGRNRTGQLFCMMAQSLVRSRDIALGGFYRRLAARRGGLVATKALARKLAAWFWRVMVKGDDYVEKGLARYEEQVRKTREHALKRLARELGRQLVPVPGVSQTA

SEQ ID NO: 252420 - protein, 345 aa, unidentified
MKKRIEGVTAYGIDIGKNTFHVVGLDSLGKPVLHSKFRRDRLLVHFANTPVALIGMESCPGSQWLARKLQASGHTVKIIPAQFVKPYVKSNKNDMVDAAAIAEAVTRPTMRFVQIRQPEQSARQALHRVRDRYMSQRTGLINQMRGFLLEFGIAVRQGAGVFRMDVPRVLGEEENELPPSMRTLLAGLWNDFKLLEVRIEELSKQIQRSVQYSDTARRLMTVPGIGPLAASALEASAGNGHQFTNGRFFAAWLGLVPREYSTGGKTTLLGISKRGNTYLRRLLIHGARSCVQTCDRQRHPLGAWITKLEQRMHRNKVIVALANKIARVAWKILIKPEEIYRWADA

SEQ ID NO: 252421 - protein, 350 aa, unidentified
MDIIGLDLHKRESQLCLCAEDGTITERRIVTSRERLTAVLGSRLRAKILLEASTESEWVARHLESLGHEVLVADPNYAPMYATRSRRTKTDRRDARTLMDACQTGAYRLAHRLSDPRRHVRAELAVRDALVRTRTRYVALAKTLVRRDGLRVASSESHLVAQRIGALSLSPALAAELQPLFTVLAPLNEQIAAADGRIARLAATDPLVARLATAPAIGPVTASAVVATADDIGRFRSAHQFEAYLGLVPGERSSGEKRRVGPITKAGNSRVRWLLVEAAWRLLRTKSAEAAALRAWAHGVAGRRGKKIAVVALARRLAGILYAMWRDGVPYDASRIRGPRIAAEVTARAG

SEQ ID NO: 252422 - protein, 425 aa, unidentified
MEQYAGIDVSLEASHVCVVDAQGKILKEAKVASEPEALIAWFAAHGTPMARIGLEAGPLSQWLFAGMKAAGLAVELLETRHVRAAFKTMPVNTDRKDARGIAQLMRLGWFRPVHCKSLPAQEVRALLTTRKLLQAKRHDVEMSLRGVLRGFGLKVGPTTPKTFAGRVRALVAHHDTLQTIADALLSARTVLEQEFKAIEKRLSGLARANGPTRRLMTTPGVGAIVALTFVSAIDDPARFRSSRMVGAHFGLTPRKHQSGETDVTGRISRIGDHGVRVALYEAANVILTRAVKGSDLKSWALGVAKRAGMKKAKVALARKLAVVLHRMLADGTTFMASKVAPRRLWRPRINRRLRFRAGSTPGPLGRRSRRRDDGSGQAADAGAAFPRLRVPRLADRSSSDPIRQRPRADCGQKQDPGGRITVTRD

SEQ ID NO: 252423 - protein, 313 aa, unidentified
MTDITRFVGIDISKSSFDVCVLPDGRSASFANSVEGIADFLVFIEPLCGIERLVLEPTGGYERHVFAALQAAQLPVARVNAKQVRQFAKACGQLSKTDKIDAFILADYARRMETRIVPQRSSQQGALVDLVRRYRQLSHMIVQEKNRREKQNETLKDWIEEMLHVLLEQRQAVVDAMEACLKADLELARKADILMSLKGIGLRTACFILADLPELGRIGKGQIAKLVGVAPLNRDSGLMRGKRMIAGGRQPVRDALYVAALPAIRFDPAIKAFFMHLKQKGKPGKVALVAVMRKMIIILNAKMRDVYATVLDH

SEQ ID NO: 252424 - protein, 347 aa, unidentified
MNFYNNTHPYYCGIDLHARSLYVCIIDQAGVTCLHKEISADPDKLQQLLEPYIGNIVVGVECMHCWYWVADFCDDIGVDFILGHALYMKAIHGGKAKNDRIDSFKIANLMRGGNFPLAYVYPKAMRATRDLLRRRMKIVRHGADLKAHVVNTTSQYNLPPNKVNLKNKDAREQLRSTFTEQSVQKNIDLDMALLDCYAGELSKIEWYIQQQAKQHKPNHFHLLKSVWGIGPILALTIIYEIGDIERFGSVQKFASYARLVKCKAESAGKTYGTQGNKIGNAHLKWAFSEAAVLYLRGNEKAQKYLLKLQKRMSKAKALSALAHKLGRCVYFMLKNESVFDEARFLKG

SEQ ID NO: 252425 - protein, 343 aa, unidentified
MYYIGLDVHKKTISYCVKDAAGHVHREGKIGSTRRELDAWIQTLPQPRMMAMEATIFTGWIYDYLLPHVEKVKVAHPLMLRAIAASKKKNDRIDAGKIADCLRCDFLPECHMASTEIRDRRRTLRYRHLVVRQVVQMKNRISGLLMESGVSYDKQRLHKMGYFTELLSTNQEISDSIRPLLRLGREHILRGQRLDRALISSLEGDPLLSERLRRLRTIPGVGSITALTWALEIGDYTRFPSVKQAISYCGLCSAEKSSADKVMRMPISKQRNKHIQHVLVEAAKLAPRYSHELALLREKEIQRGNKNRATLAVARKLVAYMLAVDRRKQDFVPAEELAAKAVA

SEQ ID NO: 252426 - protein, 414 aa, unidentified
MIVAEEPTGARVCGGVDWAKDDHAVCIVGTEGQALQRFMATHDRSGLKDMVRRLLRAGVEEVGIERPDGPVVDALLAAGSTVLVIPPAQVKNLRSRYGSAGNKDDRFDAYVLADVVRTDRRRLRPLERDTVATVALRTTVRARRDMVAHRVATANQLRAHLQIVFPAAAGLFDAIDSDVSLRFLERFSTQGQADWLSPKRLGSWLASIGYSGGTDPEVIYARITAAPRGTTGADAATHSVTTQSYIAVLRTLNTQISTLAASIAEQLDVHPDAKIFTSLPRSGSVRAARLLAEIGDARGRFPTASSLACLAGVAPSTRQSGKVKAVTFRWGADKELRDALCDFAGDSRHSNPWAADLYAKARARKCDHPHAVRILARAWAAIIWRCWQTNTAYNPAEHGGLQRILNQDQQTVAA

SEQ ID NO: 252427 - protein, 611 aa, unidentified
MSTATPLDHIGVGIDTARYGHRVSFLRPDRLPAAKPLTVLENKTGYRALQERLQQLHKQHPQAHFHVRIDAAGQYALNLEYFLRGLDLPMTLSIGEPKRNKDYQKAHFPKRTTDDTESQAMARFAVVEQPAASPTMTPAMTLLCEVAGRLQAKVKQSTQAINRLHNLLARAFPELATLTEDIAARWVLCLLDKYPSAERIAQARLQSLEKIPYLSQELAQQVHLAAQQSVASLRGDVAETLIRDLVAQVRHCHQAEQKMRQLLEQAYAELPPSGHLQVETIPGIGIATAAALVAKIVDINRFATPDDLVGYFGIFPEENSSGVDKYGNPLPPGTLRMSPKGNDLVRHYLWNAARSAITHNPAIRALYRRLRAKGTRGDVALGHCMRKLLHLVYAVWKTNRPFDAEHFSWEQPRDTQRSATTPAATDSEAEGAQHSVAASTTSANDKAVGHKRDKPAQEVVTTAASTVVPTPAPVNPMPPPPKPAKRSKIDFTFLRQQVTMEQVLKHLGLLDQLRGRGQQRRGPCPIHDQSVTAERTFSAHLGKNVFQCFHADCRAQGNVLDFWAAVHHLPLYEAALNLASTFHLQRNREEEPVRGTRPARQTPPSSAENER

SEQ ID NO: 252428 - protein, 419 aa, unidentified
MFKIIRFNCCGLDVHKTWIYACIGITDTNGRTEYKESRFKSFSYGLRNLTDWLAKYSCTEVCMESSGKYWIPVFNILEKSCKVTLAHPKYTKPQKGNKTDRKDARWICDLFMCGMIKPSFIPPAQIRQLRDLIRYRFKLTNMLTGEKNRALNCLTVSNLKLDDVFTDVFGKSSRSIISFILEHPGETFDVAPFIDRRCKTPVEEIQMAVDGAVCPEQALKLRQCLKHIDELEAHKAEIESEILTIAERYKDSLNLLFTIPGLSANPMTAIAIVSEIGSDMSVFPTAKHLASWAGCCPRNDKSAKHVKSTRISQAGNYLKPLLVQVANALIKSKKHAEFRERYQRLKARRGHKKAIIAICRMLLTAIWNVLSKSEPYCSDGFIDHRPVHESKVLTTSQALHLLKMRGYTIKDEPPVPDSA

SEQ ID NO: 252429 - protein, 415 aa, unidentified
MEVLYPRCAGLDVHRDTVVACIRIQVEGTGRPTHELRTFGTTTDALLALADWLSVHEVTHVAMEATGVYWRPVWHILDGEFELVLANAGHIKAVPGRKTDVNDATWIAELLAHGLIRGSFVPPTPVQELRMLTRTRKQLVRERASHVQRVDKILQDANIKLGSVLSDIMGQSGRAILAAIIEGETDPRRLAGRVHTRVRASGEQLAAALRGKVTATHRFMLKLHLGQADALEAAIAELDKEVGERLQPFRDAQARVTNVPGMADVAAAAVLSEIGLDMSRFPSARHIVSWATLCPRNDESAGKRRSTRVRRGAVWLKPLLVQCAWAATRAKGTYLQAQFLRLKARRGPKKAILAVAASMLTAIYHMLKNGTDYVDLGPNHFVRDRDRAATQLLRKLDRLGFEVTKMRDREAAATA

SEQ ID NO: 252430 - protein, 486 aa, unidentified
MTRRKESTFERLQKGQPLNRREKRELAVRLNSADPGFEIVHRHAAGIDIGNESHYVAVPPGRDAQPIREFGSWTADLERMAQWLKACGIESVVMQSTGVYWMAVYEVLQSHGLQVNLVDARGTKNLPGRKSDVQECQWLLRLHTYGLLRSCFLPPEPIRRLRTAWRLRDQHVKEAGRCVQHMQRALTEMNVQLHNAISDLSGVTGQAIVRAILAGERDPVRLAALRDRRIQASAEELRHSLRGNWKEEALFELRQAVEAYDFYGRQIAECDQRLQGYLAALPSREAIAQASVAGTPTRGGPAQRPEVPHKVVKRKGNEPPFDIESEQRRILGVDATTIDGIDVMTVQTVLSEVGSDLSPWKTEQHWSSWNNLAPKRDVSGGRVIRHTREHHTNRVGNAFRMAAQSLLRSQSYLGARFRYLRAKLGAVKAVKAMARVLACLFYRLLTKGQTWVDRGAAEFELRRQQREFTALERKARNFGMKLVPTA

SEQ ID NO: 252431 - protein, 334 aa, unidentified
MSLELLAIDLGKRSFHLYGIDTDGVILSQKVSRAKLADLVGNLAPTAIAMEACASAHYWARCWLAAGREVRLINPRFVKPFVKGSKNDAVDAEAIFEAAMRPTMRFVPVKSTDQQDLQSLHRARDRLICQRTAVINHTRGLLAEYGVVLPQGPWRFMAQAPTAIAGADLSDLARAIFGELMDQLDDLDRRIQKLDAMIVTLCRTNETCRRLAKLPGVGPIIATAIVGSVNDGRQFRSGREMAAWIGLVPRQYTTGGKPRLGGIGRRANHYLRRQLIHGARATVSRSAKHDDRQSTWLKALVARRGFNRAIVALANKTARVAWVLLTRKEEYAAP

SEQ ID NO: 252432 - protein, 386 aa, unidentified
MQKLNDLSRSPSPLDPDGTLIAVIELSLSSWLVAGIVPGVERQPLKKLAVDESALLKLLHRWRDEAAKAGHHIKRIAVAFEAGRDGFWLARWLRAHDIEVHVIHASSVAVSREHRRAKTDRLDTSLLKRSFLGWLRGERDHCKMVAIPTIKDEDAKRPNREHESLVGERSRIVNRMKAALIRLGIRGFNPKLKKAAGRLEDLRTPEGEPILPNMLAELRRDMERRQLINDPIRQIEDARLERIEQAPGDGPNAMVLLLARVIGVGIETADMLVQEVLARNMRDRRAVARYAGLTGSPDESGIKRREKGLARSGNARGRRGMIQLAWRFLMFQKDSTLAQWFRGRTESARGTRKTMIVALARKLLIALWRLVREGVVPDGVVLRPAQ

SEQ ID NO: 252433 - protein, 435 aa, unidentified
MKTIHSHAAGIDLGTREVLVSVPGQPVRKFSSFTEDFALLVQYLVENQITTVAMEATGVYWIVLYEMIETAGLEVCVVNGAHARNVPGRTKSDVSDCQWLAQLHACGLLAPSFVPPEEIRVLRSYRRLREDHIERAADAVRLMQKACDLMNVKLHTVVSQLHGASGLRIIDAILAGERNSYVLTELCDGQILKTKRTAVEKSLHGNWKSEQLFALGQARRTWQFYQDQIAACDREIDLHLQKMGGDKPEPPPRTGPVKPVRHNAPQIEELDEKMRRLTGGLDPTVIPGITGRTFLQLVAETGLDLGRWATAGRFTSWLGLAPRTHQSGRMRKTRGGRKKTEAGQIFRLLAQSLGRSKLPALGGFYRRIAARKGAPVAIVATARKLAVLYYNLMRHGRAYVEQGLEKYEKAYEQSQLKHLQKQATRFGFNLTPQPV

SEQ ID NO: 252434 - protein, 336 aa, unidentified
MKNYVIGIDISKEKLDLCLQFGEKILKEWVLPNTVSEIRSLFRSLLKTHVSEVSCLLVCAEYTGQYTYPLCCACEELSLDLWLENPAQIKYRSGIQRGKNDRLDARKIATYALRYQDKVQLFSLPEKNIASLKQLVSERDMYMTDKGKYQGQLTDQKHFMNKEDYERKSKRLKKLIRELEARILEIEQEIEHLIDSDETLSNQHKLLCSIDGIGDRTAVKMIVETNAFKDFDNARKFCCHAGVAPFKYDSGSSVRSRSKVSNRADKSIKSLLHMAALVVATRKKEGELRNYYLRKVAEGKNKMAVLNAVRAKLVLRMFAVIKNNSAYEKNYVFSLA

SEQ ID NO: 252435 - protein, 370 aa, unidentified
MVHTTAEVLFVGVDAHQDFLSIAVLPGDREKPERARKIPNDPPQIRRAFARLLERGEVRATYEAGCTGFVLWRQLTGMGVDCRVAAPSRIPVLPGDRRKTDRLDAERLAIFLRGGQLTAVTPPTPETEALRTLTRTRDQARKDVVAAKHHVSKLLLNRGAIFRSPRTLWSREHRAWLKTVKLDNADDQQILDFKLSRLDLRETELRELDECIEERAQRSDVEEAVRGLKAYRGVGTLTALNVVAELGDPRRFADKASVAAYVGLVPSEHSSGAKVRRGGITRAGSRHLRRLLIEASQHYRCRVNESKALTARRLAAPARVREHARLTERRLVKRYRRLSAAKHTNLAKAAIARELIGHLWASIHPDIGLA

SEQ ID NO: 252436 - protein, 445 aa, unidentified
MEVTFTHCAGLDVHKKTVVACCITPGAKGEKQIEVRTFGTMTVDLLALSDWLTSQQITHVAMESTGEFWKPIYNLLEGNFEILVVNAKHIKNVPGRKTDVKDAEWIAELLRHGLVRGSFIPPQAQRDLRDLTRQRTNLVQDRATVVNRLQKVLEWANIKLSSVATDVTGVSARAMLEAIVQDQVDPAALSELARGRLRKKRDALEQALTGAVRDHHRFMIGQHLTQIDFLDQQIAAFDEQITAAMQDMSQPPDEPGPAQPDASQVVVTPPEDTTAPLTWEAAVALLDTIPGVGPRAAEMILAEIGLDMSRFPSEAHLSSWAKVSSGNNESAGKRYSGAIGHGNRWLRTVLVQVAWAAVKVKKSYLSSFYHRLAARRGAKRAIIAVAHRLLIAIYHMLKKHEPYKDLGATYLDERNKPKVVSRMKHRIEQLGYRVTIEPVTVSVPG

SEQ ID NO: 252437 - protein, 392 aa, unidentified
MNRIVYIGMDVHTSNYTLCSLDPGYGVEKDNYFAEVQFTNNFVTNVVNYVSNLKKKLKDCEFVCGYEAGCLGYSTYKDLTKVGIKCVLMAPSTMAVQKGGKKVKNDRRDARVIAQCLAYQTYKEVYVLSEHDEAVRGYLRMRDSHNKALKRIKQQIIAFCTGHGLFSPTKSNWTVAHLKWLKDLKFNDPVEQEILNEYLSSLTFLSDKIKAMDVRIEELASEKQYCENVKKLRCIKGIETNVALTLLAEIGDFNRFSKPTDFAAYLGLIPGEQSSGDKVRGTGITKAGNSTLRRKLTESAKGYWRGRIGIKSSTFKKLEKELPKEVTEYALKGNTRLQRKFFNMTHVKGKNMNVAASACAREMACFVWGLITNHYEKAPAVPKTDEELLDLN

SEQ ID NO: 252438 - protein, 343 aa, unidentified
MAMISMIGLDLAKNVFQIHGVDASGEVVLRRQLRRGQVEKFFAHLPPTIVGLEACGGAHHWARVIGRYGHQVRLMPPSYVKPYVKRNKNDGRDAEAICEALSRPTMRFVPVKSAEQQASLAVHSTRSLLVRQRTMVANALRAALSEIGIVAAQGVKGLRALMQQLETASASIPEMMRGALLLLARQWEALDAAERTLERQIKRAALANQDARRLMEVPIVGPITASAVLAKVPDVSVFRTGRDFAAWIGITGRDRGTGGKHRPGPISKQGDRMLRTLLINGASSYLRHQRARGVKDPWLRDMLARRPYKVVMVALAARTARILWALLTKGERYRDRALVPAAA

SEQ ID NO: 252439 - protein, 449 aa, unidentified
MSKQRNKVVSLPVIEPNAAGIDVGSTEIFVAVPADRDPEPVRCFPTFTVDLERLADWLQQCQIRTVAMESTGVYWIPLFQILEKRKIDVRLVNAHHVKNVPGRKTDVSDCQWIQHLHSVGLLRGSFRPDDEICALRSLWRHRDNLIQLATLHLQHMQKALDQMNLQIHHVISDLAGTTGLAIMDAILAGERAPQKLAQLRNRHIQASEETIMKSLVGDYREEHLFTLQQSLKSYRHYQELIQEVDLQVKQMLQRLPSKIADGEKPPKGDKIRRTPWRNEPPQLRNDLYRAFGVDLTEVPGINSLTAQMLLTEIGPNLSRFPTAAAFCSWLRLCPNPKISGGQVLSSRTQPTKNRAALALRMATQGLHRSDTFLGDYFRRMKARMGAPKAMTATAHKLARIVYHMVTTQQEYDATVFQQQEQRRRLQKSARLHAQARELGFHLVPINAVP

SEQ ID NO: 252440 - protein, 489 aa, unidentified
MKRQAAKKALNDKKPSKKASGQATPGKWDEMNRKQRREMMRQMQSEDLSLEVVHPHAAGIDIGNESHYVAVPPSRDPQPVQCFGCTTAELKNMAEWLTQCGIRTVAMQSTGVYWIAVYDILEEAGMEVYLVNARETKNLPGRKTDVQESQWLMKLHTYGLLRNSFRPSQEIRILRTYWRQRQDLVRSTGRHIQRMQKALTQMNIQLANVISDISGVTGQAILKAILDGQRDPRELAAYRDCRVEASEEEIAQALEGNWQQDQLFVLQQDQAGYEFCQTQIAECDQQLAQYLARLEDRTQGATLPEETRKGRRKKKKGNPQFNLREELFRMTGTDLTQIDGIDVMTAMTVISEVGWDMSKWKTENDFVSRLKLSPDNKISGGKVIGKGRMPTNNRATTVLRMAATTLRESDSYLGAQFRRFRTRLGPPVATKAMAAKLARLVYRMLRFGMKYVDQGAELYEAQHRKQQVIHLKRKAAQLGLEIIEVAAAA

SEQ ID NO: 252441 - protein, 402 aa, unidentified
MNAVGIDVSKGKSMVAIMRPFGETVSPPFEIKHTASDIHSLVELINSVEGESRIVMEHTGRYYEVLAHQLSEANLFVSAINPKLIKDFDNDSLRKVKSDKADAVKIARYALDKWHNLKQYSVMDELRNQLKTMNRQFSFYMKHKTAMKNNLIGILDQTYPGVNAYFDSPARSDGSQKWVDFASTYWHVDCVRKMSLNAFIDHYQNWCKRKKYNFSQSKAEEIYGKAKELVPVLPKDDITKIIIKQAVDQLNSASTTVESLRTLMNETASKLPEYPIVMDMKGVGPSLGPQLMAEIGDVSRFTHKGAITAFAGVDPGVNESGIYEQKSVPTSKRGSSELRKTLFQVMDALIKTKPQDDPVYRFLDKKRAQGKPYYVYMTAGANKFLRIYYGRVKEYLATLPES

SEQ ID NO: 252442 - protein, 360 aa, unidentified
MRIIGCDLHARQQSVAMLDTETGEVVNRTLMHEGQEVREFYAQLPRPVLLGIEAIGPMQWFLNLLEELKIECQVGDATKIRAAEPRKQKHDRRDAELILKLLVENRFPAIWRPSKEQLDLRALLLHRHHWVRLRTQIQNALQAIALANGLRRGPSLWSYDGQAKIAFLPLPPHASYRRSMLQALYRKMEEEIEQLTAQVAEQAEQRSGARLLMTHPGVGPVTALATDVFLGDPQRFGDGKALASYVGLIPREYSSGAHQRLGALTKQGSPFLRFLWNEAAAHAVRRDPDLQRFYRRKLVQKGLGKSRVAAARKLGIRLWIMLRDQIDYQEFCRRGQKQSGAVCAGMLEVGYGANCHRPVD

SEQ ID NO: 252443 - protein, 407 aa, unidentified
MELAALYKRVIGLDVHQAQITACALIEECDGLIRIEQRQFGAFKKDRRALAQWVVQLQPDEVVMESTGIYWKSPYAALEAAGIRAKVVNARHVKNVPGRKTDINDAQWLATLSRAGLLRASFIPPAKMRELRLIARQRQKLTGQLASEKNRLHKILADGGIRLGVVVSDVHGQSARAMIKALIANKTPQEVLKFASRRLKASREELFDALQGELTESHRFVLNELMQHIEEIEQRIARFDQRLLAGLESEHNWLVLLQTLPGVDLIGAAMLLVEIGNDMDAFGSADRLCSWIGICPGNNESAGKHKSGRTRKGNAYVRRLLCEFAHAASRTTSAFKAKFSSLIVRRGYKRAIVALGHKILRTIFFMFKRREHYRDSATDYEKLSVQRNAARWIKTLIQHGFIKTAQA

SEQ ID NO: 252444 - protein, 482 aa, unidentified
MKKKNIYVNQSQELLSLFEEAGNNDKIMCVPIDYAKKDHMVMFCNGYGHILRKPFSVKNSPEGIEYLTEQVTRSCSHRHIDPKHVFFGGEDVGSYAENFTNTLRSGGWIVAGVNAHDAKEQRANIQASTDRLDLMGIASMLLNRRGNCSPAQSGIYRNLRTLVRHRRKLVSMSTEEKNRIHTVVDRLFPGFLDEKKTGILPFSKSSLYLMENRFSPRQIRRRKRHKLIEVLHRYGTTKPENTAAKLQEYAVRVLNTPDEYITTLQLSLAQHVKHFRCLQDSISQLENEIAVWLAQTQGAFLTAVRGIGIVLAAGVSAEIGNPYEQKPLNNLVSYSGIIPRVKQTGGSEGKTRTGKVAKRCNRILKDYVVQSALHMGLHGPEDLMADYERREAAGQHADFGIGRRYLRMAMCLMRTSQIYMPPRLRNREVKPEERTGYYLMTWPSLRKKWNEAGALEVAFEKDRPLGQWRNMIQELYEIKLKL

SEQ ID NO: 252445 - protein, 471 aa, unidentified
MKERSAIGIDPDSKGFVCALVRSSSAKVITKGYMATEADLESFLRWVKGEGEVIVAIEGSNGLSAPIEKALRDAGIIFYSFAPADTDRFRKAVLGQNKNNEKDAESVARYAMAMESQGKLQRYRRVWFADMELRLLSRGYERNSKAATAEVNHLWKLLRHASPELYLAFGGNHPEVNLNKNMLDTQGILSLFSEKPNVWEWKDLSEEGFLQAMGRNCRGRHALVQELRKLAACVKPFPSSTALIIQTSARLLAQLKRDQSEIVKMMDEMTKDSPPVQTLKEMRGIATITSTTMIAEIIDIRRFPREENLASYSGLGKKEHSTGGITRMVATQSFNRHLKDAFMTAARNYGTFNPDSHLSGYYRNLVKKGMKPLEANKRVARALVRVIYRKLASLVEEDKWCSADRKDCQEGESDMASGSARSGQGGHISNMSLSSPQNNKARDATKVKGRARSTRKTKNSGRRKRNLKNIA

SEQ ID NO: 252446 - protein, 400 aa, unidentified
MRAVFGIDVSKASSEVAILVNGEKVHGYTMSNDALGFARLLGDLRTVHKPEIIFEATGVYSRRLQTFLDEHGYAYTRLNPLEAKKQLDSLRVRKTDQIDAEKLAQSQFVLNRKTTYVQEEVYQELRDLSRFYQNLTEDIVRAKNRLHKVLQVTFPEIETVLSKPTGEQYWNLVTAFPCKDFVLELSKDELLESIRQSTSKRISDKRVAYLAEKLTALANQSYCAVKKTSPIMEEVRYYAKELLRLSEQRQTVLDQMVELAQPLPEYDILLSIPGIAETTATSIIGELGDIRRFQSTNQINAFIGIDLRHYESGNFLAKEHITKRGNPYARKILFKCIHNIASASHTNPCHIADFYEKRKRQSQTTSTKPHTIASIHRLIRTMYYLITHNKLYDYTSTQNR

SEQ ID NO: 252447 - protein, 403 aa, unidentified
MNCVGIDVSKGKSMIAVMRPFGEVVVSPFEVRHTASELSKLAGLLKSLNGETRVVMESTGNYHAPVAWLLHDAGLYVSVVNAMLVHDYGNNSLRRGKTDKKDAVKLANYGLDHWLTLPRYVPEEDTRLMLKTCYRQYQQYSKVQTMLKNNLISLLDTAFPDANRLFTSPPRADGSEKWVDFVATFWHCECVCGLSKKAFTAKYQKWCRKHGYNFSQDKALDIYASACGRFGVMPKTNTAKLLVEQAISQLQTTSAALAALKQEMQSLAASLPEYPVVMEMFGVGPTLGPQLIAEIGDVRRFHSKKALVAFAGIDAPPYQSGQIDVRSRSISKRGSASLRRTLFLVMGVLLQCAPMDEPVYQFMNKKRSEGKPYRVYMMASANKFLRIYYGTVMAYLKQLDSAS

SEQ ID NO: 252448 - protein, 348 aa, unidentified
MAHFVGLDVSVKETSVCVVDDTGKVILEQKVPTEPADIITLLSSLGVSYGRIGIEAGPLSQWLVNALTVAELPVICVETRHMKALLTAQQINKTDRNDARGIAQMMRVGLYKPVHVKTLVAQEQRMLLTSRKLLQRKLLDLESDLRGTLRNFGLKVGVVSGGRYEVRVRELVEGFPRLAAIAEPLLKVRQVMRQQLAVLHKMLLDTVRDDPVCRRLMTAPGVGAVVALTYRATVDQPQRFVHSRAVGAHVGLTPKRYQSGEIDYDGGVSKCGDALLRTMLYEAAQVLLTHGSKWSWLKAWGVRVVQRRGMRRAIVAVARRLAVVLHRMWVDGSEFRWSKDSAAVPTAA

SEQ ID NO: 252449 - protein, 356 aa, unidentified
MRFYKEHHKFYTGIDLHARTMYVCVMDNDGDVVFHKNMAATPECLQHVILPYGTDIVIGVECIFTWYWIADFCSDRSIPFALGHALYMKAIHGGKSKNDRIDSEKIAAMLRGGMFPIAYVYPRDMRATRDLLRRREYFVRHQAELFTHIENTNSQYNYNSTLTKGRMRSATYRATLPEQFGDPVAQKNIKADMFLADAFHRLILDLEQEIQRQAKTHDPFSLALLRTIPGIGEILSLVILYEIEDIHRFPNVGNFISYCRLVKCAHESAGKRVKGGNDKIGNTHLKWAYSEASVLFLRNNEPAQKLHDRLVKKYGKAKALSIIAQKLARTSYYMLKRKEPFVKTRFFQDGVSEHPA

SEQ ID NO: 252450 - protein, 338 aa, unidentified
MNANKKVYSIWIDVSKKTLDICILREDMVVIEEFKIQNDLAWFNILESRIKKIKDLDLNNKSSLFFVLESTWSYHYNSAFNLKERWYWVKVFNPIISSKYSKTSIRKIKTDKVDAKRIAEIWLKENLFEFEETRESFELKKKISLITKFQKQRQIIKQSINQAKEDFIKLKINSKDTFKELDLVIDQINKSIKKLEKEIIELWKKIECFKDISEIKWLWWLSISILLSILKSKTFPTKQALNAFAWFDIWIRQSGTSINYKWRITKRWNAILRKVLTQMAWWVMMHNENFKPMIEYYKSKWRHYCELLVILARKILFIIYWMIKNNSHFDYTKIWKFC

SEQ ID NO: 252451 - protein, 466 aa, unidentified
MREKSKRTKGIEEAHPFSGMSRIHPHAAGVDIGAIEIVACVAGDENTQIVKAFGNYTVDLQALAQWLKSYSIKTVAMESTGVYWIPLFEELERQGFECLLISSRSLRRVAGRKSDISDAQWIQTLHSYGLLEGSFRPQAELVALRTLLRHRSQLVEHRSPHIQHTPALAPGASVQKSLLQMNVQLSQAVTDVTGMTGQKIIRAILAGERDPQTLAAMREPGCKKSAEEIGKALTGTWREEHLFVLKQSVMLYDFYTEQIQACDLEIERLYGLTRPDWESGEVAPVTKRKRNSHSKNIPQHPEEIRKHLKRISGVDLSAVDGFGVSLAQTVIMEVGTDMSKFPDEKHFCSWLGLAPKHEISGGKVLKKNTLKTKNRAGQAFRLAANSVKQAECMFGVFYRRLRARLGPAQATVATAHALARLVYRMLKYKVEYEPLSLNEYQKHYEEQQIKYMRKKAAKLGFQLVPT

SEQ ID NO: 252452 - protein, 338 aa, unidentified
MKLYAGMDLHSRNTLVAVMDSGFRRVFQKRVANDLALILATLEPFGDQLQGIAVESTYNWYWLVDGLMDAGYRVHLANPSAIKQYEGLKHTDDRHDAFFLAHMLALGILPEGYIYPKEDRPVRDLLRKRSFLVKHRTAHLISLQSMLEREKAYKLGGNEIKKLKAADVESIFGQEHLILSAQANRASIEFFGHHIKQIEKAVKKQIKLREPFQYLLTVPGIGDILGLTIMLEVGDIARFAKVGKLSSYARCVSSHRLSNGKKKAQGNRKNGNRYLGWAFVEASHFARRHNERLRRYYQRKLAKTNEAVATKAVCNKLCRACYYIMRDQVAFREEALFC

SEQ ID NO: 252453 - protein, 423 aa, unidentified
MKLTYPICCGVDVHKTFLVATIITSEYVMPHYYQKRFSTFYNGLVAFKKWLLEYDCKDVCMESTGKYWVPVWNVLEDSCHVVIANPKWVSAVKGNKDDKKNSKWIGNLFRMGLVPSSYIPSKDIRILREFTRYRSKLVSMRSSEKNRFQNAFTVCNLTLDAVVSDMLGKSATDIENYLLDTDTVDPEHCVSLLRCSLKKKASDVVEAVSGFNMIPEQKERGRIVQEHFADIDHRIAQLDEIIGDLVAEYEGQISLLCTIPGIDRRTAITILSEIGTDMSQFGSSKRLCNWAGLAPASNQSAGKKKSVRISRAGVYLKPALVEAAHAAVKSTEKQPYYRIKFERLMKRRGKKRATIAIARMILTAIYAMLSTGEVFNPSDLKKFDMPEDLKRKQTLSSAKEAIKLLVSLGLVTAGSISLDALAG

SEQ ID NO: 252454 - protein, 378 aa, unidentified
MNRIIKIGMDVHTTNYTLCIFEPSFEHDGTVHCITQVKPEVKNIIRVIETFKKKHENEELNIVCGYEAGCLGYSLYHELKEKGIECVILAPTTMKTEKGGRKLKNDYRDAKMIAECLAYGGYSAVHVPTELDNSVKEFIRMRDDIKENLKSIKQQIIAFLTRNGKQFEGKSFWTRKHIDWINTISFSEPLLQDTLKEYMIEYNHLCDRVETLDKQIEEISLKEEYVEKVQQLQCLIGIKTHTALSLIVETSDFNRFKKGNMYSAYLGLIPGDDSPAGHENKLGITKAGNSHLRKLLVEAAQGYTRGKVGFKSKDLKSRQEKCSSEVVAYADRANERLRRKYYRMTLRGKRYNVAKTAIARELACFVWGIMTDHIDLCN

SEQ ID NO: 252455 - protein, 369 aa, unidentified
MNKFSKYVGLDVHQETIAVAVADTAGEVRYMGEIVNTPEAIAKLVTQLKRRTERLAFCYEAGPCGYPICRQLRDLKQDCQVVAPSLIPKKPGERVKTDRRDALSLARLHRAGELSPVWIPDEAQEALRDLTRAREDMKHLQRQAKQRLLSFLSRHGHRYTGRSRWTQAHWRWLESIKFARPEQQIVQQEYIDAVQACGRRVASLDREVETAAHASQVWPVIEALMALRGISLLAAVTVVAELGDLTRFAGPPQLMAYLGLVPSEHSSGKRERRGGITKTGNSHLRRVLIEAAWTYRHAARKTAILQRRAERTTPEVQEIAWSAQKRLCQRFRNLMARGKLKNQVCTAIARELVGFIWAVGQHVVPLSRA

SEQ ID NO: 252456 - protein, 435 aa, unidentified
MEEVEDEPLFCERVAGIDIGKKMIMVTIRVPSKARKSGRQQETREFGTTRKELLALADWLRCWQVERVGMESTSDYWKPVYFLLEREGFDCILYQASQVKALPGRPKTDKLDSVWLAKLTERGSLAGSFVPPEEIRRLRTHTRYRRKLVQMRTAQKERCEKLLEDAHLKLSSVISDIHGVSGRDMLGAIAAGERNPKVLADKARGVMRGKIRELEEALDCSFFTEEHAFILQMMLDSIDQLTAQITVLDGKIAEMCRPYERQIERLDDVPGFGITTAQDLIAEIGTDMSVFPTAGHLASWARQAPRVTESGGKRKGKNATGRGNPYIGGTLGEASISTGRTQTFLGAKYRRLCKRMPKKKAQVAIMRTQLVIAHALLSDPDARYEDLGPDYYERQADIRRRAHSHARALERLGYKVTLQSIDTATGELLPVTAGR

SEQ ID NO: 252457 - protein, 305 aa, unidentified
MKTYIGIDIAKLNLDIYQDGKASRIPNNEKSITAFLKSLSDHSIIVCESSGGFEALLISLAHIHLRSIARINARQVRDFAKAKGRLAKSDAIDAQILAEFGQAFHPSPLSIPDRLQQEIAALVKLRAHFLTQITQNNNLTETISDKSLLAIIKKTVSSLKMQADKIQKLIAEKIKSSPSLQSKVSRLQEVQGIGEITASSLLGLMPELGSLSDTQAASLAGVAPFNHDSGQFRGQRHIRGGRSQVRSVLYMSALVASRHNPILKTLYQRLLVAGKPKKLALTALMRKLIILANRLLKNTNFSLAN

SEQ ID NO: 252458 - protein, 343 aa, unidentified
MEQYAGIDVSLESVSVCVVDADGRIMREAKLACEPEALITWFGKLEVDMARIGLEAGPLSQWLYARMREAGLSVELLETRHVRDAFRAMPVKTDRTDARGIAQLMRLGWFRSVHCKSLPAQELRAILTARKLVQTKRHDLEMSLRGILRGFGLKVGQTTPRSFEARVRELVDGHPTLTVVADAMLLARAVLVEQLGKLQKRLVSLARQDMRARLLMSTPGVGVLVALTYAAAIDDPARFRSSKAVGAHFGLAPRKYQSGETDVTGRISKIGDAGVRTALYEAANVILTRPVKGSSLKSWAMRVAKRAGMRKAKVALARKLAVVLHRMLANGSAFVAGKAAAKA

SEQ ID NO: 252459 - protein, 418 aa, unidentified
MTKKLDTTFIQIVHPICCGLDVHKKKISACLITVDKNGKEQYEIKEFGTFTDDLVKMKNWLLDNECPVLAMESTGVYWRPVHNILEGLMEVILVNARHIKNVPGRKTDISDSKWLAGLLRHGLLKGSFIPPKEIRQWRELTRLRRTYTESLADFKRRVHKLFETANIKIDSVVSDLFGVTGLNLISLLCEGSELDLATIEKNTKPGLKKKVVELHRSIQGFFEDHHRFQLIGMMDVMTSLERQIDDITQRLDALTVGHQDILDRLDEVPGIDKKSAQSILSEIGVTLDEFICTAALASWAGLCPGNNESAGKRKSGRASVRSHPFKTILIEVAWAAVRKKGSYYRAKYFKLKARRGAKKAIVAIAHRISKAIFNIIKNGDHFMDLGEDYLNTQTRQRAINSIKKRANQLGYELVPCAN

SEQ ID NO: 252460 - protein, 376 aa, unidentified
MERGSLMLNTTTFVGLDVHARSIKAVALDVMTGEVRSATFGYDAAAVAGWVSSVDPSAKCVYESGVTGFDLQKKLTALGVDCVVGAVSKMIKPSADRRRKNDRNDAEFLARMLSVGNVVEVWVPDDECEAARDLVRALDDAREDLKRCKQRLSKFLLRHGLVFSETNAKGQRKKNWTAAHWAWIRSISFPEKADDDVLAYYIDAVRQAMEDKARLERLVEAEASKPRWKRRVDSIRCLKGVDVMTAADLVFEAGEFSRFKSARSFAAWLGLTPSEHSSGESVRQGGITKAGNKHLRRVLVESAWHYLGCSPHSKDLAKGQAPDPGARRHAAKGVRRLVGRRAAMLERGVHKNKANVATARELACWCWAIGRMVENG

SEQ ID NO: 252461 - protein, 521 aa, unidentified
MPPLRSARRGKTPRPFCLQKPNGQLNPRVQQVGPEHFGILAIDCAKARSRYFLADFYGQVLIQPTTLPHNQGDFQAAIGRVRQAMSQHELKDLVVAIERTGEYHRPVQLAFRQAGFETRLVHPFTSKQYRQPADPGNKTDDTDLAAIWRATTHGFGLLEPAWPDDYLTIQLLRRHRRDLVEKNSILQCQIREVLHAAMPGYAECFCHLWDDSPAPLIFARHTTSPEAVRHAGLAGLRQLAEQAQLRCRAETFHKILAWAESAPPSLGHALERRRRLVSLDDDRLLKNRQILELERDLAHRVVHTPYVLLLVIPGINIVTVADLAGELGPIPLYANANAITGRAGLMPSRYQSDAVDCANGPLRRRGNRRLRAALMQTADNLIQSNHYFRARAAAWARAGKDRRWVRVKVAKIFSRLAFAIVAGRQLFPHPCRQERHYILGKLLTFHSEHGTDPKAMRQDLEAAVEQLPVKARAREAEPLQKELDALGRRRGPQPLAEIIPLVLARLADRVVESTPSESAEP

SEQ ID NO: 252462 - protein, 347 aa, unidentified
MNYNRQHQFYCGVDLHARSMYVHVLDAKGKTRFDDDLAADPDEFLHAIKPFRKNLVVGCECMFAWYWLADLCEDERLPFVLGHALAMKHVHGGKAKSDKIDAAKLAGLLRGGLFPMAYVYPRAKRQTRDLLRRRSFFVRQRTQLIAHIVNTNSQFNLPPLPKKLTYAGNRSDAIATRFRDPSTQLMIRSDLALIDNYDTQIAALELHLKRSAKIDDPVTYGFLQTTPGIGPILGLILLYEIDQITRFPEVGNFLSYARLVRCEHSSAGKVQGFGPKKIGNAHLKWAFSEAACLMKRCSPPARSWCQRQEKKRGQRKGMSVLEAKIGRAVYHLWRKQQAFDLKRFLKG

SEQ ID NO: 252463 - protein, 397 aa, unidentified
MYIVGIDIAKRKHEAAVIDGEGAVIIKPFSFTNNCSGYNRLLAMLTKAKLPLDEVSFAMEATGHYWLALFTRLQKEGFRVQVINPVQTNSIRSFYIRQAKTDPRDALLIAEVIRFGHFSESTLHPENIYELRELCRGRHAIVSMQADVKRKVVALLDQVFPEYETAFTNMFSDTSMAILQTCPTPKELSEMPLEELCHLIEVSSRKRFRMAKAQELQALARGSFGFAMAGDVFSTMIRLYAKHLDFLKQQVREMDRKIAEIMDTLDTPITTITGIGPTLGAYILSEIGDISRFSSAAKLAAYAGIDPTMRQSGEYNGVRNRMSKRGSPYLRHAIWLAASSAVLHDPALKFYFQKKRDEGKPYMASVGHACRKMVSIIYAVMRDNKAYTPHIPNEISA

SEQ ID NO: 252464 - protein, 331 aa, unidentified
MKFKSFIGIDVSKSKLDAYLKINHLHAIFNNNEEGFKELVEWVMENSGLVLARELLFGFESTGIYSSELALFLDKHPLPFYIMSGLELKRSLGIRRGKSDKADSKDTAEYLYEKQEKIEPTFLPSQTIQDLKKLFNYRERLVKERAAFKTRLKEYETIVSRNKLKVYLKSHTTVIACLDKQIETIEKEIQKLTHSEELLMNQYKLLNSIKGIGPQTALALIILTGGFTKFSSSRRFASYAGTAPFPNQSGTFNGRTKTSKLANKRIKTLLTLCAGTAIQYSTEMKNYYQKRVGEDKSKMSTLNIIRNKLLSRAFAVVNRNSNYVDTLKYAA

SEQ ID NO: 252465 - protein, 349 aa, unidentified
MYFAGLDAHLKYVSIAVLDRMGQVALETSVSTREPEQLLAALAPYRPLEVVVETCPFWPWVYDLLVPAGIGFHLAHAKQLRAIAAAPQKNDAVDARLLARMLLSGLIPEAYPRSADQRDLLRLLRHRTTLVRYRTRLAGRIHSQLHQQRLSLPREQLLRRATRGWLQETAWPRLTVEQRAIVTTHLELIDRLAPLIDALERRIATAAAGHPTAPLLATIPGIGPYRSLLLAAELEPITRFRRAEYLVSYAGLAPVTRSSGGHTHHAGIPKGANRWVRGALVSAIPTHARCAPTSAVSVAYAQLTDRLGWRVARVAAARKLARVVYVMLTRRTPWHGAPAAGDVRDEVLR

SEQ ID NO: 252466 - protein, 327 aa, unidentified
MPNWIGLDVHKRICHATVLDERGVVIQTKLQNEPEELKRFFERFDDAKVAMEAAYFWQPVYELIEKLGRVVVLAHPKETRIIAKRKVKTDAKDSEALAYLLQLGWLPTAYVPPKEIRGLRELVRLHVYLVHERTRFKNKVRAELAKRWFKLTMNPFTKRGRQRLAELDGRTVRICTDIIESLDKNIKELERELKSRAGESEEARLLMSIPGVGYFSALAVLAELGDVERFPDEKKVCAYAGLVPSLHQSGNLSRLGHVTKEGSPLLRWVLVQCAWMHIQHAENTGLTRFFWRIARRKGSKVAILAMARKLLVTMYWMLKRHEEFRAH

SEQ ID NO: 252467 - protein, 489 aa, unidentified
MATAAQQPRAKNGSNAQRSAPKRKARGRHCPTGKGDRRSSKLTITNPEAAGIDVGAQAHYVAVPAGRAEVSVRSFGAYTAQLQELVHWLKDCGIKTVAMESTGVYWIPVFQMLEEAGFEVVLVDARQAKHVPGRKSDVQDCQWLQQLHSYGLLRAAFRPEDSICRLRSLQRHRKSLVECAAMWIEHMQKALNEMNLHLHHVLSDISGQSGLAILEAMVAGERDPRKLASLAHYRVQKSQAQIEAALTGDYRPELLFVLSQSLSNYRQMQQQIAQCDLSIEKQLASMADCTNPSQHAEPTTPGPASVAGKPRKRKPKGGLELTLAAHLKRILGVDLTTIPGLNVLAVLTLLSEIGTNMAKWRSEKAFVSWLGLCPNNSISGQRVLNSRTRKVVNRAATTLRLAAMLVGKTNTPLGSFYRRKRAQLGAPKAITATARKLGCLIYRLIKNGQPYQEPDIRTYELKYKDQILYSLRKRANSFGFDLVELPKAA

SEQ ID NO: 252468 - protein, 385 aa, unidentified
MSQPNDLSRSLTSLEQDSTIIAVIEMSQSSWLVAGIVPGIERHPLKKIEPSEEELICLLMRWRAEATKHGRTITRIAVVFEAGRDGFWLARWLRARDIEIYVIHPTSVAVSREHRRAKTDRLDTGLLKRVFIGWLRGEPDHCHMAAIPTLAEEDAKRPNRERERLVGERTRIVNRMKSCLVRFGVRNFKPTLRKAPERLETLQTPEGVPLPPNTLLELRRDMARLRFVMDQIKQVEEARAQRLEQAPQEKSHAMVRLLARVIGVGIETADMLVHEVLARNLRDRRAVARYAGLTGAPDESGSKRREKGLAKAGNARVRRGMIQLAWRFLIFQKDSALARWYQTRTASVGKKRKTMIVALARKLLIALWRLVTTGEVPAGVVLRAA

SEQ ID NO: 252469 - protein, 337 aa, unidentified
MQVLTNTLWFGIDVSKATIDVALGPDGRKKPPHQKFPRTREGCHACLLWAADLVPQGSTPAFVMEATGGYSRELAHWLLGERKDLRVAIAQPMKVHHFAKLRGLTNKTDRQDAILLAQFGASEPVVPFHPMSPAYTQLRALTRERSALVKALVALGNRNDLASESTLAQGIREHLLESHREAIHELESAIQVLIARDPSLGEDFRLLQTIPGVGPVVAATLMGELGDLREFPHPKALAAFVGVAPAWNSSGTSVHDAPHMTKHGNSRVRQMLYLAAMAAVRRPNTLNISYEHLLKEGKAPRSALGAVMRKILVLSRAVLLSGQDYDPEHRHSSSIEI

SEQ ID NO: 252470 - protein, 465 aa, unidentified
MSKLRKRNRARSSQGETRPFEGMRQVHPHAAGVDIGAHEIVACVPDGDDQQIVRTFGTDTVDLQTLADWFVDRGIQTVAMASTGVSWIPLCEEREARGLPCCLISAQSIKRVPGRKSDVLDCQWIQTLHSYGLRAASCRPAADLVALRTLLRHRAQLLEHRAPHVLHMQQALLQMHSQLSHALRDITGATGQRLIRAMVAGARAPQHWAALRNDRCKKDAHEIAMALTGTWREEHLFVLTQALALFDFSTTQLSACDAQVEHAFAVITPHFESTAEASVPARAAVPPRRKPHSPSKNAPEGNTRAHILRITGVDLVAVHGMSDSLAPTIVAEIGTDMSQWPDDTHFCSWLGLAPNNDISGGKVLKSRTMKHRNRAAQAFRMAAQSVIRSHCAFGAFYRRLTGRLGPAQALVATAHKIARTVYHMLKHRVPYYDIGAAEYNKRFREREMHSLQKQAAKLGYKLSPG

SEQ ID NO: 252471 - protein, 416 aa, unidentified
MRTKPTTIVAQPEVLYMSLELSASHWKLAFTTSLCQRPRIRNVAAGQLKQLESEIAAAKARFKLDDSVPVISSYEAGRDAFWLHRCLVSMGVESHIVDPASIQVNRRKKNAKTDRIDAQKIVNALIRFKAGDRFACRMIRIPDQAHEDARHLSRELKSLKKERTAHACRIQGLLVTQGCDLAINRNFSNSLKTIRGGDRKPLGDRLVARLKREHERLVLVTEQIRELQKEQFALLRKARTEIAQSDRSYQDQLTKIAEHLVTLRGIGSVTAFTLSGEIFAWRDIRNRRQLAAFVGLTPTPHASGDLEKEQGISKSGRSDLRVLMIEVAWLWLRYQAESKLSKWYAKRFANGASRQRKIGIVALARKLLVALGKYVNDGEIPEGAQLSEKISAQYLTSLNPKASRNKQQNQSIATAT

SEQ ID NO: 252472 - protein, 389 aa, unidentified
MTTTAKTTAADTILAIDLGKYKSVACVHDGASGTFRFSSFETTRSEMHRLLTRNRATVVIIEACLLAGWVHDLCAELGIRCLVANTASEAWKFKHLKRKTDRDDAQRLAQLYLLEQLPTVTLPPSSVRQWRSLIACRQALVGRRVAVQNRIRALFVAQGLPAPRGAKAWAATGLAGLASWARPLGECAADGLWRGLLDLSLTEYRQLCELIDQAQTRLDALGQQHADVVLLQTAPGLGPRTAETVAAYLHDAPRFRSAKQVSAYSGLVPRQHQSGEMDRRGRITKRGPALLRKMLVECAWCMIRYNAWARGIYQRLTGGGQRRKKQAIVALARKVLVRCWAMLRDRKPWHDPQTGPKPTLPPSKQRRQAQAQQRRQVKRRAAPAPAAPG

SEQ ID NO: 252473 - protein, 452 aa, unidentified
MRLLNSKQGLRRSQFAKELRGMNLEKVLIVPIDVSKVLQKAMILNYFGECIESSFSFMVSRTGMKVFTDKIEKAKEELQTDKVFIGIEATGQYYEDIVRILMDYGLSVHMINPASTHEERKQHLTYTKTDDIDLYLIAEVLIGNKATNSKLSTGVYKQLQQITRARRSEIEKRSRIKTEIRTYHDQIWREYQGVSTLVDGKLKTKKIFSDFWGKASVHLLTHFPHASQILELGEFGLRQLSKEHNLKIRKTSIEKLLFAARESVSKPLEELSSELFLLKQKLQDFEYHTNNIANYEKEIERLFINTNGLLLLTIPGIGLVTAAEIFCEMGDLSHFTNASQLIKKAGTNPVIKQSGPGAGYAGRISKQGNANLRRALYNAGRSLSVHNEALKPFAMRLKDKGKKAGSVYIAMGNKLLKIAFAMLTKEEPFKWDNPEYNYKEEVFKKLTLPLAA

SEQ ID NO: 252474 - protein, 389 aa, unidentified
MQSMIEGQSHFQPFGLSYWGFEDLNKGVGSMTASYEYHIGVDYHKSYSHLVVQDSSGKTLRSGRVKNDRQSLGGFLERYRENSHAVVEATRNWMVMYDWLDDICDDVVLAHPWKVKAIADAKIKTDKIDATVLAHLLRADLVPEAWAPGERARELRIALRERMFYVRLRTMTKNRIVTVFDRYPEQTAQLKKLGDLFGKAGRVQLAQVNVSEIDRIQIDRGLDFIADIDVRIKQSEATIRTMTKANGNVKLLKTIPGIGEFFARLIDAEIDDLSRFRNPKKLAAYAGLVPSTYSSGGKTFHGKIIKQGNKWLRWAFVEAVSPAIATDAQLRAQYEHLKFRGTNKARVAIARKLLTIAFQILRDQRAYEPRGENTMEGTSTDIPVVLMAV

SEQ ID NO: 252475 - protein, 343 aa, unidentified
MQTVTTIGLDIAKSVFQVHGVDAAGQVVVRRQLKRRYVLAFFEKLPPCLVGIEACASSHHWSRELQALGHTVRLMPPAYVKPYVKRQKNDATDAEAICEAVTRANMRFVSTKTPEQQCGLVLHRTRHLFIRQQTAVINAIRAHLAEFGIIAPVGRHGVEELLNVVADPNDKRVPEIARACLLAFGAQLRTLKEQILEFDRMIRAWHRFSETSRRLDDCPGVGPVLATALVATVADPKSFRSGRNFSAWIGLVPKQRSSGGKNRLGSISKQGDRYLRGLFVAGALAVIRYAKIHGTKHRPWLTALLARRPTKVAAIALANKIARMAWAMMAKDERYKEPVALAA

SEQ ID NO: 252476 - protein, 321 aa, unidentified
MVAAIDGGGDRRRPCRVVLTPRRMSLERFAQWAPEQLTQRDQVVLEATTNAWTRYDQLAPLVLEVKIAHPLLINLMSSARVKTDTRDTLHLARLLAAGLIPAVWVPPPPVRELRIVVAHRQRLVRQRTPVRNRLHSVRPAHQLPPPAGRLGSPQQQAWWDTLDLPPLERLRVRQDLVLLQTVDGLITEGAAELGRLSAQGPWKPIMPLLMPLPGCAVVTRMTSMTLLAALGDISRFPSAKKLVGSSGWGARVHDAGQTHRSGPLTKQGRRELRTVLVEAAWSAVEHHPHWHMEFERLVPALGKGKAIVAIARKLLVVVWAS

SEQ ID NO: 252477 - protein, 411 aa, unidentified
MEKIYDNCCGIDVHKKLIVACFRQGRKQEIREFGATTRELLELCDWLKQGGCQKVAMESTASFWKPLYNIFEVSEISAMVVNARHMKNVPGRKTDVKDAEWIADLLQHGLLTASYIPDKDQRELRELVRYRKSLTDERARELNRLQKMLEGANIKLSGTVRNINGKSARSLLEHILSDKVFDAAAYDVMYDKKIIAHNLKATKQQIIDDLNGFLSPLQKRMMKELLNHLDELNQHIENLEKEIDDSMKPQEHQAVEAIKEIPGIADASAKAVISVIGTDMERFPTDKHLASWAGICPGNNESAHKRKSGKTTKGNAILKETLVICAHSAARVRDSYFYAQFQRLRSHRGAKKAYVAVAHSMLIAIYHILKYGTVFKDLGADYYNQFNKESKINAYIKKLKVLGCSVKVAVA

SEQ ID NO: 252478 - protein, 323 aa, unidentified
MQGQKSPERSAQPEVYVGVDVCKDWLDVYLHPIGQKFRVANTPEGLKALKRRIAELPVELIVMEATGKFHRQAHRTLHAAGFAVAVVNPLRARLFAEAAGQLAKTDRLDARVLALMGQALEPSAIAPAPEAVEALQELARARSAAKADQTALSNRRGASQTAFLKAELGRRLKTLAGHIERLDAEIQRRIGVDPALKRRFDILLTIPGVGPVAALALVIGLPELGACSAKAAALLAGLAPLACDSGEKAGERHIKGGRAFVRTGLYLAAIAAARFNPQLRDDYNRLRDAGKKAKVAITAIMRKLVVLANVLIKEDRPWKPIHA

SEQ ID NO: 252479 - protein, 413 aa, unidentified
MADETIHWFAGVDWGSAKHQVCLLDGAGNVVGEREFAHGGAGLTALCEWVVSMAGDPGTVAVAIEVPHGPVVDALLDRGFAVYAINPKQLDRLRDRISVAGAKDDRRDARVAAAGLRTDRPLFRRVLAGDPSVVELREWSRLAEELQQERVRLGHRVRQQLWRYYPQLLALSDDVTAEWVLALWTLAPTPAQAARLREATLARLLRQHRIRKLDAPAVRGILRQPAITVAPGVTEAAVLHLRSLVARLRLANQEFHQAARKLEALCTALSQTQPGAQDSGPRDAAILSSLPGVGPVTLAALLTEAAGPISRRDYTALRTLSGVAPVTKRSGKSCIVIMRYAAQLRLRNAVFHWARVAVLNDPKCRSRYAALRARGHSYGRALRSVADRLLGIACVLLQRQVLFNPNHGAPTQP

SEQ ID NO: 252480 - protein, 366 aa, unidentified
MKKTSTVQALQSENFKEQKLTIGVDLGDHWSFYCVLDETGKIILEQKVTTTPEAMKQTFGKIPRSLIALETGTHSPWVSRLLTELGHEVIVAHAQKVQLITKSNRKDDRHDARTLARLARIDPELLGPVRHRSAKAQIHLTVIRARAELVSARTALVNAARGLVKSYGQRLPKCGTQQVNRELAAELSTELRDVLEPLLKEVESLNERIKEYDERMEKIAKEVYPEVALLKQVKGVGTQIALTYVLTIEDPYRFPKSREVGCFLGLRPGRRNSGESEPQKGISKEGDRYLRTMMVQGAHYILGPFGEDSDLRRWGLKLAERGGKNAKKRAVVAVARKLAVLLHRLWVGGEVYEPLRNSQKAMLEVA

SEQ ID NO: 252481 - protein, 378 aa, unidentified
MFVGIDTHKDTLAVAICDPAGTLTEWTEVVNEPSGFAQLERLFAARPAVRVGIEGSGHFGRAVAAHLAGAGYDVREVPTSMTSRERAAKPAQGKTDAVDALAIARITAREADLPLARLKIGLAADLRALLDYRDALVREHHALANRVHAELVGLLPGYHHTHPHLTTTVQVKAVLALLDGDERVRAGLARRRLGRILAIMAEVRALAREIDALVSGHADAIQAIYGAGPIVAARFLAEIVDIARYPNRDAFASANGSAPLAASSGRTVRHRLNRGGNRQLNRALYTMAITRSAPTPKAAPTTSASAPRERPPAKRSAASNGACPTRSTRPCAPTPAEQRMSTPAPTSANAPPDLGEGLPEPSQEERHNVQPSDGAQSS

SEQ ID NO: 252482 - protein, 370 aa, unidentified
MDTIYIGVDFHARQQTICYLTTETGEIVSCELTHSDKMAVRAFYAQFQGHVIVGLEASGYSPWFERLLEQLGCEVWLGHATEIRRRARWRQKNDRRDAELILDLMLHDEFPRLHRPAVQSREVLRMLRYRQKLTKLRTMSKNSLQSLALQAGLAKRSQLFTKDGLQQLRAAEMSPVMQWQCEHWLQLLQPLNQQLLETMVWFKAQSRSDVAVIRLRTHPGIGLLTSLCLVHTLQPVSRFRNSRKVAAYAGFDPVERSSAERKCFLGISKAGSRLLRYLLVEATHTAVRKDEDLKRFYQRLAERRGRPKAKVAAARKLLIRAYIMLRDEIDYAEFRRRAVAARLARASRRPNMPESLIGPPASAECQEVTH

SEQ ID NO: 252483 - protein, 377 aa, unidentified
MKRLKFVGLDVHAETIAVAVAEQDGEVRSLGIIPNREDSIRKLVKKLGPVEELRFCYEAGPTGYVLYWQLTRMGAKCEVVAPTLVPVKAGDRVKTDRRDALKLARNYRAGELTPVWVPDAAHEALRDLVRAREAAKKDQLRARHRLNKFLLRHGRRPPMGVKPWTMKYLEWVRREVRFEQMAQEATLLDYLHEVEHAGARIMRLDSAIQEAVKLAPPRMRAVIEALQALRGIAHVSAVTVVAELGELSRFARAKQLMGYGGIVASENSSGERTQRGQITKTGNAHLRRVVVEAAWAYRHPPAMGTTLRKRQENVTEEVKEIAWKAQQRLHQRYRKLLAKGKNKGVVVTAIGRELLGFIWAIGIKVETAQKESLQRAA

SEQ ID NO: 252484 - protein, 352 aa, unidentified
MLETAAPAPKITIGFDLGDRKCRVCEVGEGARVVKEAEVLTTRSAVEAYFGGRERCRVVMEVGTHSPWISRQVAALGHEVVVANPSKVYGSQHRTHRNDRSDAQFLGRQGRADVELLYPIQHRGAKAQEHLELIRGRDQLVRVRTKLINHVRGTVKSSGGRIAKCATEAFVVRARHQMPPELRGVTEPILEVIEDLTRRIHTMDRQVEKLGEEYPGVSRLRQVPGVGALTALAFVLLVEDPRRFSGSRAVGPYFGLVPGLDESSDYSPQLGITKAGDELGRRLLVSAAQYILGPFGADCDLRRHGEAIAARGGKNAKKRAVVAVARKLAVLLHRLWISGADYEADRQLKRRA

SEQ ID NO: 252485 - protein, 367 aa, unidentified
MIVNEVAKNVEKIISIDTAKNSFQVLVVNQKTGKKKNTKVQRSKFVEYILKQGPCLIFMESCSASQHWARLFESFGFTVKLIAAQHVKAFLRNRRVKNDERDAEAIYTCGIQPDTKFVRIKTVEEQTVALLHTLRKAAVSQRVELSNRIRGILAEFGIVVARGKGSFNSEIEALFNECEKIHDVYLRSAISSLFEDYHRLEQREKELSEKIESLNKDNELVKIALTCPGVGPLTASAIVAEVGDASQFRNGREMAAWNGVVPSQHSTGGRSTLGGITKTGNRYLRTLLAQCACAVIQKASRHLEQGKDTHLDRFALRLKLNGKPAKKIMIAVANKIIRILWAMLTQRKTFKNKADETSDISAELQLA

SEQ ID NO: 252486 - protein, 335 aa, unidentified
MKYIGLDVHSTHINCAVINERGTLIHRDCFKTSLKNLINLSENLKHPLSIVFEEGELADWLYQELLPYFDKIVVADPIENRLIYGSDQKRDQLDPFKLATLLRGGFIHPVHHTWDHQRSQFKQLIFAYHDMAKQVTRIKNKIKAYYRKQGVIIQTTSVYHHTKRSLFMERCRHTEILKHYYHFLDQFQKQKDLFERTLKHEARKYPIIDRFLKIPGVGIVTASTFFTIVDDPHRFDRKQQLWSYAHLGKASYQSGDKIIIKKQKKGNRLLKGVIITAVNCSLRQKPNTFSKLFTHMVLIQHKDTRIAKRILERKLLTTMWTMWLKNQPYRPVPFP

SEQ ID NO: 252487 - protein, 344 aa, unidentified
MYFIGVDHHKQVSVMTVLDEAGEERKHGRMLNLRRYVEDFLDGFRPFRAVLETGRSSYVMADLLKELGGEVKIANASQVKAIAHARIKTDKRDSRVLAHLLRADLIPEIYQREAWNRRAQRVMRIRAYWVRKQTEVKNKIRALLAQQREEIRLEVERRERGLFSRKGLEFMSGLALEGRDKDVLGDLVQGYQEFEAHIGKSDGLVKALYGEIEEAARIDTIPGFGMTLSVLVAVEIGEIKRFPRPEALHAYTGVIPSTHSSGDRTYHGHITKQGSSWLRWAVMEAVYPAIKKDLALRTLYNRLARRKGPNVAKVAVARRLLTIIYRVLSEKREYIPDTMKQSAA

SEQ ID NO: 252488 - protein, 340 aa, unidentified
MGTTTYGLDVAKRVFQMYWIDARTGEAINRQFRRDEIIRFLARRPPGRVALEASGSGHWWARKINSLGHEAVLLHAKFIRPFVQTNKTDAADARAIWTAVHQPQMRLVAPKTEEQQAVLAQHRMRALLIKFRTMQVNQLRGLLYEFGVTFGGGRQAGLKEIRARMPELESTVPAAMFVCLQDQLRRIDGVQQDIEQLEARIGVWHKQEAACRAIAAVPGIGTLTASALIATIGDARTFKSGRELSSFLGLVPRQNGTAGKVRLGSISKRGDPYLRTLLIHGARSVIYHTRAPTKWQRDIQSRRPPNVVAVALANKMARTAWAILAHDRPYRTDYGCARAA

SEQ ID NO: 252489 - protein, 338 aa, unidentified
MGQPQYVVGIDIAAETFTATVLSPPDQIVLVSEQIVNGPEGYQQFLSELKQHHVGRKRSVVVMEATGVYGEQLCYYLYANGYQVAVEPPHAVKKAFRFKQKNDTVDSRQIAEYGCRFFDILRFWKPKTEILEQIQTLLTTREQLTKQRTASQNALQMLRRKVIQTPLAVATYEENVERLGEQIKRIDQAIKELIDQDPTLRQKGNLANKVPGVGLLLTANLMVITGGFCHHVNPKSLAAYLGICPYEHTSGTSVRRKDHSDRRGTGRIRKLLYLASLSVKEHNRPFRAYFYRKVAEGKSQRLVLNNIANRLLKVICATVKSQIPYHENYRSIHPALIK

SEQ ID NO: 252490 - protein, 366 aa, unidentified
MWEAPVRNQRTSIGLDVHARSVVACGLDGETGELFERRLTPDHQEILGWIRSLPGPVAATYEAGPTGFGLARFLLAQGVECVVAAPSMLQRPSGDRVKTDARDARHLARLLHLGEIVAVAVPSVETEAARDLVRAREDVRGDLMSARHRVSKLLLRQGIVYYGGKAWTGTHDVWLRGQRFDAPGLQLAYDTAYDTVLAAVDRRNRLDTAIAEMAAAGPYTPVVARLGCLRGVSTLTGFGLAVEIGDWNRLDGRRIGAYLGLVPTESSSGGTRAQGGITKTGNGHARRLLIEAAWHHRAPYRPGVGLRRRWDAASPAARARGQAANRRLHTRWQNFDARKKRPVVANAAIARELAGWCWSLAVLENN

SEQ ID NO: 252491 - protein, 337 aa, unidentified
MEQYVGLDVSQETTSIAVRQDGRRVWRGKCPTDPKALSEVIRKHAPHAVRVVFETGALATWLYHVLQAENLPVVCIDARHAKAALDMAPNKTDANDADGLAQIAEIGFYREVRVKGYGPMLTRTLVGARSQLLRISVQLSNQIRGIMKTFGLIVPKGAGRIFERNARALLETNEAVARVVLPLLETWQVVRARAAELDRQLIAAARTGSSYRLLMTIPGVGAITAVSFVAAIGVPENFKRSRAVGAWLGLTTRRYQSGETDYDGHISRRGDRYLRALVYEAAVAVLTRTRTDCALRSWGLKLKAKVGFKRAAIAVARKLSVIMHTMLKTGAAFAAAA

SEQ ID NO: 252492 - protein, 311 aa, unidentified
MTDDTIGIDISKATLDIHRLSDAKTISFGNCPTGFRALARFCAKTTVTRVVYEATGAYHNGLERTLGAHLPLVKVNPLQARRFAQAQGVRAKTDAVDAKILAEMGNAFALEPDEPAPKILHDLKELRAFRSGLIKDRTSIMNRLKTQKLSITCRQSKARLAQVDKQIAEISAEVDRLINTNNTLAHSMKILRSIPGIGAVCAATILIEMPEIGKLDRRQVASLTGLAPMARQSGQWRGKSFIQGGRKIVRDALYMPALVAMRHNPDFKAKYQAMIKAGKPPKVAITALMRKLIELANALIKADRNWVKKGA

SEQ ID NO: 252493 - protein, 343 aa, unidentified
MTIVILGVDLGKTSCSVVGVDATGAVVARRTMRRQTLIDYVTKLPTCVVAMEACCGAHHLGRLFAAQGHEVRLMSPEYVRPYIKAQKNDDRDAEGIAEAASRPTMRFIDLKSEEQLDIQTLHRVRSRLVAERRNLINQLRAILLERGIIFPVGRKKFEIGMDALLAESTEILSPRTRQLVGDLRVEWKGLDTKIEALNTELIQLARNDAAMRRLTSIPGIGVLNATALVAAVGDASSFKKARDLGAWLGLVPKQHSTGGKPRLLGISKRGNTYLRTLLIHGARAALPSLSRTDTPLGQWLKSMIERGVHRNAVVVALANKLARIAWAALRKETGFDRSHPIAA

SEQ ID NO: 252494 - protein, 359 aa, unidentified
MKKVRVLGLDVHADTIAVAIAEPGEGEVRSLGAIPNREESVRKLIKKLGPPEQLKACYEAGPTGYVLYWQLTGLGVHCDVVAPTLVPVKAGDRVKTDRRDAAKLARSYRSGDLTPVWVPDEAHEALRDLVRAREAAKQDQLRARHRLSKFLLRCGRRPAMGVKPWTAKYMEWLRQEVTFAQPAQEYTRADYLHEVEHANDRVRRLEVAIAEAVKLAPVQMQELVQALQSLRGIAQISAVTIVSELGQMSRFPGARQLMAYSGAVASEDSSGKRVRRGAITKTGNAHLRRVVVEAAWAYRHRPAIGATLRKRQDGVSEEVKQIAWKAQHRLHKRYHRLAAAGKTPPKIITAIGRELLGFI

SEQ ID NO: 252495 - protein, 357 aa, unidentified
MVDFTPEAKSSGKGVTSPYHRTEHCENIHEYRSDNKVGVIGIDVSKEHLITSKGRVRKFTNNEEGYEKILSMKPNIIIIEPTGVYSTRPSQYFKERGVKVLQVSPNLLWKQKDVRGKKTDFYDAEKLENMVNNAREYTHNPLKELVSLYLFMKDIQIKQENRLKRTLFLVTDDEKISEERLEKFSKGDFSDVKLYQLEYTNTVLREIQVLAKTLLQTREELERVRGMIEEQVPEDHVLLTIPGVGRLAAGIIIGVVGDIKRFPSPESFVAYCGLDPVVERSGRVEIRKGISKRGNKYLRSLFYFLALTQYSRNPTLLKFHESHKDRLKGRKLYTALARKLARIVWSVWYNNKPYEVK

SEQ ID NO: 252496 - protein, 359 aa, unidentified
MQTRGQSLDFSGQNIYAGFDVHLKSWSVTIMTDEITHKTFSQPPEPEALHQYLQRNFPGGTYLSAYEAGFCGYWIHHKLLSLGIHSIVVNPADIPTTNKEKVQKDDKRDSRKIAKALRSGDLVPIYVPSAKTIEDRCLVRTRSMLVRDSTRNKNRIKSFLHFHGIKILASFENSRTHWTKRFINWLEAIEMKEDSSKLTLSLLVSECKKLRGTILTVTRSIRELSQTEAYIKQEKLMRSVPGIGPITAITFLTEIETITRFSNNDQLHSFIGIVPSTNSSGEDEIIGDITPRGHSILRSAIIESAWIAIRHDPALMKAYHDYCKRMEPNKAIVRIAKKLLNRISFVLKNMQPYSLCVVK

SEQ ID NO: 252497 - protein, 355 aa, unidentified
MERTLGLDVHAASCTLAILSEAGRRLKDFPVETNGQALVEAIRMIPGHKHLVFEEGLQSAWLYETLNPHVDDIVVAGITTSRGQKSDKIDAYNLAEKRRVGSLGKLVFKAPRQFTRLRELSRIHMTLVSDTVRVQARIKSLYRSRGILVSGANVYGVRHREEWQSQLPSSLQTRAARLYNCLDFMLNQKKEAEADLLREAKKHPIFSILETAPGFGPIRTARLIPIVITPHRFRTRRQFWSYCGLGIVTRSSSDWIQTADGQWIRARVPQTRGLSRQYNHILKDIFKGAATSVITQRNKDPIYERYQRLLDGGTKPTLAKLSLARMIAASLLRMWKDEKEYDPGRASPPAKTRKG

SEQ ID NO: 252498 - protein, 413 aa, unidentified
MTEHTNHDDDRVLVAIDIAKQSHDALILWPSDKKRAVKIANTRQGYEELLARTGTESNRVCVGFEPTADYHRYIAYWMQQQGVSCHMVSSLSCARAREMLFKTWDKHDRKDTCVILYLMSQGMMQPFHDFLVQGYLDIQELSNTYHQITLARSRCQHSLLNHYLTLYFPEMERYFHTSRAQWFCRFLLKFPTPESITRYRKATFIKRAWDVVGRKVAKQRFLEELYETAECSIGLPVGTEGWVVEMLRLQVIRYLQLTEQRQALEHSAEELLSELADYQHLKTLPGVGPVIALMIIAESGDLRRFRHYRQYLSFCGFNLSAVQSGNQRGNYKLSKRGNSRLRYAYWLAATVAVRQRENSFRYKYERYIQKDPENADLKRKARVAVASKLARVAHALVKNNADYRGYHEFGCGT

SEQ ID NO: 252499 - protein, 273 aa, unidentified
MQHYIGLDVSVKETSVCIVDKAGKVIREVKVATKPVAILAVLTEEALAIERIGLEAGPLSQWLYSALAEAGLPVICVETRHMKAALSAQINKSDRNDARGIAQMMRVGLYRPVHVKTLASQKRRMLLTSRQLLQAKALDIENDLRGTLRNFGLKVGMVGTVKFEARIRELVANHPDLAAIVEPLLIARRVLREQLGVLHRQLLEIVRHDEVCRRLITTPGVGPVVALTFRATVDVPSRFTSSKAFGAAFGLTPHRQQSGEIDRMGASRSAETP

SEQ ID NO: 252500 - protein, 410 aa, unidentified
MEVLYQRCCGLDVHKETVVACLRIVSGGEIVREVRTFETTTASLMALSEWLAENSCTHVAMEATGVYWKPVWHILDDGDFKLILANASHVKNVPGRKTDVNDATWLADLLAHGLIRASFVPDTQTQELRTLLRTRKQLVREKSSHILRVQKTLEDANIKLDSVITDVMGMSGRAMIEALIAGESNPTKLAGLANYRLKASQEKLREALRGRVTKHHRFLLRLHLNQIDALGAATATIDQQVQAGIAPFRSAVELVTSIPGVSDIGAQVIVSEIGTDMSQFPSESHLISWAGMCPRNDESANKRRSNRVRKGAPWLKTTLVQCAWAAVRKKDSYLKAQFLRIKARRGPKKAIMAVGASILTAIYHMLKHGTLYQDLGSDHFQTRSKGQQTKRLVKRLADLGYDVALTPLAS

SEQ ID NO: 252501 - protein, 341 aa, unidentified
MEQVTTIGLDIAKHVFQLHGADAAGHVLFRKRITRVKLLGFLATQTRCVVAMEACAGAHYWAREIAKLGHHVRLIAPAYVKPFIKRQKNDAADAEAICEAAQRPSMRFVPVKTEEQQANGIVFRARDLLVRQRTQCVNALRGHLMEYGYVFPKGITHVATLVALVEDPQSSLPEGVRVILKLLVDTFTALEAQIAVLDAEINQRSKSDPTVRRLMTIPGVGPIASTAITALVPAAEGFPAGRDFAAWLGLTPLQKSTGGKQKLGAVSKRGERTIRRLLIIGASAVVQQASRRGAPKGSWLAQMLARKPKMLVTVALANKMARVIWALLVKGGTYRAPAVAA

SEQ ID NO: 252502 - protein, 360 aa, unidentified
MEFVGIDVGTMSCSASILDEAGGIKRCLEFANEESGWKTLTAGMNREAVMVMESGTAAFPIYDFLCKEGYKVVMANPSKIRAITDSKSKTDEKDSLVLAQLLRLGYIPRSYVPTAEIMRNRELLRACVDVGQEICRTKNRIHALLTKSGLRPQYKTSRDLFRAEKRIRWMKSLRFGDHRDAVLQSHLVHLGSLQREQDILKSEVARIGRDSSEVDLLMSIKGVDFYSALLILSEIGDVTRFRNSEALCSYASLVPRVRQSADVVSHDRITKQGPGTLRWVLDLVAQVVIRYDNPLRAYYRRLVRRKKKKSAALTAVSRKVLVMVYAMLTRKERCRWEDRHLTDVKIKMMRRACARKVFAG

SEQ ID NO: 252503 - protein, 338 aa, unidentified
MKLYGGIDLHSNNSVIALLDEADKVVYRRRLPNDLERILAAIEPFGDAVEGLVVESTYNWYWLVDGLMEAGYRLHLANTAAIVQYEGLKYADDDSDACWLAKLLRLGLLPEGYIYPKEERPVRDLLRKRSQLVHQRTSNLQSVQNLMARNRGRSLSANSIKRLTYEEVDRLLPDADLALAVKGSLAVMRTLDGVIVLLEKAVKGRVRLRPQFKPLLTVSGIGEILGLTIMLETGEIGRFDKVGNYASYCRCVGSEHLSNGKRKGRGNTKNGNKYLAWAYIEAANFAVRYNPQIKRYYQRKSARTKGIVAIKTVAHKLARACYYILRDQVPFDVNKAFT

SEQ ID NO: 252504 - protein, 330 aa, unidentified
MYYVGVDLHKRTSWFYILDSEGRKIKSKNVNNDKLTGFIRTIPQPFEIAVESTYNWYFFVDLVQSYAERVYLANSFSLKAFAKQHKKNDKIDAHLIADVLYKGFLPKVVIADKETRQIRELLRSRLTLAADRGRNILRLGSLIDKLGIPSGRLYPSVGNMDNHVPSEGVPDIYKNIIQDYKERIVYLTKKLYQVRKQIMNIVEKDQDMKNLETIPGIGSFSAALIKSEIMDIRRFATFKRLCAYSGLAPRTFSSANKLYHGPINKNRRKHLQWILLENVYKFIKALPDKNEKFEKIKKAKNHNTAKVVLARDFLRIIYKILKEKRAFYYV

SEQ ID NO: 252505 - protein, 333 aa, unidentified
MLPPNCGTATPYILRNTVGLDISKLTFDATAIVGNAEYSAKFDNDSKGLNQFSDRLKSLGCQNLHICMEATGNYYEEVADYFAQYYSVYVVNPLKISKYAESRFKRTKTDKQDAKLIAQYCRSAKESELVKRQKPTDEQYRLSRMTAAYAQIKSECAAMKNRHHAAKDEEAAKAYAQIIKAMNEQLEVLKEKIKEQTEKPNCKEGVKRLETIPAIGRMTAAVLFHHLTSSKFETSNKFAAFAGLSPQQKESGTSVRGKGKLTKFGNRKLRAVLFMPAMVAYRIRAFPDFIKRLEEKKKPKKVIIAALMRKLAVIAYHVHKKGGDYDPSRYKSA

SEQ ID NO: 252506 - protein, 384 aa, unidentified
MRAVCGLDVHKDSVYLCILTGEGELIEKVFGVLTFQLQQMRDLLLAHNVDEVSMESTSVYWIPVWRVLAPHFHMRLVNPYFIRQLPGRKSDVADAQWIAECTLKNLVSGSFVPPEDIQQLRQYDRRIFDLDEEIVRKLSKLDAVMQRCNFRLSNYVSNVDCKSYKDVVRKISEGVTDPESLIGEIHGRIIKHHGRETILASLAGVISQAEIDVLRQLREELALAEEHKRECLERMLEICQEKYPDELRRLQTIPGVKERTATSLIAEIGTDMSKFETANHLSAWSGLRPRNDESNKKFKSRRITHGNIYLRKNIIQCAWAASRTKGCFFSRFSYHQTQVRKKNKMKVIVAVARKLLVAAWHVIHDKTDYADFQKQDRQAPASNG

SEQ ID NO: 252507 - protein, 352 aa, unidentified
MASQRWRAAMEHYVGLDVSLKQTSICVVDRSGSVVREGVVDSDPEAISVYVRSKAPGAVRIGLETGPTSTWLWTELKRLGLPVICIDARHAKAVLKMQINKSDRNDAIGIARIMQTGWFKEVHVKDIDSHSVRALLASRALLVKIKRDLENHVRGLLKNLGLVIGRAKFNVFAVRAEELIEGRPELIATIRPLLEARNAVEQQVSELDRKVMKLARHDAQVRRFMTVPGVGPITALAFKATIDDPARFTRSRSVGAYVGLTSRRHASGEVDWTGRISKCGDAMLRSYLFEAAGVLLTRVPKWSAVKAWGVRLAKRNGLRKAKVAVARKLAVILHRMWIDGTEFNWSKKEIAA

SEQ ID NO: 252508 - protein, 468 aa, unidentified
MDRRERGRARLRDGKASKAEQRFLERVHLNAAGIDVGSRSHWVAVPDDRDPQRVREFKSFTHQLLELADWLDACGIETVAMESTGVYWIPLYEILEERGFEVLLVNARHVENVPGRKTDILDCQWIQQLHTFGLLRGSFRPEAEITTLRTLVRHRDKRVGDTAMVIQRMQKALTRMNLQRHNVISDVTGLTGMAILREIANGETDPATLSRHRDRRCKASQEEIAASLTGSYREEHLVVLRQTLEIYDFDGAKIESCDAEIEVRLRTLEARCQPPAKPLPVPRSNCKKKLRDNAPWFEIQSPLFQLTGGVDVTELPGIGPHGALELISEIGLDMHRWPTEKHFAAWLTLAPQDEISGGKLLGSRTQPSANRAAKTFRMAAMTLGRSDPTLGAFYRRLAIRLGKAKAIAATARKLALLFYRMLKHKLSYVETSAVESDERQRHRILRSLGKRARSLGCDLVDTSTGVVM

SEQ ID NO: 252509 - protein, 454 aa, unidentified
MPGLPVGGLHTFFLRGKEMERVYQHCCGIDIHKRILVACLILVTADGQRHKEIRTFRTITQDLLQLLDWLQANQCTHVAMEATGVYWKPLFNLLEGHVQVLVVNAQHIKAVPGRKTDVRDAEWIADLLQHGLLKASFIPPATQRELRELTRYRTTLVEERARIVNRLHKTLEDTNLKLGDVVTDILGKSARAMLEALLAGQSDPVKLADLARGRLKAKRAELEQALVGTLKPHHRFLLKEHLAHIDTLDQAMVRVGAEIAVLMRPLEQAELSETHPDEPTPETQEQALTWAQAIVLLCSIPGISQRAAEGILAEIGIEMKRFASAKHLASWAGMSPGNRESAGKRLSGKTNKGSPWLRKLLVEAALAASHTKHTYLAAQYKRLAARRGAKKAAIAVGHSILVIIYQLLDQHKSYEDLGGNYFDELDRQAIQKRLVRRLEKLGYEVELKPALPAA

SEQ ID NO: 252510 - protein, 335 aa, unidentified
MDIRYFIGVDMSKATLDWAVFDGKTIALQRQSANSETGIKATIKLIKALPDFTVAKSVCCMEHTGIYNAHILTYLQNISLPIWLENSLQIKKSGGLQRGKTEAIDAQRIAEYAFRFRDQMRLWQPPRPVLQKLAVLSALRQRFLLVRQQLQQPITEQEGFANAGLQKQLTKNCQASLKAIKGDLESVDKQIDKLIQADNRLKEFVNSITSVPGVGPATATEVIVATDECKAISDPKKLACHAGVAPFEYKSGSSVRGKTRVNQHARLRLKSLFHLGAMSAIRMKGELQDYYTGKVGEGKNKMSVLNAVRNKLIHRVCSVVHRQQNYDKNYTPMLV

SEQ ID NO: 252511 - protein, 414 aa, unidentified
MPYKIAGIDVHKKVLMVVVIDATTPEEKPERRRFATMPSEMRRLSVWLREQGVEEAVMESTAQYWRSVWLELEPYMRLHLAHAFSNRAPRGRKHDFKDAERLVRRLIAKELILSFVPDGEQRTWRSLTRMKLQLTRDRVRLQNQIECLLEEMRIKLSIVVSDLLGASGLRMLLALAKGETDPKKLAQLGDERLQCREEQLVDALTGRVQPMHRAMLGLQLERLQLIDRQIAKLNALIAQAMKPHQEAVMRLAEVPGLGVDSAQQIIAEVGVQASTFPSAAELTSWVGTCPGKDESAEKNHSSRSAKGNKYLRRVLNQAAHAAVKKKGSHFQVVFRRLLPRLGYQSAIWAVAHRLCRMVWKILHEGVRFIEQGVEPDPKAKNKRVRTLARALRKLGYEVAITPITPVAATNGMQM

SEQ ID NO: 252512 - protein, 332 aa, unidentified
MLYENYVGIDVSKLSIDAFIRESRIHRQFRNEESGFKQLIQWIKKHIGETWESLLICFEHTGLYSLSLALFLEREHIAYAMVPALDIKRSLGITRGKNDQIDAKRIAEFAYRFNDRVMPTSLPAKDIRKLHSLLAIRDKMMRNMGGYITSRNELFRVIPDRELPVLTSVYENIISTLKNEVHELEREIRSIIMANKELKTTFELITTVKGIGFIVVSFLIVYTCNFTRFENWRKFACYSGIAPFEYQSGTSVHARTQVSSIANQQMKRLLHLAAMTAIHFDAELHNYYVRRQAEGKSKMATINIVRNKLIARVFAIVKRGTPFVDIQKYVYL

SEQ ID NO: 252513 - protein, 378 aa, unidentified
MTAVLQQKDNTMSHVLYLTFELSNKKWKLGFSNGQKKRIRTLQAGDWPTLLAEIKQAKARLNCTEDSTVVSCYEAGRDGFWIHRALVAEQIKSHVIDSASIEVNRRKRRVKTDKIDVAAMLRLLMRFMSGEKEALHTIRVPTVLEEDQRRLNRERDRLIKERGAHSARIKSLLIAHGIRLEKMSDLPRLLATAKAAVIGYDLPEDLKSELMREYERYDLVAQQIKKQEQLQIDRAESQDIPAMKHIQHLRSLKGVGWQSSWVLTMEFFNWREFKNARQLGACAGLTPIPYDSGDSIKEQGISKAGNKRIRKLMVELSWLWLRYQPASHLSQWFNRRFAQGGKRMRRIGIVALARKLLIALWRYLDQGVLPEGAILKIV

SEQ ID NO: 252514 - protein, 432 aa, unidentified
MGLTHGLTDADWLSSRGFVGPLGEATARDRTGVRDLIGAWSRSPTTVLSARPAGACRPTGISERTAVTSMTDQALEVTGGVDTHGETHHAAVVDRIGRHLADREFPATGTGYRQLHAWLRSFGMVTAVGVEGTGAYGAELARTLRRAGLKVVEVDRPDRRTRRMKGKSDPIDAYAAAEAVASGRATGTPKSRDGIVEAVRTLRVVRRSAVKSRTQAVNQARQLLVTAPESLRAQLRGLSAAALAKACARLRPGTDLADPARAAKAALRRLGRRILALSEEIDELEAELKPLTARAAPELLALKGVGADVAGQLLATAGDNPDRLRSEAAFAHLCGAAPIPASSGRRDRHRLNRGGDRAANHALHTIVLSRMRWDERTRAYVERRTGEGLAKKDIMRCLKRHVAREVYRVLMRSIHTTNTGRNTAQSDLIEAA

SEQ ID NO: 252515 - protein, 337 aa, unidentified
MDYFAGLDISMDETHVCVVDREGMVIHEGKSASLAEAIADELTKAPSCRRIVFETGRMAPILFHRLSQLGLPVVCIESRQAYQTLKSLATHKTDRNDARGLAHLARTGFFKPVHVKSLSAHAVRSLIIARKKLVGQRVTLENQIRGLAVVFGIRLPRALTAAFIDRALKASEGVAGLSAAIRGLIAARTAVMTAVAAIDADMRRMTKASEACRRLMTIPGVGQLTALAFVAAIDDPSRIRRSRDVGAYLGLVPRRYQSGEVDYVGGISKCGDRRMRTLLYEAANVMLTRYKGQLKLKDWAFTIAKRSTMRKARIALARRLAIIMHAMLRDGTEFVAA

SEQ ID NO: 252516 - protein, 263 aa, unidentified
MEIVVGIDVSKERLDVAILPQEEVFAVGNDHAGIDELAERLKGIGVDAIALEATGGFEMLAVAGLSAAGLTVLVVNPAQVRAYAHAIGRRAKTDPIDAAVIAAFVLATKPEIRPLRDAETQALSELVARRRQIVQMVVAEENRLRMALAKQAQKSIKRLLKALRRELESLDADLDSHIRKSPVWRVREALLTSVPGVGATTARTLLAELPELGSLDRRQIASLAGLAPWTRQSGKWKGKSFIGGGQGTRRPIHGRPRRQPIQP

SEQ ID NO: 252517 - protein, 349 aa, unidentified
MPIVGGLDIHRKQITFDYVNAGTGELRRGQIAPADREHLAAWLAGRFTGQDAHFAVEGCTGWRYVAEELAAAGAVAHVAEPADTAALRGRKRHAKTDKTDSRHLRVLLADGRLPECWVPPSHILECRALLELYHDLRTEHTAWVQRIHAVLFHQGARQLGEQRLRTGEGLAALRAAVAQLSPAGQLQVMVALDMLQVLEGHLDGLRSRLIEAARRLAGARELHARLYGVGPVTALALTCWLGGAGRFSSARKAVRFAGLDVTVWSSDRKGPPGRLSRQGPEVVRWCVYEAGKTHARRCAPDHAYYQQVKDRIDGKRAAISEARKIIRQAVHILAALGDDALIMDPSPSR

SEQ ID NO: 252518 - protein, 370 aa, unidentified
MGKSALYVGLDVHKMSVDVAVAEPGPGAEVRFYGRIGGDLEALDKVTRKLQAKGAELRFAYEAGPCGYQVYRHLTAQGHSCLVAAPALIPRRPGDRLKNDRRDALALARLLRAGELTPVKVPDADDEAMRDLTRAREDAICVERRARQRTVAFLLRHGRVYPGKTTWGRGHWAWLLEQVMDHPAQQIVLQEYLDAVREASARVLRLTGQIRDLVPQWHQAPFVAAYQALRGVSFIVAATVVAEVGDLDRFNNPKELMAYLGLVPSEHSSGASVRRGRITKTGNSHARRVLVEAAWAYRLRARVSRTLLKRQEGLPERVRQLAWKAQLRLCTRYRRLLARGKARQTIVIALARELAAFLWAIGRAVAPATA

SEQ ID NO: 252519 - protein, 338 aa, unidentified
MQITTIGLDLAKSVFQVHCLDSAGGAIRKKLRRSEVLGFFRSLQPCLVGMESCATAHHWAREIGAFGHEVRLMPPAYVKAYLRRQKNDAADAEAICEAVSRPTMRFVPIKSTERQGVLVLHRTRELLVRQRTKLINAIRGHCAEFGLVAPQGPRRALELIEQVRDGAVPSLPEIACNALLILGEQLTILAAQIHALERRLLAWHRQNQASQRLATIPGVGIITATAMAASVTDPSLFRSGREFAAFLGLVPRQNSSGGKDKLGRISKKGDGYLRKLLVVGATSVIRRSRTADLAAAPWVRALLERRPARVVTVAMANKTARIIWAVLTRGEVYRPTAA

SEQ ID NO: 252520 - protein, 371 aa, unidentified
MKSILSVGMDVHKNSFSLCAYDGYTGEIVSESTFASDVKLVIKFIETLKSRYENDVEIKCGYEAGCLGYSLYKSLTSRGVDCVILAPTTMQVSAKNKMVKNDRMDALNIAKNLASGSYKAVYVPDEEDVEIKEYIRMIHDFKKELKRVKQEICAFVLRHGYQYDGKSKWTIRYMDWIRNLQMSEIQKETLNEYIAEMDSLSDKIERFMNRVDEMYQSERYHEKVSELRCFKGIDTFAAMTIQVETADFERFPNAKAYASYTGLTTGEHSSGDKNNRIGITKQGNTVIRKTLVECAQALVKGNVYTPKSKKLKSRQKGMDVDIIAYADKATERLMKKHQKLIERNVPRNKAIVAVARELACFIWGMETGNIH

SEQ ID NO: 252521 - protein, 346 aa, unidentified
MKNNTPERVVKVLGIDLAKKSFHLHGVDKHGYVVLTKKLTRAKLKAFVAQMPACLIGTEACGGANYWKRVFESYGHTVKMMAPQFVKPYVKSNKNDAIDAEAICEAVQRPSMRFVPSKNIEQQDIQSLHRIRSQVVARRTAQANQIRGLLMEYGIIIPKGIAYVRKEIPGILEDADNELTGLFRSLLRELYEEMVHLDERLEKLEDELKIICRDNAHCQRLLTIPGVGLLSATALVAAIGDISAFKSGRELAAWLGLVPRQHSTGGKPTLLGISKRGDSYLRTLLIHGGRAVVRVAGKYLDKRSQWIGDLEKRRGNNITAVAVANKNARIAWALLTNQTSFQASVN

SEQ ID NO: 252522 - protein, 386 aa, unidentified
MHDGTNLPVPEQTGIRGDCATLFVSLELSRSTWVVTALAPGSSKMSKHTLAGGDGRKLLDLLARLKARAEQRIAAPVKVVAIHEVGLDGFWIHRLLDANGVESHVVDPASIAVPRRHRRAKTDAIDGETLLRTLMAWQRGEPRVCAMTVPPSPSEEDRRRISRERAALLRERIRHTNRIRGLLFGQGIANYNPLNKNRRKCLEELRTGDGRSVLARLKAELLREIDRLELVLRQISEVEVERDEMLRPAEASSPAALLMQLKGIGAEFATVLYLEGLFRHFENRRQLAAYAGLAPSPWKSGSIDHEQGISKAGNPRLRTTMVELAWMWVRYQPDSALSCWFRQRVGSERGRTRRISIVALARKLLIALSRYVTHGEIPAGAVMKPV

SEQ ID NO: 252523 - protein, 417 aa, unidentified
MEPQTFKYYVGIDWASDSYQVCMVDDAGGVLGEKRFDHSGDGIRQCIEWLMQLVGGDVDEIAVTIEIPHGAMVESLIENNLTVFAINPKQMDRFRDRHTVAGAKDDNLDAFVMADSLRTDRSCFRRVDVDEPAIIRLRELSRMEQDLQTDRNRLANQLWEQLRRYYPQMLNLSPAANEAWLWDLWEAAPLPGDASALKLAKVKAILRAHRIRRFTAEQVLEQLRQPALRLAPGAAEAASEHVQMLLPRLRLLQQQGQATVKRIRGILDEFCAAPLECEGREHRDEEILLSLPGIGPVIAATMLAEASQPLRDRDYQALRIYAGAAPVTRRSGKRKVILMRYACNQRLRNALYHWSRTSMQKDARAKQHYAELRRRGHSHGRALRGLADRNLAMLMSMLKSGTVYSSEKRGTAGAQVG

SEQ ID NO: 252524 - protein, 391 aa, unidentified
MEHPMPQRNDLSRSLVAVDQNSTMIAVIEMSRSSWLIAGIIPGIDRHPLKKLEPDQESLLRLLQRWRDEAARAGRTISRMAVAFEAGRDGFWLARWLRARGIEAHVIHPASIPVSREHRRAKTDRLDTELLKRAFLGWLRGEPDHCSMAAVPTLEQEDAKRPNREREVLVGERTRIVNRMKGTLARLGIRGFKPTLRRAPEHLKTLRTPEGVTVPPNTLAELQRDMARLRFVGEQIEAIEAARTERLEQAPGEGQNATIRLLARVVGVGIETADMLVQEVLSRNLRDRRAVARYAGLTGAPDESGAKRREKGLAKAGNARVRRGMIQLAWRFLLFQKDSALSQWYRARTTDARGATRKTLIVALARKLLIALWRFGATGEVPRGVILRPAV

SEQ ID NO: 252525 - protein, 372 aa, unidentified
MSKSSILFVGMDVHKETIDVAIATNRLNGKVRHFGQIPNRIDVIDKLVAKLKREAGTLKFVYEAGPCGFGLYRHLTRKKHQCAVVAPSLIPKKPGDRVKTDRRDAIRLAQLYRAGDLTPVYVPDVDDEAIRDLSRAREDAMIDQKAARQRLKSFLLRHGIRYEGRANWSERHLRWLANAIMPTPAQQIVFQEYVNTVTERTHRIERLELMLKEQIKGWHFAPVVNALQTMRGIRFINAVSIIAELGDLTRFDNPRQLMCFLGLVPSQHSSGERTRLGPITKSGNRHARRYLVEAAWAYRYQAKVSREIQLRQENIPIRIRDIAWKAQIRLCARYRKLAARGKNRNIVVVAIARELVAFMWDIAHQVHLKPAR

SEQ ID NO: 252526 - protein, 348 aa, unidentified
MEKSMTVAVDLAKDVFELAVADERGRIVERQRLSRSQFGRFFENRLVCRVVMEACGSAHYWARLIRGHGHTVRLLPPQYVRPYRRRNKTDRSDCEAILEASRNREIREVPVKQVDQQVIQGLHRVRAQWMATRTNRINVLRGLLRELGIAIPLGATTAIRRVSEAAETLPARLQPVVHALLDEIRELEERVDLIDTALREHTRLDADAQCLIQVSGIGVITATAMAASVVDPRFFRNGRQLASWVGLTPREHSSGNRRHLGGISKRGDVYLRMLLTHGARSVLNRAKQLHKAGKPLNRLQRWVVELEQRRGHNKATCALANKIARIAWATWRHQRKFDGNYSLQKQAA

SEQ ID NO: 252527 - protein, 404 aa, unidentified
MWYAGIDWADQHHDALIIDEKGRQVATLRIDHTPQGLARLNTFLEQIIGSQPKEHMACIIETTHGLLIAHLLEAGWPVYPVNPRTVDRRRSASGAKTDTIDAYLLAKTGRADLADLHRLSPDSQKITELKLLTRDQDALIRMQTRLVNQLTACLKAYYPVALELFSKLQQKSTLLFLQTYPTPQAAMAASAEQITEILRRAKHSNPIPVAATIFERVHQPHLQADAVTTRAKARLMLVLVSQLLPLLEQIAQYDKEIATLVLTHEDHELFASLPRAGKRLAPRLLAEIGDDRTRYRDASSLQALGGTAPVLFQSGMYSKAHRRMACIKPLRNALHQFAWQTTHSEAWAREYYQRKRAEGKSHTVAVRALANVWVRIIFAMWMHHQCYEVATFEHAQQQHARPAA

SEQ ID NO: 252528 - protein, 310 aa, unidentified
MEPIFIGIDVSKDRLDVHVRPGGEAFVVTRDGKGLEELVGRLQELGPTLVAVEATGGFETIVAAAVAGAALPLAVVNPAQIRHFAQAVGKRAKTDPIDAGVIAHFVEAVRPVPRALPDEASRLLAELVGRRRQIIEMMVAERQREKRAANVRVRKSLARHIAMLERELGAIDQDINTLVRGSPVWRVKEDLLASVPSIGKTLARTLLAELPELGSLDRRNIASLAGLAPYARQSGRWRGRSMIGGGRAAVRSATFMAALVASRCNPPLKDFYQRLVSVGKPKMVALIAVARKLLTILNAILRDNRPWQSA

SEQ ID NO: 252529 - protein, 435 aa, unidentified
MKKRVYSSRRLSSKDFDRIILSLGSSCVVVGVDVSKHELMLMIRSDPSSRSDAATFSGPYRVANPGGIPEAVALIRQIQSRGGVRVAMESSGTYADAFRQSLSDAKLELHRVETKRSHDYAEVFDGVSSQHDGKDAAVIAELCAIGKSSPWAYEQMSESDSRMRLLVEWIDSHDRIKRMWISRLEGLLARHWPEATGLLDLTSGTLLSALAHYGGPAALAADDQATRRLKSWGKLFLKESTAAALIVSARSTLGVRQNPVDQERLGYCASQAHEASLAIKRYRLQLKKAARDNKTIQSLASAVGIVTACVLWARLGDPRDYDSAQAYRKAMGLNLVERSSGQYKGRLRLSKRGDPLVRRWMYMAALRLITEHAELHNWYRRKRQQNGGCHHKAMAALMRQLAIALHKIAVSEEPFDPARLFNAVAASVAGGRCGK

SEQ ID NO: 252530 - protein, 430 aa, unidentified
MGLIVPSAIDAEQEEQPLPYEWFVGIDWGSRQHQVCVLDRDRRRVGERVVDHDGASLARLADWLWTVSAGQPQRVAVAIEVPRGAIVEGLLDRGFHLFAINLKQLDRFRDRHSAAGAKDDRRDAFVLADSVRTDQPSFRRVHLGEPHLLLLRELSRAEETLLEDFRRHANRLRDQLHRFYPQMLQLCAAADEPWLWDLIDLAPTPAHTALLTEEQVQRVLKAHRIRRVTAQDVLTCLQALALPVAPGTAEATQAHCQFLLPCLRVLAEQLQACSQQVSALLSTLAEAPGKDEGPSDVAIVLSLPGVGRKITAWLFAEAAQPLAERDYQMLRTHGGVAPVTKQSGKRRVVVMRRGCNPRLRHALYHMARVALQRDAHCNRVYTALRAKGQRHGQALRNVGDRLLRMLMAMLRHRTCYDASRIRREPGVQMG

SEQ ID NO: 252531 - protein, 433 aa, unidentified
MIYCGIDWAEKTHDVALVDDSGQLLAKRHITDDAAGYKILLDLLAEYGDTEEHPIPVAIETSRGLVVVVVLRSGKRQVFAINPMAAARYRDRHSVSRKKSDPGDALVLANVLRTDMHAHRPLPQDSDLARAVAVLARAQQDATWNRQQIANQLRSLLREYYPAALAAVESWKNGLCRPEAHQLLKLSPTPAKAARLTRTQLQAALKMAGRQRGIAADAERLREVLRTEWAHQPQLVEDALGKQMLALLIQLEAACTAADNLAEAVEEAFPQHPDAEIILSFPGLGTQLGARVLAELGDDRKRFADARGLKAYAGASPITRASGKKSSITRRWVKNDRLNAASYLWAFSAITASPGAKAHYRRRRDNHADWHAAAQRNLFNRMIGQLYHCLQNRELFDEESAFPAPPDVAVSAAWLATPRAPRQAAQGLRARTQ

SEQ ID NO: 252532 - protein, 433 aa, unidentified
MGLIVPTVMPPERADQPPSYDGFVGIDWGSQQQQVSVLDRDRRRMGERVVDHDGASLAQFVAWLWGLSAGQPQRVAVAIEVPRGALVEGLVERGFHVFAITPKQLDRFRDRHSVAGAKDDRRDAFVLADSLRTDQPSFRRLRLDDPQLLVLRELSRAEETLLEAFRRSANQLRDQLHRFYPQMLQLCSAADAPWLWDLIDLAPTPAHAARLREEQVQGVLKAHRRRRLKAHEVLACLQTPARPVAPGAVQAAQAHCRFLLPCLRGLAEHLQACGQQVGALLHTLAEMPGAGAGPSDVAIVQSLPGVGRKMTAWLFAEAAQPLAERDYQVLRTHGGVAPVTKQSGKRRVVVMRRGCNPRLRHALYHMARVAMQRDAHFNSVYAALRAKGQRHGQALRSIGNRLLRILMAMLRHRTCYDASRIHCEPVVQMGETI

SEQ ID NO: 252533 - protein, 368 aa, unidentified
MIVIGTDTHKQSHTAGAVDAGTGRELADLTVRAKRRSFDDLLVWARGLDGERVWAIEDCRHVSGALERFLLARGEQVVRVAPKLTAGARKASRERGKSDVIDAVQVARAALREGLHNLPAAQLAGPELDVRLLVDHRERLVAARTALINDLRWQCHDLWPEFEIPLRALITATWQERLGGRLARAEQTARVRVARDELRRIRDLTRSIDALQRELGTLVAGLAPQLLAETGCGVLTAAKLIGEIAGIARFSSDAKLARLAGSAPIPASSGRTDRHRLDRGGNRQLNCALHRLAVSKARLDPATAAYVARKRAEGKSRREALRCLKRHLARRVFRLLQPDAHPATASASRPTRVVTIHCNTPSTRFSLT

SEQ ID NO: 252534 - protein, 340 aa, unidentified
MEGLYAGSDLHGNSNFLGIIDAQGKRVFKRKMPNELGLIRQTLGPFRGELVGIAVESTYNWYWLVDGLMEEGYRVHLANPSAIQQYSGLKHSDDRHDAFWLAEMLRLGILPEGYIYPKEERPVRDLLRKRGHLVRLRTSMLVSLQNIISRNCGRKISVNDVKRLGEDRVTPYLEGQEDLALAGRVSKDTVDFLSDQIREIEKAVLKRVRLKKGYQLLLTIPGVGKILALVIMLETGPISRFATVGDYGSYCRKVPSRWTTNGKWKGSGNTKNGNRYLAWAYAEASDFARRYYPESRAYYQRKMQKTNAAVAHSALAHKLARAAYYVMRDQVPFRMEKLFG

SEQ ID NO: 252535 - protein, 348 aa, unidentified
MTIVEPARLVTGGVDTHLDVHVAAALDELGGVLGTESFPTTPAGYGELFDWFESFGPLARVGVEGTGSYGAGLARSLMARGVEVVEVDCPNRKDRHRAGKSDTIDAISAARGALSGHANGQPKGGTGPVEAMRVLLVAKRSARSERVRTLNQMRHLVFVAPDDIRARFHGLNVYHLTRQTAAMRPRPGNQVDYVTLMTLRELGRRALSLEDEIGHLDDLLEPIVADHAPGLLAMFGAGIFVAATLAVAAGDRPDRIRNEAAWAHLCGVAPIPASSGKTTGRYRLNRGGNRQANSALHRIVLVRMGHHEPTRAYAERRRGEGRTNPEIMRSLKRYVARETFKQLPRGDT

SEQ ID NO: 252536 - protein, 428 aa, unidentified
MSTLFISVGIDVGADFSFMSIALPNQTLFGKPFKIVHSNLNSLERAVSIIKEAEELHSMKVRIIMESTGVYHYPLFCYLRDKGLCVAIINPIISKNSTNMNIRKVHNDKFDSKKLALIGLKPDLKVSVVPSEAVFDLRNLVREYYNLMDSRVSYVNKLSGVLKTSFPLYKSVFSKITTKTSLALLENFQSPSDFLAAGEDTIVGIIRNTARFGETYAKTKHQALVEAANFAATFGHFVSSNAFQIRSCVSFIKQYDEAISAVLLQIRELIDRHSDKEFVRQVRLIESIPGAGFLTAVTVIAEIGDFSAFTSPKQLFAFFGLDPAVKQSGKFVGTQVKMSKRGSAIARRAIYTIALVSIGMNRKGVANNPVLRDCYLVKCKSKPKMVALGVVMHKVCNIIFAILRDGKVFRIVTPEEHKANYLLGKSAA

SEQ ID NO: 252537 - protein, 449 aa, unidentified
MRKPQEIEDEEYEQVLQRVAAADVAKKAGMVCTRVPHDTRPGRRRTRVGEVPATTAAILELGAYLAGERIEKVTLEATSDYVRPFFYLLESAGLDVQLVSARDVKNVPGRPKTDKLDAVWQAKCTERGMLRPSFVPPPEIRHLRDYTRLRADLTRDRTRHWQRLEKLLEDALIKVSSVASSLGTVSVRDMLEALIAGERDPQVLAGLARTRMRAKHDALAEALNGRFDDHHAELARMLLDQTGQLDAQIGHLTARIGKLIAAIPAAWGVNADGTTGPGAGLGENAPVLPAVIRLDEVTGIGQHAAQVIIAEAGLDMTIFPTAGHLVSWAKLTPRTIQSGAKNRTGPAGKGNPYLKGILGEAAAAAARTSTFPGERHRRTVKRRGKPKALVAVARSILVNVWHLLANPTARYQDLGAGYYASRIDKDRKTRSHIRQLEALGYTVTLAPAA

SEQ ID NO: 252538 - protein, 342 aa, unidentified
MEQVSVVGLDLAKSVFQVHGVNAQGEAVLRRRLTRGQLLKLFEKLHPCLVGMEACASAHHWARELTALGHEVKLMPPQYVKPYVKRGKNDAADAEAICEAVTRPTMRFVGAKSPDQQATMMLHRVRQILTRQRTQISNALRAHMAEFGITAAIGRGGLERLIAVIADQEDARLPEEARACLGVLCTQLEMVKEQILDNDRRILADARRTEAGRRLMKIPGIGPLLASAIVACVPDPAIFDGGRSLSAWIGLTPRQNSSGGKERLGSITKAGNTYLRELLVVGAMAVVRRAKQGSSKRPWVTQLLERKKPKVAAVALANKNARIIWAMMATGEAYREAELAAA

SEQ ID NO: 252539 - protein, 430 aa, unidentified
MKITTRISPINPNLLKVTVDVGMESLYAYTELPPQTNAAHCLEETIPNRNQPIIRALEQFSQLARQHGFEGLCVLCEPTGGYERRLLRLARQAGHFTAYLNAESVRKLRVVQSNDSTKSDLKDPKTMFLLAKLGKTLTHRNLSGPWLVLRETHAYYEEHDRHNVVLRYQIHRVLTQLFCEFTFKKDFLFESPALPHLVREFGLNPYRIVATGQAAFYRRMKKHGVRLRTLERLWQDAQRSVLQHLEPGYSDLLETNLRELFEDFWRCQQRLEAARQQMIGLLHQLQAQGEVKLTARHGLINEFLLARILAETGPLEDFKSWPQLLRYAGMNLCERQSGTMIGRRRISKKGRTLLRKVMGQVVLPRVRKTDLYGPYYHGKKANGMVGQKAMMAVARKFLKLLWGLNRSAQDYAPARVFCSATQFQPLAQAA

SEQ ID NO: 252540 - protein, 487 aa, unidentified
MSVVTGHVCDIGEAAKAVIPFERVSITTYPNRCGIPNEMMEEDMAQRKRTALELAHPNAAGIDIGSASHFVAVSPDRDDEPVREFKSFTEDLEELADWLVCCGVDTVAMESTGVYWIPLYEILEARGFAVNLVNARHVKNVSGRKSDVLDCQWLQQLMSYGLLSGAFRPTDEICMLRAVSRQRDMLLASQGRHIQHMQKALTQMNVQLANVISDIVGETGQKIVRGIIAGERDGHVLAKMKNARIRASEEEIAKSLQGNWREEHLFALKQAMALYDNYGTLLAECDTKLESMLATLVGDDNSYPGRGRRASNSKNAPQFDVRTYLFRLCGVDLTRINGINPATALKVIAEVGPDMSRFKSAKHFASWLGLCPGTKISGGKVLSGASKRTTNRAAQSLRLAAAALHKSQSALGAYFRRLAARLDRAKAITATAHKLARLIYTMLTKGAEYTDQGQDYYEERYRQRVMHHLAKRAEKLGMQLVPAPQST

SEQ ID NO: 252541 - protein, 402 aa, unidentified
MNKFNPATTKVSTVSALENIQAQPSVLDKYAAYIGLDTHKDNIVVAIALPGRALAYIDSELANNEKNISKLIRRLSKQFAGQLLLFCYEAGPCGYAIQRQIMASGHDCEVIAPSKIPKKPGEKVKTDRIDARKLAQYLRSGDLTAIWIPDHEQEAMRDLTRARSDMKSQELKARQQLNAFVLRHGHSWPSNKTRWTQSHYNWLESLKFNHDWLQVVLQEYINAVKAASGRVKDITDQMERVLPQWSMAPVVDSLIALRGIDKLAAMVLLAELGDISRFDSPKQLMAYLGLVPSEHTSGSKRRQGSITRTGNSHARRMLVESAWSYRFPARQTMHLKRKAIKASDEAKTIAWRAQKRLCGRYTTLIQAGKNTKQTTVAIARELIGFIWDIVCHEMPKVKIDVQ

SEQ ID NO: 252542 - protein, 406 aa, unidentified
MDVVYTHVCGLDVHKKNVVACVITPETKEIRTFSTMTDDLILLVDWIKCKGCTHVAMESTASFWKPIYNLLELEEIQTLVVNAKHMKNVPGRKTDVKDAEWIAGLLRHGLLQGSFIPSRDQRELRELIRYRRSLIDERAREVNRVQKVLEGANIKLSSVASDVLGKSGRAMIEAMVAGEENPELLSELAQRRLKNKKEDLKRALNGLMGNHQKLMLAAQLRHIDYLDEEIGRLDEEIKRRMLPFEEDLELLDTIPGVARRTAETIVAEIGTNMDQFPSAAHLCSWAGLCPGQNESAGKRKSGKTRKGNKKLRSALVEAARAAGRTKNTYLSSQYHRIAARRGANRAAVAVAHSILMIAYYILKRRQPYIELGPTYYEERKRDTLIRQSIKKLESLGLKVTVESAAS

SEQ ID NO: 252543 - protein, 346 aa, unidentified
MEHYAGVDVSLELSSVCVVDAQGKIVKETKVSSEPEALVSFFKGLGFPMKRIGLEAGPLSQWLHAGLAQAGFGTVLLETRHVKAALSAMTVKTDRKDARGIAQLLRMGWFRAVHAKSIGSQEVRALLVARKQLLGRLIDVELSIRGILRGFGLKVGPVTRKEFEARIRELVMGQATLERIADAMLSARAALKAEYEKLHKAVLAIVREDAVCRRLMTVPSVGPLVAITYKSAMDDPNRIVKSKAAGALFGLTPKKYQSGEKDVTGGITRTGDEMVRTALYEAANVLLSRITRFSKLKRWGMDVAKRRGSKRAKVALARKIAVILHRMWVDGTTYRWAAAEPIATQA

SEQ ID NO: 252544 - protein, 343 aa, unidentified
MQVIIGIDPHKASHTAVAISAGEDELDHKKVRACRTQVDQLLAWAESFPARLWAIEGADGMGYLLAQQLVATGEHVVNVPATLAARTRLLGSGRTSKSDPNDALSVAVTALRAQELRRVEPVGHSEVLRLLAKRNKDIGNQRTRVVARLHALLLELDPGGIAKEINASDVDRFLAAVDPATPVEQVRFDLATELLVDIRCLDEQLKASHKRIRTAVAASGTSVIDVFGIGPIIAAMLIGCTGDISRFKSRDRYAAYNGTAPIEFSSGGRTVHRLSTRGNRNLNHALHLAAICQLRQPHSDGRAYFDRRVAEGKTNKEALRALKRQISNTVYRHLVADAATRRG

SEQ ID NO: 252545 - protein, 410 aa, unidentified
MVLFVGDDWAEDHHDVEVQDHTGRRLAKARIPEGVVGIVRLHELIAGFTDPDIGPEQVLVGIETDRGPWVAALVAAGYRVFAVNPRQVARYRERHSTSGAKSDAGDAHALADMVRTDAHQLRPIAGDTPAVEGIKMVARAHQTLIWERHRHVLRLRSALREYFPAALAAFDDLTATDTLDLLGAAPDPARAARLSRSRIAGALKRARRRDVEAKAERIQATLRGEQLTQPAELVAAYAVIASSAVAVITVMNSQITVLQGQVEACFGRHPDAEIHRSQPGLGEILGARVLGEFGDDPDRYAGARARKNYAGSAPITRASGRKTVVLARFVRNHRLADALHQQAFCALNASPGARAYYDQLRARGTGHHAALRQLSNRLVGILHGCLKTRTPYNEHTAWAHHNQDQSDVAA

SEQ ID NO: 252546 - protein, 321 aa, unidentified
MTYIGIDVSKDSFVVAYSPDKNSKTKTFKNTTKGIHEFIRTISKEEHHCVMEATGNYSALLVYLLSEAGITTSLENPLKVKNFARAMLSTVKTDEIDARLIALYGEKMQPAPYKLRSDAILTLKQKRTVIRQLKKQLIATRNLKGSMEVLPFFDAKCKKSIDKTIAFLEKQIKDLEEDLASLAKSEYKKQMDLLTSVKGIGITLAAALIMATGGFTYFDNAKQLTRHLGLSPTYQQSGTSVNFKGHINRNGDSSLRSQLYVAAFASLRCNTECRACYDRLRSNGKPGKVAVIAVANKLIRQAFAVVTQEKPYVDGYISSKK

SEQ ID NO: 252547 - protein, 356 aa, unidentified
MQNKWYVAIDISKKWLDACVFVENADVKAFPHVQVENSKQGINELMSWLRKQDMVLKQTSFLWEHTGSYGWLLREVIHRKGYKFRAEDPLEIKHRVGYSNDKNDHLDAARMVDYLARYADRLQPSHMPSKGLQKLENLRNERKFYVKQRAALKNRSQVDFSKEELRRHRSLIKEYDEMIKRIEQRMLNILCEDEYLYKTYDLLKSIPGIGFINAINFICITENNTTFKNARQYASYIGVAPHRKDSGKSVHWRAKPSAKCDGQAKADLGQGAEIAVEHCAEIALFYQRKTKGREKDKDIRRKAYNAVKFKLVLRMFAVVNRRTKYYSKAIGTRQAIPLTGQENYDGDLPRPSQKQS

SEQ ID NO: 252548 - protein, 367 aa, unidentified
MSSVASAAGLIHLGMDTSKNTIMVATLLPGEENPVTDRIANEEAAVRRLVGRFTDRSVLRAWYEAGPGGYELYRLLASMGVACQVVAPSLIPKGGSDKVKTDRRDSRRLARLGRAGELTPVRVPSPAEEAVRDLVRARGAVMEDRKRAQQRLTAVLMRHGRVWRGASYWTAAHRSWIAAQRYGEPALASAISYYRATLAVREAELAAVDAELAPWAAREPLAPAVARLGCYRGIAELGGLTLAAEVVDWRRFPAARAFMSYTGLVPAEYSSGERTRRGHITKAGSEPVRTALTEAAWSCRHAPAIGAGLRRRQAGASPDTLARSWTAQRRLHARYVHLVHDGGKAAPEAAVAVARELAGFIWAEMTA

SEQ ID NO: 252549 - protein, 353 aa, unidentified
MTSLTDLREVVDVVIGVDTHVHTHAAAVVDTATGGVLDEITVEATAEGYAKLMEFANKHATLRAWAIDGTGSHGAGLSCHLLEHSEMVIELDRPKRAARRNGAKSDPLDAIRAAREAMARPRLGTPRSGGERQALSVLLAARRSAINASTEAQLQVFSLVISAPEPIRVRFRGQKLAAMLNTAAGLRAHASCDIETASTVLALRTLARRAHAMLKEARELQKAILVIIRGWRPDLLEEFGVGPIVAATVLCAWSHPGRIHSEAAFAMLAGVAPIPANSGQVTTRYRINRYGDRQLNNALHTVVQVRIQYQPTTRDYVARRTAEGKTSREIKRCLARYVARDLYRLLESGAATA

SEQ ID NO: 252550 - protein, 313 aa, unidentified
MHLGIDVSKQTLDCCLISDGIFYERKFYNDSSGMNKLQKWLDEHGADHTLHCCCEATGTYYETVAVALSGQYKMSVVNPRTVKGFGAAVLNRSKTDRQDAKLIARYCQAMKPEQWQSATPEHRQLQELVRYIARTKRQRAAEQTKRQTAPDYLKPHIQSTIEHLTELLNRLEQDLKAHYRSHPEQDSRRKRLETIDGIGENSAAVLCSIITERFTHAKQLVAYLGLDPKEHQSGTSVKGRTRISKIGKSETRAALYMPALVAYRMGAFPNFTARLEAKGKPPKVIIVAIMRKLAVIAFHLLKNGENFDRSRYR

SEQ ID NO: 252551 - protein, 322 aa, unidentified
MYSIGLDISKSSIAVHIPKNNLDLEIENNTQALKALFSKLKKLYKKETNKLVWVFESTGSYSSLIYRFCAQKGIKVFMPNPKQARSFAKAIAQRNKSDKIDARVLAQSIVIAKETEIKVPHIDALVEDFKEMISYYRLLIKQESQLKNHKESLLAKGNNSVLSKSVDRQIKALKKEQQAVLEKMRDMVRKDNVLSQKLDAIASIPGIGELTALVLLHLFIRYPDANQRQIVSLAGLDPVMRESGSSIRGRVKISKAGDRIYRGALFMPAMAAIRFNDKLKAYYERLKANGKHTTVAQVAVMRKLLIIAHALYKSGQMYREEV

SEQ ID NO: 252552 - protein, 417 aa, unidentified
MTVSSLMQRRSAIKPDTLIVGVDVAKFHNVVCTMVPGGAIGRPLEFSNSREGFVALSAEIEARKPSPVSAVIVGLESTGVYWINLARWLAEQGYQVVQISGLYVHRAKELADNSRGTSDGKDALLIADLVVQGKYLSFVQPAGVLADLRQLVGLRQRLVRERAARYNLLHQSVDLLFPEFAAVFRDVTGPGARRVLRRFPAPAAALAHPPDEMHRLLSEDGRVQVSTAKLARLQAVAQQSIGAREGTTGMGYALNDTLLELASLDARVKQVEAEIDRLLVQVDETPILTSLVGRMTAAVILSETGGVRQYSCAAAVLKLAGLNLYQISSGQYCGDRHISQMGRSLLRQALYLAALQHTHPGTPLYPYYAELLRRGKPKPVALIAVCCRLVRLLYALVRDGRCYSAQPPENNPQAQTA

SEQ ID NO: 252553 - protein, 338 aa, unidentified
MALYCGIDLHSRDCWLAILDEGLKVVQEAKVGNDLEAILHVLERYREDLEGVAVESTFNWYWLVDGLEEAGYRMHLTNTWAVKQYEGLKYTDDRHDARWLAHLLALGILPEGYIYPKKERAARDLLRRRAFLVRKRTSFLLAMRGAFECRTGMRISSNDLKKWKAKDVEAHMEDPAEAFSITCLLEPMHALSAQIKKIEKGALARGRLRPEFAPLETVWGIGKILGLTIMYEVGDIARFRKVGNFTSYCRLVNTVRLSAGKRKGSGNPRNGNPHLSWAFSEAAHHAVRHHPEAQKFYQRKRAKTNGIIAIRALAHKLARASYHVMRDQVDFDPEKTFA

SEQ ID NO: 252554 - protein, 428 aa, unidentified
MNYNTQNAKIASITEKTLIVGIDVGSETHYARAFDWRNYEYSKNPLEFSNTETGFHTLKAWMEDIAEKHGKTAVIPGMEPTGHYWFALGKFLQDSGMKPVHVNPHHVKKSKELDDNNPNKNDRKDPKTIAALVNEGRFSYPYIPTGIYAEIRSLSNLRFQTQEELTRIKNRIARWFSIYFPEYKDVYKDLKAVSGRMVLKAAPLPEDIVNLGAEGVNRIWRDAKLRGAGMKRAKTLVAAAEHSIGSKEAPEAARIELKNLLNDMDVYTARLEELLQSIEEKLKEIPYIDKLMAIKGIGLVTVSGFIAEVGDIGRFDNPKQLQKLAGYAIVADDSGKHNGESRISYRGRKRLRYVLYEAAISLIGKNAEFREIHEYYRSRKENPLKKMQSVVAVACKVIRVFYTILTKGVDYDAEKLRGDIRRPQMQAA

SEQ ID NO: 252555 - protein, 415 aa, unidentified
MGGRQQWYAGVDWGSQSHHVVLTDGDGRKIGERSFKHGGEGLAEMAAWLMAASCAAEPGQILAAIEVPHGPVVETLIERGFKVHAINPKQMDRFRDRFTMAGAKDDSRDAEVMASALRTDPRCFRSLAAADPIIVELREWSRIAEDLGVERNRLINRLREQLWRYFPALLELEGDLGAEWLLELWEAAPTPDTASRLREATIAKLLKRHRIRRFDAAFVVNTLRRPPVCVAAGTVEAASAHVALLVPRIRLLNRQIKDAHSRIDGLTARLMPAEAAEPGQKKQHDAEILASLPGVGRTVLATLLAEASDALQRRDYAALRSLAGVAPVTKRSGKSCVVVRRQACHDRLANAVYHWARVAVQHDPRSRAKYAELRSRGHSHGRALRSVADRLLNVACAMLKSGAAFNPSSAAQKPA

SEQ ID NO: 252556 - protein, 362 aa, unidentified
MTAQSIVAHCYPFVVGVDTHARNHVYAIIDSNNGALLDTQSFPVTSVGISRAIRWVARRTEGNADTLWVIEGAATYGAILAGTIAAHGFPVSEAPRMSKKQNRCVGKTDALDAQRLAKSSVPLPIDKLRHPRLNEGIRQGLRILVTARSSMAKDRTRSVNALNALVRSNVLGIDARKKLTSGQITEVSRWREREEELSLRIARSEAVRLAKHTLDLDHQLTINEQQLDELVRVSEAAPLMEEIGFKAITVAKCFVAWSHEGRVRDEAAFACLAGASPIPASSGNTTRHRLNRGGDRSLNAALHLAAITRMTHDDETRIYVEKRRAEGKTDREIRRCIKRYLARRVFKIFHVSAVAEEVTIAA

SEQ ID NO: 252557 - protein, 377 aa, unidentified
MKKELYLGLDVHKDCIATAVAEEGRKGEVRDTGVISNDLHALEKWVGRLRKAHGSDVVLRACYEAGPCGFGIARRLKRLRVECEVVAPSLTPKRAGERVKTDRRDARKLARLLRAGELTPVYIPDVRDEAIRDLCRARTDAVDDRRRSRHRLKGFLLRHGYHYQGKSSWSAAHERYLRELVLPHPAMKVILEEYLQGIAAAAERIARCEEAMGELLDKWRLRPAVHALMAMKGFRTVAAMILVSELGEVHRFSHPRQVMAYLGLIPSENTSSDKRRQGSITKCGNAHARWLLVECAQHYATPPKVSRELSRRQQAQPAQVRAISWKAQNRLHRRYTRLLARRLQRNKAIVAIARELCGFIWELLRTQPCYQAQAPPV

SEQ ID NO: 252558 - protein, 423 aa, unidentified
MRFIGLDIDRDFCEVAIAEGGELRLAGRVQTEPEALALFAQGLGGDDEVALEATGNALEIARIIEPHVGRVVLANPKAVKGITRAGPKTDKIDARTLAQLLAGGFLPAVWLPDEQTRILRRRISARAQLVRQRTRAKNQVHATLMRNLKGKPPVSDLFGARGRRWLAAQDLPADEQETVAACLRQIGFLDGEIGLVERTLAEQVLASAEMRRLLTLPGVNFVTAAALLAAIGDIRRFPSARQLVSYLGLDPRVSQSGVEPARHGRISKQGPGETRHVLVEAAWHAARTAGPLRAFHQRVAARRGGNVATVAVARKLAVIAWHMLSRGQDYAFARPSLTREKIRKLELATGAERQKGKRIGVWVTKEQHRLDKELAAQAELAYRRLVQDWQPAIKGTGAAPGRASCGPSSGQAARQETAPTPAL

SEQ ID NO: 252559 - protein, 297 aa, unidentified
MSVGQIIGTMNGLQVFGLDIAKQIFQLHSVDMQTGEIVNVAITRARVLERFANQVPCLIAIEACGGASYWARELTKLGHTVRLLHAKIVRPFVSGNKTDVTDARGIWLAVQQPGVKFVGIKSVSQQATLTLHRQRELLVKMRVMQINALRGLLYEFGATFPKGRNAIFKDVESKLESLQSQLPRSVADSLREQVQRIKALGEDIAKVEQRITLELKADPAMQRILKIPGVGTLTATAAIATMGQASAFKSGREFCAWLGLVPKQTGSGGKVRLGHISKRGDTYLRSCSSTGQGQSQR

SEQ ID NO: 252560 - protein, 464 aa, unidentified
MRDSRDKTSKPNREVEVEGLPVVRPNVAGIDLGSERHWACAPRVDGDGREVEQFGATTPELERMVKWLKERKVESVAMESTGVYWIAPHELLERRGLEVVLVNTRELSRVPGRKKTDRVDCKWIQRLHSCGLLLGSFRPKEQVCMLRTLVRDKANLVAEAGDWLRRMQKSLDQMNVRVHRAVADIEGVTGMAIVRAIVAGERDPRQLAKLRHPGCHKSAEEIAEQLSGHWREDHLFSLQQALKMYDAIQERITAYEREVLRKLAEMEREECRGQEPPKVNNPRKAKKIQQRGQEPLRQALYRISGVDLTGIDAIGVETVQVVLSEYGPDLSRFPTEKQFVSHVTLAPHQPMSGGKPVKKKKKRGSASSRVAAALRMAAVSLRHSNTALGAYYRQIARRTGADVAVFATARKLATLIYRLLRWGQPYLDEGVEAFENRHQQVRIQRLTAMAEDLGYQLTPQIAQA

SEQ ID NO: 252561 - protein, 412 aa, unidentified
MAVFCGIDWAEEHHDVALVDGEGTLVAKRRISDDAAGFTALVQLLADAGDTEDQRIPVAIETNRGLLVACLRATGRQVFTINPMAVSRYRDRYSVSRKKSDAGDALVLANILRTDLAAHRPLPSDSPLAQAIAVLARAQQEGVWDLTTAHNKPRSVLREYYPAILDAFADKRGGLLRSEARTLLAAAPTPHAAAELSTAKLRALLTRAGLQRNIDPEAYRLREILQREYLHHPQLVEEAFGRQALALLHQLDAACASAEDLAAAAAEQFDRHPDAEIITSQPGLGSLTGARILAEIGDDRTRFTDARSLKAYAGSAPVTRASGKAITVLHRRVKNQRLAATGYIWAFAALTASPGARAHYDRRKATGDRHIAAQRNLFNRLIGILHHCLQTRQRYDETTAFAATAIPTAAVA

SEQ ID NO: 252562 - protein, 349 aa, unidentified
MPSLSEIVDVVIGVDTHVETHTAAVVDARTGAVLDEMTVPTTPEGYQDLVDLADAHSPLRVWAIEGTGGHGAGLTRHLARGEEVVHELDRPERAKRRHGAKSDPLDAIRAAREALSRPLLGTPRSGGDRQAISVLLAARSSAVDAATVAQRQLFSLVIAAPEALRVKLRGKRLPEMVRVAARLRIHTGWDTETATTATTLRTLARRAQVLTAEARDLEKDLLALVKAWRPDLLAQPGIGPIVAATVLCAWSHPGRVHSEAAFAMLAGAAPIPANSGQVTTRYRLNRHGDRRLNRALHTIVITRTTCDPATRAYIERRTAQGKTRSEIRRCLKRYIARELFADLPRELLA

SEQ ID NO: 252563 - protein, 394 aa, unidentified
MKLVGIDVGKNSHHFCVMDKETGEFNVAPSSFSNNKEGFDFLINSLKPYSKKSILIGMEDTGHYHVALLKFLLSNGYTVALINPKTTDLTRKMEGGITKNDKLDTITICDVLDTPERKKQYRITKVDRFDLYEQRQLTRHHHNLKEELNVYCNRLQKSIDLVFPEFNTLFSSKYSIVYMNLLKTFGSAEAIASTDIRTIRKCFEIKGKGGRISLTPEKLKECAKNSIGISSEVETIQIKHLVSQIMLIKEQIAEIDKKIEEFSIKNNSPILSIPGISHFSGTSILAELGDIGNYSKPSQIIKFAGVAPYHYESSQYNAQHTGITKKGSKYLRKTLYQIILPVINNNPVFKKYYLLKISQGKGHRCAQGHCIRKLLRIIYHLLETGQSFDPALLR

SEQ ID NO: 252564 - protein, 378 aa, unidentified
MTTQLTASLKLYIGLDIHKKSWSVHIRSDISDHKTMTIPPKSEVLYDYVQSNFSDHEIYLTYESGCCGFEPARYLLNMGWHVTVVNPADVPTMHKQTHQKTDAIDCRNLSKQLQAGQLRGIYIPDQRQDYLKSLLRHRADLSSQLRSIKNGIKSLLLYHDMKIPDKYDNPNWSKEFIEWIAKLDWSESTIKMCMASKLRQLQFVHSEYLQMANELRAYCRKHHKTDYYLLKSIPGIGGYLAAAVLAEIGDLRRFNRSADFASYVGIIPSMRNSGSSEKIIGVTPRCRALLRTYIIESAWVALRLDPHMQAYYRKHTGKNPKSIIVKIAHKLLNRMLAVIKSGVPYQHNYALNNGKEIKSGAKQTTKQRGVVKSTSPSR

SEQ ID NO: 252565 - protein, 334 aa, unidentified
MFFIGVDSHKGHLAACAVDEVGRVTDERTFANDQQGHRAMLLWVSGMQQLRRIGIEGSSNHGSGLARLLLEMGEDVREVPPILTHRQRARTGRAGKCDPADAQAIAMVVAREGGLAPAAAGSSNADLKVLVDCRDQLIGERTRTKNRLHADLSILCPGYKATARSFASHVRRRRARALLEQATGVRSELALERLQRIEELDRQIVACEARIEHAVGESGTSLTRIPGVGIITAAKLLGETGDPRRFRSAAAFAAMCGAAPIPASSGYTQRHRLNRGGNRQLNRALHTIALVQTRVDERARGYVDRKRQEGKSPREAMRCLSRHLANVVAPRQDS

SEQ ID NO: 252566 - protein, 394 aa, unidentified
MKLVGIDVGKNSHHFCVMDKETGEFNVAPSSFSNNKEGFDFLINFLKPYSKKSILIGMEDTGHYHVALLKFLLSNGYTVALINPKTTDLTRKMEGGITKNDKLDTITICDVLDTPERKKQYRITKVDRFDLYEQRQLTRHHHNLKEELNVYCNRLQKSIDLVFPEFNTLFSSKYSIVYMNLLKTFGSAEAIASTDIRTIRKCFEIKGRGNRISLTPEKLKECAKNSIGISSEVETIQIKHLVSQITLIKEQIAEIDKKIEEFSITNNSPILSIPGISHFSGTSILAELGDIGNYSKPSQIIKFAGVAPYHYESSQYNAQHTGITKKGSKYLRKTLYQIILTVINNNPVFKKYYLLKISQGKGHRCAQGHCIRKLLRIIYHLLETGQSFDPALLR

SEQ ID NO: 252567 - protein, 344 aa, unidentified
MVIIGIDAHKRTHTVVAVDGQGRQLAVRTVGTTTSDHLTLVAWARQHGEELLWAVEDCRQLSRRLERDLLAAGERIVRVPPKLMANMRDAARSFGKSDPIDALAVARAALREPDLPVANLDGPEREVRLLVDHRENLVAERTRMISRLRWHLHELDPGWQPPARSLDRPRALNQAAVRLNGQPGTVARFARELVERCRILTSEIDQLEAEIAMLVERLAPSLLAICGCGPLTAAKIIGETAGIRRFRSNDAYARHNGTAPLPVWSSNRARHRLSRSGNRQLNAALHRIALTQAHWHPAARALLARRRANGDGGLEALRVLKRRLSDVVYRALLADANALPALAA

SEQ ID NO: 252568 - protein, 338 aa, unidentified
MPLYGGIDLHANNSVVVLLNEQDQRIYHKRLPNDLATIVEQLAPYHADIEGLVVESTYNWYWLVDGLMDAGYRLHLANPAAIQQYSGLKYTDDHSDARWLAHLLRLGVLPEGYIYPKAQRPIRDLLRKRAHLVEQQTANVLSVQNIILRNTGARLSTNRIKSVSQAEVEALLPDADQALAVSSALAVLHCLAEQIKTVETRVRTRIQSTPLYELLQTVDGIGPILAQTILLETGDIGRFPSVGDYTSYWRCVDSTKVSNGKRKGQGNVKNGNPYLAWAYAEAAHFARRFNLKVQRYYQRKQAQTNVPVAHKTVAHKLARACYHMMRHQVPFDAAKAFG

SEQ ID NO: 252569 - protein, 367 aa, unidentified
MVHSEYTVGCDAHKHFSLFAVLDEAGQLAQQIRVGHVPGAIGDFLSQFPDGTPVALETVGNWYWIVDEIEASGCIPLLAHAAKAKVMMGNIHKTDKLDAHGLATLLYLGKLPSVWIPPTEVRDERELPRTRMTFAGHRTRVKNRISSTLAKYALSLDGASDIFASRRRSDLEDLLQHLPAETARCTSQQLQLLDALNSHIKQLEDRIVERIQTTPTIQLVQTVPGPAKVLAIVIDREIGSIDRFTAPNRFASYCGLVPKLSASAGHVHYGRMVKQCNTYLKWAFIEAANVIVAHRHHANWRKKYVVHLFERNRRRKGHAVAVGATARYLAESTYWVLKKGEPYQEPPHWAPGGMKSPVSLSQGQVRG

SEQ ID NO: 252570 - protein, 337 aa, unidentified
MKFSGIDLHSNNSVVVVSDEEDRIVYQKRLPNNLEQIRAALAPYRDELVGVVVESTYNWYFLVDGLMDAGYRVHLANTTAIRKYEGLKYSGDFADAAYLAQLLRLGLLPEGYIYPREERAGRDLGRKRMQLVRCQTMQILAIESILARQTGGRMSSERVKRLTAQQIKELGLVPDVALALEANRAVSETLHRQIEALEKRLKERVKLRPEYRLLKTVPGIGETLATTIMLETGTIKRFARVGNFSSYCRCVDSRRESNGKKKGEGNAKNGNKYLAWAFVEAANFALRYCPEVKRFYERKKRKTNGIVAIKAIAHKLARACYHMLREQKPFDVQRCFV

SEQ ID NO: 252571 - protein, 346 aa, unidentified
MNLIVGLDVSLAMTAVCVLNARGQIVREAKVESNPDALLGFFRDLDACDPSVGLEAGPLSQWLYRHLREAGYDVTLMETRQVKGALKAMPVKTDRRDAEGIARLLHMGWFRPVHCKSLSAQEMRAVLSARKSVKKAALDIELSVRGVLRNFGLKMGQVAVGRFDARVRDLIADNPMLMAAAEPLLQARANLRRELARLERLLRDMVKADPPCRLMMTMPGIGPVVALTMRAAIDDPTRFRSSKDVGPWAGLTPSRYQSGERDVIGAITRAGDAGVRAALFQAATVMLNRGAKSWLTAWAQKVAGRRGRKRATVALARRIGVILHRMWSDGTEFRFTRTVDVNTAVA

SEQ ID NO: 252572 - protein, 326 aa, unidentified
MIIIGIDVSKDWLDIAELGATTQTSRVANTADGIAAFVTRLGALELTRIGLEATGAYHLPLLTALLEARLPVSLINPAQIKAYRQVRQGRNKTDRQDAILIARFTQTSAAELRLASAATPRQARLRELVGYREGRVRERTRLRNQQEAADWAGSAAVQTLLAADLAHVEQQLASVEQAITAILAELPETAVLLRFTGVGPRIVAVILAYLPVEVWGQVKRAAAYAGVHPRLAQSGRSSQSRLSKAGPPVLRRMLYLAALVAVRHDADLKRRYDALCARGKPPKVALCVIMHAILRHMMGALKDFYRQQSAQPAQPDQQDQHEPLAA

SEQ ID NO: 252573 - protein, 361 aa, unidentified
MKVQRTSIGLDVHARSIVACGLDGDTGEVFERRLCPDHREVLEWIGRLPAPVAVAYEAGPTGFGLARALTLAGIDCRVAAPSKLQRPAGDRVKTDARDAAHLARLLHLGQIVEVAIPTVEQEAARDVVRAREDCRRDLLAARQRVSKLLLRQGIIYSGGQAWTGKHQLWLQARRFEAAPLQWAYDTALDTLLATLDRRKRLDAWIDQLAAQGDYTPVVQRLMCLRGVSTLTAFALAVEIGDWSRLTGRSIGAYVGLVPTESSSGATRSQGSITKTGNGHVRRLLVEAAWHHRKPYQPWSPTLRRRWDAASPAARARGQLANRRLHDRWRRFDARDKRAGVANTAIARELAGWCWSLAVLDN

SEQ ID NO: 252574 - protein, 404 aa, unidentified
MDWASEKHSVIVVSQAGKIIEQFEIEHSALGWKKFREKLQAYGSIPFAIETSRGAAVEQLLEAGMIVYPLNPKSAQAYRERKAPSGAKDDWLDAWSFADALRVDGHGWKALRPEQALIKELRLLCRDEVSLIQQRTAFIEQLRHALAEYYPAALEAFEDWTSVSAWMFLERFPTPHELAKAGKRKWQNFLHSRRLWGSNEGTRRMEIFARAIEFAGSLPTVKAKSLLALSLVQMLFAIEKQLAIYRQRIEELFARHPDHELFGSLPGAGPKIAPRLLSEIGDDRQRFDDVQALQCLAGTAPVTKRSGKKRKYCHVHQRWACNKHLRHVLHLLADKSLSRCVWAETYYQFHRQKNQSHASALRRLANRWLKIIYKMWLDRTPYEPEFHHHNQLKHGSWILQLKQP

SEQ ID NO: 252575 - protein, 346 aa, unidentified
MERYVGLDVSLKLTAICIVDRTGKIEHEGVVRSDPEAIAAFIKSNAPHVARIGLETGATSTWLWTELNKLGLPVICIDARHAKAVLKMQINKSDRNDAVGIARIMQCGWYKEVCVKGLDSHAVKALLVSRALLVKIKRDLENQIRGLLKNLGLVIGPAKMNVFALRAAELTKERPELALAVTPLLTARMAIEQQIADLDRKVMKLARSNAQVRQFMTAPGIGPVTALCFLATIDDPTRFKRSRSVGAYVGLTTRRYASGEIDWTGRISKCGDKMLRSYLYEAANVLLTRVAKWSALKAWGIRLAKRTGLRKAKVAVARKLAVILHRMWIDGTEFRWSSKQTAVQTA

SEQ ID NO: 252576 - protein, 413 aa, unidentified
MQVVYERCCGLDVHQKTVVGCRLLSQQKGTVEKSLRTFATTISGLMELDSWLAEGQVKQVALESTGIYWRPVFNLLEGRYEILLVNAQHMHAIPGHKTDIKDSEWIADLLRHGLLKASFIPPKPIRELRDLVRTQTHLIQERSRHINRIHKILETANIKLSSVVTDILGKSARQMLEALIAGEYDPVSLAKLARGRMRPKIALLQQALQGRIEPHHRFLLKETLAHLDFLQQRVGQLEQEVAERVSPFEKSITLLMTIPGISRRSATIILSELGTDMAAFKSAAHLASWVGLCPGSHLSAGKRRSGKPTKGNPYLRSVLTQVAWVLTRMSDNYLSAQFRHLKPRLGAKKAVVAVAHSVLVVIYHVLAKAEPYQDLGADYFHRQDKEQQARRMVRQLETLGYHVELAPQEEVTS

SEQ ID NO: 252577 - protein, 325 aa, unidentified
MTQPMWVGIDVSGKWLDVGSHPQQETIRLPYTDAGLADLLVWLDGRVVIGVAMEATGGIERTVAYALADAGHQPRIVNPKRVRDFSKAISPVKNDRIDACRIAHFAATVAVVPIERDKVREQLDEMVTTRQFLMNQLIAARNHARLLRVPAMRAHMASQIKAMRTRMAAVERDIEGVIKADEAIDRDRKRLCTMPGIGPVVGAALVAWLPELGRLSAGKVAALVGVAPFDDDSGDRSGKRHISGGRIGLRNLLYMASLSAIQHNPVITAFYQRLIAGGKLKKVALVAVMHKMLTRLNAMQRSGQVWNAGHVCVRVQLPTAIATLA

SEQ ID NO: 252578 - protein, 428 aa, unidentified
MPKSKAQSVIQTDDDALYYERCAGIDVHKKLLVVCLRIGRKTETREFGTTTGEIREIVAWLKENDCQMVAMESSGPYWKPLYNIFEQENLPAMVCNAHHIKNVPGRKTDWNDAFWIAKCLSQGLLKPSFVPDRNQRELRDITRFRKSQIEERSRNINRLQKFLEGANVKLGSWLSDIEGKSATQLLELIINKPDFTLDDVKSRMYGKMKSTPQEIFAALEGYITPVQRTFFAHVMNVIKEQTAQIEKTDTMIKSLLSQEQKEAVKALDVITGIGEVSAEVIIAETGTDMSHFRNQHAFSNWIGVAPGNNESAGKRKSGKTTHGNKTLKSTLTQCAKSAKKVKNSFFCAQYNRLVGHRGKNRATMAVAHSLAIAIYFVLQGAEFKDLGADYYNQFNREKKINSHIKQLSKLGVNIPDETLKIVMGRPPD

SEQ ID NO: 252579 - protein, 373 aa, unidentified
MPKYSTAFGMDVHLRSTTVCALDADTGEAVTRRFPGNPWGEIAGWMDGFPGPSLAAYESGYLGFAPQRELAGLGVECVVAAVSKIPRSAADSASKNDRNDAARMAKAILAHDISPVWIPSPEVEGIRDLAGAYDGATARLATAKQRLLAFLAKRGFVYGGTAPAGNPRKYWTYDFLRWLDKVRPEDDGGVRTLAALRNEVEAAAEARADLLSEYRAAVDASPIAAEVAALQSIKGCAFALAAAFSAEVGDFTRFRSGRQVTAYFGLAPSQRSSGDSVRLGGISGAGNALVRKLAVEGSWCYAAARHQPKLMPRDTGVPLEIRMHGRKGSDRLLRRREEMLARGMPAAKANAATAAELVRWLWALGMMCREGAE

SEQ ID NO: 252580 - protein, 433 aa, unidentified
MQDVHDEPLFCERVAGLDIAKAEVEATIRVPSDTAPGRRQQETRTFATTRRELESLGDWLACWGVTKVGMEATGDYWKPVFFLLESRGFDCQLYNAAQVKALPGRPKTDRADSIWLARITERGTVASSFVPPEPIRRLRTHTRYRRHLTQARTAEKQRVEKLLEDGHLKLSSVISDIHGVSGRDMLDAIAAGQRDPRALAQLARGTMRGKIRRLEEALDCSFFTAEHAAVLAMMLAAVDHYTTQIEALTAKIEELIAPYLSQVDQLDAVPGIGPVCAQDIIAEIGTDMTVFSTAAHLVSWAKWSPQVKRSAGKRKGSNATGRGNPYLGAALGEVSISAGRTQSFLGARYRRLARRMPKKKALVATGNSALTIVHALLSDPEACYQDLGADYYEQRMHARRQARNHLRSLERLGYKVTIQAVNPDTSELLAPTA

SEQ ID NO: 252581 - protein, 369 aa, unidentified
MADRITYVGLDVHKDSIVVAVAAGGLRGEVREYGRIANTPAALDRLLRKLGGDGMVLRFCYEAGPCGYGIHRRLSARGHECVVVAPSLIPKRAGDRVKTDRRDAASLAKLHRAGELTAVWVPDCRHEAMRDLVRARLDAVHSLRRARQQLSGFLLRQGCHYGRPAWTRLHRRWLAGLKFEQAVHHIVLEDYIAAVEAAEARRNRLTAQIEAMLPDWTLAPVVTALQTMRGMALVNAATLIAELGDLSRFANPRQLMAYLGLAPSEHSSGTSVKRGGITKAGNAAARRLLIEAAWSYRFPARLSRELLLRQERQPRLIRDIAWKGQLRLCARYRRLARTGKPANIVTTAIARELSGFVWAIARQATVTTD

SEQ ID NO: 252582 - protein, 355 aa, unidentified
MTSAKYVGMDVHKETISIAVMNSMGKLLMESIIETKAGTILQFFAGLRGDLHVTCEEGTWAAWLYDLLKAHVTEIIVCNPRKNALLKDRNKSDRIDARKLAELLRLNYLKPVYHGEHGLRMLKELSRTYLAISKDLVRVMNRLKALYRGWGIACSGRSVYAPSYREAWLKKIIEPGVRLRAEYFYQQLDTLQRLRREVRRNLLIESRKHSATKMLSQIPTIGPIRSAHLVALIQTPHRFRTKRQLWAYSGLAVETHDSAQFRYVDGQLFRSRKPQQLRGLNEDHNHDLKNIFKGAAQKATGGTGPFREFYEGLLAKGIKPSMARLTLARKIAAITLAVWKKGVRFDPEQLKPQAA

SEQ ID NO: 252583 - protein, 363 aa, unidentified
MEIYRTSVGLDVHARSVVACGLDRSTGEVFERRLTPDCREILEWVGSLPGPAMVTYEAGPTGFGLARSLVGAGIECVVAAPSKLQRPAGDRVKTDVRDARHLARLLHLGEISAVTVPSVEQEAARDLVRAREDCRGDLMTLRHRLSKLLLRQGIVYYGGKAWTGKHELWLRTHRFDIRGLQLAYDTAFDAMLAALDRRDRLDEAIAEMAADSEFTPVVTRLGCVRGIATLTAFGLATEIGDWHRLDGRSIGAYLGLVPTENSSGASRSQGGVTKTGNGHARRLLVEAAWHHRTRYRPGPELRKRWDAASPAARARGRPPTGACTPAGPASTNARNAPWSPMPRLPVNSPAGAGHWLSSTTNNP

SEQ ID NO: 252584 - protein, 416 aa, unidentified
MKKNTKSSMKKEPSAKRAKAQRPVPREPKEVLAELVEKLQGKLAVKATSASPTAAGARGELSPNLNRLTVGLDLGDQWSHFCILGFEGETLSEGQLQTREEEVAEFFQALPGARVVMEVGTHSAWMQEIIAGEGHEVVVANPRLMEGSKRRKRKNDRIDAKKLARLGRVDPQSLYPIRHRSREVRQDLVVLRAREALVAARTELINATRGLVKSMGTRLPKCSSESFGHKVKDAIPEKVREALLPLVQLADALSACIQSYDQKIAELGSEKYGHTKLLRQVKGVGPITALAYVLTLENPEHFAKSRDVGPYLGLVPKQEDSGESQPQLGISKTGDTMVRKLLVGSAHYILGPFGPDTDLRRYGLRLCERGGKNAKKRAAVAVARKLAVLLHRLWVSGEVYEPLGYAASRAIVQPAA

SEQ ID NO: 252585 - protein, 369 aa, unidentified
MKKDTIFVAIDDSKRTLVLGILRPGADAPETRSIPNEPRHVQRLFARLKREGPVMVCYEAGPSGYDLYRQLTALGVACQVMAPALTPRKPGDRIKTDRRDAGKLVRLFRAGELTPITVPDEAGEAARDLLRCREDVQEDLLRWRHRLGKFLARHGRVYREGRNWTQRHWTWLRSQHFTLPTLERTVTEYRCAVEQLLARVADLTREIAALAETAPYRERVGWLRCFRGIDTLAAMTLLAELGDLQRFPHPRALMAYLGLVPSEHSSGDRTQRGSITKAGNTHVRRLLVEACWHARHAPRLGAALARRSQGQPPGIRAQAWQAQLRLHRRYRHLVGHGKRPPVAVVACARELVGFLWAALTQTAPVARAA

SEQ ID NO: 252586 - protein, 342 aa, unidentified
MKKMVKQVVAIDVAQKELVVCLGRMSDDWSPELYAGKTFANTAKGFESLQVWVSKMTEPEVALRYVMEATGVYHEKLAYYLADRGYNLSVVLPNRISNYFRTLEVKTITDKTASEAIARFGLERKLDDWHRPKSIFKRLRQLTRERDQLVGERTIVKNQLHAEQAEAEPGGSSVVRMKKRIALLDKQELEIKQEIQVLVKKDEQTSSTVKIICTIPGVGLLTAATVLAETNGFELIRNKRQLASYAGLDVKEKQSGTSVKRKACISKKGNKYLRKAMHLPALSVIRHDHRYKAVFARLVSKHGIKMKAAVAVQRKLLEMIFTLYKTNTTYDREYLNKKIESN

SEQ ID NO: 252587 - protein, 336 aa, unidentified
MMYVGLDVHKRVCYGTVMTHDGEVVKRARFSNDPEGLEEFMEGLHEAQVAMEAGYCWQPIYDRLEEAGHDVRLAHPKEVKALAKKKTDKTDSETLAHLLRADLLPESYVPPRDIRELRDRVRRRAFLVGMRTKIKNRIHAELAKRRIRLGVSPWTREGRELLRGLGLEAVDQVLPVMAALDRQIAEISLGLKRMCGETPQARLLTTIPGVGYYIALLIVSEIGDVSRFPDSESLCSYAGLVPTVWQSGGSTHHGGITREGSGWLRWALTQAVHAHLRHETNLTRFYRRLAGKKPNQVAVMATARKMLKAVYWMLRNNEPYHPGPGVVDPVRRRREI

SEQ ID NO: 252588 - protein, 404 aa, unidentified
MRHVIAFDISMGKSYMVIYNAQKQCIFEKEIKHSKSEFEELQKKIHELTNETGKSPEIVFEATGIYSRQLERFMQDNQYTYCLLNPLEAKLQCDSLRIHKTDRSDAHRLAITHFTVTRRVSHGTTDHLFHQLKSLSRFYSELDGELSMIRSRMHKVIQLTFPELEKMFTSKSDLFLNFVQLFPHPDCVLNLSKTIIKNRIRANTNKKISTIMAEKKAIQILEIAKNSYPAVSQNDVLCDQLKVYARRYQELLHQKEHCINKMVHLAEQRAEYSIILSLPGIGPNTAVRLMAEIGDITRFANNKQLNAYAGIDIRRFQSGKTFYKDKINKRGNKHLRKLLFLIIQNMIKQRRYGRNHIIEYYDKLKTQPYNKCHKVASIACVNKLLKLLFHLITHDIHYDYRLTA

SEQ ID NO: 252589 - protein, 418 aa, unidentified
MNESFRWIVGIDWAKELHTVTLQDNEGRSVAERKLAHSGADLAAFCSWLIEKTGAEPGEIAVAIETPRGPIVDMLLERSFKVFSINPKQLDRFRDRFTVAGAKDDSRDAKVLARSLCSDPQAFRLLRIEDALVIELRGWLRIHDEFTQDRTRLSNRMGDQLWRYYPQIGEVTDDLAATWFLDLWELVPTPGEAARLSEKKVARILKSHRIRRFAADEVVQILRRQPLAVAPGTTEAATAYIRSVVARLRVVNEQLKEADRRLEEITTAIEAKAEVEPGQICEQRDVAILRSMPGLGRTSVAALLSEASEPLRRREYSVLRLLTGAAPVTRRSGKSRYVVRRLACHRRLRNALYYWAHSAVQHDPVSRKRYEALRQRGHGKARALRSVGDRLLYVLCTCLQRQTLYDPNVKSTQSALAA

SEQ ID NO: 252590 - protein, 340 aa, unidentified
MNYYAGIDVSLEASSVCVIDASGKIVREAKVASEPAALIAWLGSLGLELTRIGLEAGPLSQWLYAGMREAGLEVELLETRHVRTAFKIMPVKTDRKDAQGIAELMRLGWFRPVHCKSMEAQETRAMLTARKLVQKALHEVEMSLRGVLRGFGLKVGKVAPARFEARIEELVEGHPNLAVIAASLLAVRATLRREFNGFERRLRAIARSDTRARLLMSVPGVGTIVALTYAAAIDDPARFTSSKTVGAHFGLTPTKYQSGETDRSGCISKIGDGSVRAALYESAHIIITKPIKGCTNLKSWAMRVAKRAGMKKAKVALARKLAVIMHRMLADGTTFTTQPA

SEQ ID NO: 252591 - protein, 526 aa, unidentified
MSRNFRANRRRRHSRSNPRNTHSVQKARGVIGHRVKQVGGEKFAIVCVDPAKHRSEWMMADYFGNLLIQPQTLEHQAAFFKLAVMQVREAQQQHGIQDTIVVVERTGNYHLAAKRAFADAGFETRVLHPFATKQYRMPADAGQKTDGNDLKAQHRAAVAGFGLVEWELESPYRELQLRARHRRNLVEQTSALACQIREHLHLAMPGFARLFDHLFDHKSALAIARRCESPAAVLKLGSAGLSRHLREQKVRHQPRTIDKLLAWASQAAGESIQDGPLHHAIWTDLEGLFQHCRQRIVEVERRLARDLVQTPYVRLLAMPGVNVVLTAELAGEMGPMTSYANANQITGRSGLYPSRYQSDQTDQNGPLVRQANRRIRCALMRIAESLACHCAYYRGLADTDRARGLHTKASRVKTANKFTRVAFACVAGDEPMKHPAFQKPDSILEKLRQFHHVHKTPMDQVLADLQATVEQLPYHTRKREAEVVAAVLRKRASRTRRTVAIGDLLPAVLARLETKPTEQTETRDRS

SEQ ID NO: 252592 - protein, 326 aa, unidentified
MKSILGIDIAKLTFQAALLVDDEKTLSKNFPNTAKGFAQLDAWLRNRKVTTVRACMEATNSYWEALAHHLYERGHQVAVVNPSRPKAFGQSEMLRTKNDSVDAALIARFCKVQRTELWSPPAPEERELQGLVRRHASVLEMRQQERNRDQVPGLPKAVKSAIVKHLRDLDRQAKDLERMMRMLIKEHRSLQIKRDLLTSIPGIGDVSAARLLAEIPNMLEFKSAKEIAAFAGLSPQHFLSGTSVHGKARMSKTGSSALRRQLFFPAVTAMHHNPVLSVFAARLLANGKPRMLVVGAVMRKLLVLAYGVLKSGVPFDASYGQKLALS

SEQ ID NO: 252593 - protein, 348 aa, unidentified
MRFYTTQHAFYCGVDLHARTMYVCVLDQAGDVRLHRNLPTQPEAFLRAVEPFREDLVVGVECLFCWYWLADLCAAETVPFALGHALYMKAIHGGKSKNDRIDSYKIAALLRGGTFPRAYVYPREMRSTRDLLRRRLYFVRKRAELLAHIQNTNTQYNLDPIPPQLDRPGIRKGLLEHFADEDSVQMSIAADLAMIDGYDHAIHELELFLAAAALQHDRARFQLLRTIPGIGKILGLTLLYEIQDWRRFPGVGNFLSYSRLVRGDRESAGKKGKPGGAKMGNVHLKWAFSEAAALFLRGNPPGKKLFTRLERKHGKGKAMGVLAARLGRAVYFMLKRHEPFDLKRFVAA

SEQ ID NO: 252594 - protein, 363 aa, unidentified
MEQQNRRFVGLDFGVRTYEMCMYDENGKIVRSNGLTTPEGRQKLYSKLKPTDRVGIEMCSLTMKVAREMKSAVGCDVLLLHAGKLAVIYKSLKKTDKEDALKLARLVKTHEDEELPIVPLPSEVDLKRRRMIREAKQLRSDRTKEVNRLHALFVECGITDIKKKNLATKTSREKSLQLLEETQRRQAERICQVIDLVETQIAEVKKEIAVEVENDSNIKNLQTVPGVGELTAVAYSGFVGDGSRFDNGAQVSNYLGLVPKLDISCDQVHYGNITKTGNPEVRSLLIMAAWSHVRFAKEDTVLKSKWQYLTLVRGMSKKKAIVCIARKMAEMMLAILKSGKPYSPKKFSVAQFSELAEKALKSA

SEQ ID NO: 252595 - protein, 396 aa, unidentified
MLYLGIDIGKNTHVASLIDDNAKLLFKAFSFGNTTEGGESLITKLSSHVPSISEVEIGMEATGHYWLSLYSFLVGKGYVIHVVNPIQTDGWRKGTEIRKRKTDIIDSVLIAELIRYGDFLETSLADENTMSLRNLTRFRHYLVASIGDLKRKAICVLDQVFPEYQSVFSNIFGQTSKELLLQLQSPDDFQSISAERLEDILKSITLKKFAKNKISTISELAANSFGLSFCRDSFSLQLKLLLEQIKFIEAQVADVEAEIRQLLERINSPITTIPGIGPITGATILGEIGDITRFSTPAKLVAYAGIDASVSQSGMYQSTNNKMSKRGSPYLRKALFQAALVASNCDPTFKAFYQKKRIEGKHHLTAVGAVARKLCYTIHAILKNNCPYQVQTVSSD

SEQ ID NO: 252596 - protein, 362 aa, unidentified
MEHELHYIGIDTAKEKLDVDVLRPDGRHRTKKFANTTKGHDELVSWLKGHKIDHAHICIEATGTYMEPVAECLYDAGYIVSVINPALGKAFAQSEGLRNKTDTVDARMLAEFCRQKRPAAWEAPHPLERALRALVVRHQALTDMHTQELNRTETAREVQRPSIDAHLLWLEAELKRLEKQIKDLTDDDPDMKHRRKLLESIPGIGEKTSAVLLAYIGLKDRFAHARQFAAFAGLTPRRYESGSSVRGASRMSKAGHVSLRRALYMPAMVATSKTEWGRAFRDRLAANGKKGKVILGAMMRKLAQVAYGCLLYTSDAADEEDSGDHGGRRSIKKKKRGTTSPGASTSKKIINSVMYMAVLTRQ

SEQ ID NO: 252597 - protein, 348 aa, unidentified
MVLIGCDFHPSWQQVSWLNQETGETGDVKLAHEAGSAEKFYRQFPLGSRVGLEATGNCQWFLELLAKLRHEVWIGDAAKIRASDARQQKHDKRDARLLLQLLAENRFPRIWAPSREQKDLRQLLIHRYKLVRIRAQVKNGMQHLAMNQGMLRKRKLWSVAGQQALRELPLALWASRRREDLFRMRSELDAKIILLDEAVATAAEQDKGARLLMTQPGVGPITSMAFVLTMGDVSRFKRGKQVASYLGLIPREYSSGGQQRLGSISKQGNRFLRMLLVEAAQSVVRHDESFRNEYLHRCHGKPKGVAKVAAARKLAIRLYWMLRSSTKYPEIVHVESSSRVPLVGASLP

SEQ ID NO: 252598 - protein, 412 aa, unidentified
MLVHAVPVTSSTVVVAVDVGKTCVALSVTDTARHRLLGPVEFAMTAPALSAVVKRIVKVLPETDASVKIGVEAAGHYHRPMLDASWPPGWEVLELNPAHVAEQRRVQGRRRLKTDAIDLDAITELVLSGRGIPLTAHDEVIGSLQAWSAHRTRRVLTRTATKNQLLGQLDRSFPGLTLALPDVLGTKVGRLVAAHFADPKRLAALGSVRFVRFAAARGVQVRHSIAQRLVTAARDALPTREAEVAREVLAADLALLAALDVQVQAAETAIAGLLPVSVFATLGSVPGWGTVRVGNYGAAVGDPSRWPGPAQIYRASGLSPMQYESAGKRRDGAISREGSVALRRALVDLGTGLWLNDPGAKTYAAGLRARGKKGGIIVCALAHRAGKIAFAMTRDHSTYDPTLWTPETGPTR

SEQ ID NO: 252599 - protein, 407 aa, unidentified
MNRYYLGVDWGDTMHAVWVCDDTGEKVKKLEVKQTPEGMSEFGRWLHERTAKGIELWAGIEKPEGQIVDFLLDHEVVVYPINPKAVDRYRDRIRTSRSKCDMFDAYVLSEFVRTDYAHLHALKPSSEQAQELKILTRDYQRLVRQQTRLINQLKATLKEYYPRPLEVFGDVTTKAALDFLKTYSTPESLRKLTRKQWQQFAKTHALNKVPPEEFRELLRKPQLPIPAHVVRAKSRLVGVLVEQLKVTVGAVDKYREVVEDFFASMPAAKLTETLPGGKSGTTVPTLWAELGDAEDRWKSFKHLQAQAGAVPVTEQSGRSQFIHFRFACNKRMRYAVDWLAFISLRQSEWAKAYYQTQRNRGHSHHQALRALGAKWLKIIFVMWRDNAQYDENYHLANIARDHLRQVA

SEQ ID NO: 252600 - protein, 314 aa, unidentified
MDISKLTFDATAIVGNAEYSAKFDNDSKGLDQFSDRLKSLGCQNLHICMEATGNYYEEVADYFAQYYSVYVVNPLKISKYAESRFKRTKTGKQDAKLIAQYCRSAQESELVKRQKPTDEQYRLLRMTAAYAQIKSECAAMKNRHHAAKDEEAAKAYAQIIKAMNEQLEVLKEKIKEQTEKPNCKEGVKRLETIPAIGRMTAAVLFHHLTSSKFETSNKFAAFAGLSPQQKESGTSVRGKGKLTKFGNRKLRAVLFMPAMVAYRIRAFPDFIKRLEEKKKPKKVIIAALMRKLAVIAYHVHKKGGDYDPSRYKSA

SEQ ID NO: 252601 - protein, 315 aa, unidentified
MAMPVSAIKPIVGVDVAKSELVIYQAELELLETLPNNKPAIKKWLKALPAPVDVAIESTNIYHLEFADLAHEAGCTIYMVGGYELSHYRKGVKVRAKTDALDAKLLARYLKNEYEELHPWIPPSPLYRCLLSLFRRRAALVQARVRLVQSWTNEPLLKAAFAEQVASMQRLEGLVEKMINDRLKEAGLLAQLKRCMKVEGIGFLTGARLIAAFQRGDFRNADAFIAFLGMDLRVSQSGQKDGRRSLTKRGDPEARRLLHNAAMSASRTAAWKGFYEEQRAKGFSTTQALVILARKLARIVFALLKGQSEYQPKAG

SEQ ID NO: 252602 - protein, 432 aa, unidentified
MRKTSKSEKEVENVAAYVGIDWADNAHEVRMLIVETSQVETMKLKQEPESLREWVERLRERFNGRKVAIVVEQRKGALIYALMSYEFLILYPVNPATLARIREAFNVGGTKTDPTDAELLLDLIRLHRNKLRAWVPDDADTRLLQMLVEERRRLVDEVTRETNRLKSTLKQYYPQALEWAGELNEEMALDFLTRWPTLGSIRRAGSNAIEKFYRDHRVRSEEKLERRLKSIKEARELTSDQAVLIGSKTKALVIVQLLRVLKKSIGRINKQIDELFEKHPDHQIFSSFPCAKKVLAPRLLAAFGSDRTRYESASEIQSFSGIAPVTKRSGKSKSVNKRLACPKFLRQSFHEYAGQSIKQGGWARSYYRELRQRGMKHHAAVRSLAYKWIRIMYRCWQNQEPYDETKYIASLKRRGSPLTAALSAQAGFKAAV

SEQ ID NO: 252603 - protein, 418 aa, unidentified
MSYKVAAIDIHKKVLMVVVATAGEEVADPAGEALEFECRRFGSGASERQQLTRWLQEHAVREVVMESTAQYWKPVWLDLEPHFGNLHLAQAYSNRAPKGRKNDFRDAKRLARRLLADELVLSFVPAAEQRTWRTVTRGKLQLVRDRVRLQNQLEAVLEEARIKLSSVISDLLGVSGRRILQAMADGETNPDRLAELGDDRLQCSQAELTDALSGSLEPIHRELLKLYLERLKLLDEQIGKLDQMIATLLKQQQDAVIRVAEVPGFGVDSAQQLIAEMGTDASAFDSAGNFASWAGLCPGTEESAEQNHSSRSAKGNKFVRRILTQAAQAAVKKKGSHFQSLFHRLLPRLHYSGAIWAIAHRLGRLVWKILKEGVSYIEQGQDSDPKTKKRRATRMLQALRKLGYTVTITPNAPQSVHP

SEQ ID NO: 252604 - protein, 421 aa, unidentified
MVGQVVRDEVLYLRAAGVDLGKRFLVACVRVPNPKRAGTWSLETERFDTTSAEIRRLRDWLVERRVEVVALEATSDYWRAVYYTLQESLHVMLVNPSHLRGIRGRKTDPSDAAFLARAAASGMVLGSFVPPRAIRELRDVTRRRTEVIADRGREVQRLEKELEDTGMKLTSVLSNVSGVSSRKILHALIEGERDPRILADLTVGTARRKIPALVTALDGTFTAHHAFMCRHYLDQIDHLGELVTVLDARIAAIIAELARDDDIANLDTIPGVARTSAEIIIAETGGDMAHFATAGRLASWIGVCPGMNESAGVNKSGATRRGNANLKRVLGTAAMAAVKQKDSYYGVYYRRLAARRGAQRALVAVMHKLAIAVWHVLHDHVTYRDLGADHFTKRDPQRAMRRMTKEANALGLTIRFDPIGG

SEQ ID NO: 252605 - protein, 410 aa, unidentified
MEKILRYCIGIDVDKKEFKTNFRSLDSFSNQKTIASRTFSNSKKGFDSFDSWITKNRKDPDVRLVLTMEATGVYHENLAWYFHGKGFNINIVLALKAKRYLQSLGLRSKNDQIDAQGLATMGLQQELEIWRPGSIELLKLRSLTRQHEAFQQTKTTFSNQLEAITHAAVSDPLVHKSLKSMLKNLDSELEKLEDKICKIVKEDYFLAAKWNLMQPIKGLGMLTFAVVAAETSGFALFKNAKQLTCYAGYDVVENQSGGRQGKTKISKKGNAHLRRAMFMPAFNVVRYEEGSFADIYQRVFDRTKIKMKGYVSVQRKLLCLMFALWKSDQPYNPKHQFGYSREEETEVPLSVSVPEGTEEKLISEKTGKMQIAVKQCSPAKGKATLDGLSGKVSTNSPLSVYAKILEKSYD

SEQ ID NO: 252606 - protein, 346 aa, unidentified
MEHYAGIDVSLELSSVCVVDAQGKIVKETKVSSEPEALVSFFKGLGFPMKRIGLEAGPLSQWLHTGLAQAGFETVLLETRHVKAALSAMTVKTDRKDARGIAQLLRMGWFRAVHAKSMGSQEVRALLVARKQLLGRLIDVELSIRGILRGFGLKVGPVTRKEFEARIRELVMGQATLERIADAMLSARAALKAEYEKLHKAVLAIVREDAVCRRLMTVPSVGPLVAITYKSAMDDPNRIVKSKAAGALFGLTPKKYQSGEKDVTGGITRTGDEMVRTALYEAANVLLSRITRFSKLKRWGMDVAKRRGSKRAKVALARKIAVILHRMWVDGTTYRWAAAEPIATQA

SEQ ID NO: 252607 - protein, 391 aa, unidentified
MSMYFVGIDISKYKHDCCIISAADQQIVSKFTITNDKDGFEQLLISLNSLSNPEDIKIGFESTAHYALNLELFLENANHSFMEVNPVLIKEYKKSTTLRRTKTDSVDCESIARWLMTVEYKPHSKGFYHAYSLKSLTRLRDRLIRQRSFYLVKITNVLDHTFPEFKPFFNERLSKTAIYLLENYGSAEKMAHMNSVSYDKLRCISRGKFSIQQFLRLKELAANTVGVNNSIFDIELNSLLTLYNSLCKEIKNLEAEITRLIEEVHPHYMSIPGIGPISAAVIYAEYGDISNFSNPSQMLAFAGIEPGINDSGTESHGGRMVKHGSSQLRYVLLNACLPLIRFDLTFATYYAKKRAEGKKHRVAITHVAKKLIRVIYALERQDVDFNAQKLR

SEQ ID NO: 252608 - protein, 338 aa, unidentified
MIWIGIDAHKRVHQAVALSVDGVLGQRVIANTAVGWTELIHWASSWPERLWAVEGSGSLGRGVAQFLARRDERVYEVNPRWTAQRRRGLRRPGKTDALDAQAVARLLREEGESLPLVQAEEVAVASLQLWSRLRDDLVLDMSRLRNRLHALLLLCDPEYRHVIRSLRSRRGIQAARTYAAPGSGVRQVADQIALLMDQELELRANIEAGVRENFAPLLGIDGVQVIVAAGLIAELGMPRPGFGVPQIAVLAGVAPIEASSAGEVRHRLSRRGNRKLNMLLYLIALAQERAYAPAQAYMARRQQEGRTKREARRALKRHLVRRIWHQWRACWPRAQRPI

SEQ ID NO: 252609 - protein, 318 aa, unidentified
METIIAQNVGVDISKATLDVHLHPAGIARQFANDANGIKALIGWLGDRDIVRIVFEPTGPYHHRLERRLGDAGLPLAKVNPLQARRFAQAAGAHAKTDAIDAAMLARMGALLTPPVRQITSEAIDDMRELHIARLALIKDRTAGKNRQHACRSPLLKRHAAQRLAQIDRQIAAIDAALNSRLQTDPELVSRFEILISIPGVGALTAITMLIEMPELGQLESKQVASLAGLAPQARDSGQYRRKRHIRGGRAVLRQALYMPALVATRFNVDLKAKYQALVTAGKPPKVAITAITAIMRKLIILANTLLKAERKWINKAA

SEQ ID NO: 252610 - protein, 406 aa, unidentified
MNNAVGIDVSKGKSMVAAVNFAKEVTLTPREFEHTETGLERLIYNHLLTLDGGVRVIMEATGRYHEPVVAALHEAGIYVSVVNPLIIHDYGNNSIRRVKTDRKDALKIARYGIDNWGELREYTPVDSMRQQLKLTCRQYNFYMKQVIQQQNNLVSLSDKVFPRVNEIFSSPARKDGRQKWVDFFATFWHCDCIARVSESAFVERYRKWCKRKGYNFSADKAFDVYVDGLGHQTTLPKNAYAKLIVTTACSQLTATLKGLMTIKAEVLRIAALMPEYECVKSLYGVGDITAAQLIAEIGDVRRFANRSSLIAFAGVDPSTNQSGKYESKSGKATKRGSSHLRKTLFQVVSTHLKRSPENEAVFQFIDRKRAEGKPYHVYMTAGANKFLRIYYGIIKPFLIALDSENN

SEQ ID NO: 252611 - protein, 426 aa, unidentified
MNGKDCIRLEEFRQLKKEIRGSKEYLIVGIDVAKERHHAFFGTATGKTLLKRLIFDNTIKGFRKLLEQVRAIQVAQSLPRVVFGLEPTANYHKPLGEYLIKCGGMVVLVSGVAVKNNRKSLDGRWDKNDAKDAANVADLISQGKCLFYEYPETRLRDLRSLLSLKRKLKKQEHSYRVRIRNHLLAQYFPELDKYSGRAEVESIVRWCLDPSRIAGLENDQFMRLVAPGRKTLAQHHRLHTIQELAVNSIGCGMGEGATFEAQVLVDGLRQIRETIKSTDDKIEEICRVFPEYTCLLTIPGFGPDVSSKVLGALGNPHRFQNQKQVLKTAGLDLSADRSGKGSQTAVPIISKQGKADLRYALYQAALVASTQNIDFMRYYTQQLQGREKEQGIKTKRWVKLSAKLLIIAWTLMKKKESFDPRYFNQV

SEQ ID NO: 252612 - protein, 355 aa, unidentified
MQKYKVSFKGQNIYVGIDVHLKTWHVTTLTESGYKYSFAQHADAKELFDRLNKKFPEAHFMSAYEAGFCGFSAHYALIEQGIENIVVHAADIPTTGKEKAMKTDAVDSEKIAWALKRDELTGIYIKDKRYMDDTNLMRLRQRFIMDLSRQKNRTKHLLYTQGVTYPERFRNCRTHWSRNFMKWLREEVELLSEQKLSLLLLCEQVENTRKAILKVTREIRRLSTTDRYKENYDLLITVPGLGLITSMSMLTELDNDIMRFPNERSFVSMLGLIPTCHDSGEKKVSGEKINRGNKHLGPLIVEASWVAIYRDYQLGAYYSNCCQTMKPHKAIIKVARKLACRAYAVLKTKTKYELL

SEQ ID NO: 252613 - protein, 457 aa, unidentified
MPARGKQPRSGAGSPAHTIDPNAAGVDIGATEIYIAVPTDRDPHPVRKFSTFTEDLLAAADWLKQCGIKTVAMESTGVYWIPLFQILEAGGMKVCLVNARHVKNVPGRKSDVCDCQWLQHLHSAGLLRASFRPEQQICAVRSLVRYRDSLVQLSAMHLQHMQKALDQMNLQLHHVISDLGGKTGMAIVEAIVAGERDPHQLATLRDPRTRASKETIAKSLVGDYRREHLFTLRQSLTGFRQNGQLIADCDVEIESLLKEFSSGDGPGAEAVPEPQAELKRKPRRNEMNFDLRTQLHRIFAVDLTEIPGIDTLTAHTLFTEVGRDLSKFANVAAFTSWMGLCPDNRVSGGKILHAQTRRVNNRMAKALRMAAQALSRSHGWMGQYYRRMRAKLGGPKAITATAHKLARIIYHLLTTGQAYDETVFAQQEAQNNQRNEKRLRHQARKLGFELTLIPTEV

SEQ ID NO: 252614 - protein, 344 aa, unidentified
MEHYAGLDVSLEQTSVCIVDAQGGIVSEAKVGSEPEALIGYLRTHELRIARVGLEAGPLSQWLHAGLTAASFETVLLETRHVKAALSAMTVKTDRRDARGIAQLLRLGWYRPVHAKSVSAQEVRSLLTARKLIQAKLLDIESGIRGVLRGFGLKVGPISRGRFDARIRELVDGQAILETVIGSMLAVRATLDAEFKRLHRELLALVRADPVCRQLMSVPGVGAIVAITFKSGVDDPTRFRRSRDVGPHFGLTPRKYQSGELDVTGSITKVGDRMVRTALYEAASVMLTRTVRFSRLKAWAMGVAKRRGTKKARVALARKLGVVLHRMWVDGTTFRWSSEETAIA

SEQ ID NO: 252615 - protein, 453 aa, unidentified
MPAGKDKYMKYPKVLTMLESIPYLSVGLDVGADFTWMSIMLPNGALTGKPFKILHSDPASRDLAVTKIKEAQEMYSLESRCFLESTGIYHIPLLYFLRDKGFDCSVINPIITKNSTNMNIRKLHNDKFDSKKAAKVGLDASLKTSIVPDDSVIDLRNLVRDYYYFKDLQSAVVLKLNAELKVSFPAYLKVFSKITTQCSLKLLEAYPLAADMLAAPKDEIVETIKSTARFGEKYALSKYDAIYAAAEDAAVFGRALKSNAVRIRLYISIYKEYQKHLDDLLVALHESVDKLQGTSVYGRIDLLQSLRGVGFLSAVVLIAEMGNFDLFSSPKKLYAYFGLDPAVKQSGKFNGDKVHMSKRGSSLARRILHMVSLNNLKVDKGTKAPVNPVIYDYYTDKCKSKKKNVAVGAVMHKICNIIFAILRDNKPFEIITQQEHCERYAAKHPDKAGMNAA

SEQ ID NO: 252616 - protein, 448 aa, unidentified
MSESLTAASPEPEWAALAAIDWADQKHFWRLLPAGSAQAEHGEIVNTPEAVEVWAAGLQQRFAGRPIAVCLEQRRGALVYMLTKYPHLVLFPVHPTTAARYRETFAPSGAKSDPSDTASLLDLLVRHRAQLRPLRPDTAETRLLQFLVEERRRTVDERTRASNRLTDCLKLFYPQILRWFDKVTSPLVGDLLERWPSLEQLQGAHPGTLKKFFQQHNCRAQELIAQRITEIRQAVPATKDPAVLEAGKIITRGLVAQLATLREQIALLDKRIAELVAAHPDGAVFASLPGAGAVLAPRLLVAFGTDRERYQSAYQMQCYSGIAPVKEASGNTVWVHSRFICPKFLRQTFHEFAEHSIGQSEWAKAYYDHLIQDEKKSHHAAVRALAFKWIRIVFRCWKDRKPYDEEIYMESQRRRRSLLGRTLGALGAATDARWNTIAGFQRFSKNNA

SEQ ID NO: 252617 - protein, 313 aa, unidentified
MSQNLPSILYLGLDVAKLTLQLDLAGQPHVLANDAKGHARLLKLLRGHPTAHLVCEATGGYEQPVVRVLHAAQIPVSIVEAGRVRHFAKAKGQRAKTDPIDAAILSEYGRTLQPAATAAPTAQQARLAELSTRRLQLLTTLTSESNRADHYTDKLAVRQARQLRHLLEKQIAACDRALAEIIAADATLKTKAERLETIPGVGTVVATTVLAELPELGQLSDAAIAALVGVAPYNRDSGKQTGGRQIAGGRGAARRVLYMAVLSAVRYDAILKAFYTRLRTNGKKPKVALVACIRKLVILMNRLLKNPEFQLAK

SEQ ID NO: 252618 - protein, 352 aa, unidentified
MKRQGKGLDPGEVLFVGVDLHKMRWHVTIRTADLELWSGSIPGKWESLRLQLDHYRGCAIQLVYEAGCFGFWLHDRLMEYGVECMVTPPSLVPQEYGNRVKTDRRDSRKLAHLLAKGLLKRIFVPGKKECYHRQVVRRRRRLIGDRTRVQNRIKAELRFYGINLSEPVGKWTKGYVENLNRLSFEDRFMQESFNRLLEQYTFLTGQIEKQNALVRELSEMEMYRERVGILKSVPGIGTLAAMELLLELQDVSRFRQADQLAAYVGLTPSQYSSAEKVRMGRITKIGKHSVRALLVQAAWQLIRKDQAMREKYERIKIRSGAKRSIVAIARTLLLRLRRIWLDATPYRLALNA

SEQ ID NO: 252619 - protein, 338 aa, unidentified
MGEISIIGLDLAKQVFQVHGARVDGSVVLRKKLTRGQLLVFFSKLPPCIVAMEACATAHYWAREIGEFGHEIRLVPPAYVKPFVKRQKNDVADAEAIAEAATRPTMRFVEPKTPEQQARAMVFRTRELFVRQRTQTINALRAHLAEHGLIAPKGLWNLSSIRQLIDQAEDTVDGLIVETARIYLEQIETFSTRILSLEAVLKKEAARSDASSRMMTMPGLGPITAMAIEAFAPTLSVFKRSRDFAAWLGLVPRQHSSGGKQILGRTSKMGQRDIRRLLIIGAMSIIRWASKKAPIHGTWLHAMLLRKPRMVVAIALANKMARSLWAMQTKREDYEIRY

SEQ ID NO: 252620 - protein, 347 aa, unidentified
MSEISIIGLDLAKQVFQIHGADPASRCVLRKQLKRREVLQFFAKLRPCTVAMEACGTAHYWAREIGKLGHCTRLIPPAYVKPYVKRGKNDAIDAEAICEAAGRPTMRFVPVKPMENQAIVMLHRSRDLVIKNRTMLVNALRAHLAEFGFVAGKGIWKLPDLVKIVSQAPAEALPELARATLSGLLDIIAAISSQLDAIEKRLREWHKKDARSKRLDTVPGIGLIAATACRALVPDPKLFRNGRHFAAWIGIVPKLDGTGGKTRLGRISKAGDRYLRRLFVLGATSLLRSLENKSTRLALWVQALLARRTKRAVTVALANKLARIAWAVMTRDEAYKPLAAAQSAGCA

SEQ ID NO: 252621 - protein, 408 aa, unidentified
MKRYYIGVDWADREHQLRVGDEQGKKIAEMKVEETPEGMAQLGRWLDESRAAGIELWAAIEKPHGRIVDFLLDHGVVVYPVNPKALDRVRDRYRMSQSKSDPFDAQVLSEFLRTDHAHLRPLRPSSEQAQELKLLTRDQRRVVRHNTRLLNQLKITLKEYYPRPLEVFGDLDTQIAQDFLKAYPTPAALSELKRKQWTRFATHDHHLGKARCEELWEKLNKPQLMVPPHVVRAKAQLVEVLLEQLKPSLTAVKTYNERVERFFASMPAAEIAQTLPGGKSGTLVPMIWAELGDAQDRWESFPHLQAEAGVVPVTRSSGKSHVVQFRFACNKHLRHAAYLFAFASLNRSEWANRYYRDQRAAGHSHPQALRALGAKWLKIIFVMWRDHKPYDENYHLANIARQRMRQAA

SEQ ID NO: 252622 - protein, 404 aa, unidentified
MTVVCAGIDWASEEHAVCVLTDEGELLHEGTVRHDEAGLGELCELLCGLGTERVAIERPDGVLVDRLVAAGLPVYAMHPNQVKAARARFRTAGGKSDRFDALVLAELARTDHQRFRPLAPDSDETRALRALTRAREDLVATRVALANQLRAELERCWPGAARIFADVDSPIALAFLERYPGPADAKGLGERRLAAFLARHSYCGRRAAADLLARLREAPVTALGELEAEARRGVVLALVAALKVLVERIRLLSSEIAGAVRQHPDGALFLSLFRDRNSTVTAARLVAEIGDQRGRYPSAEALAAAAGMCPVAVESGKRKVATFRRACDKRLRDAVVTLCDSTRHWHPWAHDVYERARRRGCDHPHAIRVLGRAWLRVVWRMWQDRVPYDPDLHGSLRALPVTGG

SEQ ID NO: 252623 - protein, 466 aa, unidentified
MTPRRTKTLRMPPQPAEPLRVQHPRAAGIDVHAAQHWVAVPPEAAPPPPADHPPNLPSHVRRFGACTADLEALADWLTACGVTTVAMESTGVSWIPLFELLERRGFQVFLVDPRQTRQVSGRPKTDVLDCQWIQRLHSYGLLAASFRPEDQVVVLRGYLRQRHMLLRHAGQHVQHLQKALEQMNVKLAEVVSDVTGVTGLAIIRAILRGERDPLELAELRHDKCHHTESEIARALYGNWRDEHLFALRQALELYEAYQAKLRDCDDCIERHLRTFADRSGGRKLDQKARRRSRPRHEPAFDVRAALFRFRGVDLTVIEGVDRTTALAILGEIGRDMSKWPTVKHFVSWLGLCPQHQGSAGQIKSRHTRRGANPAARALRLAAQGCHHAKNALGAFYRRIQARCGGPKAVVATARKIAERVYRLLKYGEAYVRQEMAAAEEAYRARVLKGLARKATGLGYPLVPATP

SEQ ID NO: 252624 - protein, 348 aa, unidentified
MLSPQTGSVCVFPISFSLCIMKMYVGIDVAKDTLAVAWPQTAMSWQVRSIPNAPDAIRKLIKELPDQAHVVLEATGSYSVLLTYLLCQAQVVVSVINPKQSHHFAQLQLAVTKTDESDAVLLARYGQLVQPPRYTMENDVLLRLKQKRTLLRHYKKQQRSLANLQHAFSPLPVQDAQVGSSLQQVLSHFQTAIVEVTAEIEQLTKQHFPDQLRRLTSIQGISTTIATALIEITSGFAQFHSAKALAKYIGVVPVIYQSGKSQITKGICKTGDPHLRSMLYMASWSAIRYNKPCQQLYQRLKAAGKAPKVALIAVVNKLLRQAFAVVKFDQDFDPNYQPILRPSPCFLT

SEQ ID NO: 252625 - protein, 356 aa, unidentified
MDLHKNTSSFSVKDKEGKVIDECKLPTEPSAIKGYLKRFPDSSLAVEPVSQWYFYGDLIQGLGIDVHLANPLKVKAIASARVKTDKIDAGVLCDLLRSNLLPEAYFASPDARYWKEMVRYRSSLIRLRTQIKNKIHSILFRNGLRHPFTNLFGVGGRKWLESLDLAEHFAFNLKQYLGLIDAFSQLIKEADERIEKVVGDNQPAKLLTSIPGISYISALTIMAEIGTIERFASAKKLQGYAGLVPSTYASGDRVVHGRLTKQGSRWLRWTMIEIAQRQLLCKRKPGFGWYYQRIKQRRGSGAAAAATARKLLAVVWRMLKDNRPFEIVPPAPRSKTSLLRGKSGAKDAHRKNIVSH

SEQ ID NO: 252626 - protein, 354 aa, unidentified
MALSPKQNIVELASVGIDIGKEVFHLVGFDTAGKIVLRRKIRRAALISEFEKLPPCIVGMEACLSAHFVSRTLRKLDFEPRIIPAIYVKPFVKGQKNDYNDAEAIAEAALRPNLTFVTEKTQDQLDLQALHRVRSRLVSRRTATINQIRAFLIEQGITVRTGAHALRNSLFAILDNRKDELSPRMNDLIVGLSVDWQDLDARIETITGEIEAISKSEENCQRLMSVPGIGPIISTAMVAAIGTGEAFGRGRDFGAWLGLVPRQYSTGGKTVLGRISKRGSKYLRTLFIQAAHVILMRPNNWQKFSFGPWLTEAATRLHRNRLATALANKLARIAWSVLANKKDFDTNRDEITAI

SEQ ID NO: 252627 - protein, 348 aa, unidentified
MLADQLDYIVGVDPHRDTHALAVVHVVSGVVVVEATVVADGAGYLDALRFVEEHAPGRRAFAIEGTGSYGLGLARFLTSRQERVLEVGRIRRERRSGGKTDALDAVRAARSVLASERPSTPRAGGERQALQALVAAREGAVNAKRAGLCQLRDLLITTPEPLRSELRPLTRARLLQHLAATRPHGRQDPELRGSLLALRSIARRVLQLTAEERELAREIEALTRKLAPQLLDQPGVGPHAAAQLVLSWSHHGRISSEAAFARLAGAAPIPASSGQTIRYRLDRSGDRKLNRALHMILVTRKRSHPDTIAYIERRLAEGKTRREANRCLKRYLARSLYRLLEHGPPIAT

SEQ ID NO: 252628 - protein, 522 aa, unidentified
MRWDESGREPGGAMASVTKSCNRKPRGAALKERSADASPAIRGGRTRTAAGRGGSLQPPAVPAPSPSAPEKRRKEGAERRRGLADEPKGSAPTEKTAENVAVLPPPGTRPDGTPTRSETQNRGAQGRTTMRKVALDLGTKKTTYCEVAGGQVVQRATVSGVSSLESLLGPDQPPATVAIEACREAWYVHDQLIKWGNQPVLVDTTRSRQIGVGAHGRKTDRLDAETLARALERGGIPAAHVLSPSRRELRNVLGVRRCLVEMRTTVVTTIRGLAREKGCAVPSCRTKGFVGKARVTFARHSELQGLTDPLLTTLESIDTQLAEVEEQLARCCAQEPVIAQLTTVPGVGSIVAAAFVSVVDDAGRFHSAHHLESYLGLVPSEDSSGGKRRLGAITKEGNCYVRALLVQSAWSILREAPKDDPLRLWATQLAARRSKRIAVVALARRLVGVLWALWRDGTVYDRPHLAQQGIRGHRGAVQSNERKIEALQAARKKHSVLIPRAEKLTKARSKPRTRINQLARAS

SEQ ID NO: 252629 - protein, 313 aa, unidentified
MTEHSIGIDISKSHLDVFHLETQTAKRFENSASGFRALRKWLAPLAVTRVVFEATGPYHRAFEKAFSGGLPLVKVNPLQARRFAQACGTRVKTDAVDARLLARMGDALALVPDVPVSEKTHDLRDLQIARTTLTKERTRLRNRGQVQTSAVLKRQTKARLALVERQIAELNDEIAKRIAEDRSTARKRDILCSIPGLGPVVAAAILAFLPEIGSLGRKQAGSLAGLVPHCRESGQWKGKSFISGGRKPLRDALYMPALVAMRFNPDLKAKYTALRAAGKPAKVALVALMRKLIETANALIKADRFWVANRACA

SEQ ID NO: 252630 - protein, 438 aa, unidentified
MSNNLIFNLDELFISVGIDVGADFSWMSIALPNQQFVGKPYKILHNSIDSLTTAVSKIKEAEELYSLESRIFLESTGIYHYPLFCYLRDKGFNCSVINPIITKNSTNINIRKVHNDRFDSKKAALVGLKPDLKVSLMPSDLALNCRNLCREYYDLIDNRSAYVNKLQGELRMAFPQYLGIFSKVTINTSLTLLETYTSPSAFLKADKQEIIDIIKSTARFGLTYAQNKYNAIIQAATDANQFGYIIDSNIKRIRLYISFIRKYDEEINSILESLHELVDANEDSDFVKQIHLIETFKGAGFLSAVSIMGEIGDFSAFSKPKQLFAYFGLDPSVKQSGKFEGTKVQMSKRGSAIARRVIHTLTLQSISISRNREAKNPVLREYYLKKCDSKPKLVAMGAVSHKVCNMIFAILRDNKPFKIIAPQEHIQQYNAAKCDIAA

SEQ ID NO: 252631 - protein, 348 aa, unidentified
MTDYYIALDVHCAFSEMAVVTGSGKLVRRDRFATSIPAIREALGQVPRRRRLTLEEGPLADWLAREVRASVNELVVCEPRRNHWIARDGDKDDPLDAHKLADLYRGGYLKAVHQAGSLERSLLKQHVSLYHDRVRERVRQGNQLVALLRRHGVFVKAAHQLDETEWSLTLQRLPAAELLRQGLERVRQAYQLLVTQEESLREELTGLAKREEPVRRFQELPGVGWIRGVTFYAYIDTPERFRGKAALWRYAGIGLERRHSGQGPMRTRLSHRGNPRRKDVLLGAAKSAIVQGENPFAEKYRSWIEEGGLPVPNARRNVARGIAAVLWSLWKTGQTYDPQRVSVASPRA

SEQ ID NO: 252632 - protein, 377 aa, unidentified
MTMDGRGRYRGEHSGEVLEEVVLGVDTHLDAHVAVALGALGRRLGELSVPTTKKGYEGLVSWAEGFGRVRCAGVEGTSSYGAGLARHLRSAGIGVLEIERPKRRHLRRKGKSDSRDAEAAARAVLAGETAGVPKSADGRVEMIRVLRAARRSAVKTRTQAANQLRGILVTAPEALRHRLRALTTKELVAVAARFRLGNDPEDVETATRFALRSVARRYRCLAEEIADLDAQLARLVAETAPELISRPGVGTDHAATLLIVAGDNPQRLGSEASFASLCGVSPVEASSGKVVRHRLNRGGNRHANRALHLICVVRMRIDERTRRYAARRASEGKSKKEIIRCLKRYVAREVYRVLAPSVAGADSSVEEGRVVEVTGVT

SEQ ID NO: 252633 - protein, 312 aa, unidentified
MYHVKEQLVYLGIDIAKAYLDAAIGTERCRFTNDAAGHRELIKWVKQLKGSVQVICESSGGYERALVQALARAGVQISLVQANRVRQFARAAGILAKTDRIDAEVLCEFGKVMRPQRVTAATLAQEHLRELESQRRHLTHLLVMEQNRGARVSDVLVRRLNRSLINQIKKQIERLDQLIKEHIEQSQELSAKARKLTAISGVGARTAALLLAQLPELGQLNRRQVAALVGVAPFNRDSGRMRGKRAIYGGRRPVRHGLYMAALVAARHNPILRGFYLRLRAAGKPAKVALTATMRKLLIVLNSTLKPDLIYA

SEQ ID NO: 252634 - protein, 355 aa, unidentified
MSEEKYIGLDVHQASVSVAVLDRAGKLTMECVLETKASTIVEFIQGVRGSLAVTFEEGTCAAWLHDLLQPHVSRLVVCDPHKNALLQDGSKSDRIDARKLAELLRGNQLSPVYHGDHGVRTLKELARSYLALTQDLTRVMTRIKALYRSWAIPCSGARVYAARHRNQWLAKISQGGVRQRAERLYQQLDLLRPLHQQARCALVEESRRHPAVKWLRQIPSIGPIRAALLLALVQTPHRFRTQRQLWAYSGFAVETHDSGEYRCVGGKLQRNRERIRVRGLSDNYNRDLKNVFKSTAISASTRPGPLRDFYLALLAKGMRPSLARLTLARKIAAVTLTIWKKGVDFDAKQLGRQAA

SEQ ID NO: 252635 - protein, 362 aa, unidentified
MTSIALGRSDVVVGVDTHKDEHVAVAIDGLGGRLGELSLAANPAGYAQLLVWADQLGAVAVFGVEGTGSYGSGLARFLRRHGRKVVEVCRPPRKGERRLSGKSDTIDAEHAAREVLAGRAKSTPKLADGIVEAIRLVKIARDSAVTAHSQAMITLKATLVTASDELRAGIEPLTDFRLIQACAVMDESGDIADPAVAMRHLLATLARRWLELHEEIKVHSRHLKKLTKTAAPELVAAFGIGPDIAAEMLVTAGDNTDRLPSDAALAKMCGACPIPASSGKTNGRHRLNRGGNRQANAALYRAIIVRMRWHPPTIAYVERRTAEGLSKREIIRCLKRYLAREIYRLLPPPGTCAPLASAAEAA

SEQ ID NO: 252636 - protein, 392 aa, unidentified
MIYVGIDIAKDKHDCFITNSDGEVLFKSFTISNNPDGFETSFQKIQSVSDDLTKVKVGLEATGHYSYNLLGYLLDKGLPTYVINPLHTNLYRKSLSLRKTKTDKVDARTIASMIMSDVNLKSYSDTSYHNEELKSLTRYRFDKVKERAKLKTSVSRLICILFPELEKLVPTLHMASVYALLSEFPSAHAVASAHLTRLINLLSQSSKNRYGNDTAVMFREAARNSIGSNMPTKSLELKHTIKLIQELTSEIDEIEAAIKQIMDEEIQSPILTIPGISYRMGAMIIAEIGDFCRFDSADKILAYAGMSPSTYQSGQLDNCYSHMEKRGSRYLRYALYNATKYVCHWDKSFGEYLAKKRSEGKHYNVAISHAAKKLVRLIFAMEKSRKAYLPTA

SEQ ID NO: 252637 - protein, 353 aa, unidentified
MTEYVGIDWAYRRAAWCAMSAGGVISAEGFTPADEDGLAKLVLRLGSDVKACLEMMSGAVWVRDRLRSAGWQVEVADARRVKGVAPLACKTDRVDARVLAELCRRDLVPALWIPSLEERELRERLRRRMHLVRLRTSAMNRIFGLGTQWGLRLSAERLRRQGALELLAQRGVPAVWQRSIQEALAVIDLLEARIAPLEAELAPIARADRDVALLVTIPGVGEMLALTLAAEIADVSRFPSPGKLVGYAGMAPGVKQSGQSSRSGLPLSKAGSRTLRWAAVEAAQHAWRESNPWHQLYSDVAKRSGKNAAKSAVARKVLIASWHMLSRCEPFKPSRPRGGARTVPASSISVLAA

SEQ ID NO: 252638 - protein, 428 aa, unidentified
MDQVNHNRLEEFRQLRQEVRHSGEYLIVGIDIAKDRHYAFFGTATGKTLLRRLVFSNDHEGFRKLLDQAEALRVQHGLKKVVYGMEPTANYHKPLGEYLIGLGRTVVLVSGVTVKRNRETSDGRWDKHDVKDSANVADLISQGKCLYYEHPSAELRGLRGLLSLKRRLKKQEHGYKVRIRNHLIAQYFPEMDRDYAQLGAEGLSIVRWCFPASQIVQLDVDPFIERVTSRRIRVEKRRRLEVIWEKAGESIGCDGVPGVEHEAKVMVEGLRQIREMIKETEEKILGLCKQFPAYPYILTIPGFGPDVSAKVLGAIGDPDRFQNGKQVLKMGGLDLSADRSGKDSDKATPEISKRGKADLRYALYQAAFIASTKNRDFMLYYTNKLRGREKEKGIHTKMIVKLSAKMLLIAWTLMKKKEAFDPAYLITE

SEQ ID NO: 252639 - protein, 332 aa, unidentified
MSEVVVGLDVHLKNTQVTVMRNDLIGEIVKRERVSTCKAELRKCLSSVPKGSRVALESVGFCWPWIDFLEELGYEVLLANPAKVKLRAEDIKNDRVDSKTLAELVRMNWLPTCYVPSAELRWLRSLLRHRAYRTKLSTSVRNRSRSEFRKRDIHLDVDLGTVKGRKAAGSLDVFEISQNIELLDVIERQSKEVETMLWKKYGKIKPVELLMSVPGIGFLSALTLYAEICDIKRFSSAEKLAHYAGLVPRVRQSGEKMRMGREIKGCDKWLKWIFIEASWNFVRCCPDSHLTRVYEDACKRKKDKTKAIKIVARKLVNVVWYVWTYEKEFKVK

SEQ ID NO: 252640 - protein, 411 aa, unidentified
MEPIVERCCGLDVHQATVVACLMVGQAHEKPRKEVRTFPTFTPDLMAMRDWLQAEGVTQVGMESTGVYWKPVYTILEEGDFELIVGNAHHIRNVPGRKTDVKDSEWIAELVRHGLIAKSFVPPRPIRDLRDLVRYRRKLVESQTAEKNRLLKLLESANIKLASVASDVFGVSGMRMLEAILEGQSTAEQMAELARGRLRPKRAALTRALEGRVEAHHRLLLGIELRRLRKVEADIAELDQCIEAQLAPYREAHALLMQIPGVDAVVAAVMIAELGVDMSVFHSVHHVAAWAGVCPGNHQSAGKRKSGRVRWGNVLLKTTLVEAATAAACAKGTYLRDKFFRLKARRGYKRAAMAIAHKILIAAYHMLSTGQAYRDLGEAYLDRLGEQRITVHLTRRLERLGYLVHLERRVA

SEQ ID NO: 252641 - protein, 351 aa, unidentified
MAAKKRSLIGGVDTHRDTHHAAVIDSTGGLLADAEFPATTAGYADLLAWMRSFGRVTAVGVEGTGSYGAGLARYLTSKKIAVVEVDRPDRRARRAQGKSDPIDAIAAARATLAGTATGTPKTRTGPVEAIRALRVTRRGAVKARTAALNQMRGLVAAAPEPLRAHLTRVSAAVLVSRCATLTYDPARLHEPEHATAAALAGLARRVTALTEEITTLDRQVTPIVRKAAPRTTALFGVGPDVAAQLLTTAGDNPDRLHSEAALAHLCGAAPIPASSGRVRRHRLHRGGDRGANHALHTIALCRMRYDQRTRAYVHRRVTEGLSKQEILRCLKRYIVRDVYTALVADFTALTT

SEQ ID NO: 252642 - protein, 416 aa, unidentified
MMEGLRPTYTVGIDWASDKHDVCVLAAAGESRLAFAIPHTADGLAALVQRLHRYGAPADLPIAIERPSGLLVDTLVEAGVPVVPIHPNALKASRPRYAAAPAKSDPGDAYILADLLRTDGHRFRPLRAPSDPTKALRAAVRTRDDLVATRVQLANQLRTLLDSFWPGAAAIFADVDSPIALDFLNTFPTPDSAAHLGVKRLERFLQRAAYCGRRPAAELLGRLRAAPRGQAGPLERETKGQLVRALVAVLRPLVAQLRELEGLIAAQLAHHPDGALLQSFPRSGTVNAAQLLAELGEDRRRFPTAAQLAAEAGVAPVTHTSGKHRAVACRFACNKRLRQAATTWADNSRHGHAWAAAVYRQARVRGCDHPHAVRILARAWLRVLWRCWQDRTLYDPAQHGRALPFLTPQPPSSAAA

SEQ ID NO: 252643 - protein, 409 aa, unidentified
MIYCGIDWAERTHDVALVDDSGQLVAKRHITDDAAGYQVLLDLLAEYGDTEESPIPVAIETSRGLLVAVLRTGRRKIYAINPMAAARYRDRHAVSRKKSDPGDALVLANILRTDMHAHRPLPQDSELARAVAVLARAQQDAVWNRQQVANQLRSLLREYYPAALAAVEVWKKGLCRPEAREILRLAPTPTRAAKLTRAQLQTALKRAGRQRGIEAEVERLRDILRADWAHQPRLVEDALGTQMLALLLQLEAASKAADDLEHAVEEAFPQHPDAEIILSFPGLGVQLGARVLAEIGDDRQRFVDARGLKAYAGASPITRASGKKSSITRRWVKNDRLNHVGYLWAFSAPNASPGAKAHYRKRRDHGDWHASAQRNLFNRLLGQLYHCLQHGARFDEAIAFPAVAEALAA

SEQ ID NO: 252644 - protein, 409 aa, unidentified
MRVLYKRCAGLDVHKDMVMACARVRGRGNRVTYEVAEFPTTTAGLLALAEWLSEREVTHVAMEATGVYWKPVWHVLEDTFTLVLANAGHIKNVPGRKSDVNDATWISDLLAHGLISNSFVPPRPVQELRGLTRTRKQLSRQAAKHVLRIQKTLEDANVKLSSVLSDTVGQSGRRILKAIIEGETDPTRLAALASAQCKASREEIATALTGKVTDHHRFLLSLHLGQVDAAERAIEETDRRIEEVLDPFQEAEELLLTIPGVQKTSARAILAEIGTDMSRFPTAAHLVSWACLCPRSDTSAGKRRSTRLRQGSPWIKTIMVQAGWAASHAKGTYTSAQFRRIASRRGTKKAVVAVAASILTAIYHMLKNHVPYHDLGPDFFDRRDTHKVANRLVHRLEELGFKVELKAAA

SEQ ID NO: 252645 - protein, 368 aa, unidentified
MLYLGIDQHAMQLTICIRDKSGNITLRRQVSTRPDKVQAFFDDILEQAKAAGGWVVMLEVCGFNQWLIALLKKMECDELILIQPDKKSRRKTDRRDAARLSELLWVNRERLLAAERVQGVRRVYIPTETEADSRQVTSWRERLGKQRTRVINAIEHLLNKNNLIHHKPTKTFQTVAVRKWLRQLELTSIDKLELNQLLDQWELLEKQIQQVHSVVQQRTKEDKNAQLLTTMTGKTGYTALAIASRVGPIERFKSARSFTNYLGLTPTCNSSGNREQLGHISKEGSPIVRFLLGQQVLHVLKRDPSLKAWYQRVKKRRGAKIARVAVMRKLASSIWYMIRYQEPYQPMTKRILSNHHNNRYNERQAITS

SEQ ID NO: 252646 - protein, 358 aa, unidentified
MVESTKIHFENQPFFVGLDTHARQWTVTIRCNQMELKTFSMNPSPQELFRYLDRNYPGGEYLSVYEAGFCGFWIHQELVQLGIRNIVVHAADVPTTDKEKDQKTDIRDSRKLARELENKELESIYIPDLFHQQLRALCRLRNEVTKNSTRVKNRIKGFLYYYGIPMPPHAEMSHWSNRFIQWLKQIQFDYPTAQDYIRFCIEELTQHRKRLFDITRSLRQYCRQYHLMDHIDGLLSVPGVGFITALSFYSELIDINRFPDLNHLASYVGLVESVHSSDNKGPDLGLTKRRNRYLRYLIIEAAWVAIRKDPVLLQKYNALSRRMKKQNAIVHIAKRLLNRIRFVWKHQTPYKMGVVHSN

SEQ ID NO: 252647 - protein, 358 aa, unidentified
MNSVGLDIHKTRCVACIKTQEGILEEEFTFQNNPEGQEEFVKHLKAYPEVQVALESTGNLWTRIYDRLEGEGIPVILTNPKKTKAIAEAKIKTDKLDARMLADLLRANLLSPSYVPPREIRIQRSIIRERARLVQLRTILKNRIHTLLDKYDFKPPFTDLFGKHGLEWLQSLQLQPGDRTILEVNLEQLSSLNRSIDRLTENIAASAVDNPEVKLLMGFTGIDYYGAMLLLNEIGPIARFPSPKKLVSYAGLAPSTHQSGNITHHGHITKEGNSHIRWILIEAAQHASRHDARFSQFYLRIAKHRGHQIAIVAVARKMLVTIYHVLNHQTTYRGLRPELFENKIRRLQRITEPSLQPQ

SEQ ID NO: 252648 - protein, 348 aa, unidentified
MKKVVAGMDLHSNNVVIGIMDLDGKRVAGGKVPCDLKEVVKFLAPFKERLEKVAVESTYNWYWLVDGLEALKYPVVLANPAGMEQYSGIKHADDTNDAFFVAELLRLKILPVGHIYDAQLRPMRDLLRRRLKLVEHRTALMLSFKSLYTRTTGQEMSLSQLKELEIKQAQELYTHPANQLIAGMQIKHIEQLSQSIHKIEKGVLDCARELPFYTKLLSLPGVGKILGMTITMEVGEIKRFADPGNFASYCRTVEAKHTSNDKKKGANNSKCGNRYLAWAFVEAANFAKRFDEQCRKWYDRKAAKTSNVIATKALACKLAKAAWYLMAEGTTYDPARMFGQPAKSEMKT

SEQ ID NO: 252649 - protein, 351 aa, unidentified
MSQKTEAGLACTIGIDTGKNTLHLVGLDAKGAVVLREKLARGRIAARLANVPPCLIGIEAGMATHYVARELLVLGHDVRQVPPAYAKPFRQGHKNDFRDAHAIAEAVQRPSTHCVPIKTDAQLELQALHRVRSRLIGGRTAVINQIRSFLLERGITVRQGLRFLRQQLPQVLATRTDVLSPRMIRIIEDLSSDWRRLDERIEHVTEEIELLASDSEACRQLMTVPGIGPIIASAMVAAIGNGAAFAKGRDFAAWLGLVPKQMSTGDRTILGRITKRGNRYLRTLFMQGARVVLLRPTNWAKYSFGPWLAAAAKRLHHNVLATALANKLARIAWTVLAQGRSYERRAVPGIV

SEQ ID NO: 252650 - protein, 356 aa, unidentified
MQTIYIGVDFHARQQTICYLTTDTGELLIHQLEHQDKAAVRAFYAQFSGHVIVGLEASGYSPWFERLLEELGCEVWLGHATEIRCRARGRHKNDRRDAELILDLMLHDEFPRLYLPPLQSREVLRMLRYRQKLIKIRTIGKNSLQALALQAGLAKGPHLFTKAGLQEFRQAPMSPAMQWQREQWLQLLEPLNQRLLETMLWLKQQSQADERISRLRTHPGVGLLTALCLVHSLEPVNRFRNARKVTAYVGLDPLERSSAERQRFLGISKGGSRVLRFLLVEAAHTAIRKDAALKRFYQRLAERRGRPKAKVAVSRKLLIRTYIMLRDEIDYAEFQRRPSQLGLLAQPMGFNARHPD

SEQ ID NO: 252651 - protein, 379 aa, unidentified
MEKDIRHVGLDVDSQTLVVGVAEPSGEVRSLGSIPYTSEAVRRLVKKLGPASRLRICYEAGPHGYGLYWELTALGVHCDVVAPTLVPVKSGDRVKTNRRDAEKLARCYRSGDLTPVWVPDAEHEALRDLVRAREAAKKDQLRARHRLGKFLLRRGLRAAAGVKNWTLKHLLWVRTLHFEHAAQEATFLDYLHEVEHAAERVARLEKAIDQAVEGLPQEMKAMVAGLQALRGIKQVSAVTIVAEVGPLSRFERPKQLMGYSGMVSSEDSTGNRVRRFGITKTGNAHLRRVAGEAAWAYQYRPAMSAALKKRQEGLSEEVKEIAWKAQHRLCTRYRRLLAKGKVKQQVITAVGRELLGFIWAIGVQVEKEQRSSPKGVCAA

SEQ ID NO: 252652 - protein, 376 aa, unidentified
MTKTELYIGLDVHKETITAAVAEGGRNGEVRQAGTITNDLHALEKLLRRIRGDQDRTLHVCYEAGPCGFVIARRLSQLAIDCTVVAPSLIPKKPGDKIKTDRRDAEKLARLLRAGDLSPVYVPEATDEAIRDLCRARTDAVDDHRRARVRLKAFLLRHGFRYSGKSTWTPAHIRYLRELVLPHPAMKVILEDYLCAIDAAHERVERCETAMEELLGTWRLRSAVEAVMAFKGFKIVAAMITVSELGNIHRFAHPRQLMAYLGLVPTESTSSETRRQGGITKCGNPHARWLLTECAQHYATPPKVSKELSMRQNGQSREVREISWRAQNRLHSRFKKLIGRKLHRNKAVTAVARELTGFLWELLRGLPCYTKVADAQ

SEQ ID NO: 252653 - protein, 329 aa, unidentified
MNVRQIIGIDVSKASIDLASYQRQTHLKIENTSAGFKRFLKWLKQQKINPVDVLVIMEHTGLYSYSFEQFLQKQSIGFTKVPALAITRSLGLIRGKTDKIDAARIALYGFEKQHALSITSPQSPQLLRLQILHSIRHQLVKQKAAMLCAMEEYQHLGISKTDTIIKSQQAVINTIDKQVDTLNKEMDKLISEDDHLQKNYNLLISIKGVGKVVAIAMIIKTANFTRFKKPKKFACFCGIAPFEHTSGTSIRGKTRVSHLADKEMKALLHLSAQTAIKNDKELRTFYLRKTESGKSKMSTLNIVCNKIVSRMFAIIKRQTPFIEYNLKAA

SEQ ID NO: 252654 - protein, 396 aa, unidentified
MATIGIDIGGHTHVAARCRDGETQADRKIVRVSQSRAGFASLDAWLAAEPEPVDLIVMESSGHYWMPLAAHLRRAGVPVAVVNPLAARYFAKSRLERTKSDPADARSLAEMAMRDSPPARDPLAGVELRQSARFAMTLVTEQAKVCQKLYRLVELGFPELRELFEDPTCRTARAVLRLAPTAEAASRRRTSTLANANGGPGRRRLGQAKAERLAAAASDSIAVPELDAEVAFEVGLLLDQFDLLERQIEAAEARVAGLLDGDLARRLRTIPGVGPAIVATLIAEIGDIGRFDDFDQLLAFAGVHPAEKSSGRKGASPETSWHMSKAGNSYLRAAAYRMAVVGVQHNPVIAAHYARKRAAGKSPMNALGHCMRKALSIVWGVWRNGQDFDPNWGVEA

SEQ ID NO: 252655 - protein, 520 aa, unidentified
MKKQRSRKSRSIYRSQCDEIAAIFDTARSPAKVLCVALDFAKTTHVALICDGHGDILKQSIPVHNTGEGVAFLIDQINASARRRKIPRKHIFIGGEDIPNYASNFLFALQKQNFLVVRVNAHEAKGNRENVTSSTDDLALLAIAKTLITRRCRVVERPHDDCSKAVTALGELTRSRSHFVKVKTATSNMIHSQVEILFPGFLDSSKSGITSFGKMSCELMKERFSGPQIARRKHASLTAEMRRNRIKKPEQSAAMMIALAKEALPPDKEVVNAAQRALKCEVELYECLKKCEQEQKLAAADLLAQTPYVMLTSIQGIALVLASGTGAELGDPARLGPIKSLCGYAGIVRATDQTGGPDKPARGKPTPSRCNHHLKNWAIQASQKMKMYGPPEIKERFARWEVNGQNAKFAGAKRYLRIGRMLIKNGVPYLNAEARQPGASDEVMAHASEEAFGILVNKWSGVPGWERMVFAEDRPLGFWRQLAIKMYGAELPLSGDALPEAKPDIDIFDDEVSLENEAMI

SEQ ID NO: 252656 - protein, 404 aa, unidentified
MNNVPVLSIDISKSKSYAALFRSYGDPYLKPFPFNHCPSDLSYLSSQLKNIERDTGKKPSVVMEATGNYSKPIASFFRENGYLVYIINPLQTHAQKKKSVRKVKTDPIDANRIAQVFYLDKFCADHSFEPHIQELKSLCRQYDGFNDLYVETQNRLRSVLDLYFPLCETVFAHLRGKTALRVLALFPSPADVLSASHDELFEALKPSKKSVSWCESKIDLLILAAKESLPLNQAQASNVRILRNYIELLLSQQNILADLRAQMVYWANFSPYYSLLCSIPGVGEMTATTILAEIGDIERFPGPKQLVAFAGLDPSVFQSGNFKASKNRISKRGSSYFRKALYQATVAGISNLPGGPRNKILYEFYSKKLAEGKPTKTAIIASCNKLIRMIYGILTSGNPYSLSH

SEQ ID NO: 252657 - protein, 344 aa, unidentified
MIWVGLDVHKSYSRMGTFDPATGAVQDLGTVRNEPSAMDEKLSELPSPKTVVLEAGRSSYHMAGLAEAMAERVWIVDPGEVRRLQQRIAKTDRRDAAALAWWAAKGVLTPQWRPDAELLDLRELTRGKTVLTRLSTQVRTRMRGLLARHGYECPHRDLLGERGQLWLDEVELEGHAGQLLAALGEMLVVIQAKADEFERLVEQESSTHPVAHRLRTIPGIGPFLGLALAAEIGDINRFPSPPHLRGYSGLVPAVYQSGDKDARGPLTKTGNAWLRYAAVLATQRMAQMRHPDPTLKRIFLSVAFRHGRNPGKVAAARRLLDLVYHLLKEEEDYQAPIARAASTI

SEQ ID NO: 252658 - protein, 346 aa, unidentified
MREPSTCKTTIGLDIAENVFQVHGIDDAEKIGVKRQLRRGQVKQFFEALRPCLIGMEACASAHHWARELSKLGHEVRLTAAKDVKAYVKRNKNDATDAEAICEAVRRPTMRFVRVKSAEQQGQLMQHRSRDLLIRQRTQVINALRAHLAELGITAAQGREGIKDLLAIIADDRDERLPMDARASLLVLAAQLQALQTLIGTLEKRIAAQHRANSDSKRLRTIPGIGLIGATAIAAVVTDPKAFRSGRDFAAWVGLVPREDSTGGKRKLGPISKQGDRYLRRILVVGAHSVLRRAKHNPEKYPWLTRLLARRPFKVVAIALANKMARIAWALLAKGGTYRTPRLAAA

SEQ ID NO: 252659 - protein, 346 aa, unidentified
MNQIASIGLDIAKRWFQIHAVDETGREVLNRKLPRDKVLDFLAALPACGVALEACSSSHYWGREIGRLGHRVSLISPNYVKPYLKRGKSDAHDARAICEAASRPDMRFVRVKSEEQQAALMQHTSRQLLIDQRTAVANSLRGQFAEFGVIARKGIENVGELVRMLDEDDEELAQVPACALTVMKILADQLRAVDAHLSAIDEEIEAWQRESCAAQALKTIPGVGALTSAALAAQVPDPSMFRSGRDFAAWLGLVPRQNSSGGKERLGRITKQGNPYLRRLLVLGATASSRWLHKRTDPLAVWTKRLLQRRPARLVTVALANKLARIAWAIMTTGELFRSDAPIAPA

SEQ ID NO: 252660 - protein, 484 aa, unidentified
MAAKKKDARTGPDRTTAGAAAERGGEGAEVAEDRVQVVEYAAAIDVAKGSGMVCTRVPGSRPDRRRQTVWRVEATYAQVTALMDHLRCEGIQRLVLESTSDYWRIWFYLAEAAGLEVWLVNAREVKHLPGRGKSDRLDCVWHCKLNERGMLRRSFVPPEPVRDLRALTRTRARLAQDQARHQNRVEKILEDAQLKISVVISDLFGASGRRFLDALVAGERSPKALAALGDPRLKATRQQLEDALTGRFRDIHAFEISTHLRIIDAINEEITRLDGKIEEQLALVPRTAPACVACGLAGGGHAPGCADEQVPLLGLAARLDEITGVGECNARAIIAELGTDPSQFPTPGHAAAWARLTPRTRQSGETARPGRTGKGNRYIRGALGQAAMTAAKTDTRLGAMYRRIARKRGKQKAIVAVSRVICEIAWILICDPGARYQELGPDYHTPRSRARQTRDKIREIERLNPGKKVILAPIDPGPEAGAAA

SEQ ID NO: 252661 - protein, 313 aa, unidentified
MNQPKSNVFVGVDVSKERLDVAVRPSGEHNSFANDEAGIAQMSECLCRLSPEMILFEATGGWQMNAVNALAARRLPVVIMNPRQVRDFAKATGQLAKTDAIDAAILAHFAEAVRPEIRELKPLEARKLEALNTRRRQIVEMLTAERNRLITASEWTRPDIEDLIAFLKKRLATINLDINKLIRQSPLWREKDKILKSFPGVGPVTASTMLSDLPELGSLNPKAIAALVGVAPLNCDSGKHQGKRKIWGGRAGVRSLLFMCAKTAVRCNPVIRGFYERLLRAGKLRKVALTACMHKILIILNAMIRDQVCWKTA

SEQ ID NO: 252662 - protein, 410 aa, unidentified
MEVVLERCAGLDVHQASIVCCVLIGAPGRKPQKLLRSFGTTTRELEALRAWLAEHGVTHVGMESTGVYWKPVYAVLEGHFDLIVGNAHHIKNVPGRKTDVKDAEWIAQLVRHGLVASSFVPPPAIRDLRELVRHRRTLIETRTAVRNRVLKLLEGANIKLSGVASDVFGVSGMAMLEALAAGTNNASEMAGLARGRMRRKHAALEAALDGRMREHQCFLLGMQLRNLEAIDQDLEALDARIESQLEPYQAQHRLLMQIPGVDWVTAAAIIAEIGTDMDVFATARRLAAWAGVAPGNYESAGKPKGAGTRRGNVFLKSALFAAASAAVRTKGSYYRDKYNRLRARRGPVRAIMAIAHKLLIAAFHMLSTGEAFRDLGESYLDQVARKRSTAKLVQRLSNLGYDVMLVPKAA

SEQ ID NO: 252663 - protein, 403 aa, unidentified
MNNVAGIDVSKGKSMVSVLRPFGEVVAKPFSVGHTGSELKELADYLKSLDGETRVVMEHTGRYYEPVARFLHDEGVFVSAVNPKLIKDYGNNTLRKVKTDKADSRKIARYGIDNWAELRQHTPMDTIRMQLKTLNRQQSLYTKTKTMMKNNLIALLDQTYPGVNALFDSPVREDGSQKWVDFATTFWHVDCVRNMSLTAFAERYRKWCKRHGYNFSQSKAVEVHAGAQDLIAMLPRDALTKTMVRQAIDALNAISASMERLKAEMQALAAQLPEYPVVMAMHGVGDSLGPQLMAELGDVTRFTHRNAITAFAGVDPGADQSGTHEAKSTRVSKSGPPELRRALFLVMDCLLKTQPQDDPVYRFMDKKRAEGKPYLVYMTAGANKFLRIYYGRVKEYLASLEGN

SEQ ID NO: 252664 - protein, 366 aa, unidentified
MDAIYIGVDFHSRQQTICYLKTETGELVITELKHQDKERVRAFYQQFLGHVIVGLEASGYSPWFEAMLEELRCEVWLGDATEIRRRARWRYKDDRRDAELIRDLMVHHEFPRLHQPTPQSRDILRMLRYRQKLIKVRTMTKNSLQAIAMQAGLAKGRRLFTIAGQAEFKAVAMSPVLQYQRDHWFELLKPLNQELLETMKWFKVAAKGDATITRLRTHPGIGLLTALCFLHTLQPVSRFRNQRKVVAYGGFDPMVRRSADLSIHLGISKAGSRMLRYLTVEAVHTAIRHDEDLKRFYKRVAARRGRPKAKVAAARKLLIRAYIMMRDEIDYAEFNRRAVAARLARNSQGTPCVPEVLIGQSASPGA

SEQ ID NO: 252665 - protein, 372 aa, unidentified
MKYIGIDLHSNKFNICIIHDDNTRKVLSFGLSMHAINAFLESVDKETFIMVEASTNTFRFVERIRDKAKEVYVANTHKLKLISLVKKKTDRIDAEKLAIFLKMQIASGEKIIEPVHVPERLIQNLRSLFTTYKIIKKHIASTKNRIHSLYKQELYPFTKEYIFGKKTRTKLKGISINPATDFQLNLLFDSLENREKEIDRLKEYLMYLAKPYFKEIEILTSMKGISVFTAIALIADISEINRFKSSKKLSSYLRSAPGVDISNKTVRNLKTNNLGRKLSITLISQSLNHFRDSNLKLKKWYEIKMEQNKPKGKARMALCRKVFTEIFQMLKKKEYHYYRDEKNHLAKIKMYEKFLNNCEVDEKYEYYIKKSA

SEQ ID NO: 252666 - protein, 345 aa, unidentified
MLHVGLDLSRHRLDVHVLDPGGSTVAQLAVAPHGEELRGLAARFNRKGPVRAVIESMNGARFIHDTLEMAGWDVLIADAYKAKGIAPLACKTDKVDAMVLAELSRRDLVPAIWLPTPEVRGERERIRYRAHLVKHRSMLKCRIHATLLAFGLPNDYSDLFAGGGRAYLDELVFPTPWRDNVNAARTLIDELTSQIKAIDRDLNLIASRHPYVKLLVTAPGIGPVLGYSIASEIGDITRFPTPTQLVGYSGLCPKVYQSGQTDRRGALAKNGPRYLRWALMEAAIHAAAHPAYRDRYLRTRSRLGRYRGSKTARVDVARRLAHATWHMLTKGEPFAPAGATCVLTP

SEQ ID NO: 252667 - protein, 375 aa, unidentified
MGNAITCHVGLDTGKSQTVGCGVFRDGGEDLEFDLGTDRHSVRRMVRRLSRKTGGGVSFCYEAGPCGYELQRWIRAEGAECVVVAPAFLPGKAGERVKTNRRDARKLAMAHRAGLLTEVRPPTPEEEAARDLVRGREDLVGDVRRCRQRIKSLLLRRGLSLPGSKGTWTLAYRRWLKSLAWEHEADRVVFSDYLLALEQGEERLKQLGTKLKELSQQDPWVERVGWLRCLRGVDTLTAMTLLTELHGWERFRTPRELMSYLGLVPSENSTGLGVRRGRIGGGNRFARRVLVEAAHHYAHRPGIGVSLKKRREGQPGWVLAMADRAQLRLHRRFWRLMANGKNRNKVVTAVARELAGFIWAILQGPATTASTGKAA

SEQ ID NO: 252668 - protein, 356 aa, unidentified
MREGMRLAPGSDVFLGLDISKTSWHVTARSGGETLLSASFPARREALNGLLARLKGCRVHSAYETGPFGYGLHDWLRSRQVDSMVVSAAHVPGQIGNRVKTDRRDGLKLARTLEAGLLRPIFVPEARQRAERELVRQRHRVQRDRCAAMVRIKSFFLTYDVEVPEEAGAHWSGDFEAWLRGLKLEDRSLDRVLEELRGLYFDLDARVDALTKELQQMARSADYAPMVELLSTVPGIGWLTALTLVVEIVDFSRFPDGEALSSYAGLTPSEHSSGDRIRHGHITRQGNPVVRSVLVESSWILIGKDPEMRRFYDRIKVRRGGKRAIVAVARKLCHRLLAIAQSGQPYRVNFSRIKQN

SEQ ID NO: 252669 - protein, 465 aa, unidentified
MKNKSDTTKKKKQKITINPDWEQINPDAAGIDIGSREHWACVPPNRQPQNVRKFGTFTGELEALADWFEQCGVKTVAMEATGVYWIPVFQILERRGFKVVLVNPRQTKNVAGRKSDVQDCQWIQRLHTYGLLQASFRPGDAYCVLRTCLRYRDELITARATQSQHMQKALQAMNVQLHHVLSDVTGVSGLAIIGAILKGERDPAKLATLVDYRVRASQQTIQKALAGDYRSEHLFVLQCAFELHHTYEEKVLACDQRLVAEVAQLPRQVDPVLKPIPPRKEGRAAHKDKLCGQDMREPLYEKIGVDLTAIEGIGITTALTVLTEVGPDLSGFSSEKKFASWLGLCPDNRISGGKVLSSRTRRVINRVSDALRIAAMTLERSQSALGAFHRRMKARLGAAEAVTATAHKLARLIYRLIKHGEAYVRQGMDDYERKFHAGKLNHLKKTAAAMGFELTARQPVTLPVS

SEQ ID NO: 252670 - protein, 348 aa, unidentified
MLHAGLDLSRKRLDVELVAEDGTRLGYAAVMPDADGLRSLTRQVQAWHGQPVRAAIESMNGARYVHDQLELAGWEVEIADAQKVKGLAPLACKTDRIDAWVLAELSRRDLVPAIWLPDPEIRAERERARWRLHLVRHRTALKNRVHQTLIGFGHQRPVSDLFGVQGRRLLERMALPDPWSGTVEAAVRLIDDLDRQVDGCEAELRTLGADHRYVPLLLTVPGIGWVLAYTIAAEIGDIARFPSPVKLSGYTGLCPRVHQSGARDHRGPLTKQGPKFLRWALIEAAQHAAQSPQYRDRYQATKRRLGRQRGAKVATVDVARKLAEAIWHMLTRSQPFAPAGATRCPLVA

SEQ ID NO: 252671 - protein, 333 aa, unidentified
MNKFKNFLGIDVSKEYFDAVVILNGNKQNTIHNQFVNDYKGIQALRKWLKEQNATFENTLICIEHTGMYGKLLIKYLMLFKFELWVEMSLKIIRSIGVQRGKNDKIDAERIANYAMKNVDEAVPYKAPRKEVDKIRNLLTLREKLVVTKASLLRNIQELKSFDLEVAKLSEKLQKSTLKGIDLDLKSIEKQLDKIIIEDENLSRIFKISTSVTGVGKVTTLFLICFTNEFTMYNTPRQLACYAGVVPFEHTSGKSVRSKPKVHYMANKKLKKQLHMCALSAITSDPELKIYYNRKVEEGKSKMLVINNVRNKLVHRICACIRENKMFEKRQVA

SEQ ID NO: 252672 - protein, 309 aa, unidentified
MEHFVGIDVAKDRLDVHVRPSQESFAVARDGEALAALVAQLRALAPALVVMEATGGYETVVASAVAAAGLPLAVVNPRQIRDFARATGKLAKTDRLDAAAIAHFAEAIRPPARPVAEPEAQALGELVARRRQVVEMMGAERNRRRQATQRRVLHAIDRHLAVLQAELSELEGDIDGAIRSSPVWHRDAELMTSVPGVGPATVRTLIAELPELGRLTRRKIAALAGLAPINWDSGTLRGRRAIAGGRAPVRTALYMATLVAAHHNPVIAPHYRKLCAAGKTRKQALVACMRKLLVTLNAMLRDRKPWQPV

SEQ ID NO: 252673 - protein, 426 aa, unidentified
MYYFILYVYTILTLLFKGIGSSEHYVRAFDYLGRELTRKVFRFSTDINGFNSFYDWVTQICIKHGKNEAMIGCEPTGHYWYTFYQFVKDHGMKLAFVNPASVKKAKELDDNSPKKTDLKDPKMIAKLVIDGRYSFPYVPEGIYAEIREVTSSRDRIMKELNAASNRIQRWLKIYFPEYLTVYKKFDTTTGMMILEEVPLPTMVTALGVDNIIKIWREHKVRGKGASFNRAKTLVDAVHDSVGKSGGQGAVMEIQMLLEDYKVKKQQLEMVTSVMEELIMQIPNAEKMLSVDGVGLVTVAGFISEVGDISRFKNPKQIQKYAGFELVENSSGKHKGRTTISKRGRKKLRKIIYQVVLPLIQSNKEFRSIYDYYRKRIKNPLKGRQAMIAVGCKLIRVFFAIMTKGVVYNGSKMIEDIHRPTQLPQAA

SEQ ID NO: 252674 - protein, 477 aa, unidentified
MVTARPSQLNRKQRKELARRLRVEDPGLTVMHPHAAGIDVGNSAHYVAVRPDRDPDSVRRFECFTADLHRLADWLVHCGVTTVAMQSTGVYWIPLYEILDARGLEVYLVNARHTKNLPGRKSDVQESQWLLKLHTYGLLRNSFHPPAEIRVVRTYWRQRGDHVHAVSTCIQRMQKALTQMNIQLANVISDLSGWTGQRIVRAMLAGERDPEQLAALSHPGIHATRQTIAKSLEGTWQPDLLFVLQQEVAMYDAYLQRIAECDQALEQHLKGVADKVADTLSDAESQTPSRETRRFGPKRRRKAGSHAPQFDLGRELHRISGVDLTRIDGIDVGVAQTVISEVGLDMTRWNTEAHFASWLGLCPDNRITGGKVIRKGTRHVVNRAATALRLAATTLLRSQSYLGAQYRRLRARLGAPKAITAMAHKLARLVYRMLKWGHEYVDKGLQYYEERHREQQVQLLKKRAAKLGLQIVEPEAA

SEQ ID NO: 252675 - protein, 387 aa, unidentified
MQASTVDTPTAGHCGTIFVAIELSQKSWLVTLHSPDKGKMSRHRLEGGDHAELLALIGRERDRAARALGAVPAVVSCYEAGYDGFWLHRLLMAAGITNYVFDPASIAVDQRARRVKTDRIDGEKMLRTLMAYLRGEPQVVRIARVPAPEQEDARRASRERGRLIKEQTAHTTRIKALLRLMGMAVGNPRRRDWLNWLATQRDWQGQAVPPRMLAEIKYEHARLMLVREQLEGLAQASAQADPAPAAAQMAERSELLLRLKCLGPVFATTLASEVFYKDFRNRREVASYFGLTPSPWQSGGIDRDQGISKAGNPRARCAAIELSWLWLRHQPESALTRWFRSRTHNNASKRNKRIAIVALARKLMVALWRYLTTGLVPEGALLKAVKA

SEQ ID NO: 252676 - protein, 343 aa, unidentified
MKVTTIGFDLAKNVFQVHGVDERGHVVVRKQLRRDQVAGFFANLLPCLVGMEACGSAHYWARKLQGFGHRVRLISPQFVKPYVKSNKNDAADAEAICEAVARPNMRFVPIKTMEQQAVLSLHRVRQGLVKARTAQANQIRGLLTEFGLVLPRGITNVMRRVPQLIDGAADLPASMRQLIARLLENMKVLDRQVKEFETQIKAWHQGSELSRKLEKIPGIGALAASALVASIADARSFKNGRQLAAWLGLVPKQDSSGGKPKLLGMSKRGDTYLRTLLIHGARSAIVAAQRKGKPNVWLSGLLARRHPNVAAVALANKNARTIWALLAHEREYRPDYMPRPATV

SEQ ID NO: 252677 - protein, 341 aa, unidentified
MNVFVGIDVSLRSVAICVLDGLGTILDELDLPCEVDAISDYLQGSSYEVERIGFEAGSMSQMLFHGLTAKGFDVVCMETRQVAAALSAMRNKTDRADARGIAHVLRAGWYSPVHMKSRVSHDERALLTSRKTLQSKCIDLENEIRGLFKVFGIRLPCRLSHGLFDETVRPIIEADDKLSLALMPMLEARQALFDAFREMDRRLYAIARHDPVCLLLMTVPGVGQVTALSFKAAIDDPTRFKSSRLVGSHFGLTPRRFQSGEMDNPGRISKAGDASVRATLYSAANALLMRSMKSSHLKTWGLKLLRTKGRRRTLVAVARKLAVILHRMWVTNTPFNAEGTA

SEQ ID NO: 252678 - protein, 373 aa, unidentified
MPKYSTAFGMDVHLRSTTVCALDADTGEAVTRRFPGNPWGEIAGWMDGFPGPSLAAYESGYLGFAPQRELAGLGVECVVAAVSKIPRSAADSASKNDRNDAARMAKAILAHDISPAWVPSPEVEGIRDLAGAYDGATARLATAKQRLLAFLAKRGFVYGGTTPAGNPRKYWTYDFLRWLDKVRPEDDGGVRALAALRNEVEAAAEARADLLSEYRAAVDASPIAAEVAALQSVKGCAFALAAAFSAEVGDFTRFRSGRQVTAYFGLAPSQRSSGDSARLGGISGAGNALVRKLAVEGSWCYAAARHQPKLMPRDTGVPLEIRMHGRKGSERLLRRREEMLARGMPAAKANAATAAELVRWLWALGMMCREGAE

SEQ ID NO: 252679 - protein, 387 aa, unidentified
MPQRNDLSRSAASLDHESTLIAVIEMSQSSWLGAAIAPGIARHPLKKPEANEEALLQLLRRWQDEAAGAGRTIARVAVAFEAGRDGFWLARWLRAHGIEAHVIHPTSVAVSREHRRAKTDRLDTGLLRRAFLGWLRGEPDHCSMVAIPTLEEEDAKRPNRERESLIGERTRIINRMRGCLARLGIRSFRPTLRKAPGRLETLRTPEGVTLPPNTLAELRRDMARLRFVTGQITEIEQARLERLRQAPDERPHAMVRLLARVIGVGIETADMLVHEVLSRDLRDRRAVARYAGLTGSPEESGARRREKGLAKAGNARVRRGMIQLAWRFLRFQEASGLAVWYRARTADARGGTRKTMIVALARKLLIALWRLVTTGETPDGVVLRPAA

SEQ ID NO: 252680 - protein, 343 aa, unidentified
MQNSTVVAVDVAKTIFEVAVSDRPGHVCRRDRPTRAHFLAFFLAYPGATVVMEACGSAHYWGRELMKRGHQVVLLPAHQVRPYVRGNKTDRTDTKAILEAYRNADIRPVPVKSINQQSLTTLHRLRSGWMAQRTARLNAVRGLLREMGVFIPVGSREVVPAVWEQLGDADSEIPSVLRPLFAEACQEIRDIEVRIKMVERELEALAAQLPPVILLMTIPGIGLLTATAFVAFVGDIRRFPSGRHLASYLGLTPREFSSGLKRRLGRISKRGDGYLRTMLIHGARSVLIHARKQQPDRLRSWAHDLGQTHVHNKAAVAVANKLARIIWAVWTRGMTYQLMPKAA

SEQ ID NO: 252681 - protein, 329 aa, unidentified
MQIQQIIGADLSKKTIDLVCHLSQNHIQIENSGSGFKGMLKWLKLQGINPAEVMIVMEHTGLYSYCFEDFLHRHQICFAKVNALTIKRSLGMVRGKNDKIDAKRIAGYGYEKKEQLITEAPVDKDLKALQMLHSTRARLVKQRAALICAIKEYRNIGIQEKDLILHSQLQMIKSFDKQIDRLETEIETVIEKQELLKQNFRLLQSIKGVGKVLALNAIIKTNNFTRFANARKFACYCGTAPFEHTSGTSIKGRTRVSHLADKQMKTLLDLSAKTAIQHDKELREFYLKRLSLGKSKMSTINIVRNKILYRMFAVVKRQTPFIENYLQAA

SEQ ID NO: 252682 - protein, 410 aa, unidentified
MEVMFDRVAGLDVGKETVTVCLRTPGPRGGRRSETRTFKTMTGSLRVMRDWLVEAGVSIAAMESTSTYWKPPFYCLEEVMEVWLLNAAHMKAVPGRKSDVRDAEWIAQLLEHGLLRPSFVPPPAIRRLRMLTRYRVQLMGDRAREIVRLELMLEDASIKLSSVASSLKTVSARAILTAMINGESDPLRLADLAKGKMRRKIPDLAQALSGHFDANHARLARSMLRRLDLVEQALAELDAVIMDACQPWQHQIELLQTIPGVGPKVAETIIAETGADMSRFPSAAHLAAWAGLAPAMNESAGRQTPAGKRHGNKWLTAMLVEAAGSVGRMHGKNYLAVQHARLTKRRGMGRAQVAVAHSILVAAYWMLKRDEPYHDLGADWHSRRNDQAHTRRLIAQLEHLGHTVIIDPAA

SEQ ID NO: 252683 - protein, 351 aa, unidentified
MNEITTVGTDLAKSVIVISAADKSGREIFSRQFNFAGFGEWAANLPPCTFGMEACSSAHYWARRLTSYGHTVRLIAGEFVNPFRKSRSMKTDRNDAQAVLAAVLQPDMRFVTPKSIDQQALLAWHRMRAGYIQDYTALMNRTRGILAEFGVWLRRSPHALRQALETLQTDGRLPTPVHGLLAEVKEQLRELQERVERCNVEISAHAQRSDDAQRVSALSGIGPITASAAIATISKASDFKSGRQMAAWIGLVPSQHSSGGQVRLGPITKRGDTYLRRLLVQGACSAMRAAQCKAPEKRSRVERWMIELAQRAGYRKALVGIANKHARIIWAILAKGEAYDPQAWQRHARAA

SEQ ID NO: 252684 - protein, 349 aa, unidentified
MWIIGCDYHPRFQQIAFVNTEGGEYGQRRLEHVGEAEQFYRSLAGADVRVGMEASGHARWFERLLAELGYELWIGNPAAIRAAAPRKQKTDARDAEHLLRLLCEGRFEGMRIWVPTAQDRDVRQLVLHRHRLVQMRTRVKNQLKAVALNEGMERKPGLWSRRGREQFEQLSLPAWTARRRQDNLELLDELVSRTEPLDGAVEQEAQRRPEAMLLMTHPGVGAVTALAFVLTIGNPARFARGKQVASYLGLIPAEDSSGGRQRLGHLTKQGNALLRGLLVEAAHIAVLRDPQLGRCYRRLAMKKNRAIAAVAVARKLAIRLWWMWIRGFNYEQFRECGSHAGKPGLAGGV

SEQ ID NO: 252685 - protein, 353 aa, unidentified
MKRIVKQAVGIDVAQDELVVCMGRMHEDLTLELYSHKTFSNTAKGFELLTTWVSKLSNADVELNYVMEATGVYHESLAYYLSDRGDHLSIVLPNKISNYSRTLDVKTVTDKTASEAITRFGLERKLDNWEPPKGVYRSLRQLTRERDQIVATRTIAKNQLHAEEAEAYPNKKSIARTKKLIAFLDKQEQEIKEELAQMIKEDEEVKRIVVLLCSLPGIGLLTAATILGETNGFDLIRNKRQLASYAGLDVKEKQSGTSVKGKPRISKKGNRYLRKAMHLPALTAIRHDERFKAIFARIVSKHGIKMKAAVAIQRKLLEMAYTLYKKQEKYNHEYLTKSEGKIAIEMQDLSIKN

SEQ ID NO: 252686 - protein, 322 aa, unidentified
MHPLQLGIDVAKAKLDCALRLSSGKFRHKVVDNTPAGFKTLGDWIAKEGATALHVCMEATGIYWEAVAEHLAVRPQTTVSVVNPAQIKAFGVSRMVRTKTDKVDAKLIAQFCAERTPEPWQAPTPAEKTLRALVLRLDALQVMRTQESNRLEVARESVAEGIAKHLKWLDDEIARLIKAIREHIDNDPTLKDKHRLLDSIPGLGERTTAVLLAFLAEPARFESARQAVAFAGLDPRQHESGSSVKGKPRLSKVGHSFLRKALYMPAMVTLYRTDWGKLFRERLTARGKPPMLIIGAMMRKLVQVSFGVLKSGKTFQPELHGA

SEQ ID NO: 252687 - protein, 357 aa, unidentified
MDKFVGFDIDNHKTIACVVQKGQKERFTTLPSMVEAMREFLQREKQQDDAVHLTFEISGEAGFLYDELIGSVDSVTVSNPAKMTWIYRTAKKNDRLDARKQAVLLSIGEIPKVHMPTRKVRQWRQTILHRRCLISRIVQVKNRIRAELKSPGLRKPPHRGSWWKTPNRLWMKGLSEMAWSSGHLWRMKLAHLLEELQLLETQLNHVTTYLDRYLAKRPAGTLLMTIPGVGPRTAEAVLAYTDDVHRFRRGKQYCSYFGLTPKLDESGSCKRLGHINKQGPSVVRWLAGESAWRVIKHSPAMKGFYERVLARQDGRKKIAVVAVARKLLSIMRAMLITGEGWNEELVCRQDPAWKKTA

SEQ ID NO: 252688 - protein, 402 aa, unidentified
MNAVGIDVSKGKSMVAIMRPFGEIVSAPFEIKHTASDIHSLVELINSVEGESRIVMEHTGRYYEVLAHQLSKANLFVSAINPKLIKDFDNDSLRKVKSDKADAVKIARYALDKWQNLKQYNVMDELRNQLKTMNRQFGFYMKHKTAMKNNLIGILDQTYPGVNTYFDSPARSDGSQKWVDFASTYWHVDCVRKMSLNAFIDHYQNWCKRKKYNFSQSKAEEIYGKAKELVPVLPKDDITKLIIKQAVDQLNSASTTVESLRTLMNETASKLPEYPVVMAMKGVGTSLGPQLMAEIGDVSRFTHKSAITAFAGVDPGVNESGSYEQKSVPTSKRGSSDLRKTLFQVMDVLIKTHPQDDPVYQFLDKKRAQGKPYYVYMTAGANKFLRIYYGRVKEYLSSLPES

SEQ ID NO: 252689 - protein, 315 aa, unidentified
MMSQEIAHVGVDVAKAMLDVSVLGQPKTWRVNNSPAGWRTLIARLRALECPVVVGIEPSGGYERGPVRALIEAGLEVRWTDPARVRALARALGAPAKTDAIDATMIARFVAQAEGRPVELDDERQRLKDLLAARQASGQIARQLTAQALALDHAPARAALEDLAAAAAREARSLTRQAMALLKDNPGLKAIWVRLQTAPGVGPLVAAELIAHMPELGRVGGKAIAKLAGLAPFIRKSGAWTGRAVCSGGRARPRQALYMAAVASLRAKLGPRPVFQRLIQAGKPVKLALTACMRRLLVTLNAMVRDSTNWRHATA

SEQ ID NO: 252690 - protein, 407 aa, unidentified
MYVGIDWAADEHAVCIIEADGRVADRFSIAHSAEGFEQLVSRLARRAEPAALPVALERPDGRLVDRLLEAGHPVVPVKTTAIKAWREAEVGSGAKSDPGDARVIADYLRLRGPGLRPLRPFSDETRALRAVVRSRSDLVELRVAAANQLRAVLAAAWPGAGELFADVSSPISLAFLERYPTATSAARLGEGRMGAFLRKHGYSGRRRPAELLERLRAAPAGLADGPESGARRDVVLAMVRVLRALDRSIKDLDRSVVARLGEHPDAAVFGSLPRAGRINAAQMLAEWGDCREAYDGPEAVAALSGMAPVTRRSGRHLAVGFRWACNTRFRNAMATFADNSRHASPWAASVYGAAIDRGADHPHAVRILARAWIRVIHRCWLDGVAYDPARHGAARRLQAQGMAPIAA

SEQ ID NO: 252691 - protein, 365 aa, unidentified
MLHIEIQVTQGLLLRFQRSLQSDCKNHLVMCYRFFIGIDVSKDYLDAGLLDGDSVGIVHHHKVSNSDAGITELLGWLEHHQDFTLEHSLFCLEHTGMYNFALLQFFSKHSANVWVENPIEIKRSLGVQRGKNDKVDAKRIAQYAFRMQDKARLWQPVREVTEKLRHLASLRERLVETKKKLLTPVEELSKVGNEVMAKMLSRSMNKTIKGLDKDLDAIEKQMKDIIDSDDDLKKLYALVSSVVGIGFVTAVNLIITTSEFKLFQCHRKFACYAGVAPFEHKSGSSIRGRTKVSHMANKKIKCNLHMASLTAIKYDEGMKAYYERKVAEGKNKMSILNAIRNKLLSRIFAVVERGTIYQKNYLAVS

SEQ ID NO: 252692 - protein, 342 aa, unidentified
MDNITTIGLDISKQAFHMVRLDETNTVDLRRKLRRAQLEAFFQKLDGCMVVMEACGSAHYWARKFETMGHEVKLLPAQHVKGYLRGQKNDFNDALAIAEASIHGSIRPVMKKTVEQQDEQARHRMRSLLIRDRVALSNHIRSFLYERGIVFALGISNIDKQVPGILEDAENDLTETSRELLDRLYRQFKVLSDEVRWFTQTIEKRAKEDEVSTRLMELPGVGPIVSSALKSWMGDGKQFRKGRDASAALGIVPRQNSTGGKIKLLGITKKGDTYVRSLVIHGARAALIRAANKNDPLSLWVNRIKERRGYNKATVALANKLVRMAWVIVARGEHYRPKAIAI

SEQ ID NO: 252693 - protein, 345 aa, unidentified
MSYYAGIDVSLEQSSVCVLDGEGKIIREAKVASEPEALIAWFGSLGLAMTRIGLEAGPLSQWLFAAMKQAGLAVELLETRHVHNAFRTMPVKTDRKDARGIAELMRTGWFRPVHCKSISAQETRAILTTRTLIESKLRDVEMSLRGVLRGFGLKVGKTTPTNFSERIKELVSGHANLQVVADALLAVREVLLREFRGFEKRVRTMARHDGRAKLLMTTTGVGAVISLTYAAAIDDPARFKNSKQVGAHYGITPKRYQSGEIDYTGRISKIGDKSVRTALYQAAHIVLTRPVKASAHKTWAMQLAKRVGMAKAKVALARKLAVIMHRMLVDGKPFDHKLPNQVAAA

SEQ ID NO: 252694 - protein, 409 aa, unidentified
MITYIGIDWSSKKHDVCFVNAAGAAIARQVIAHTPAGFAEFERQREQLGVEPAECVIGLETAHNLLLDYLWGHHYAQVYVIPPNQVNRESQARWPSGARSDPSAAQLLADMLRQDRTRFPIWCPDSVLTRQMRSRVSLLMHLTRHITALSNRLWAVLCRYYPAAITVFSDLTAQIELAFLVAYPTPQAAAQVTWTEFQAFAAEHRYTQRRKLPAAFARLQQAQPEADADTVATFQVEAVQLAQLLLPLVQAKQAQLHALTRLFRQHPDAAIFDSLPGAGEFLAPGLLVKFGDDRNRFPDAASVQALAGTCPVTDSSGKRHIVRFRKACDHEFRTLTQQWAKATLPVSPWAQAYWQDMRPHCRSNSAAYRRLANRWLAIVWKLWQTRQPYDEDYHLQQRAAHSQPRATKS

SEQ ID NO: 252695 - protein, 356 aa, unidentified
MYNAKYIGLDVHQATISVAVMDSTGKVVMESILETKATTILEFIHGLRGSLYVTFEEGTSAAWLYDLLVPHVSKVVVCDPRKNATLKVGNKSDRIDARKLAELLRGGHLSPVYHGENGVRTLKELARSYLAITKDLTRVMNRLKAVYRSWAIPCAGTRAYAAHCRAEWLKQLPEAGVRRRAERLYQQLDVLQPLRQEARRDLLAESRKHRANRLLRQIPCIGPIRAALLIAVIQTPHRFRTKRQLWAYCGLALETRTSAEYRIVAGQLRRSKKLLAIRGLNRNHNHDLKYLFKSTATLASSRCSGPFREFYDALLAKGLKPPMARLTVARKIAAITLTIWKKGERFDAEYLKRQAA

SEQ ID NO: 252696 - protein, 351 aa, unidentified
MTVYVGMDVHRKRSQIAVLDAAGEEQRNRNVPNDPVKLVPILGVLPPGTPVAFEAAYGWGWLVELLEELELEPHLVHPSRCKAIAAARLKNDKVDARTLAQLLRADLLPEAWIAPPEIRDLRALLRHRASLVRLATGLKNRVHAVLADRGITPPSSLWATPGRAWLQALELPPTPRAIIEDCCGVLDALATPIARLEGEIGALAKPDPRVQALMALPGVGKLTAMTLLAEIGDIGRFPTARKLCAWAGLTPQVRNSDRKVRHGHITKQGSPWVRWILQEAAQTAKRSPLFADTYGQLARRRGRNIATVAIARRLLARSFHILTQLEAAPAPEKARPGALASLHEPATRPLS

SEQ ID NO: 252697 - protein, 340 aa, unidentified
MGNVTTIGLDLAKHVFQVHGVDAEGATVLRKQLRRAQVLAFFSRLPPCLVGLEACATAHYWGRELRALGHEVRLMPAQYVKAYIKRNKHDAADAEAICEAVERPTMRFVPVKTADQQAAVLLHRGRERLVRQRTGLVNALRGHLAEFGVIAPQGLRNVGKLIAIVRDEGDARLPDLARQVLQVLAAQIEQLEAAVSAIEKQLMAWHKSNPISQRLASVPGIGPIIATAIAATVVEPSGFRSGREFAAWLGLVPRQNSTGGKHRLGGISKRGNQYLRRLLINGASANLLRSKATNADPWVIGLRQRRPSLVVAVALANKTARIAWAVMHRHENYQRVAAAA

SEQ ID NO: 252698 - protein, 346 aa, unidentified
MLYAGLDLSRQRLDVHVLDAEGRTVTTTAVTPDAPGLRALAGRLRLYGSEVRAAVESMNGARFVHDELELLGWDVELADTVKTKGIAPLAAKTDKIDARVLAELCRLDLVPAVWLPDPTVRAEREEARFRLHLVKHRTALKNRIHSTLITFGHPVPVSDLFGTAGRTLLASLAIPEPWATTLARTLELVDELDRRIDRCEAELRSAGADHRYVPLLVTVPGISWILAYTIASEIGDIGRFASPKRLTGYTGLCPRVFQSGSTDRRGPLAKSGPKYLRWALIEAAMHASRSARYHDRYQRTKRRLGKQRGGQIARVELARELATAIWHMLTRQEPFRAAGPAFRLVA

SEQ ID NO: 252699 - protein, 369 aa, unidentified
MSKTLYVGLDVHKDTIAVAVAEDGRGGEIRFHGTIVNSADAVLRLTKVLTTQGNTPSFCYEAGPCGYGIHRLLTKLGFECAVVAPSMIPRKTGDRVKTDRRDAEMLARLWRAGELTPIWTPDEEQEAMRDLIRTRKQAVDAVKTAKQQLLSFLLRHGLRYETGKYWTQRHRRWLAEMRKFRFPYQQLVFEELKRTVHQNEERVATLDQAIDDAIPRWHFAPVVDALRALRGVNTTIAATVVAEIGDITRFSNPRQLMAWLGLVPSEHSSGNTTRRGRLTKTGNALARTMLVEAGWSYRHPPKEGHPYLKRSAHLPQHIKDIGWKAQTRLCKRYRDLSRTGKPQPRVLAAIARELAGFIWDIARKTPLAT

SEQ ID NO: 252700 - protein, 328 aa, unidentified
MTSSLGVDVSKAKLDVALLNDEGKYRCKVFANSGMGFAALHQWLQTHLPQGQELAALHVCMEATGSYHEPLALHLHDLGVRVSVVNPLRVKRFIELEGTRNKTDQGDSKSLARFCRMASPELWEAPAPGVRALQALVARLDALQEMRQSEANRLEVAHGVVQASLHEMLATLDKTIAQVKAQIRQTIDDDPHLRGRAQLLHSIPGLGDRTIPQLLAYIGRPERFKSVKALIAYASLSPAIRQSGTSLNKRGGTHAQGHRQLKHALYFPAMVAGRHNPAVAAFWQRLKAQNKPGKVIVVACMHKLLAIVYGVLKSRTPFDATRFCDANT

SEQ ID NO: 252701 - protein, 355 aa, unidentified
MKKDITVNDLVVVGLDLGDKYSWYCRLGISGDIDGNGRVRSNPKEMRKFFEKIGTCRIVMEVGPMSRWVSALASDCGFEVIVANPRKVRAISESDSKTDRADAELLARLGRVDPKLLHPIRHRGPEAQADLAVLKARAELVRTRTALVNHVRGVSKSFGVRLPLCSTPSFEKKNQTLLPAVLRPAFEGILKVLQSLGTAISEYDEQIDQLSETKYKETALLRQVPGVGVQTSLTFVLTLEDPHRFKKSRQVGSFVGLRPKLKQSGARDPQMHITKAGDADLRCLLVQCAHRILGPFGHDSTFRRWGEKLSQHGGKATKKRAIVAVARKLAVLLHRLWITGEVYDPLKGISQPQVA

SEQ ID NO: 252702 - protein, 414 aa, unidentified
MPYKIAGIDVHKKVLMVVVLDASTPEEKAERRRFPTMPSEIRRLLIWLREQGVEEAVMESTAQYWRSVWLELEPYMRLHLAHAFSNRAPRGRKHDFKDAERLVRRLIAKELILSFVPDGEQRTWRSLTRMKLQLTRDRVRLQNQIECLLEEMRIKLSIVVSDLLGASGLRMLRALATGETDPKKLAQFGDARLRCTEEQLVDALTGRVQPMQRAMLGLQLERLQLIDRQIAELNRMIAQAMKPHQEAVMRLAEVPGFGVDSAQPIIAEVGVQASTFPSAAELTSWVGTCPGKDESAEENHSSRSAKGNKYLRRVLNQAAHPAVKKKGSHFQVVFRRLLPRLGYQSAIWAIAHRLCRVVWKILHEGVRFIEQGREPDPKAKNKRARMLARALRKLGYEVTITPINLAIAENGMQI

SEQ ID NO: 252703 - protein, 433 aa, unidentified
MNNMHIAHHSSEGKTKYIIKAVNHYCAGLDVHRDFVCVTTLCGKDDDISMDYREFRTVKRDLLQLRDWLLSKNITVAGIESTGKYWYPIYNAFEGIIHLNVYNSRHIKNIPGRKTDKSDSEWIARNTRYGELKASFIPSSRIRDTRMIARTRKSVLQIRGTCRQIVHGYLESSSIKIGSVLSDVFGVSGQELLHLLVSDSAISPGKIEQCLHGSLKDKSEEVVIAMDGYVNDVHKSLIRSMLKNEETLTLRIKSLECDLKRQLITNADERHVLNLLTAIPGVSELSALLILAEIGFDLSSFPNEKQFCSWAGLVPGKHESAGKNKTGKIHSRACYMRTLLVELSLSASRVKNSFYSAKFASLRARIEPQKAIIAIAHKIAKAIYVIIKYHQPYEELGVQRIQQDMYQRDINTLRRLQQRLGVETIISQLSGTP

SEQ ID NO: 252704 - protein, 343 aa, unidentified
MKIKRVGVDLAKNVFQVHGVDSKEHPVWRRRLSREKWVSILLSKVEPGCEVGMEACAGAHHWARELQVHGLRVKLVAPQFVKPYIKSNKNDANDAEAICEAMSRPTMRFVTVKSVEQQDIQAVHRIRSELVSQRTAKGNQLRGLVAEYGLVAPQRLSHLRRAIPMWLEDAENGLSGRLRRLLDGLRGDLVELDRRVEELDEEVEAIAKAHPVAQRLQQLRGVGPLTATALIATVGNGEQFAKGRDLAVSLGLTPKQHSTGGKERLLGISKRGDPYLRSLLVHGGRAALYAARNKDDRLSVWVTNLAARSHPNVAAVAWANKTARMAWSMIRHGTDYQPERAAS

SEQ ID NO: 252705 - protein, 459 aa, unidentified
MAQDGDTVEVEEPEEILARVAAIDVAKASGMVCTRVPHPARPGRRATKVWQVPATTNAIIELAEQLAGQGIQRVVVESTSDYWRAFFYLLQARGLVVWLCNARDVKHLPGRPKTDRLDAVWLARLNERGMLRPSFVPPAEIRQLRDYTRLRWDLTAERARQVQRLEKLLEDALIKLSTVATDIMGVSGRAMLEALVAGQRDPKALAELARGRMRGKRGALVQALTGRFDDHHAELARMLLDHYDALTAQLDRLTARIQELLGAIPAAQAPPDGAGPTGSGDGGTTAAGAHRQPAQPPLGALERLDEVPGIGAKAAQVIIAELGLDMGQFPTPAHLVSWTRLSPRTIQSGATRRAGATGKGNPYLKGVLGEVAAAAAKTDTFLGERYRRLVRRIGKLKALVAIARSILVIVWHLLADPTARFHDLGAGYYTSRIDKDRKTRNHVRQLQALGYTVTLAPAA

SEQ ID NO: 252706 - protein, 340 aa, unidentified
MRKLYGAFDLHSSNNYLGISDEKDRRVYKQRLPNQPDVILAELEPYREQLVGLVVESTFNWYWLVDLLMDNDYQVHLANPAGIQKYKGLKHSDDKHDAFWLAHLLRLGILPEGYIYPKEERPVRDLLRKRGHLVKLRTSLINSLQAIIHRNCGVKLNARKIKAIKEDNVAPLLSGQEDLALSGMVSKEAIDYLGRQIRKVENVVLDRIKLKEEYIYLLTIPGIGKILALTIMLEVGPVSRFQKAGNLASYCRKVPTKWTSNNKKKGKGNKKNGNKYLAWAFSEAAEFARRYDDQARAFYNRKTSKKNFMVAHSALAHKLARAAYYVMRDQVAFDSQKLFA

SEQ ID NO: 252707 - protein, 332 aa, unidentified
MKISETIGIDISKSWIDARMHVARLEKRFDNNRTGFRHLISWVEKHLSATKDSILFAFEHTGLYSYGVSSYLSSMGYHFILIPALEIHRSMGIVRGKDDRIDAAKIALYAYRRKDEIKPYQMPAEIICHLRHLLALREQLVKQKAGFLASLKEHSRFFTKSQESDFFQIHERMIHYLAKQIDKIDVKLTDTIQHDQAIYQIYELIMSIKGVGPQTAYYMIVYTNGFTLFKEWRKFASYAGTAPFPYQSGSSIKGKTKVNQMANKKMKSLLHSCAMSAIIYNPEMKAYYKRRVEEGKSKMSTINIIRNKILARIFAVVNRGTPYVNTYGFAAA

SEQ ID NO: 252708 - protein, 338 aa, unidentified
MNVTTLGIDIAKSVFQLHGVDAKGHRVLTERLTRKELMAYTAKLTVCTIIMEACSSSQYWARQFRRLGHEVKLISPQYVKPFVKRHKNDKHDAAAIVEAGTRPDMHFVPTKSIEQQDIQCLHRVRSRLVAERTALANQIRGLLAEYGIVIAQGVHHLRKQLPLILEDAENELTVLGREVFADLYQHLVEVDRRISQYEAKLTQVFKASEACQRIATVPGVGILTATAMVASIGDAKVFKHGRHLAAFLGLVPNQHSSGNKQRLLGISKRGDTYLRMLLVHGARAALRVAHKKDNAPSRWAVNVKSRAGENKACVALANKNARVIWALLTQQVTYQPAA

SEQ ID NO: 252709 - protein, 309 aa, unidentified
MQAITTIGLDIAKSIFQIHGVDAAGNVIVRRQLKRRYVLPFFQKLPACLIGMEACASSHHWSRELTALGHTVRLMPAAYVKPYVKRQKNDAADAEAICEAVSRANMQFVPTKTVEQQSCLLLHRTRHLFIRQQTAVINAIRAHLAEFGIVAPVGRNGVEQLLDVVADTSEKRLSEIARACVLALGAQLRTLKVQILNFDRQIMAWHRSNEASRRLDEIPGVGPALATALVASVADPKAFRSGRNFSAWIGLVPKQHSSGGKDKLGSISKQGRSLSARPVHGRRAGRHPLCQRSCPAEPRTRTSAISRNI

SEQ ID NO: 252710 - protein, 412 aa, unidentified
MNKRKEDLIYVGIDLHKDSHTAVILDCWNTKLGEITFANTPAEFPKLIRKVSKFCTENKEPVYGLENAYGYGRGLAVWLIAKGLMVKDVNTSLAHRQAKCRAMYKKSDSDDAEAIALATINMLDSLPDACPNDAYWSLSQMVNRRDNIMTQRIRLKNQLHEQLCIAYPSYKQFFEDIRRKTALFFWEHYPSEKYLRGKTPESLADEMKDVGHNSFSVRRCKVILDAVKRDHTKAKEYQNYRDVITKGLVKDLQHYDEQLKAVDKELEQLYHDLGCTLATMPGLNITTAVKIMSEIGDVNRFPNPAKLAQFAGIAPINLSSAGKGKDKASKQGNRRLQATLYFLAIQMIQVSTKGKPRNPIFRDYYDRKLAEGKNAKLVLVSIARRLVNIIYGMLKNKTEYRLPCLETGEVSE

SEQ ID NO: 252711 - protein, 423 aa, unidentified
MMKLKYSICCGLDVHKNVIVATIVTTNKDGISEYLQKSFSTINSDIQRFHNWLIENNCYHVCMESTGKYWIPIFNYLENDIDVCLTHPKYVKAIKGKKTDKKDSKWIADLYKFDLVRCSFIPPKDFRQLRELSRYRFKLVCMKSSEKNRIQNCMTISNVGIASVLSDPFGKTATEIISYLLEHTADSMDEKAVRKLIKKGAKSKSDEIIEAIKGYNIETDQAKKLELAQGHLEYLDDMITQTEVELYVRIKPYYEFVEFVSTMPGMTELSSTIVLAETGVDMDIFDDAKHLCSWCGLSPANNESAGKKKSVRIAKAGDYLKPMMVQCALAAIKSKKQPYFAIKYGRIKKRRGHKKAIIAIARMMMVCIYHMVSEKKPFTPTDYEELMNPQNHVERVVLNENNVFAYLESLGYDSSKLVKRNDN

SEQ ID NO: 252712 - protein, 412 aa, unidentified
MEGETVIAGVDTHKDVHVLCLLDGLGRKIWSGSFGADPEGYDRLAEAIGDPGSCMVVGVEGTASYGAGLTRRLVELGYNVVEVLRPKRDKARPGEGKSDPLDAERAARKAASGRGCSVPKSQDGWVEAVRQLYVARRLAVATSTSCVACAKSMLTTAPSALRERFRGRERPKDLMPLLARGRKAGDALEESVLASLRSVAAVWKEARSQVESLDERIRALLEANAPALLGVEGCGTTTAAALVVAAGDNPGRLKGEAAFSMMCGASPIPASSGKTDRHRLNRGGNRQANWALYEIAIKRMAYDERTRRYVARRTSEGKSRREAIRCLKRYIAREVYRVLMDPNPDGAAPEGPELAKMRKAMRVTQKKAAAELGLSAATLGHLERGKRRSTKLERRYYELLCELERTLPQTAS

SEQ ID NO: 252713 - protein, 355 aa, unidentified
MTNTKYIGLDVHKESISIAVLNSAGKVVMECVIETKASTILQFIHGLRGDLHLTFEEGTWAGWLYDLLKPRVTELVVCNPRKNALLKEGSKSDRIDARKLAELLYMSKLSSVYHGEHGLRMLKELSRSYLTITKDLGRVMNRLKALYRGWAIPCAGTQVYAPHYRSEWLSKIMEAGVRRRAELYYQQLDALRLVRQQARKELLAEARKHGATKLLRKIPGIGPLRAAHLVALLQTPHRFRTKRQLWNYSGLGLETHDSAQYRVVEGQLQRSKKPVTLRGLNDNHNHDLKDIFKGAAMRASTAAGPLRDFYEALLAKGRKPTMARLTLARKIAAITLIVWKKEVRFDANYLKQQAA

SEQ ID NO: 252714 - protein, 343 aa, unidentified
MQITTIGLDLAKHWFQVHGVDANGHVVVRKRLWRSGVIAYFRSLEPCLVGMEACATAHHWARELTALGHTVKLMPPAYVKAYVKRNKNDAADAEAICEAVTRPSMRFVPVKDTEQQSVLMLHRARSLLVRQRTMLVNALRAHMAEFGIIAPQGLRHVEVLTKTIAHQQERLPELARAMLQMIVDQLNGTMARIREIEVRLARWHRESRVSRLLATVPGVGIMGASAIAATVADPSLFRSGREFAAWLGMTPRQNSSGGKERLGRTSKRGDKYIRSLLTAGAVAVLRHARNRPTRDGAWVRALLARKPTKVAAVALANKTARIVWAVMMRGEGYQPKEVFGQPA

SEQ ID NO: 252715 - protein, 311 aa, unidentified
MTDDTIGIDISKATLDIHRLSDGKMMSFSNCPAGFKALSKLCAQTPVTRVVYEATGAYHSGLERALGAHLPLVKVNPLQARRFAQAQGVRAKTDAVDAKMLADMGHIFALEPDEPAAEIQHDLKELRSFRSGLIKDRTGIMSRMKTQTLSITCRQSKARLGQVDKQIAEIDAEVDRLINSNDRLAHSMKILRSIPGIGAVCAATILIEMPEIGSMDRKQVACLTGVAPMTRQSGQWRGKSFIQGGRKVVRDALYMPALVAMRHNPDLKAKYQAMIKAGKPPKVALTALMRKLIELANALIKANRNWVKKAA

SEQ ID NO: 252716 - protein, 414 aa, unidentified
MLSSEIRCVVGIDVAKSAHVVCALEAPSGAVRLKSTPIPATAAGYAHLVEWLGTWAAGEPSRLLIGLESTGSLWEPLYDALTQAGYTAVLLNPHQTAAWASSLGLRAKTDGIDAHTLARGLLAGWARASSVPDETVQALRTLTRTRRDLVASQSAARQRLHDELVPVFPELVGHLPNHADLGAPAVLRLLTVYRSAQSLARAPLDALSHVLEEASAGRWGLAQAEALQGLARTSAASTRAVAARAVVVRTLGLHLLDLQARVAELDGALAEVLRTDPPSQQLQAEVPGLGPTWTATIRAELGDVSRFTRADQVVAYAGLEPRTHDSGRSAGQRHLSKRGPGALRHALYMATLVAVRCRPEWRLRYQRLLDRGRAKKEALAILSRKLLQVIYHLLRTGASYDPACINPAPLAGQG

SEQ ID NO: 252717 - protein, 322 aa, unidentified
MHAYHLGIDVAKAKLDCALRLPEGKILHKIAENKPAGFAQLLVFLEKHHAQGVHVCMEATGIYWEAVAEFLSAKSGFTVSVINPAQIKAFAASHLTRTKTDKVDAGLIAAFCAERNPEPWQAPPEAERALRALVLRLDNLQTMRTQESNRLEVARPAVSAGIASHLEWLDGEIKRLIKEIHQQLDNDDDLNAKQKLLDSIPGLGERTIAILLAFYGQPERFANARQAAAFAGLDPRQHESGSSVRGKPRISKVGHAFLRKAFYMPAMVTLYRTEWGQRFRRRLASAGKAPKLIIVAMMRKLLHVAFGVLKSGKPFDPALHAA

SEQ ID NO: 252718 - protein, 394 aa, unidentified
MPTVTTRSTDPTAASADLSALAAASRSTLHLALDLGNSRWQLAFATTVALAPRLRSVTARDLATLDAEIAAAKLRFGLPPEAPVVSCYEAGRDGFWLHRALAARGIANVVVDSASIGQNRRARRAKSDRLDATALVRLLLRHHAGERGVWSVLHVPSVEEEDRRHLHRELFTLTRERTRQVNRIKGLLALHGVVLPRVRGLPAHPPAVVGADGTPLPGGVTARLAREWTRLRALQRDLLALRAERRHLLASDAAAADPLLRMVTQLQALKGVGEVSAWLYAVEFFSWRDFRNRRQVGALAGLTATPRESGDVSRELGISKAGNMRIRALAIELAWSWVRRQPTSALTQWYQARFATAGGRQRRVGIVAVARKLLIALWRYLHTGALPEGALLKT

SEQ ID NO: 252719 - protein, 458 aa, unidentified
MERKMKLGMDVVNFNAAGIDVGSRSHFVAIGQELEDVREFGVYAEDLTALCQWLLESDVTTVAMESTGDYWQNLYVELISFGLEVVLANGKFTKNAKGKKTDVIDCRWIQKLHTLGLLTGSFLPDLTTEQLRTFCRQRGNWIHLAASATHKMQKYLKLLNFRLDVVVKDVCGLTGMKIIEDICKGNLDPYSLAEHRHYNCRKPKEEIAKALHGNNRKDYLFGLQQEFESYKFFQKKIGECDKKIEHFIIKELKQHPEREKTKTTEKPHKRINKNAPQIKDLNQKAFRYFDGVDLFAIEGLSHSSVLSIMSEIGPEGFKKFKSAKQFSSWLRLAPNNKISGGKILSNRVPKGINRLKIALRQAANAIGNLKDTHLSDFFRRVAYRKGRHSAVSATARKLAVIIWNMIINKIPYQLPKQYLFLDQKRKLGLVNRIRKQIDRFELKPEDLGFEKTLIINKN

SEQ ID NO: 252720 - protein, 413 aa, unidentified
MRNKTKKIQIINEKVMIATIDIGMTKNTGYWRYNNISIKPFEFANNADGFKRFWQKIWTAKIINRADNVIIGFEPTGSYEQPLIHYLINKPVKLVQINPTHTKRVKELNDNSPLKTDKKDPEVIADIIQLGHYLSLVVPKGSSARFHNLVNSRESTIKNRTMSINRLHRSVYMIFPEFLEVMKTVSSKSSMYLLKHYSTPFDIINLGLESLACCLRKTSRGRFSIEHAERLYNAANNSVGIKEGVDSIVMGIQQIIKEISLFNDFINEIETKMNHYLKEIPESQYILSIKGIGEVTTAGIIGEVGDFNDFHNQRAIIKLAGLNLYEVSSGDQKGIRHISKRGRSLLRKILFFASLNVVRKNGIMHEYYHRLIDNGMIKKKALIAVSRKLLKLIFSLARKKRYYIHNYEMKSVA

SEQ ID NO: 252721 - protein, 354 aa, unidentified
MHTVGADVHVRNSYLDVTTDEGQALRRGRCPNSLADLAEFLAGIDPAEGFHVVIESTTNSRAIARMWQEYGQQAGVAVQADVVNARKVRIIAESVCKTDRLDAQVLSELGRSNLRLPVCYVPDDEVFALREHLRARQDLVQIRTMLKNRVHAVLHRRGILTPEQDLFGKAGQEWLGQIELDEAGRQIVSRFQEGLATIERTIAESTAMLRRIARQDRWSKQAALLQTIPGVGLITSLTMLAELGDLSRFASRAAVTNFVGLIPVTRLSNDHGFQGRITRRGSRHLRAVLVEAAWVAIRRVPRYQALFERIKQRKHACTAIVAVARQILEDGFTILRKGESFRFEGRRVVASVPG

SEQ ID NO: 252722 - protein, 350 aa, unidentified
MNVNHYIGFDVHKKSVSYCVKTAAGQIVEEGKLRATHDVLRQWAGKRPEPWHGAMEATLFSGWIYDTLRPFAAELQMGHPALMKAIAASKKKNDKLDARKIADMVRCNLLPACYVAPVEIRELRRMLRYRNLVVGQATRLKNKMSGLLMEVGAEYNKERLHGKQYFTELLDTVAEVPESVKDLLRLSRGAMEMFETTQQQLLARLRRDSLLARRVILLESIRGVGEVTALTWALEVSDPHRFSSVARAVSYCGLTSALVSSADKQQRGPLSKQRNAHLQTVLVEAAKLAPRWNPQLAALHARELERGNRNRATLAVARKLVAYLLAVDKSGQPFEVRNPLVAETEAQEVA

SEQ ID NO: 252723 - protein, 402 aa, unidentified
MGIDLHKQHHTAVFIDCWNQKLGEIKFDNKPSAFPLLEKEVKKHTKKGLSVVYGLEDVGGFGRALAVYLTENKCWVKEVNPKLSTARRKSHITVQKSDSWDAECVARVLKDELLQLPDAKPIDLYWAISQLVTRRKGVVKVLSGCIKNLHQQLGYHYPSYKKFFSEIDGKTALSFWETYPSPRHLKDMEEATLAEFLRSHSNNGLSHKKAAQILSLIEADGDTYRDFQDKRDFIVQSLVRSIRFNQQELAQIEEEIGGLIKQLGFQLETMTGIDVVTAAELVAEIGDIHRFATPDKLARFAGIAPIICGSGNKVRNYKSKQGNRELHDIIRNLAIRQIAVTRNKKEPRNPYFHSYYEQKLTAGKTKQQAIVCIMRKLVNVVHYLMRTKAAYIIPEVSIKQAG

SEQ ID NO: 252724 - protein, 366 aa, unidentified
MQKISTVGVSANKIFNGCQLTIGLDLGDRWSFYCVLDESGEIILEQKLPTTLAAMKQTFARIPRSRVALETGTHSPWVSRLLTPLGHEVIVAHAQKVELITKSTRKDDRHDAKTLARLARIDPELLGPVRHRSAAAQIHLTVIRARAELVSARTALINAARGLTKSYGERLRKCGSQQVSRELAMGLSAELREALEPLLREVESLNERIKEYDRWIEKMAKETYPETELLKQVKGVGDLIALTYVLTIEDPHRFRKSREVGCFLGLRPGRRNSGQSEPQKRISKEGDEYLRTLLVQGAHYILGPFGEDSDLRRWGRKLAERGGKNAKKRAVVAVARKLAVLLHRLWVSGEVYEPLHNSQKVMRAVA

SEQ ID NO: 252725 - protein, 410 aa, unidentified
MTAFTLHQFALFIGLDVGKSEHHATALTADGTKIYDKPLPNSEPKLVQLLTKLVSQYGPTLLVVDQPATIGALPVAVAQSLKQVEVAYLPGLTMRRVADLHAGNAKTDARDAYIIAETARTMPATLRAIVASDEQIAELAVLAGFDDDLLAQTTATRNRLRGLLTQIHPGLERVIGPKLHHPGVLDALTRWPTPAALKTAGPGHVRRRIAKHNPRLAATLTQDIFDALHAQTVIVPGTSAAATIVPMLATQLVELYTQRATVFQQVEILVEAHPLSLVLTSMPGVAIRTAARLLTEVVGKHFKTAGHLASYAGIAPTTRRSGTSIRGEFANRGGNKRLKSALFNSAFASLHHEPSRRYYDKKRAEHKTHKQAVIALARRRLDTLYAMLRDGTFYQDPTTPNAVNNLSQAA

SEQ ID NO: 252726 - protein, 418 aa, unidentified
MNAELIARLSRRYLALDIHKHYSVVAGVNFEGQVVVEPVRIEHADLEGWLKNHIQPTDYVVIESTTNAWHIYDLLVPLAEKVLVANPIKVKQIAQARVKTDIRDTLILARLLAANMVPEVWVPPAHVRELRYLLSQRRHLVGMHTATVNRMHSVAHRHHLNHPRGKRFNEQNTKWQQDNVLSESEQFQLELDMNTKKHLAEQTEKITEKLRRMSHQKPWAESMLYLMQLPGFGVITGMTVLAAIGDITRFESPKHLVSYSGLNSGLEQSGVKLRGKKITKDGRKDLRWAMVEVAQRAVKSDPLWKHRFIELCRRMHKNQAIVAIARRLLELVWYVLSRKQAYRNFSDERIAYKYLTWSWQLSEADRDGLTRQQFTRYYLMKLGIGHDLEQIALNPRYKRNLASEAEVLALRPELKQTE

SEQ ID NO: 252727 - protein, 310 aa, unidentified
MDRNIVGIDVSKDRLDVEVRPSGEAFAVGRKAVGLEQLIARMRELSPHVIALEATGGFETVVAAALGAAGLPVVVVNPAQVRAFAKAIGQRAKTDPIDAGVIAHFAEATNLEPRPLPDEQTRLLADLVGRRRQIVAMIGAERQREQRVTAPRPRKSIARLIKALEKELASLDADLDDAMKGSPAWRAKEELLTSVPGVGPVITRTLVAELPELGQLGHKQITALVGLAPFTRQSGKWRGKSFIGGGRTAVRAALFMGAMVAKKHNPVLKAFFDRLVAAGKPKMVALIAVARKLLTILNAIVRDNQPWQTA

SEQ ID NO: 252728 - protein, 343 aa, unidentified
MDYFAGLDVSVKETSVCIVDDAGKIVREARVASEPEALLQVQTNTSYRFKRVGLEAGPLSQWLYSVLAEAGLPVICVETRHMRAVLKAQINKTDRNDARGIAQMMRAGLYRPVHVKTLRSQKLRMLLTHRKLLQSKAIAIENDLRATLRNFGLKVGMVGTVKFETRIKELVENLPDLAVLVEPLLIVRRVIREQLGILHRRLLAIVRDDDVCRRLMTIPGVGPVVALTYRVTVDVPARFRNSKAVGAVFGLTPAKYKSGENDRTGAISRCGDEMMRMMLYEAAQSMLVRSTKWSWLKAWAMKIARHRGMKKAIVALARRLAVIMHRMWVDGTEFRWTREVAAA

SEQ ID NO: 252729 - protein, 410 aa, unidentified
MEVLYPRCAGLDVHKATVVAAVRLAAGGRVAREVRTFATTTAGLLELAAWLAENGCTHVAMEATGVYWRPVWHVLAEGGFVLVLANPAQVKNVPGRKTDVNDATWLAELLAHGLVRASFVPDGPTQELRSLLRTRKQLAREKASHTLRLQKTLEDANVKLDGVVTDLLGKSGRAMLEAMAAGETDPGRLAALAHPRLSATPERLREALRGRVTAHHRFLLRLHLDQVDALDAAVARVDREVEERLAPFRAAVELLASIPGVGALAARVIVAEIGLDMARFPTAGHLVSWAGLCPRSDESAGKRRSVRLRKGAPWLKTALVQCAWAASRKKASYLQAQYHRLRARRGPKKAVCAVAASILTAAYHMLKDGTAYADLGPDHFDRRSREVQARRLVRRLGDLGYAVELAPLAA

SEQ ID NO: 252730 - protein, 410 aa, unidentified
MDLLRRELPASSLVVAIDPGKAFNRVWLTSGEQGLIGEPVSLPVLRDGIEELQRLIRASGVPGPPVIGLEATGALHRAWASEIERRWPGSLRLFAPSETTAARGQLGSRRFKTDDRDCAALVWLMRQGAGRPAQPEVVEAMLGTVRYRAQLVDARRVLQQRLHDQLNMLCPGLSAPASHGRTLKLESPTGQAVLACAASFQGRAASKRSLVARAPGRMTEATAAFWAERWKRLLDPPADAQLRAVRLSQDLRRWQQLQADIALAERQLADLLADSDGQILTTLPGVAVVRAAEFSAYTLPIERWASPEHLYSATGLAPASYQSSTITRRGRISRQGLAEHRNALMGIAWGLSQNSEAFRVRDRELRVRGFRPIQARVALARHACRLCWRLLQSRHPYDEERYARTRRRGR

SEQ ID NO: 252731 - protein, 406 aa, unidentified
MLLVGDDWAEDHHDVEIMDPAGRTLAKARLPEGIAGLARLHALIAGQRGDDAEQVEVRIGIETDRGPWVAALTAAGYTVYPVNPLQAARYRDRHAVSGAKSDAADAHTLADMVRTDAHQLRPIAGDSPDSDAVKVVARAHKTLIWERTRQTQRLRHALREYFPAALDAFDDLDAADTLELLAKAPDPTAAVRLTRAQIAAALRRARRRHVDTKTTAIRAALRTPQLGRPAVVVAAYAATTRAAVAVLATLNAQITALEAQVGAHFRRHPDAEIILSQPGMGPVLGARVLGEFGDAPGRYADAKARKNSAGTSPITRASGRRKTVHARHVHNDRLVDALMLQAQSALQASPGARAYYDRQRARRLDHNPALRQLANRLVGILHGCLKTRTRYDEATAWSHHNQQTAA

SEQ ID NO: 252732 - protein, 344 aa, unidentified
MELYAGMDLHSRNTLVGVIDSSLKRVFEKRFEKRVPNDLCLIVDKLEPFRSRLKGIVIESTYNWYWLVDGLMEAGYSDVRLANPSAIKQYEGLKHTDDRHDAFWLAHLFALGILPEGYIYPKEDRPVRDLLRKRSFLVKHRTAHILSLQSMLEREKAYKLKGNEIKSLKVDDVERIFCEEHLVLSAQANRASIEFFGHHIKRIEKAVRKRVKLCKSFEYLLTVPGIGDILAMTIMLEVEDIARFARVGNFSSYARCVSSQRLSDGKKKGQGNRKNGNRYLAWAFVEASHHARRYNDRLRSYYQRKLAKTKQAVATKAVCNKLARACYYIIRDQVAFREEALFCS

SEQ ID NO: 252733 - protein, 418 aa, unidentified
MGGIREVAKVACGLDVHRSEVVACLITSGTRKRPKVETRCFRTVLAELFQLRAWLVEAGCEVVGMEATGPYWKPIYAALEGHVQLVVGNPLQMKGLKGRKTDQKDAEWIADLTRLGMIKPSFVPPPEFRALRDLTRERRNVIHARTILRNQILKLLEGTGIKLASFISNVFGVTGMGLLRSLSEGQDVRAQLPLLVKGTLRRKLTDLNLALEQPLPEHLREVLAIQLMRHDDLDRVVSHIEAMIETRMEPYHAERNLLLQVYGLGITAVNIILAEIGVDMDVFPTPAHLAAWAGVCPGNRETGGKRISGTTRKGNTYLTTILVECALATVRAKGSYFRSKYHHLCARIGHKRALMAIAHKLIRLIHRLLSRKEPYKDLGETFLDKREKTVKADKLTRRLQALGYRVTLEPLPDAGLIA

SEQ ID NO: 252734 - protein, 403 aa, unidentified
MNMNAVGIDVSKGKSMVAILRPYGEIVSSPFEIKHTSGNIQSLIKQIKSIEGESRIVMEHTGRYYEPLARELSQAGLFVTAVNPKLIKDFGDNSLRKVKSDKADSVKIARYTLDSWTDLKQYSLMDEIRNQLKTMNRQFGFYMKHKTAMKNNFIGILDQTYPAVNTYFDSPARDDGSQKWVDFATTYWHVDCVRKLSLDAFTDHYQKWCKRKKYNFSKAKAEEIYGATKELVPVLPKDDLTKLILGQAVEQLNTASKTVEELRTLMNKTAAKLPEYPIVMEMTGVGPSLGPQLMAEIGDVTRFTHKGAITAFAGVDPGVNESGTYEQKSVPTSKRGSSVLRKTLFQVMDCLVKTKPQDDPVYAFIDKKRAQGKPYYVYMTAGANKFLRIYYGRVKEYLMSLTE

SEQ ID NO: 252735 - protein, 537 aa, unidentified
MPSVSHLGPIHLGLDVHKDTISVAILAPDRDGPDVERIPHDEASVRRLVGRLGDPRWLRACYEAGPTGYELARLLHRMGVRCEVIAPSLIPKAPGDKVKTDRRDCRRLARLHRAGELVAIRVPTVAEEAVRDLCRARADMVEDRTRARHRLSKFLLRHGRPWRGGNAWTLTHERWLLSQRFGEPALAATDGHYRAVLQGRDAQLEAIQADLAVWYDRPPVADAVHRLSAYRGITRLGALTLASEVCDWRRFGRAAAFAGFCGLVPRSIPAGPRPGGATSPSMATPTCAPSWWSRPGPTSTARRSGSSCTSASKAWIPRWWLGPGRRSCGWAAASGGWPPARTPRTWSPPRSPGSWPGSCGRRWWPNDACWPTVTAEIGATVTASRTLRRGTVAAGPIPVSTMRRPLAGRRALSQGHLPASSRPAVSTRVHQCGGSPIHHAPARRADHGARPPPRRALPHHPPTHADLRPARQAPSPQPCPNHAIYQANRHIDMPLHISTPAALRWAQVSLPLLDGQASEQLTRPGTPRPGSSSDQRS

SEQ ID NO: 252736 - protein, 409 aa, unidentified
MEVVHARCAGLDVHKKSVYGCVICWEANGEKRQEKRSFGTVTADLLRLADWLREHGVTHVVMEATGVYWRPVWAMLEGQFELLLVNPHHVKAIPGRKTDAKDCEWIAELLQHGLVRGSFVPPTEIQDLRDLTRYRVELTQSQARMANRIQKLLEQANIKLSSVASDTLGVSGLKMIEAIIAGEQDPEQLADLAQKRLREKIPELRLALEGRVRDHHRFLLKEFLEQWRALGARIRRMEEEIDRRMVPFEDAVRLWQSIPGMERLTAYNLVAEIGVNMAQFPSAQHLASWAGLCPGNNQSAGKRMSGTTRDGNKWLRRTLCQGAWAVTRKKDGYLASQFRRVAARRGMKRAVMAVAHSMLIIAYTMLKTGRTYHELGGNYLERINADQLQRYYVKRLQKLGLTVTVAPAA

SEQ ID NO: 252737 - protein, 301 aa, unidentified
MRAVTRRCFGLDVHRDFAQVAIWQDGLVRQAGQIAMTAEALRVFADSLAPTDEVALEATGNTNAIVRALRGRVARIVVGNPQKTRAIAEAKVKTDKVDAAILAQLLAADYLPVVWVADEATQARRRQVARRAHIVRQRTRLKNQVQAVLHRNLIARWPAADLFGHKGRAWLAEQPLPADERQAVSALLRQLDFHGEELRLIDRELARVALGCQDTKRLMTIPGVDVTVAMSITAAVGDFERFCSPNKLVSYLGLNPRVKQSGGQPASHGRITKTGPRARPRDARRGRRGGGQDPWAAARVL

SEQ ID NO: 252738 - protein, 341 aa, unidentified
MSKTNPVKIIIGVDTHKDIHVAVAINEIGTHLGTFTIPVSPKGYQNLETWARAFGSIHAFGIEGTGSYGAGLARFLQAKGHTVVEVNRPTRQLRHQSGKSDPLDAESAARAVLGGQANARPKSADSSVEMIRHLKIARDTAVKSRTQAMVTLKTIIINAPAALRQALDRIIGKMALIRHLAALRPGPIVSVTASAKGALRAIARRWLTLDAEIRAHDADLEALTASCAPAMLEAQGISTGTAAEMLILVGDNPERIRSEAAFAKLCGACPIPASSGKTNRHRLNRGGNRQANTALYRVVIVRMRNHQPTLDYVKKRKADGKGKMEIIRCLKRFVAREIFGY

SEQ ID NO: 252739 - protein, 398 aa, unidentified
MAAVMIGVDPHKATHTAVAISAAEEPLGELQVRACAARAERLLAWAAAWPQRTWAVEGAGGLGHLLAQQLLAAGERVLDVPPELGARVRLLAAGDVNKNDPNDARSVAVAALRSPVAEVRPDDHAAVLRIWSKRYRDLGRTRTQVVCRLHAVLCDLVPGGVSRPIYASRAARIGQQVTPADAVAAARCELAVAFLEDLRRIDAQIRETRKKLAAAVAATGTSLTRLFGVGPVIAAAVIGDVRDVSRFPNRDHFAAYDGTAPIEVSSGLPAVPAREPPAQPRHLHGRSHPDPPPAQRRPRLLRQETGRGQDPQRGPARAEAAGQQRHLRLPAGRRTARRRPRGKPGRATGERLCSQRGRLTPQAPALRTSHSRAPPPPYDRGQPPAARASQEGQILPAP

SEQ ID NO: 252740 - protein, 353 aa, unidentified
MKPKTESDTALPMVIGVDIGKEVFHLVGFGGDGKIVFRRKIKRLGFAAVFEKVPPCIVGMEACLSAHFVSRTLRTLGHEPRIIPAIYVKPFVKGQKNDYNDAEAIAEAALRPNLRFVQEKSQDQLDLQACHRVRARLVSHRTATINQIRAFLIEQGIAVRSGPRALRTSLFAILENRKDEISPRMARLILDLYKDWCHLDERIDTVTGEIEELSRVEAKCQRLMTVPGIGPVISTGLVAAIGSGEAFERGRDFGAWLGLVPRQYSTGGRSVLGRISKRGSKYLRTLLIQAAKVLLMRPHNWPRYSFGAWLKTASERLHRNKLAVALANKLARIAWSVLRHDKAFDTHLETAAI

SEQ ID NO: 252741 - protein, 348 aa, unidentified
MTVTMVETRAVTGGVDTHAEVHVAAALDSIGGLLGVEEFPAAPAGYARLLAWLGGFGQVCLVGVEGTGSYGAGLARHLAAAGIRVVEVDRADRGDRRRQGKSDPLDAVSAARAALSGRARGAPKGRDGQVEAIRALMVAKRSARAGRTQTINQARALIVTGPDDIRTCFARHATADLIAALASLRPRPGSMVRYHTLLSLRELGRRAQFLDGQLERLDELIVPLVTARAPGLLSLYGVGPDTAAKLLISAGDHPGRLRSEAAWAHLCAAAPIPASSGKVKRHRLNPHGDRQANHALWQIVITRMSSHPATRAYVARRTKEGLSKKEIIRCLKRYVAREVYPHLRAPAG

SEQ ID NO: 252742 - protein, 356 aa, unidentified
MKRAYFIGIDVHCQSCEIAVLSPGGKVVQRERCSTTIPELLAVLRNVPRPCSVVIEEGPMAGWLWRNLHDKVGGMVVAEPRRNHLVSKDGDKDDDIDAEKLALLHRGGFIKPVHQVATLDQAVFKQLVALYHYRVRQRVREAHRITHLLRQHGLVVRERAYAAAEDRPALLQRLPAQRMLLELIGSMWTSYDALAEQEEQWRQRLSRAAQKVEVVCRFQELPGFGWIRAATLYAYLDTPWRFASKAALWKYLGIGLERKHSGKGKEYLGVPQLAHRLLKSTILGAARSAAAHGDNPFADLHRRWLDDEGLSAQLARRNVARSLAATAWGMWKSGDVYHPEWVGVAATTKVAAKGFR

SEQ ID NO: 252743 - protein, 323 aa, unidentified
MQTPAAVFNIGADVAKDAIVVACSEGSFPVREVANQRPAVLALLKGLPAGSRIGVESTGTYHELFAEAAHQLGFLVFLLNPKDTHHYAKAVGLRGKTDRVDAELIARMVAHEHTKLHTWIPPTPQQREIDRLIKRRATLISLREAVAMSLHDLGEFTADRKALRTRFNQLIARIDLRVKALIEASPERQQNFTRLCTITGVGPVVGTALVNTLERVPVKSADAFVAFTGLDPRPDDSGQHRGKRRLSKRGPAELRRLLYLAALSAVKTKPWRPLYEHYRARGLSSTAALVILARRIARTAWSIYTYKTEFDPARLTNPVLRTH

SEQ ID NO: 252744 - protein, 355 aa, unidentified
MNSVRYVGLDVHRDTISAAVLNESGRMIQQSILATRAAAILDFIGGMRGTLNVTFEEGTHSAWLYDLLQRRVARLVVCNPRKNALLKSGNKSDAIDARKLAELLRADMLSPVYHGEKSAMEVQHLARSYALLTEDTTRVMARIKAVFRGQAIACAGKKLYGHKHRGEFLAELGAGALRRRAEFLYQELEAVQQLRRQAKRDMIVECRKYPETKLLCSVPFLGPVRAAVLIGRVQTPHRFRTKRQFWAYCGLALEMRDSGEYRMVDGQVERRKKPAQIRGLNWNHNHELKNLFKAAATSASACDGIFREFYLGLLKKNMQPEMARLTLARKIAAIALKIWKKGEAFDAEQVKLQAA

SEQ ID NO: 252745 - protein, 311 aa, unidentified
MEQIFVGIDVSKDRLDVHLRPTDEAFAVARDGEGLENLIDRLRALRPALVLLEATGGFEVTVAASLAAADIPLAVVNPRQIRDFARATGQLAKTDALDAKVIARFAETVRPVPRPLPDEQARALGELVARRRQLIEMMVAERNRRRQLTSRRLIESVERLLAALQKELSELEADLGDSIRGTPVWRERDELLRSVPGIGPIVARTLIADLPELGRLDRKQIAALVGVAPLNRDSGKMRGKRTTWGGRAKVRCVLYMAALVASRRNPVLVAFYQRLISSGKAKKLALTAVMRKLLTILNAMARTHTPWQEPV

SEQ ID NO: 252746 - protein, 409 aa, unidentified
MKLFVGIDVSSKDLVTSIISEEKHEVVFRGNFVNDLKGATELKKQIINTANSNQIDQVIIGMEATSIYSFHPAMFFQEDIDLKAFNTQSVVVDPKKTKRFHDVFAEDKNDQIDAYYIADYLRVGHYSIGIVRQENYIALQRLTRSRYEIVQSLVRVKQHFIENLYYKLNKLVISDELNTSIFGSTMMQLLTEDLTTDDLLNISINDLTDYLAEYGRGRFADPEALAKTIQKAVRSSYRLDKVVANSVDAVLSVYAAEIKTFQKMIKDLDKSIEKVVKVTDDEQILRSIPGIGPVYAAGILAEIGQIDRFDNEAKLAKYAGLSWREKQSGSYTSDNTPLKRTGNTYLRYYLVEAANLVRTHDPVFGEYYQRKYKEVKHTPSKRALVLTARKLIRVIYFLLKNHQIYQEKR

SEQ ID NO: 252747 - protein, 346 aa, unidentified
MDKLIAGIDLHGNNLVIGVIDEKGKRLNHRKLQCDLKEIVEFLQPFKPRLKSMAVESTFNWYWLVDGLRAHGYPIDLANPAKIEQYSGIKHADDKHDAFHLAQLQRLNILPKAYIYDAALRPVRDLLRRRMNLVRQRTALMLSFKSLYARTTGATMELKRLKEITPEEAFELYEHPAHQLIAQVQSEHIKALNASIARVEKAVQQSARELPIYPRLLTLPGIGRILGMTITMEVGDIKRFKTDGDFASYCRTVDSRRMSNGKKKGENNQKCGNKYLSWAFVEAANFAKRYDDQCRRWYDRKAAKTSTVIATKALACKLAKAAWHVMAHKVDYEPRRMFPELAIKKT

SEQ ID NO: 252748 - protein, 376 aa, unidentified
MEHNSEAFIGIDTSKLKNAVAIAEGGRDGEVRYLGEIDTTDGATRKLVAKLAAKYRKVTFCYEAGPTGYGLYRLIKSLGHECSVVAPSLVPKKPGDHVKTNRRDAVGLARNLRAGELTEVWVPDTRHEAMRDLSRAREAAVDDLKSKRQQILSLLLRLGLHYSGKKTWGKSHRNWLASLKLGQREQRIVLEELFCAERQAQERVDRLVGAIIAAVPEWSLAKIVTALMAVRGIDLVAAVTIMAELGDLSRFASPRELMGFLGLVPSESSTGDSVKRGGITKAGNRRARRILVEASWSYRYPPRIGRDKLAKVAAAPEPVRAIAWKAQTRLSSRFRELSKKGKRPTIVATAVARELCGFIWAIHRAVTGPGGQQLVF

SEQ ID NO: 252749 - protein, 392 aa, unidentified
MICVGIDVAKDKHDCFILNSEGEVLADVFTILNNADGFDTLLQTIRSYTRPEDKIKVGLEATGHYSYNILGFLLDCGLPTYVINPLHTNLYRKSLSLRKTKTDRIDARTIAAMLMSDVDLKSYTDTVYHNEELKSLTRYRFDKVRERAQLKSSIARLVCILFPELEKLVPTLHMASVYTLLSEFPGAKQVASAHLTRLTNLLHEASKGRYGREKAIQIRDAARISIGSAMPAKSLELKHTIHLIRELDAEIEEIETEIDSVMETLHSPITSIPGIGNRMGAMILAEVGDFSNFDSADKILAYAGLSPSTYQSGQLTSSYAHMEKRGSRYLRYAIFNATKFVCNWDPTFAAYLAKKRNEGKHYNVAISHAAKKLVRLIYTMEQTRQPYRRAAV

SEQ ID NO: 252750 - protein, 343 aa, unidentified
MKTTTVGIDLAKNVFQVCALNRAGKVVSNRPVKRAALTETVAQLAPTRIAMESCASAHHWGRTFKKLGHDVILVPPQHVKPFVRGGKSDPRDALAICEAAHRPGLHPVPIKSLAQQDLQSLHRVRQQQVQHSTGIANQIRGIAHEYGVCFPVGLKRLYREVPYALEDADNGLTDAVRELLARRFIDLLAIREEIERTSRRIVTLAEGLPPWSRLLELPGFGVMVTSSYLAAIGDGRQFKRGRQVSAWLGLVPRQHGSGGKIRLHGMTKSGDRYLRTMMLHGARAAICWSRDRDTPLARWINPMVERRGYNKAVVALANKNARIAWHIVANGAHFDPGQAFGSA

SEQ ID NO: 252751 - protein, 410 aa, unidentified
MELLHRRCCGLDVHKETVVACLRLVSDGKVTTEVRTFQTTTADLLRLSEWLAANECTHVAMEATGVYWKPVWHILDDGDFKLVLANAAHVKNVPGRKTDVNDAMWLAELLAHGLIRASFVPDAQTQEMRNLLRTRKQLVREQSSHVLRVQKTLEDANIKLDSVLTDLMGKSGRAMIEALIAGETNPAKLASLADRRVKASPEEFREALRGRVTKHHRFLLRLHLNQIDALDTAMATLDAQVEANLGPFRTAVELIMSIPGIKNLGAHVIVSEIGIDMSRFPSDAHLISWACICPRNDESAGKRRSNRLRKGGTWLKTTLVQCAWAAVKKKGSYLQAQFYRIKARRGPKKAIMAVVASILTAIYHMLKDGTMYKDLGSNHFDRRSTDQQKKRLVKRLADLGYVVEIKPLAA

SEQ ID NO: 252752 - protein, 366 aa, unidentified
MQKISTLQRNESRIFKRHQLTIGLDLGDRWSRYCVLNEVGDIVLERKLTTTPEAMKQVFGKMQRSRIALETGAHSPWVSRLLTALGHEVIVAHARNVRLIGESRRKDDRIDARTLARLARVDPQLLSPVQHRSAQAQIHLTQIRARAELVKARTALVNSARGLVKSYGERLSKCHTQQVGQELAMGLSPELREALDPLLREVESLNAQIKEYDRRIEKMARENYPEVELLKQVKGVGDLIALTYVLTLDDPHRFRKSRQAGCFVGLQPGRRNSGQSEPQMHISKEGDRYLRTLLVQGAHYILGPFGEDSDLRRWGLKLAERGGKNAKKRAVVAVARKLAVLLHRLWVGGEVYEPLRNSQRAVSAVA

SEQ ID NO: 252753 - protein, 355 aa, unidentified
MNDTKYIGMDVHRESISIAVLNSAGKIVLECVVETKASILLQFIDGLRGELHVTFEEGTWAAWLYDLLKPHVTKLVVCDPRKNASMKQGNKSDKIDARQLAELLRLNHLNPVYHGEHGLRSLKELVRSYLTITKDVGRVMSRVKAIYRSWGIPCTGKQVYTPQHRVEWLAKITEPGVLRRAEFYYQQLDALRSLRREVRRELLAESKKHQAWKQLCQIPSIGPIRAAVLLGILQTPHRFRTKRQLWTFGGLGIETYSSADHRYVEGQLQRSKKLASIRGLNENCNHDVKNLLKGAAIVASTKPGPFQEFYAALLAKGMRPEMARLTLARKIATIVLIVWKRGVSFDAQHLKPQTA

SEQ ID NO: 252754 - protein, 326 aa, unidentified
MEHELHYIGIDTAKEKLDVDVLRPDGRHRTKKFANTTKGHDGLVSWLKGHKIDHAHICIEATGTYMEPVAECLYDAGYIVSVINPALGKAFAQSEGLRNKTDTVDARMLAEFCRQKRPAAWEAPHPLERALRALVVRHQALTDMHTQELNRTETAREVQRPSIDAHLLWLEAELKRLEKQIKDLTDDDPDMKHRRKLLESIPGIGEKTSAVLLAYIGLKDRFAHARQFAAFAGLTPRRYESGSSVRGASRMSKAGHVSLRRALYMPAMVATSKTEWGRAFRDRLAANGKKGKVILGAMMRKLAQVAYGVLKSGVPFDASRHNPVAA

SEQ ID NO: 252755 - protein, 348 aa, unidentified
MGYFVGLDVSVKETSVCVVDDAGKVILEQKVPTEPADIIALLTSLGVSFCRIGIEAGPLSQWLFNALTEAALPVICVETRHMKALLTAQQINKTDRNDARGIAQMMRVGLFKPVHVKTLVAQEQRMLLTSRKLLQRKLLDLECDLRGTLRNFGLKVGVVSGGRYEARIRELVTDFPRLTAIVGPLLNVRRVMRQQLAVLHKMLLDTVRDDAVCRLLMTAPGVGAVVALTYRATVDQPQRFVHSRAVGAHVGLTPKRYQSGETDYDGRVSKCGDALLRTMLYESAQVLLTHGRKWSWLKAWGIRVAQRRGMRRAIVAVARRLAVVLHRMWVDGSEFRWSKPSAAVPAVA

SEQ ID NO: 252756 - protein, 384 aa, unidentified
MGSEKYVGLDVHKDTISIAVMNSAGKLIMESIIETKAITILQFFQGLHGDVYVTLEEGTWAAWLYDLLKPHVTQVVVCNPRKNALLLKQGSKSDQIDARKLAELLRLGSLSAVYHGEHGLRMLKELSRSYLTISKDLGRVMNRLKALYRSWAIPCAGAQVYAPRHRAEWLAKITEAGVRRRAELYYEQLDALRSLHKQAKKELLSEGRKHSATKLLRQIPGIGPLRATQLVALMQTPHRFRTKRQLWNYSGLGLETHDSAQYCMVEGQLQRSKKPQQLRGLNDNHNHDLKNIFKGAAMRASTAAGPMRDFYEALLAKGRRPTMARLTLARKIAAITLIVWKKGASLCAGINRHEVENARVLRERTSDSPGPEFCAAHREVHSEA

SEQ ID NO: 252757 - protein, 423 aa, unidentified
MHVAAVPPDRDAEPVRSFGTCTEDLQRLADWFARCGVRTIAMESTGVYWIPAYEILEQRGFEVILVNARDAKHVPGRKTDISDAQWLQRLHEYGLLRASFRPKGEVATLRAYLRQRERLLDYAASHIQHMQKALMQMNVQLHHAVADITGATGMRIIRAIVDGERNATALAAHRDQRCHASVEEIAKALAGNWREEHIFALAQALDLFEAYQAKVAACDTRIEAVLQRLRDAAAKPVGRLPPPRQRSRSVNAPAFDVRAALYALLGVDLTQIHGLGPSLALKLVGECSTDLSAWPSAKHFTSWLGLAPANKISGGKVLSSRTRRSGSRAAALLRLAAVTVGRTQTALGAFYRRLVARVGKAKAVTATARKIAVLFYNTLRHGMAYADPGASYYEERYRARVLLNLQRRAKSLGYVLQEAPAPA

SEQ ID NO: 252758 - protein, 406 aa, unidentified
MSTSPRPRFFGFDVHHQYVMIAAVDQRQTVLFPPRKVKREELRAWMDAHVQPIDQVALEASGSVWPLVDRLQARVERVVVAHASDVKLIASSLVKTDKRDALVLARLLAADLLPAIWIPPEPVRQLRSLISHRQQIRKQRQAALNRMRNLLKQWELQPPTNAIDTPAARLWWEALTLNPTQRLLVSQNLQLLKDLATMLADIERELARLSTASPWQDQLAFLIQLPGIGLLNAMTILSAIGDIARFPTPKHLVGYSGLGARVHQSGHTHHTGGITHRGRPELRTALVEAAWSAVNFNPHWKPLFQPLAARLGRSKAIIVIARKLLVAVWHVWSKQAADRHADADAVARSLMHWASSHRVATAQGLRRTAFVRRELNRLGLGYDLEQVRYGGRQHALPPPPTVSVSV

SEQ ID NO: 252759 - protein, 353 aa, unidentified
MEYGAIDLHKKESQVRIVTEAGQVVDQRIVTTRDRLTFVFGGRSRMRILVEASTESEWVAQHLETMGHEVIVADPNYAPMYGHRTRRIKTDRRDVVALAEACQQGTYRLAHRRSARQHDVQCRLNVRRELTQARTRAISLARGITRAAGLRIRSGRTETFLNRLARVDLPSSMQMTLSPLRSVIEMLNDELATADQQFEALVDSDPVVKRLTTLPGIGPITASAFVAALDVASRFERAGQVTSYLGLVPQEYSSGEKQRRGHVIRSAHPHVQSLLVQAAWRIWRVADPRTESFRTWAQAIARRRGKKVAMVALARRLARTLFAMWRDQTEYQPERIRTRRLVAVADAGTAASV

SEQ ID NO: 252760 - protein, 488 aa, unidentified
MSAAGQQEGKKDPTLNARAPKRKARGSRCPQGKGHRRRSKLTITNPDAAGIDIGAQVHYAAVPEDRAEVSVRSFGAYTAQLDELVQWFKDCGIKTVAMESTGVYWIPLYQKLEEAGFEVLLVDAHQAKHVPGRKSDVQDCRWLQQLHSYGLLRAAFRPEDSVCRLRTLQRHRKNLVEYAAMWIQHMQKALNEMNLHLHHVLSDISGLSGLRILDAILAGERDPRKLASLAHYRVQKSQAQIEAALTGDYRPELLFVLGQSLQNYRQIQQQITQCDLSIEKQLAKMTDCATPRQAAEPMPSSPELGGGKSGKRKPPVALETSLAGHLKRILGVDLTTIPGLNVLAILTLISEIGTNMTKWRNDKAFVSWLGLSPNNKISGQRVLSSRTRKVVNRAATILRLAAMIVGKTDTPLGSFYRRKRAQLGGPKAVTATARKLGCLVYRLIKNGQAYNAPDLHTYELKYKDQILNSLRKRANTFGFDLVELPKAA

SEQ ID NO: 252761 - protein, 431 aa, unidentified
MKKNISKTTKAQKQGNGTRKRLRETKRNVAGLETAKKRKSKQRGVEQEMKEEHGNASQAVHEGEAVVEFKAGEGEGYTIGIDLGDKRSRYCILDKEGKILRESSVATLPASLKTVFSKLAGCRIAMEVGTHSPWVSRLLTALGHEVIVANAREVPLIYKSRRKNDKLDAEKLARLARMDAKLLKGIRHRGAEGQGDLLLIRSRAQLVETRTGLMNMVRGLVKSRGERLPGCTSEGFVVELLEGVDEAAVRALKPVMVLIEQMTETIQGYDQQVEEMGKKHAEIARLDQVSGVGPLIAATYVLTIEDPERFGRSRDVGGYLGLVPGQSDSGESQPQKRITKAGDGYLRYLLVQGAHYILGPHGPDTIPAGARSALHPGTARTGYGPAAVGAEAGEQWRGSREEASGGGGGAEVGDPAAGAVEDGSEIRAVAE

SEQ ID NO: 252762 - protein, 318 aa, unidentified
MESISRFVGIDVSKEQLDVHIRPDDERHQFGYDASGLLALIEVLHRMQPQLIVVEATGGYEHRLVAELVNDQQPVAIVNPRWVRNFARASGQLAKTDAIDGAVLSEFGEKMQPQPRPLPNESLQELREVLVRRRQIVDMIVAEKNRQENASKRMARQIQTHISWLQKRLAEADDELRHHVESSPIWKAKDDLLQSTPGIGPACSMTLLAALPELGCLNRRQIAALVGVAPFNKDSGRFRGRRTTQAGRAHVRCVLFMSTLAAIRFNPVIARFYKHLIAAGKPKMVAMVACMRKLLTILNSMLKSSTPWNPEHEKITCS

SEQ ID NO: 252763 - protein, 344 aa, unidentified
MATYYIGADVHSNNTELAIEQRGRIVARYSVPTSIPSISAVLNSIQGKKILAMEEGPMAGWLYRNLHEKVDKLVVSEPRRNKLITCEGDKDDKIDSGKLAVLLRGNYLKAVHHTCDNHRAHLKHWVNLYHDRVRDAVRDINKIRACCRMHGVRIPRKVVRNPVRRRAWLSELDNSVLKAQLHMLWIGYDATKEQVKIAKKQFSSYARKYPIIKSWSALPGIGIIRAATIFAYLDTPWRFKNRAKLHRYCGVGLVRITSGKDKKGKPKPPRLKLPWAVNRRLKNAVMGAAITAIERGDNAFKDYYKRMVSNGITPANARHSVARKMVSTMSAMWKTDNEYDEKLL

SEQ ID NO: 252764 - protein, 454 aa, unidentified
MPRRQRRTTRAVTTPVLHPHAAGIDIGATELYVCVPLDRDPQPIRRFGTFTEDLRAVATWLTQCGVTTVAMESTGVYWIPLYQILETRGVAVCLVNARHVKNVPGQKTDVQDCQWLQYLHAVGLLRASFRPPETVCAVRSLLRHRDSLVQLAATHTQHLQKALTQMNLQIHHVLSDITGVTGLAILDAILAGERDPQVLAGHRDRRIKASSETIAKALVGDYRSEHLFTLRQSLVSYRHYQQLIGACDAEVRTHLGTFASQIDPAVSPLPPSTGSRRTPRSTPSTPRFDLRTELYRILGTDLTQVPGLQTPTVHAIFSELGADLSAFPSGAHFASWLGLCPDNRISGGKVLSVKTRHVKHRVAYALRLAAQSLSRSQSVLGGFFRRMRAKLGAPKAITATAHKLARIVYHLLTTRQPYEESRLAAAEADHRRRTESRLRAQARVLGFQLVPVIE

SEQ ID NO: 252765 - protein, 354 aa, unidentified
MNIKYIGMDIHKETISIAVMNGEGKVVMESIIETKASTILQCIQGIHGDLHVTLEEGTWATWLYDLLKPHVTELVVCDPRKNALMKEGNKSDKIDARKLADLLRGGYLRPVYHGENGLRTLKELARSYLTISKDLTRVMNRVKALYRSWGILCGGRQVYAPRHRTEWLNKIGEAGVRRRAEFFYQQLDALRELRQAVRKDLLAESRKQSATKLLRQVPSIGPIRAALLIALIQTPHRFRTKRQLWTYSGLAIETRDSAQYRYVGGQLQRTKKPQQLRGLNQNHNHEMKEIFKSAASMASSREGAFHDFYQSLLTKGMRPAMARLTLARKIAAITLIVWKKGAHFDAEQLKPQAA

SEQ ID NO: 252766 - protein, 417 aa, unidentified
MLKIVHRICCGIDVHKKFVVATIGTTNSSGTTDYITRQFSTFTKDLLALVDWLKEHQCQEVCMESTGKYWIPVFNILESDCHVFVANPKYVKGIRGKKTDKKDALWLCDLHKHGLVQNSFIPPLAIRQIRDLMRYRLKLTHFASSEKNRIQNSLTVSNIMLSSVVSDTFGKSSLKIINRILAHPDAMDFDVSPMLHRSMQSKTEDIKNSIEGTLTKPQADKMTACFSHLDNIKQLKLDIEKAVIPLVAPFHSQIELLLSLPGIKDSFTCIAILGEIGVDMRMFLSAKHLCSWAGLTPQNNESAGKKKSVRISRAGAYIKPLLVQCANAAIKSKECPYFRARFEQIKRRRGGKRAIIAIARMLLTCIYHMILNNEPFNHELYRIAEPLPATRQLLDITQAISFLESLGATVVMPPATQ

SEQ ID NO: 252767 - protein, 350 aa, unidentified
MMIIGCDFHPRYQQIAMMDTETGELVERRLEHENGEARAFYARLPKPVLVGMEATGYAQWFERMLAEFGHELWIGHASEIRAGVVRKQKTDARDAQHLLRLLLEKRFPRIWIPSPAERDARQLLRHRHKLVCFRVSVKNQLHGLAMSQGVCRKKKLFTAKGREELEKLSLGPWASRRRQELLGMLDQLNPVIDELDRAVQQEAESRADAARLMTHPGVGPVTALAFVLTLGPMARFPRSKQVVSYLGLNPKERSSGDKQHTYAISKQGNTMMRWLLVEAAQTAVRFDPELQRVYRRLKFNKGASVAKVAIARKLAVKLYWMLRATASCAQQAPMQGSSRGTLVPQVGSTF

SEQ ID NO: 252768 - protein, 351 aa, unidentified
MMITGLGYHPSFQQIAFVDNETGEYGERGLLHQNGEAERFYRELKQRGVKVRIGMEATGHSRWFERLIAELDFELWIGDPAQIKAKRVRKQKTDREDARLLLTLLMEDRFPRIWVPGADNRDLRQLLWHRHRLVQMRTRIMNQLQAVAMNEGVRRKKGLWSNAGRAQLESFSLAPWAARRRHDLLELMDRLNPTIEELTTAVKKEAEKMPEVLRLMTHPGVGELTALAFVLILGTPQRFQCGKQIASYLGLIPCEDSSAGHQRLGHITKQGNSLLRFLLVEAAQAAARSNPDWRRRFMHLAMRRERRIAKVAMARKLAVCLFWMWRKEWDYEQLKKFGSYAGESDHVHGVQ

SEQ ID NO: 252769 - protein, 344 aa, unidentified
MDHFGGLDVSVKETSICIVDDTGRIVKEMKVASEPAALLKVLGNPTYRFKRIGLEAGPLSQWLFSALAEAELPVICVETRHMQAVLKAQINKTDRNDARGIAQMIRVGLYRPVHVKTLRSQKLRMLLTHRKLLQSKAIAIENDLRGTLRNFGLKVGMVGKVRFEARIQELVENIPDLAVLVEPLLIVRRVLREQIVILHRRLLAIVREDEVCRRLMTTPGVGPVVALTYRATVDVPARFRKSKSVGAVFGLTCSRYQSGEIDWSGKISRCGDEMMRTMLYEAAQSMMHSKKWSWLKAWAMQIARRRGMKKAIVALARRLAVIMHRIWVDGTEFCWTREQATAAA

SEQ ID NO: 252770 - protein, 324 aa, unidentified
MIDGILGIDVSKNTLDASMSSCNKVRAKSFANSPDGWRHLLDWLIGQKIRRVHACLESTGLYSLGIACKLNEAGHVVSIVNPAQIRDFARTKLGRNKTDAVDASHIREYCELFKPPPWSPPSHAHRQLGELQTIRAGIVAGLTEWKNRKNSGMIDVVAQSLADATISHFTSQLGAVEKAIAQAIDNDTDLRRKRDLLLSISGVGETLASVVLAELPGPDVLRSSAEAVAYTGLNPRRHQSGTSIDRLTRISKIGNAVLRAALYMPTMSAMRYNPAIVALVTRLKARGRLNPKQIVVAAMRKLLVLCFGVLKTGKPFDPALAMGC

SEQ ID NO: 252771 - protein, 341 aa, unidentified
MSIVGAFDVHRRQLTSGYLDTVTGEVKRGRVVPADREHLRAWLARFGGQEDAHFALEGCTGWRYVVEELAAAGITPHLAEPADTAALRGRKRHAKTDKTDSRHLRVHLAAGDLPECWIPPAHVLEARATVRLYKDLLDERGGWHQRTAATLSRQGVPVTASMATAAGRAAVAGMDLPAAGRQAVETGLRQAGRLTRELEPLRRQLDMLSRRQPGCRALRATQFGVGAVTSVAIRAELGDVRRFASSSDVVRHTGLDITVYSSDGKRSAGHLSRQGPQLLRWALYESARCAARPAAPDYACYTAARDRRTGGLATLSVARKLARRCYHTLREVGEEALAPAA

SEQ ID NO: 252772 - protein, 408 aa, unidentified
MSEEKPVPERFFGLDIHKQYLVAIAVDAAGEKVYGPRRVAWANLESWRRETLSSQDAVVIEMTTNTWQVYDELRDHVHSITVVHPPHVKVNTQAQVMTDKIAALNLAILLSKGLLKGIWIPPEEVRELRALLAQRSKMTRLSTQAKNRLHAVLHRRHIPLCEGNPFLPERCSWWLNLPLSATEKVRIQCDLATLAFARQQMAALDACLCQIALQETRLTLLLQLPGFGVLNALAVLAAIGDITRFPDARHLVGYAGLGSRIHDSGQTTRTGKITKAGRKDLRATLVEAAQAAANFHPHWKAELARLQPRLGYNKAIVAIARKLLIAVWHVLSFQIADLHAEPPRIARKLLQVAYQLRIANLPDGLSAAASVRMQLDRLKLGQELSAIPRGAKKKPVLLSPSSQPPSAS

SEQ ID NO: 252773 - protein, 339 aa, unidentified
MKYTPVGVDIAKHLIQVHFINEHTGEVVDKQLRSKDFLTFFSNLEPCLIGMEACGGSQHWARELEKLGHKVRLMQGRFVKAFVMGNKNDVMDARAIWLAVQQPGKEIAVKTEAQQSVLVLHRSRRQLVKFRTAQINALHGTLLEFGETIHKGRAAMDRELPAAPERMRTKLPPYLIVLLEDQYTRLSKLDSLIEGIEKQLISVAKQSETCKRLMEIPGVGPLIATAAVATMGEASAFKSGREFAAYVGLVPKQTGSGGKVRLLGISKRGDTYLRTLFIHGARAASLVAKEPGPWITELRKRRPTSVAIVAMANKLARTIWAIVAHDRKYDKNHVSIKPY

SEQ ID NO: 252774 - protein, 322 aa, unidentified
MLNCIGIDVSKSTLNVHISKNSQDLQITNSLAAVKKLYTKLKKVYKKELETLVFVFEPTGSYSELLRKFCADKNINCFIINPKQFSNYAKALGIEVKNDEVDAKVLAQSIVLAKPSQIKVPVYDKDVEQIKELMSFYKFTCKQTSQLRGHLEALESKAGDSFSIKELKKSIKASKERENRIIEQVHQIIENNPTYKKAYENITSIIGIGQIGGIALLHLFLKYPEANQRQITSLTGLNPVYRQSGSSLQSLYKISKSGSIFYRGALFMGVMTAIRYNENFKAFYARLKAKGKHTTQAQIAVMRKMIIVAHSLYKNDTKYVKK

SEQ ID NO: 252775 - protein, 349 aa, unidentified
MHARSVVACGLDRQTGEVFERRLCPDHREILEWIGGLPHPVAVTYEAGPTGFGLARALEAAEICCVVAAPSKLVRPAGDRVKTDARDARHLARLLHLDQIVAVTVPSMQQEAARDLVRAREDCRADLMRTRHRLSKLLLRQGIVYYGGEAWNAVHERWLRRQHFDAAGLQMAYQEAFDAMLVTRDRRDRLDAAITAMAVDSEFTTVVTRLGCLRGVSTLTAFALAVEIGDWHRFTGRSIGAYLGLVPTEFSSGATRVQGGLTKTGNGHARRLLVEAAWHHRKPYRLAIALRRRQDAASPAARARGNAANRRLHTRWQRFDARKKRPVVANAAIARELAGWCWSLATLDE

SEQ ID NO: 252776 - protein, 361 aa, unidentified
MNATTVAVDLAKSVFQLAVANSSWHVIEQHRLTRSQFERWFVNRNVSLVIMESCGSAHHWARQFNALGITVKLLPAAYIRAYVKRNKTDAADACALLEAARCADIVPVKVKSIEQQALQGLHRTRSLWMGTRTSRINALRGFCREFGISVTAGSRNGLEQISRVLADPNSAVPVLIRGTMKLLVEEIHLLEARIAQLERELTELARHSPACTTLLSIPGVGLLTATAMVAATSGNVEHFRDARHFASWFGLTPKEYSSGSSRSLGHISKRGDRYLRMLLTHGARSILRAASVAQAAGKRIDHLRIWALTVQGRSNHNKATCALANKLARICYATLRDGEPYTGTVTRMSKKMERTAYAMPA

SEQ ID NO: 252777 - protein, 410 aa, unidentified
MQDQITFEQVVRRGCGMDVHRDTVVATVMGDGIKKETRTFNTYTNTLIQLSEWLQSLSITHVAMESTGIYWRPIFNILEEHFQILLVNAQHVRNVPGHKTDKKDSVWLTKLLLSGLLKASFIPPKSIRQLRDLTRYRKKLSQQATAERNRFEKVLQDANFKMSNVISDIFGLTGSKLIDALLNDNNDFAYLLTLCHGRIKAKKDNLREALVGNLSPHHKFMLRAIQKNIDDVLVKISSINDQIDLLSKPFQVELELLQSIPGINKISAACLLAEIGIDMEKFPTALHLASWTGICPGNNESAGKKMSTHILQGNQYIKPILIECAWSATHVKDCYLRSKYESLVGRRGKKRALIAVGHKIIIATYHILKEKIPYKDLGYNYLGERKKKNQVQSYIDKLKNLGVEIQIQNN

SEQ ID NO: 252778 - protein, 337 aa, unidentified
MNLNVVGLDIAKLVFHMFMMQDGKAKKKKLKRSELLAFVAQMPLSVIAMEACGGAHYWARAFQTLGHEVVLLNARFVKAFVVGNKNDFNDAEAIYTAACQPNKRSVAIKGIEQQDLAMLQGVRRGKVDERTALVNQVRGYLAERGIVLPRSVNQFRKQLPSILEDGENDLSTLSRKLFAEQYQALKALDEAIRALDREITAVCQHNALARRLIDIPGIGPLTAILAAADVGDGKGYDSSRDYAASLGVVPRQHSSGDKQVLLGISKRGNRQLRTSLIHGARAVLKYCGDKSDPLSLWLKGLIERRGFNKAAVALANKNARIIWALATRGGDYVPQMT

SEQ ID NO: 252779 - protein, 350 aa, unidentified
METAYDGRQVVGMDLHRRRSVLVRMTEDGRRLGTARITNSAAELRKAIAAAGTNPRVVLEAAYGWYWAADVLQAAGAEVHLAHPLGVKAFTYRRVKNDEKDAADLADLLRMGRLPEAWIAPAEIRELRELTRYRLKLVQRRASYKDQVHAVLAKLGIPVTCTGIFGVWGNTWLDGLPLPQPYQGKVASLRTLIAGLGTEIALLDAVIADLLDCHDGYHALQALPGIGPVLAAVIVAEIGDIRRFAGPAKLCCWAGLTPRHRESDTKITRGHITKQGSPVLRWAVVEAIQRQPAASPLRGVKDRIIARRGKEAKNIAKTAAARHLLTAVFYAMRDGHARSLAAHAAAPDAA

SEQ ID NO: 252780 - protein, 347 aa, unidentified
MLHAGLDLGRRRLHVCLLSDQGEHLDQLAVPPDVDSLRTLARRIDEVYGEPVCAVVESMTGARLVHDTLEQEGWSVEIADAQKVKGLAPLTCKTDKIDSLVLATLSQRDLVPAIWLPDPHIREERELARFRLHLVKHRSMLKHRIHSTLINFGRPCPVTDLFGVEGRRLLERLEVPEPWRGNVTASVALIDDLERQIAEINRRLRAGHADHPYIPLLVSAPGIGWVLAFTIASEIGEIERFSSPEKLTGYTGLCPRVNQSGDADRRGPLTKHGPRYLRWALIEATMHALKHPAYSERYQRNKRRLGKQRGAKIAQIDLARRLAHAIWHMLTRNEKFAPRGAAVRLAA

SEQ ID NO: 252781 - protein, 339 aa, unidentified
MLTIGLDVHERTTSLCILDACGRVVKEKTIRGHPRLAIAWLTALSEPFQVCFEASTNYGWLYEQLAGVAKRVVVAHPARLKLIFKSRRKNDRLDAARLAKLLFLNEVPEVHVPPKARRDWRSLIEYRTRCVRERTRTKNMLRALLRTHGIESPKSLWTKTGLAWIQELPFESSVALRREMLLETLEHQAKKIDRVERALRETAGGEPGVALLMTIPGVGVRTAEAFVAYVDDPHRFRANSIGAYLGLVPRQDASAGVNRLGRITREGPSTVRKMLAEATWQSIRRSPTVRAIAERFQGNRADRKKKALIATSHYLARVMLAMLKTGEVWRETPPLARTA

SEQ ID NO: 252782 - protein, 407 aa, unidentified
MKKQILYLGLDVHAENMAVAIAEAGRDGEVRNHGMISSDLHCVEKLLHKLGHPGKELRVCYEAGPCGFVLARRLKKLGIDCAVVAPSLTPKGSGDKIKTDRRDARMLARLHRAGELTAVHVPDERDEAMRDLCRARTDAMHDRRSGRSQLKAFLLRNGYRYTEKTTWSQAHLRYLRELVLPHAAMKVVLEEYLQAIDAAAERIERLETQMKALLEEWHLAPVVKALMGLRGYQTVAAMITVSEIGDIHRFAHPRQLMAYLGLVPSESSSGGSRAQGGITKCGNGHLRWIFNECAQHYRLPPKISSQLSVRQESIPQAQRRAVQEISWRCQNRLHERGRKLAARGKTRQKVQVALARELSAFVWEVMRLVTPLADGSHVIITPRRERVSESKPPAAKKKGRVYALKMK

SEQ ID NO: 252783 - protein, 377 aa, unidentified
MQEVEDEPLFAERVAGIDIGKKSVMVTIRVPGDTRKGRRQQETREFRATRAGLLELADWLRCWQVTKAGMEATGDYWKPVYFLLEREGLDCVLYHASQVKALPGRPKTDKLDSVWLAKITERGSLPGSFVPPEDIRRLRTHTRYRRHLTQARTAEKARCEKLLEDAHLKLSSVISDIHGVSGREMLTAIIAGQRDPKVLAQMARTRMRGKIGQLEEALDCSFFTEQHAFILQMMLANIDHLTAQIDELSKKIDVLCEPYERQIAQLDGVPGFGIITAQDIIGEIGVDMSVFPTAGHLCSWARQAPRVSESAGKRKGKNATGRGNPTSAGRSASPPPTPAAPARSSAPNTGGWSGTCPRRSPGRHQQKPARHHLRTAL

SEQ ID NO: 252784 - protein, 352 aa, unidentified
MTVTNLARSITGGVDTHLDVHVAAALDERGTLLGVESFATTESGYKKLLGWLSDFGPVELVGVEGTGSYGAGLTRHLQAEGVRVVEVDRPNRQRRRLKGKSDPQDAITAARAALSGEACGEAKTRDGNVESMRVLRVARASARKGRTQALNQMRNLVSTAPDPIRAELRGLSVFNLLERASSYRPGAKRDIVSLTKYSLRMLARRALTLEEEIAEIDAILKPLVKETAPKLVATLGIGTDAASALLVAAGDNPERLRNEAAFAHLCGASPLDASSGKNQRHRLNRSGDRQANSALWHIVLTRIVYDPRTNEYIDRRRKEGLTKKEAVRCLKRYVAREVFSLLPHDKLGLDSP

SEQ ID NO: 252785 - protein, 427 aa, unidentified
MKKIKIDYLSTLFVGIDIGSRTNVISALNFDQDFLIRMVPVANAQGGAEQMEEMVAQVLSQHHEFRAVIIGLESTGFYGVHIANYLSTSEKLAPFSTKVYCLNPNEVKQYKKSFNSLDKNDGIDSFVIADFARVGRIHTEPWRGAQYLALQRLTRHRLHITECIAREKTYMLNNIFLKFSEFAMLKKDEHPFSDKYGATAEAVLTDYLSTEDIVDASVDELVAFISSKSRGRIADPEQTTYLLQKAAQDSYRLDQCLYEPLTVSIGCSFNCISAFEKELKAINAAIQRAVKGLNPTEYQILTSVPGIGPVYASGILAELGTIKCFKSNDALAKYCGIVWRENQSGEFEAEDTPMNKAGNRYLRYYMIEAAGSVMQHCPEYKAFYDKKFAEVRTHQHKRALALTSRKLIRMLFGLLANGRLYSVEKSR

SEQ ID NO: 252786 - protein, 411 aa, unidentified
MDKIYDKCCGIDVHKKLIVACFRKGNKQEIREFGATTRELLEMADWLKGGDCEMVAMESTASYWKPLYNILESSDLNAMVVNAHHMKAVPGRKTDVKDAEWIADLLQHGLLQPSYIPDKDQRELRELVRYRKSLVGERTRELNRLQKMLEGANIKLSGTVSDINGKSARSILEYLLTGESINEAKYDEMYEQKIIAHNLKATKEQIIDDLNGVMSPLQRRMMKELLVHLDELNIHIKNLDDEIDSFMKPEEKQASHAIQDVTGIGNTSAQAIISVIGTDMGRFPTDRHISSWAGLCPGDNESARKRKSGRTRKGNSLLRTTLITCAHAAVKNKKSYFYAQFMRISSHRGNKRACVAVAHSMLIAIYHILKDGVVFRDLGADYYNQFNKERKINAYLKKLKALGWEAPVVAA

SEQ ID NO: 252787 - protein, 344 aa, unidentified
MIFVGMDVHYKSTTFCFLDPTFPEEQRYRMLSRPTTVEAYREVLEPLKGDCKIAFEVGTQTQWVAKIIRDLALEVKVANAGRIPWLFRAQHKNDRLDAKKLATLLQIDQLPTVYLPPADVSAWRALINHRRSLVKRGTMIKNQVRSIVRAFCYHCPHRSCWTRVGQAWLRSLHFDEARHLMLSTLLDGLKSTNDAICVVERKLDEIARSHPNVSLLQSIPGVGPRTAEAIVAFADRVDRFKSRKQFACYFGMTPGQDASGGRDHHLHITKQGPSVVRWVLVEAVHQVVRRSPEFRSFFQQVRHGQKGKSKKAIVATGRKLLTIAFAMMRDQTAFNGSKVLQAVA

SEQ ID NO: 252788 - protein, 415 aa, unidentified
MALKIVYPVCCGIDVHKTFVVACIASTNSQGVTTYKRHRFSTFTKGLNELLQWLCEHDCKDVCMESTGKYWIPVFNILEHSCNITLAHPKYVKAIRGKKTDKKDAQWIADLFKHDLVAGSFMPPLPIRQLRDLMRYRFKLTNFSSSEKNRLQNSLTVSNIQLASVVSDTFGKSSMNILDKLLDDPTDTSFDLEPLVHGSLKGKLPELELAIDGFITPEQAGKIKVIKQHYEDLESRKAELESIILSLAESYSEEINLILTVPSFKNLFSAIAVVSEIGVNMDVFPTAKHLCSWAGLAPSNDGSAGKKKSVRISRAGIYIKPLLVQCATAVVKSEKHPEIRNRYLQLKKRRGHKRAIIAIARMLLTAIYHILKNKEPYNPDLYKKSVVRPFNREITVEQAILLAQAQGYRIMETAT

SEQ ID NO: 252789 - protein, 341 aa, unidentified
MKVSTLGIDLAKNVFQLHGVDHEGHTILRKKLTRAKFVQFVIQLEPCLIGMEACSSSHYFARLFTRYGHEVKLIPPQYVKPYVKTNKTDAADAEAICEAVTRPNMRFVQIKTEEQQAVLALHTERGILIRERIACANSLRATLAEFGSTIAAGQSHLTRELPAILEDGENGLSPFVRTSIYRQSKHIRELEEQVKQVEEALASWYRTQEACQRMAKIPGVGMLTATYVVAAVGNARQFSTAKQFASWLGLTPKEHSSGGKQQLGGISKRGDGYFRYLLVHGARALTAWVNRNGAVEENSWLQGLLERKHYNVAVVAMAAKTARIMWSMLSHNTEYQPRQLA

SEQ ID NO: 252790 - protein, 341 aa, unidentified
MKVSTLGIDLAKNVFQLHGVDHEGHTILRKKLTRAKFVQFVIQLEPCLIGMEACLSSHYFARLFTRYGHEVKLIPPQYVKPYVKTNKTDAADAEAICEAVTRPNMRFVQIKTEEQQAVLALHTERGILIRERIACANSLRATLAEFGITIAAGQSHLTRELPAILEDGENGLSPFVRTSIYRQSKHIRELEEQVKQVEEALASWYRTQEACQRMAKIPGVGMLTATYVVAAVGNARQFSTAKQFASWLGLTPKEHSSGGKQQLGGISKRGDGYFRYLLVHGARALTAWVNRNGAVEENSWLQGLLERKHYNVAVVAMAAKTARIMWSMLSHNTEYQPRQLA

SEQ ID NO: 252791 - protein, 332 aa, unidentified
MIYIGIDPSSESFTAALDPNPTTRSFANTQSGIATFLEWLQEQGVSRDAVRICVENTGVYAEVLCYQLHESGYSLSLLDPRKVWKAFGDGQPKSDPLDSRKIAEYARRYADQLRLWQPQEVLVEQIQVILSTREQLVQQKTATQNARSTLARKVIQTPAANRALEATLTHLKHEITALEEELQRLIRSHPTLLQGVSLLMTAPGVGWLLGAQLLVLTKGFREIPGYRRLAQYLGVSPNEHTSGTSVRKRARSRRYGPSTARKLLHLAARSLRTHDQEARHYFLRKTAEGKPKSLVLNNIANQLLKRLCAMLRTQTPYIRGYRSLNPRFLALA

SEQ ID NO: 252792 - protein, 343 aa, unidentified
MQVTTVGLDLAKRIFQVHGVDAAGKVVIRRRLQRSEIAAFFADLPACLVGIEACATAHHWARLIGASGHQVRLIPPSYVKPYVRRSKTDAADAEAICEAVGRPSMRFVPVKSAHQQAALLHHRARDLLVRQRTMLINAIRGHLGEFGIIAPAGRHRVSDLVNLLQGANDAEVPALAREALQSLFAELSALEIRIKVVEAVIMREHRSNAVSRRLTTIPGIGPITASALAGTIADPFAFKSGRELAAWIGLVPRQHSSGGKQKMGRVSKQGDRYLRRLLTVGATAVMRRLPGKTDGLSLWVRALLDRRPFRLVSLALANKMARIAWAIMVRPETYKASAMTAAA

SEQ ID NO: 252793 - protein, 398 aa, unidentified
MKTCGLDVHKKNVFCAVYNGKDYSEVKEYDTTTPDIRRMGDYLRSEGVEKVAMESTSTYWVPVWDVLLEMGFELMLVNPFLIKQMPGRKSDVKDAQWISCLLHKGMLRGSMIPSPVIQQLRTYSRKYTKLQEQKTRSLQKMDRIMVMCGFRIGSCMSNLGTKSVMNIVKSLIKGESNPEVLCKLVYGNTANKKSGKLREALTGNIKEHYRQQLEWEKEEYDLFEKQTEQCLTQMRRICREHYGNEMALLKSIPGVSEISSMIIIAETGGDMSVFENSGKITGWAGLRPRNDESAGKYKSTATTKGNKYLRSVLVQVSWAASRIKEGWFREKFNRLSMRKSRKKALIAIARKLLTVTWNVLQYKTPYNPKMVQIYDPVKVEAKINYHQREMLRMQKLLS

SEQ ID NO: 252794 - protein, 375 aa, unidentified
MEGAPMLDTTTFVGLDVHARSIKAVSLDVMTGEVRAATFGYDAGAVAEWVRSVDPRARCVYESGVTGFDLQKRLSGLGVDCVVGAVSKMIKPSADRRRKNDRNDAEFLARMLSVGNVVEVWVPDDECEAARDLTRALEDARDDLSRSKQRLSKFLLRHGLAFDERTPTGRRKGNWTRAHWSWIESIRFAEGADNDVLAYYVDAVRRAAEEKARLEGLVEAEARKPRWRRRVDSLRCLKGVDTATAADLVFEAGEFSRFRNARSFAAWVGLTPSEHSSGESDRRGAITKAGNKHLRKALVEAAWHYLTCSGRPKDLAKGQAPDRGARRHAAKGVRRLVERREALLARGVHGNKANVATARELACWVWAVGLMAEEA

SEQ ID NO: 252795 - protein, 451 aa, unidentified
MNNEPEIVLDDEHELVIERVAAIDVAKASGKVCMRMPHPSRPDRRMSKVRDVDATTRAVTELADDLLGEGIERVTVESTSDYWRIWFYLLEAAGLRVQLVNARDVKNVPGRPKTDKLDAVWLAKLTEKGLLRPSFVPPAPIRQLRDYTRFRVDLTRERARCWQRMEKLLEDALIKVSAVVSRMDSMSVRDMLEALIAGERDPRRLAGLARGKMRPKYKALVEALSGRFDEHHAELARMLLDQIDALGAQINTLTTRIDELLAALIDTPGPAADGSVRDRDGEVELMVTGLDAAERLAEITGIGPVSAQVIIAEIGLDMARFPTAAHLVSWAKLSPRTIQSGAIQRSGKAGKGNPYLKGALGEAAAVAARTDTFLGERYRRIVKRRGKLKALVAVARSILVIVWNLLSDPTARFHDLGPDYYTRRIDTERRARNHLAQLAALGYRVTVEPAA

SEQ ID NO: 252796 - protein, 338 aa, unidentified
MELYAGIDLHSNNSVVTVLDEADRTVYAKRLPNDLGMVIAALRSCEGTLCGVAVESTYNWYWLVDGLQDAGFTVHLVNTTAVKQYDGLKHSGDFSDARHLAHLLRLGILPVGHIYPRAQRAVRDLLRKRSQLVRYRTAQILSVQNLLARNLGARARSGDVKRWQAKSIDAMELLEEQKQALKATLAVMRCIDAQISAVERSVLAKVKARADYKALKTVSGIGEVLALTIALETGDIGRFAGAGNFASYARTVKSTRESNGKKKGQGNTKCGNKYLAWAFIEAANFAVRYDATIKRWYQKKCASSLAVVALKAVAHKLARACFYVMKDGRSFDAARAFG

SEQ ID NO: 252797 - protein, 319 aa, unidentified
MLPHPTPLATHLVGIDVSKDWLDIAFDDTKVERVDNTPAALQRLARRLVKAGLTTAGLEPTGGYERLAVAVLREAGLTVLQVDSWRCRQFAKACGQRAKSDPLDARIIRAFMLHHPCRPFPEPSQAQSDLTAWVREITRAEADIRRLENRKAHPTLAAITARLDAEIAALRETVAAAEQAIEALIAADPAMDAKAKIITSVPGIANKTARVLLAEAPELGRFTPRQAGAIGGCAPYRNDSGKARRPAHIEAGRRALKRACYLAAFAAIHWNPWAKQLYADLKARGKPAKVALIAIARKLLTILNAMIRDNKPWRDPKTA

SEQ ID NO: 252798 - protein, 401 aa, unidentified
MQQDQQHDSVDVFVGVDVGKGQHHAVALDRNGKRLYNKAMPNDEAKLRALISEFRAHGRLLFVVDQPATIGALPVAIARDEGVMVAYLPGLAMRRIADLHAGEAKTDARDAAIIAEAARSMPHTLRSLRLADEPLAELTMLCGFDDDLAAQITQTSNRIRGLLTQIHPALERVLGPRLDHPAVLDLLERYPSPATLAAASEKTLANRLTKLAPRMGKNLAAEIVQALNEQAVIVPGTQAATIVMPRLAQQLAALRKQRDEVASEVERLVLAHPLWPVLTSMPGVGVRTAARLLTEVAHKAFASAAHLAAYAGLAPVTRRSGSSIRGEHPSRRGNKVLKRALFLSAFAALRDPISRAYYTRKVEQGKRHNQALIALARRRCDVLFAMLRDGTIYQPKAADNA

SEQ ID NO: 252799 - protein, 342 aa, unidentified
MQVTTIGLDIAKNVFQVHGIDAAEKLVVRKRLSRSQVLEFFKALPPCLIGMEACATAHYWARELTKLGHKVRLMPARDVKAYVKRNKNDAADAEAICEAVRRPTMRFVQVKSAEQQSQLMLHRTRDLLMRQRTQVINALRAHMAELGMTAAQGNAGLRELLAIIAGAADERLPAEAHASLIVLAAELQAMRTLIASIEKRIIAQHRSDEASKRLRSIPGIGLVGATAIVATITDPKAFRSGRDMAAWIGLVPRQDSTGGKQKLGPISKQGDRYLRRILVVGAHAVLKLARQKPEKYPWLTQLLARKPFKVVAVALANKMARIAWALLVKGGPYRARALVAAA

SEQ ID NO: 252800 - protein, 377 aa, unidentified
MKKELYLGLDVHKDCILTAVAEEGRKGEVRENGAISNDLHAVEKWIGGLRKAHGKKTLLRACYEAGPCGFGLARRLGQLGVECQVVAPSLTPTRSGDRVKTDKRDARKLARLLRAGELTAVYIPDARDEAIRDLCRARSDAVDDRRRSRHRLKGFLLRHGYRYQGKSSWSAAHERYLRELVLPHPAMKVILEEYLQGIAAAGERIARCEAAMGDLLEQWRLKPAVHALMAMKGFRTVAAMILVSELGEVHRFAHPRQVMAYLGLVPTENTSSERRRQGHITKCGNAHARWLLVECAQHYALPPKVSQELSRRQQGQPAQVRTISWRAQNRLHNRYRRLLARRLQRNKAIVAIARELCGFIWELLRTQDCYQAQSTPV

SEQ ID NO: 252801 - protein, 466 aa, unidentified
MGKPRVVPDEDHEVVYERVAAVDVAKASGVVCLRAPDPARPGRFTSRIWDEVPAMRAQIAELGRELLRNQVQMVTLESTSDYWRIWYYVLEDAGLAVQLVSASQAKNLKGRPKTDRLDAMWLARLTQAGMLRPSFVPPAAIRRVRDFTRARTDLVAERTRCLQRLEKLLEDAMIKVTSVARDGMKAKSVAAMVAALAAGQRDPAALADLAKGPLRGKKDALAQALDGMFDSHHGVIARALLDQVAFLDRQVTVMEEQAIAALAGVPESWGVDADGQTGPQAGTSPGSPVLAAAHRLAEIPGISVWLAIVIIAEIGLNMAVFPTPAHLVSWMGLCRSASQSGTRRGKGKPKKGNSYARAAAGQAAIGAARTATFLGERYARIARRRGKPIAQVAVARSIMIIVWHLLNDPQARYHDLGPDFLASRVNRDKKIRNHIRGLTALDLTAEDICAALGITAEDIPSGGHAA

SEQ ID NO: 252802 - protein, 364 aa, unidentified
MDVHLRSTTVCALDAETGEAVTRRFRGNPWGEVAEWMSGFPGPSLAAYESGHLGFAPQRELSGLGVDCVVAAVSKVPRSAADLSSKNDRNDAARMAKAILSHDVTPVWVPSPEIEGLRDLAAAHDAATARLAAAKQRLLALLARRGYVYGGTTPAGNPRKYWTYGFLRWLDGIHPADDGGIRALAALRNEVEAADETREALLAEYRAAVAAGPLSAEVEALQSIKGCGFALAAAFASEVGDFSRFRSGRQVTAYFGLAPKQRSSADSVRLGGISGAGNALVRKLAVEGSWCYAQAGHQPKLMPKGSGVPLEIRMHGRKGSERLLRRREEMIARGMPQAKANAATAAELVRWLWALGTMCREGAE

SEQ ID NO: 252803 - protein, 366 aa, unidentified
MKKLTTTRGRRLGKMQGRRLTIGLDLGDRSSFYCVLDEAGQLIQEEKVSTTPKAMEDAFTQMPRCRIALETGTHSPWVSRLLSELGHEVIVANARNVRLIGESRKKDDRLDAQTLARLARIDPQLLSPVQHRSAQAQADLAVIRARAGLVRARTSLINTARGLTKSYGERLRGCSPRKMSPQIGSDLSPELRAALEPLLKGAEALSARIREYDAQIEKLGQDRYPEVALLKQVKGVGTLIALTYVLTLEDPRRFRKSRDAGCYVGLQPGRRNSGQSEPQLHISKEGDSYLRTLLVQGAQHILGPFGEDCDLRRWGMKLAERGGKNGKKRAIIAVARKLAVLLHHLWVSFEEYEPLRNSSKVMLPAA

SEQ ID NO: 252804 - protein, 293 aa, unidentified
MNSSKYIAMDVHTATISVAVRDAAGKLIMESVIETKTSTILQFIQGLRGDLHVTFEEGTWAAWLYDLLKPYVTNVVVCNPRRNALLKEGSRNDRIDARKLAELLRTNLLRPVYHGEKGLRTLKELARAYLTISKDLTRVMNRVKAIYRSWGIPCGGQSVYNPRHRKEWLSKITQASVRRRAELYYEQLDALVLLRKQARQELLAEGKKHQAWKLLRSIPALGPIRAAVLMAIVQTPHRFRTKRLLWKYSGFGVVTHSSADHRITITSLKICSKARRSRPPPGKVLSGNSTRLW

SEQ ID NO: 252805 - protein, 457 aa, unidentified
MKKSHTRVKKEKGISFDRPVLEPNAAGIDVGSRQMFVSVPPDRDSQPVRVFDVFTDDLNQLADWLEGCGVTTVAMESTGVYWIPLFEILEQRKLRPCLVDARHMKMWMRTDWQECQWIQYLHSVGLLRPAFRPAEEVCAVRALMRHRKNLVEMASQHVQHMHKALTQMNLQIHHVLSDLTGVTGMAIVDAIVDGERDASELAKLRDPRTKATTETIRKSLIGNWRPEHLFALKQSRECYSMYQQQISACDREIEKLLQAAPSRREPSDKPLPPNKKRKRNNGIESESAFSVRTEAYKLFGVDLTQVPGLAQNVLSLYAEIGSDMSRWATPAQFVSWLALCPDNDVSGGRTLWRGMRKCKNRAAAIFRMAAYSLHRSLTPLGDYLRRMKGRLGPAGAITATARKIAVIDYAMVKNQVPYDETRWAEYEALRKMRIEAKLHRQARRLGYQLVPLQQPAS

SEQ ID NO: 252806 - protein, 375 aa, unidentified
MSNHSEAFVAFDTSKLRNAVAIADSGRTGEIRFLGEIENTATATAKLVRKLAGKYERLTFCYEAGPTGYELYRQIKSLGQECLVVAPSLIPKKPGDRVKTNRRDAVSLAKLLRAGELTAVWVPDRHHEAMRDLTRARDTAVDDLRSKRQQISAFLLRQGLHYCAGKKTWSQTHLNWLASQKFEYPEHRLVFEEMMMAMRQAQERLERLEQAIRAAVPDWSLADLVTALMAMRGIDLIAAATFLAEIGDLSRFQSPCELMAYLGLVPSEDSTGDCVKRGPITKAGNRRARRMLVECAWSYQHPPRVGKDKQEKIAAAPRAVREIAWKAQSRLNRRYRALIRRGKLKTVAITAVAREFAGFIWAVARAATAARATAK

SEQ ID NO: 252807 - protein, 416 aa, unidentified
MNAVGIDVSSRKSTVAVLRPLGEVVCLPFDVTHDIAGLASLVEKLKALDGETRVVMEHTGRYYEAVEKALHEAGLFVCAVNPLLIKEYGANSLRRVKTDKADAVKIARYALDNWADLRDFTPMDAIRYDLKTLNRQFQLASKQRTASANNLIALLEQSFPGIRKCFDSPVRSDGTQKWVDFAHSFWHVDCVRKQPFAAFCERYRKWCKRHAYLFKLSNAEEVYALAKRAVVLTPKSKVVKVLVQEAANQLISISRSVEVYRAEMDRLAAMLPEYPVVMAMYGVGKSYGPQLMAEIGDVRRFERKQALVAFAGIDPMPNQSGDKNVRSNKSSKRGSPYLRKTLFNVIRTYLQCAPQDEPVFQFLNRKRAEGKPFYVYMLAAANKFLRRYYAKLRDYFASLDTLQSVDPIPTTLKASL

SEQ ID NO: 252808 - protein, 376 aa, unidentified
MGSPRDSRSCSQRNKRRRPAVSSISERQLVGVDLHLHRSVIARLDDQGNELGWVRIDNDPKALVREVRKAGRGCSVAIEATYGWYWAVDALTAAKFDVHLAHPLGMKALRARKRVKNDVRDAYELAKLLRLGSLPEAYIAPKELRELRELVRHRQQLVKLQTAVKAGVRALLAKHGIRIAARDLNGDGAIAVLDSLSLPGTYAIRLAAQRRLLLALGEEIDAVEVELVHRLKDHQGYRRLLTIGGIGPTLAAVFIAEIGDISRFKDAAALCCWAGITPRHYESDKTVRRGHISKEGNTLVRWAAVEAVQRNCEPGIRAVRDGIIARRGKDARNTAKIAAGRVMLEAIYHVLRDGTSRRLTNSWWALGERTDLVAAG

SEQ ID NO: 252809 - protein, 310 aa, unidentified
MMDKAVVGVDVSKDWLDLCVDERAERIANTAAAVAAWLDRVRPGLVAYEPTGGHERHLVSGLRQRDIPFLRVHPNEVIAFRRSRGLKAKTDRIDAGVIRAFVGDRLARRALRPSILGDDRLRELAARRRQLVAALQAERCRLDLAAVPIVRHSLEAVIAVLRQSLDALEAEIAAAIAAEAQTAKLAGLLQTIFGIGPAVAAALIADLPELGLLSAKEIAALVGLAPQTRRSGKIRYRERTGHGRPGVRRALFNAARAAIRHPSPFKDFYDRLVTRNGRPGKVALTAVMRKIVVLANTLLKEDRLWVNHCA

SEQ ID NO: 252810 - protein, 424 aa, unidentified
MKVTYQTCCGVDVHKSFLVATIVKTTGGIEPSYQKKRFSTFNNSIFEFKQWLLDNDCRDVCMESTGKYWVPVFNLLEDEINVVIANPKWVKAVKGNKDDTKDSKWIGDLFRLGLVKGSYIPCKIVRILREYTRYRCKLVSCRSSEKNRYQNALTVCNVALDSVVSDIFGKSSTSIIDYLLEQSGTSINHEEIASKLLRSLKSKEDAVIESVEGYQMTDAQKYRMRLVRAHMDYITAEIKDVDKMIENMISSNPDFENAVQFLCTIPGVKCDSAITIISEIGTDMSQFSSSKRLCCWAGLTPGSNESAGKKKSVRITRAGVYLKPALVQCAHAAVKSDQSPYYKKKYESLVKRRGKKRAIIAIARMILTAIYQMLSTGEQWNPSDLYKIDVPEALIEKQKAKAIKQAKKLLQREGLLPPDEPVAS

SEQ ID NO: 252811 - protein, 312 aa, unidentified
MTNKICGVDVGSETLDARVGQDGPWGQFARSLEGSLALAEFCKEHDVDLVVMEATGGYERLPFAQLWGAGQPVAIVNPRSVRKFAEAMGRLEKTDRIDCGMIAWYAQTKRIRPMQPASATQTRLTALVVRLRQLTEAKVVQTNQRRLVTEPDALATFEPILAAIVSQIRSLEHQIAETIDDDPLWAELDREFRTIKGVANRSVATLMAELPEIGTLSNKAVAKLAGLAPLARDSGKKTGQRPVRAGRAGVRSILFVVAEIVRRFDPDFKAFHQRLCAAGKPKKVVRVALAHKLLVRLNAKARDTRRKLAAAT

SEQ ID NO: 252812 - protein, 417 aa, unidentified
MIRKVMEVIHQCVGGLDVHKKTVMACRRRLLEDGQVESEVREFGTSTLQLCALSKWLSEWGSTQVAMESTGVIWIPVWNVLEADFKLLLTNAQQLKKVPGRKRDVGDAEWIAQLMQCGLLKPSFVPNREVRHWRTLTRQRMKLIDQHTGVVNRLHKVLQQGNIKLSSVATDVLGVSGRAMILAMIEGESDPERLAKLAKGRLKSKHEQLVESLEGSLNQDDRWVMKELWEQMEYLEEEVARYDEEIKEKMSHNEESLRRLMTIDLIERRSAENILAEIGPDMSFFPSDDNLVSWAGLCPGSDESAKKNRSGKTPKGNQWLRRALVEPSWGAARRKDGYLGAMYRGIAARRGEKRAVIAVARTILQAAWHVLSKGVEYKERGGDYFDRMNSEQTKIKLIRRLERLGYEVDLKPKQATV

SEQ ID NO: 252813 - protein, 345 aa, unidentified
MDHFAGLDVSVKQTSVCIVDDTGRMVREVKVASEPEALLAVLANPLYRFKRIGLEAGPLSQWFFSALAEAGLAVICVETRHMRAVLQAQINKTDRNDARGIAQMMRAGLYRPVHVKTLRSQKLRMLLTHRKLLQSKAIAIDNDLRGTLRNFGLKVGMVGALKFEARIKELVENLPDLAELVEPMLIVRRTLREQIGILHGRLLAIVRNDDVCRRLMTVPGVGPVVALTYRATVDVPARFRTSKAVGAVFGLTPSKYQSGEINRSGAISRCGDEMMRAMLYEAAHIMLVRLAKWSWLKAWAMKIARQRGIKKAIVALARRLAVILHRIWVDGSEFRWTREQAVAAA

SEQ ID NO: 252814 - protein, 370 aa, unidentified
MTERTTYFVGLDVHKDSIAVAHAEAFRAEPPHYVGVIGTRQADLDKLIRRLHSRASDLIFAYEAGPCGYVLHRYLTGKGLDCRVVAPSLIPKKPGDKVKTDRRDAVEIARLLRSGDLTNVYVPRIEDEAIRDLCRARDAATVTLKAAKLRLKSFLLRQGLHYSGRADWNQAHRRYLSKVVCPTPAQQVVFQESVRAVDEQIDRLHRVEQELLAMAPSWRLYPVVEALQALRGVQWIVAITVVAELGDLTRFDNPRQLAAFVGLIPSEHSSGDKRRQGGITKAGNGRARRALIEAAWAYRYNAKISPIIQKRIESLPKPIQDIGWKAQLRLCKRFRRLCARGKNPNVVVAAIARELIAFMWAIAKEISTNV

SEQ ID NO: 252815 - protein, 407 aa, unidentified
MRFAGIDVGAERHMVAVVGEQGEVLCRSSPFGEEASGYAHLFELLGPPESCLLALEATGHYWRNLFVALLAKGYAVAVLNPLRTRRFAEEELQRTKTDAIDALGIARFAAQKRPPAAQLPDVATEELRELSRLRDRLQEDFASRLRQLHRAVDLGFPEFTRHVRTLESQLAATILSRYPTAESFRGVSVKALARIVYDGSHKIGEELARALIEAAAKSVGSFHSEPYRLRIKYLCEDLDVLRHRLKDLARDIEHKIDDHEVGKLLTTIDGVGPLTAACLIAELGDPARFRSAGAIASYVGVAPRLRQSGKKRFSGSPTIPFGNARLRKALWMVVLNAVRCNPWLRQYYERLRAAGKPGKVAVIAAMRKLLAAVWSVATHRRAFIPYLLPNGATAGVPTGPGSAYERR

SEQ ID NO: 252816 - protein, 352 aa, unidentified
MKKEEKKKRDRVTIGLDLGDRRHRFCVLGGSGQVVEEGSMLNERVALSRLVSRYSRSLVVMEAGCHSPWISRYLKQLGSEVIVSNPRKVRAIYEHERKCDRRDALMLARIARMEPALLYPVEHGSEEAQQDLVRLKLRDSLVRARVAVINSIRFTIKSLGYEAPRTSSERFHKVVGPALPPALSEVIAPSVRVVGELSLRIKVLEREIRALARSKYPQTAWLEQIPGVGPLTALYFVLKIEDPKRFTKVRDVGAFLGLCPRRDQSGENDPQLRISKRGDTYLRRVLVSSAQYIVGPFGPACALRQYGLKLAAEGTARAKKRAVVAVARKLAVLLLSLWKNERAYLPFPQLSC

SEQ ID NO: 252817 - protein, 344 aa, unidentified
MEHLAIDLGGRESQVCVRSVEGTILEERRCPTASLKKFLAGRPQSRVVLETCAEAFAVAEVARVLGHEVRVVPATLVRALGVGARGVKTDVRDARNLSEASCRMERLPAVHIPSAASRERKSICALRENLVEVRTKLVNGVRGWMRSEGLGTPRAGNPETFPSRVIVHLKQREREVSAWVSRNLTTINHLSKQIAEADAELRHLSRADPTCRRLMSVPGVGPVTAVRFAAAVDDVSRFSSAHALESYLGLTPGERSSGDHQHSTGITKAGAPRLRWTLIQAAWSAWRHRRQDPMVMWALRVQERRGKTIAIVALARKMAGILFAIWRDGSAYDPKRHTGEVEMA

SEQ ID NO: 252818 - protein, 312 aa, unidentified
MITVSKIYVGVDVSKDNLDICIEPLGKTFRIANSEDAIEKFIKKLPQFDELKIACESTGGYEKLLDKVLSKHGMHLWIVDPRRIKGFIVSKNCKSKTDKIDAIKIAQFVMQNSEDYKQMKKTEQEQLLQALVDRKQDLIVMLSAEKTRLKHPVHELSIKSIETMMGYLKIEIELIEEQIEERIEHDKELKQKSKLLASIPGIGKATAAILLSSLPELGKIGNHQIASLVGVAPYARESGNFKGKSFVSGGRAIPRKALYMCALTTIKYHLPLKDFYDRLISNKKPFKVAMVAVMRKLIIIANIILKKGEMCK

SEQ ID NO: 252819 - protein, 424 aa, unidentified
MEEKELEKPIRAWIGIDWADEKHDVSLSDVATGKQEALTIRQSPEALQEWLGQLRSRYEGGYVAVVLEQGRGGLLNALMGCEFLVLYIINPKSLSSFREAFYGSGATSDPVDAELMRDMVRQNPSRFRAWRPDDVMTRSLRLLTEGRRNLVNQSTALTNQLTALLKGYYPQALAWVGTLDTAWACDFLQQWPTLQSLQASSRRQVLRFYEKHPRASLNLNEQLKQIQDARALTQDEAVLESSALMVQALVSQLRPLLASIAEFDRKIAMIFHKHPDRPIFESFPGAGAALAPRLTAAFGTDRDRFQAATEMQELAGIAPVTEKSGKKSFVHWRYACPKFMRQTFQEFADHSRRWCKWAKAHYELLRQRGKSHNAAVRALAYKWIRILFRCWKNRQPYQDEVYTQALLKHGSPLSSLLAQYVENP

SEQ ID NO: 252820 - protein, 344 aa, unidentified
MEIIRVGVDLAKNVFQVHGVDARERPVWERRLRRGEWLRAVCERVAPGAEIGMEACAGSHHWARELEARGYRVKLMAPQFVKPYVKSNKTDRNDAVAICEAMSRPSMRFVDVKSVEQQDIQAVHRVRSELIKQRTGQANQIRGLAGEYGLVAPLRLGALRRTLPEWLEDAENGLSARFRRLLAGLADDLRRLDERICELDQEIASIVETNPAAQRLLQLRGVGPIIATALVATLGSGQAFRRGRDFSVAVGLTPKQHSSGGKDRLLGISKRGDAYLRQLLVHGARATVRTVGCKTDPLSRWIRALLERKHTNVVVVALASKTARMAWALIHDNSDYEPRLAARA

SEQ ID NO: 252821 - protein, 413 aa, unidentified
MPQKTDYIYVGMDIHKETHTAVLMTYMEERLGKIKITNNIAGYRRLKAYVEKIQGNRIPIYGLEDVSHYGRDLAVYLLDQEYIVKEVNSALSCMERNSYATVKKNDEWDARCICSVLSRRSDSLPDANPQDYYWTMKHLVGRRDALVKNTSALVRQFHEQIQKQYPSYKKFFTVIECQTSLAFFERYPSAGHLTGVTVQELGTFLREQSHNTCSDKRAERILNLVEQDKMKEREYQSGRDLILQSITRQMIFNQQEMKRLEWMQGELLKELGYHLETIPGISTVTASALVAHIGDIKRFKNADRLANYAGVVPICHSSAGKGKNTQNKHLGNRDLYNVLYLLAMQQIQVNKEGTARNPLLRAYLEYKVSQGKTKIQAMICIMRRLVSIIYRMMKNQTPYQMPEVESPKEQMIS

SEQ ID NO: 252822 - protein, 424 aa, unidentified
MKVTFQTCCGVDVHKSFLVATIIKTSSGIEPSYQKRRFSTFNNSILEFKKWLLENECLYVCMESTGKYWIPVFNILEDEINVTIANPKWVKAVKGNKDDTKDSKWIGDLFRLGLVRGSYIPCKKIRILREFTRYRYKLVSCRSSEKNRYQNALTVCNVALDSVVSDIFGKSSTSIIDYLLEQSGTSIDHEVIASKLLKRLKAKEDAVIESIEGYQMTDSQKYRMHLVRAHMDYITAAINDVDSEIESLIASDPDYENAVELLCTIPGVKYDSAITIISEIGIDMSQFCSSKRLCCWAGLTPGSNESAGKKKSVRITRAGVYLKPALVQCAHAAVKSDKSPYYKKKYESLVKRRGKKRAIIAIARMILTAIYQMLSTGEQWNPSDLYKVDMPEALLEKQKQKAIKQAQKLLIREGLLPTTEPIAS

SEQ ID NO: 252823 - protein, 406 aa, unidentified
MELVPLHKRVIGLDVHQAQITACAILEEADGETRIEQRQFGAFKKDRRALAAWAAALDPDEVVMESTGIYWKSPYAALEAVGIRATVVNARHVKQVPGRKTDVGDAQWLATLARAGLLRGSFVPPAKLRELRVISRQRQKLVSLLTAEKNRMHKVLTDAGIRLSVVVSDIHGQSARAMIKGILDGQAPHEVLNLASRRLKASREELHDALQGELTASHGFVLDELLRHIEELEARIARFDARLLGELASEKNALALLQTLPGVDVIGAAMLLVEIGSDMSAFGTPDRLASWVGICPGNHESAGKRKSGRIRQGNPYVRRLLCEFAHAASRTRSAFQSKFQSLIVRRGYKRAIVALAHKMLRTLFFMLKRGEYYRDSATNYEQLSVQRNASRWIKALTRFGFIPAAA

SEQ ID NO: 252824 - protein, 418 aa, unidentified
MFKIFRKNCCGLDVHKTWIYACIGITDANGRTEYKQERFSAFTKGLRKLAEWLAKYDCVFVCMESSGKYWIPVFNVLEKTCFVTLAHPKYTKPQKGNKTDRKDAKWICDLFMCDMIKPSFIPSPDIRHLRDLMRYRFKLTCMLTSEKNRALNCLTVSNLKLDDVFTDVFGKSSSSIINYILAHPGEQFDVTPFVHKGCKQPIEEIQAAVDGSISPEQATKLREVLRHIDELNLHKKNIETEILRIAAPYQSVLDFIRTVPGFSSDPMTAIALLSEIGPDMSVFPTAKNLCSWAGCCPKNDQSGGKRKSNRISRAGVYIKPLLVQVANAVVKSDKYPEFKERYRRLKARRGHKKAIIAICRMFLTAIWNILSNCQPYSSDGYLVERPCKSMVISSSQALYLLKSRGYIIKDDLPFIAPG

SEQ ID NO: 252825 - protein, 259 aa, unidentified
MTSYIGIDVGKKSLHIYLPIADKSIEITNNQQGLAKLLSCCVEYYQHLSDIIIAFEPTGGYERELKEFLKLNKVNFVTVHPNKVRSYAKAKGLLAKTDLIDSKLLSEYATVFSLLVKQDYNCKSQEDLHCFIQRREQLIAFKNQEIARLENHYNKVVIKSIKSHINQLDKQLIQVQKSIEELCNNDLAIKDKVSKLTSIPGVGIVAATTAICEIPQLGNIEFSQLIALVDIAPYTRESGSYKGKRSIFAGCGKALSFYV

SEQ ID NO: 252826 - protein, 355 aa, unidentified
MERAKEQGALIYLGVDTHLESHVAAALDEAGRRLGVLAIPNNEVGYAELLGWTLELGALAAAGVEGTGSYGAGLSRFLRSRGAHVVEVNRTSRQHRRRYGKHDASDAEAAARAVMAGTASGEPKGADGAAESLRVLRVARRSAVKARTQAANQLHALLSTAPERLKASLRGLPSRHLATKAARLRCVLDPTHPAAATKFALRSVARRYRDLSEEIAELEVQIERVTREAAPELTALDGVGPDTAATLLIAAGDNPERLKSEASFAHLCGAAPVPASSGKVVRHRLNPGGNRDANRALHVVALNRLRRDPRTQEYVARRTSEGKSKKEVMRCLKRYIARETYRAILLDARAQLPPG

SEQ ID NO: 252827 - protein, 311 aa, unidentified
MTHDTIGIDISKLHFDAHRRMTGRHARFDNTAAGFKAFSHWIGADHPDLVVFEPTGPYHRDFEAAFAGRLPLAKVNPLQARRFAQSQGTRAKTDAVDAAMLARMGRALELVPDRPAEEIQTVLRELRVARAGLVRDRTALMNRLSAARLPLVRRLVKARLAQAERQIATLDAEIDGHLEACPKRRRAAQILTSIPGIGRITARSILAECPEIGTLRHKQIAALAGLAPMTRQSGTWCGKARIEGGRRHLREALFMPALVAMKKNPELSAKYDQMRAAGKPHKVALTALMRKLIQLANTLIREDRTWHPKCA

SEQ ID NO: 252828 - protein, 421 aa, unidentified
MKHPTEDRFAAVIGIDWAHAKHDLCLRAAGSEVLERSVLKHSPEAIDDWVRELRKRFGQGLIAVALELDKGPLVYALQKYEGFVLFPVNPTTLAKYREAFTPSGAKDDPTDAELALQLLLRHPEALKGLEPQSPSMRALVQLVHDRRRLVSDKVRITNRLINALKNYFPQPLEWFRDKDTVLFCDFLTRWPTLKHAKRARQSALKAFFHEHNVRRSAVIDERIRAIRSALPLTEDPGVIGPQSLLAATLVSQLRTVLEALERFNAAIAATTELLPDYAIFSSFPGAGPTFAPRLLAAFGENRERYQRCEELQKYSGIAPVTERSGQKSWVHWRYRAPSFLRQTFVEWAGETIPRSFWAKAYYQQQRAKGLSHQAALRSLAFKWIRILFRCWQDHTPYNEATYLLALQRSGSPLLKNLTASS

SEQ ID NO: 252829 - protein, 417 aa, unidentified
MKSASNTLPDEPFNGVTGGLDWARDDHAVSVVDARGRELVRHSVEHSAAGLRELIDVLTAAGCREVAIERPDGPVVDALLAADMTVVVISPNQVKNLRGRYGSAGNKDDRFDAFVLADTLRTDRARLRPLISDRPETVTLRRLGRARKDLVRHRVAAANQLRAHLRIVFPGAIGLFAEIDSPISLAFLTRYPAQDQADRLSPKRLGAWLAGVGYSGGTDPDVLHARLVAAPRGLTGADAALNAHITAAMVALLSSLLDQIKALSAQIDTQLAAHSDAHIFTSLPRAGRVRAARLLAEIGDCRARFPTPETLTCLAGVAPSTRQSGKLRAVTFRWSCDKQLRDAVTDFAGDSRRANPWAADLYQRARARGHDHPHAVRILARAWLHVIWRCWHNGVVYDPTQHGAHQRLLNQDQPEAA

SEQ ID NO: 252830 - protein, 356 aa, unidentified
MSQTPNSKIAVIGIDIGKNSFHVVGQDRRGPLVLRQKWSRGQVEARLANLPPCLIGMEACTGAHHLSRKLQALGHDARLMPAKYVRPYSKGEKNDYRDAEAIAEAVQRPTMKFVATKTADQLDLQALHRVRARLVSQRTGIINQIRAFLLERGIAVRQGLHFLRAELPGILAKRTDVLAPRMLRIIEDLSGDWRRLDERIENLSGEIEALARQDKGCERLMTVPGIGPIISSAMVAAIGSGDAFSKGRDFGAWLGLVPKQMSTGDRTILGSISRRGNRYLRTLFVQAAWVVLVKVGPKQWERYGLKSWIEAAKQRLHHNVLAIALANKLARIAWAVLHKGRAFECVKTNATASQSA

SEQ ID NO: 252831 - protein, 349 aa, unidentified
MDLFIALDVSLASTALCALNAHGKVVKEAKVDSEPEALIAALRALPGDVVAVGLEAGPLSQWLHRHMTEAGFPVVLLETRQVKGALKAMPIKTDRRDAEGIARLLQMGWFRPVHCKSVSAQEMRAVLSTRKSLQQTLINLELSLRGVLRNFGLKMGAVTKIRFEARVRELVDGNLMLERAAAPVLRARDELRKELAGVEKLLRDLAKTDPDCRLMMTMPGVGAVVALTMRTAVDDPERFHSSKDIGPWAGLTPRRTQSGERDVIGQITRAGDAALRTALYQAANAVLCRSAPSWLKAWALRVAARRGKKRATVALARRIGVVLHRMWRDGTEFRFTRDEAMAAMTRHTC

SEQ ID NO: 252832 - protein, 428 aa, unidentified
MNTLQKRIERITPITIIVGIDVAKEIHYARITDHRGIDLSKPVKVHNSIDGFESLLERITKLKTKHNCDHVIVGTEPSGHYWRALGWYMKLHESNPDLVGVNPYHTKQAKELSDNSQTKSDPKDAQVIAHLIRNGNYFDTYLPEAEYAELRVLNTERQRQTKQISRANNTLIAMLDEYFPEYATVWGNVTCPTSLALLKTYPFPSDVLTASQKKLLDDIREASNGKEGIKLMGEMIQAAKRSIGVTEGLRSARQRILNLIDELEYFEKKKAEIESAMESMMEELQLGEILQSVPGVGPIISAAFIGEVGDISRFDNWKQVRSLAGLNLVESSSGQHRGKTKVSKRGRPYLRHMLYLAGEAGCIHNKEMNGFYRYFRDRKNNPLNGHQAFVATGLKVMRILFHLAKTGEMYDPGKALGEVRKQQISSIT

SEQ ID NO: 252833 - protein, 343 aa, unidentified
MKHYAGLDVSVKETSVCIVDETGKICREIKVVSHPEDLLQLLQDRAWRLERIGLEAGPLSQWLFEGLAQAGLPVVCIETRHAKAFLKAQVNKSDRNDARGIAQMMRVNLFCPVHVKTLSSQKRRALLTARKLLQEKALAVENDIRGLLRNFGLKVGAVGAVRFEVRIHELLESMPDLIDIIQPLLQARRELREHFATLHRKLLALVRNDEVCRRLMTVPGVGPVVSLAFVATIDTPARFRRSKAVGPALGLTPVLHQSGESSRVGRISLCGDAMMRTLLFEAAQIILTRASRWSWLKAWAMKVAQRRGRGKAVIALARRLATILHRIWCDGTEFRWTREAQAR

SEQ ID NO: 252834 - protein, 334 aa, unidentified
MTNVTTCGIDLAKAVFSVHAVDGAGSVVLRKTVGRSRLMALIAELPPCLIGMEACSGAHEWARRFREHGHTVKLMAPKFVAPYRKSGKNDGNDAEAICEAVSRPSMRFVPVKTVEQQALLTLHRVRLGYVEERTATINRIRGLLAEFGVVLAQRAIEVRRGAAAVLEALPILAARAVRDLLAHVSVLDERIEEYERELKAHARQDERARRLQQLSGVGPIGASAIVASVAEGHEFKNGRQFAAWLGLTPKQHSSGGKTRLGRITAHGDPYLRTLLIMGARAMLQTALRRTDRLARWALAVRERRGYHRACVAVAAKHARIIWAMLAKHTELKLS

SEQ ID NO: 252835 - protein, 451 aa, unidentified
MNKKVSMQIINPNAAGIDVGSRSHFVAIGQGKDDVNEFGVYNEDLQAIVTWLLLHKVTTVAMESTGTYWQSLFAVLQNAGIQVILCNGKFTKNIKGKKTDVQDCQWIQKLHTIGLLSGSFLPDEATEQLRTYCRHRANLLDNAADTTRKMQKYLRLLNLRLDVVVKDITGLTGLAIIEAICKGEVNAQVLASLRHGNCKKSEEEIAKALQTNGRKDYLFGLKHEYKMYQSLQSAITSCDVEIEKMLTEQINNNADKRQHIIDKKIHKRINKNSPKNMDINLMAYQYFEGVDLLAIEGVSHSTVLSIMSEVGPEGLKKFDTAKQFASWLRLVPNNKISGGKVLSSKIPKGSNRLKIALRNAANAIGNLKDTPLSNFFNRINFRKGRVSAISATARKLAIIIWNMIIKKKPYNNEHGYEFLDQKRKRKVKEMRKLIHKFDIKTDELGLQLNGL

SEQ ID NO: 252836 - protein, 324 aa, unidentified
MTDNSTLTAGIDTGKDKLDVAVYGLTFCLTVKNDTEGWAEITAAFKKLGVTRVGIEATGGYERGVTRHLRAAGLTVIVHQPLQVKAFAKLHLRRAKNDTIDAALIAACTQLFETSKKIPPDPRLEDLAEQLTYVEQTKKDIKRLKNRLEHMENKRLRRVVEADIKRMEKRSNAELDRIEASLREHDDLATRLDLVLSVVGIGHPTAITLIVRMPELGHISREQAAALAGLAPFDQDSARHKGHRHIAGGRSQVRTALYAAAQAASQFWNPALKELYQRLTKRGHCHQSALIACSRKLLIYANTVLERGTPWEKAVLATPSQSSH

SEQ ID NO: 252837 - protein, 418 aa, unidentified
MQTELSNYTAIIGIDWADKKHDVCIHVTATGKQELLEIPHRSEKIDEWARSLYRRYGGPMAVALELSKGPIVAALQKYDFFVLYPVNPSSLVSYRRTFTPSGAKDDPTDAAYILNLLLRHPDEFHPLKPQSAEMRALMTLTEQRRRLMNDRVRLTNRLRNVLKQYYPQALEWFDRIDTQLFCDFIRRWPTVVQAKRARKATLEAFFRVHNMNRRPLLEKRITAIKAAVPLTADDGVVIPYRLLALTLVEQLETILACLDRFDQEIAALAPQHPDHELFDGLPGAGPVYTPRLMAAFGEQRERFNSAAEVQKYGGIAPVTERSGQQLWIHWRWQCPTFLRQTFVEWAAQTINKSYWAGLYYYQQRAKGCSYQAAVRALAFKWIRILYRCWKTRTPYDEARYLKALQERGSPLLKTAEAA

SEQ ID NO: 252838 - protein, 338 aa, unidentified
MMRFKFFVGIDVSKDTLDFSVVTEGKEISAFKIENSLRAIKTALLNLKKIKDYELSQVVFCLEYTGLYNNHITHCLHSMEAHIWVEKAIQIKRSSGLQRGKSDKVDAQRIAFYASRNQDKARLWVAPRTVIQQLKRLTGVRERLLIMVSQLNKPLKESKRFDSNEVFDVIKKSCQSSLKAIKADLKKVEKKITEVIKADASLSHLFELITSVDGIGTVIACEMILTTNEFKNINDPKKYACYAGVVPFEHTSGSSVRGRNRVSHFANKNTKRLLHMASLSIIRYQGQLKTYWLRKLQEGKHKMIILNAIRNKLIQRVFAVVKRGTKYEKIYSHSLQGS

SEQ ID NO: 252839 - protein, 342 aa, unidentified
MNYYAGIDVSLEWSSACVVDGAGKIVGESKVLSEPDALIDFFRKLGLPLSRIGLEAGPLSQWLYGALHQAGLAVELLETRHVRNALKTMPVKTDRNDARGIAQLMRLGWFRPVHCKSMEAQETRALLTARKLVQAKLHDIEMSLRGILRGFGLKVGRTTPSCFATRIGELVDGHPSLEAIAGRLLAVRAVLRRELDGFEKQVRALARRDTRARLLMTVPGVGVVVSLTYSSAIDDARRFQSSKNVGAYFGITPTRYQSGETDVSGRISRIGDAGVRAVLYEAANVILTKPIKGCTALKSWAMRIATRGGMKKAKVALSRKLAVIMHRMLIDGTPFIDAAKVA

SEQ ID NO: 252840 - protein, 321 aa, unidentified
MIDSASVVGIDVSKASLDVAFGLDGPVAQFVNTPKGFRALTRALATRAPSRIVMEATGGYEQRVLRCLIDQRLPAIRVNPRQVRDFARATGILAKTDAIDAQVLVRFGAAVEPEHRPLPTPEQETLARLQTRRAQIVALRTAELNRLEQTTDTLITRTIKALINAFDKQIALIQAESAQVIAEHHALERTFTILTSVPGVGPVTAAVLMGHMPELGTLSRQAVAALAGLAPFNRDSGTQRGQRHIRGGRAPVRTALYMATLSAVRCNTVIAEDFQRLTAAGKPHKVAMAACMRKLLTILNALARDNLLWGEKKTRNATVAT

SEQ ID NO: 252841 - protein, 371 aa, unidentified
MTDNSTFIGMDVHKNSIDIAIAESGRDGQVRHYGKIDGTLSALDKVIRKIVSKGNRLHFVYEAGPCGYQIYRHLTAKGFDCSVVAPSRIPKPSGAQIKNDRRDALMLARLHRSGDLTSVYVPLAEDEAVRDLVRAREDAKSDEKKNKQRLQAFLLRHGHRFTGRTSWSKAHMRWISDIKMPHRSQQIVLQESIDALSQCKARVQRLTEQIQKLLPDWHLFPVVQTLQSLRGVSMLVAATTVAELGDLKRFRYPSELMSYLGLVPSENSTGTRIRRGPITKTGNGHVRRVLVEAAWAYRFNARVSRVLLKRQEGLPQHICDISWKAQLRLCSRYRHLWNKGKSKQVVVTAIARELCAFMWAISNETEIPANV

SEQ ID NO: 252842 - protein, 369 aa, unidentified
MNEISRIGMDTSKRIFVLHGVDAAERVVLRKKLRRSQVLGFFRELAPTKIGIEACGAAHYWARELTALGHEVVLLPPQYVKPYVKRNKNDAADAEAICEAMGRPTMRFVPVKSAEQQAALMLAGTRDALVRRRTQVSNTIRGYAAEFGFTAPKGLKHIDPLLARIADDRDVPVLVKELFADYARDYARVQEQIARIERKLMAWHRHNELSRRLAGVPSIGPLTATLLAMKVPDPGAFRSARDFAAWIGLTPKDHSTAGKMRLGVITRAGDEALRSSLVVGATSVIQQVCKGRGNHSPWLLDLVRRKPPKLAAVALANKTARIAWKLMVSGEHYDAQRAARFVPPTDSIAPRSPRQGRFAPPSAVAAGQP

SEQ ID NO: 252843 - protein, 433 aa, unidentified
MHQFTRAPVSRTMRSHLTASVPVDPMVWVADGQEVGFPPFATNLEDREMSKLNHTDASAAAEYATVHLAFELSKANWHLGVILPRSQKLSRFRIDGGDLAALSAHLAEWRAKAGAAGKPVRIVSCYEAGYDGHWLHRWLTNQGVINYEIDPASIQVNRRARRPKTDRIDLEQLMSTLLRYLRGEPRVCSMVRVPSPEDEDRRRVSRERDRLLKERSGHTNRITGLLHAQGIRDAKPLARGFIASLDSIRTGDGRPLPPRLKEEIVREHQRLCLVHQQLIALEKKSLAERRAPARGSIEEKINQLVDLRGIGAVGGRKLMHEVFYRSFDNRRQVGSFVGLTNSAYDSGTSHRDQGISKAGNRRARTLAVELAWLWLRYQPESELSRWFHARVGHIKGRIRRIAIVALARKLMVALWRYVTTGLVPTGAVCRQSI

SEQ ID NO: 252844 - protein, 316 aa, unidentified
MSMNPTPVYLGIDIAKDTLEVAGPGLRLPVPNTAEGHAQLLAAARSLRTPVHFVCEATGGYERRLVACLLAQDCAVSLLNPARVRQFAKATGRLAKTDRIDAEVLAEYGFTLQPPAEPKPVPLLEELTDVVRRRAQLAELLGLQRTQRQQLHDARLVADLDRLIGFLEQQIAALEKRLDELVDKDGGLGARLQRLCQVEGVGKTTAMNLLAELPELGQLNRTRIAALAGLAPFNRDSGAATGQRHIRGGRANVRRALYMAALTATRCNPVLCPFYRQLRGRGKGHRVAITAVMRKLLVHLNQIVRTPEVMLASQHS

SEQ ID NO: 252845 - protein, 372 aa, unidentified
MSQSSTLYVGLDVHKDSIEIALAEAAREVEVRRLGTVAGGTAAVTKALRRLVSAGHRLHIVYEAGPCGFVLQRHFAALGWHCEVVAPSSIPRPSGERVKTDRRDACKLARLARIGELTPVRVPDAGDEAMRDLVRGREDAVREQRSARHRLKALLLRNGIVYTGRSAWTGAHLRWLATVKLAHAAQQIVFQEYLHAVSEAAARIARHEQALREALPGWTLAPVVAALQALRGVQLIAAITLVAEIQDFWRFASPRQLMAYLGLVPSEHSSGPKRRQGAITKAGNAPARRILVEAAHLYRYPARVSPVIARRQAELPKAVTDIAWAAQVRLCARFRRLGARRVPHNKLVVAVARELCGFVWAIAREVTPAPSH

SEQ ID NO: 252846 - protein, 387 aa, unidentified
MPSSGLRPGQIAVQISPAAIFVSLELSRSTWLITSLAPGGRDKMSKYLLRSGDNAGLLDHLTTLREKAHARTGASFPIITIQEAGLDGFWVHRVLERAGIESHVVDAASILTSRRRRRAKTDRIDGEALLRTRLAYKRGEPRVCTMVRAPSAEEEDRRRLCRERKTLVAERVAHVNRIKGLLFAPGICDYEPLRGDRRQRLEAVRTGAGHPLPPHLKAQIGRELDRLGLLLEQLKAVEAERDALLEPANDAAPVAVKALAGLRGIGPEFTAMLWSECLFRSFRNRRQVAAYAGLAPTPWQSGSVRHEQGVSKSGNPRLRSTMIQLAWLWLRHQPTSELSLWFRERVKRNGGRGKKTAIVALARKLLVALWKFSSSGVVIEGAMMKAA

SEQ ID NO: 252847 - protein, 306 aa, unidentified
MGGRQLRRAGRIDMTRTALEGFGKSLLASDEVVIEATANSMGVSRVLAPFVARVIIANPLQVKAIAQAHVKTDKIDAGTLASLHAAGYLPQIWTPDAATERKRRLATRRYQVVRHRTRLKNEVHSILHAHLIPKCPHADLFNARGRTWLAAQPLPEDERAAIDRHVRELDRLAEDLALLDRQIAQDAIDDPAVKRLMTITGINLTVAAAIVAAIGDIGRFNSPQKLVSYFGLNPRVRQSGLGVAHHGRISKIGRSHARAMLVEAAWASAKTPGPLHAFFVRIRARRGHQNAAVAVLASSLCSAGIC

SEQ ID NO: 252848 - protein, 316 aa, unidentified
MQAQQVFIGVDVAKDSLVSCIHGLAKPQVVANEERAIKGWLKTLAPQAVIGMESTGRYHQSLARLAHQAGLRVYVLKAKDVYFYAKALGARGKTDPGDARVIARYIAEHHGALHAWAPGTAAQLRVQELLQRRARVAVHRASLRQVLAGLEELAPDVLQLEQHFEQLLQHIDDEVQALVASETQLSQGSALLQTICGIGPQGAALLAALFNRIEFANADALVAYSGLDPRPCDSGTRSGRRRLSKRGSPSLRRQLYLAALAATRSKALGPTYRAIRARGFKSTPAVVILARRLLRIAWAVWKSGQPFDAARLQLAP

SEQ ID NO: 252849 - protein, 331 aa, unidentified
MVFNYYLGIDISKATLDAALIIKERDIVGQTKVSNNSQGFKELVAWVKKKGAKVSETIICAEHTGIYGYDLQEWLDDNGIAFSFVSALEIKKSLGIRRGKNDAVDAVRIAEYAYLKRETITLTHKPLKGIFTLKSLLGERKHYVRLKSSLLARKDALNQYESHESRERRNKAIELLLKNIDALEKQIKSVIDEDPEISRNYELISSVKGIGLVNAVNTIVYTNNFTSFQTARQYACYCGIAPFEHKSGTSVKGRTMVSTIGCHQLKAELSMAARSAIINDPWLRKYYKRKMEEKGNLTSAHGIVLNAIKFKLVVRMFSVIKSGVPYKILAY

SEQ ID NO: 252850 - protein, 420 aa, unidentified
MPATFSISRTNDLERAMTAVMIGVDPHKGSHTAVMISPAEEPLGEIRVRASAAQAGKLAEWASAWPERTWAVEGAAGLGRLLAQQLVAAGERVLDVQPKLASRVRLLQAGDTNKNDPNDALSVAIAALRSRTCREVAAEDHPAVLKVWSKRHRDLARLRNQVACRLHAVLCDLVPGGIAKEISAAQAARILGQATPSGAVEVARAELAAEFLEDMRRLDAQLRGTRKKLAAAVKVSGTTLTQVFGVGPVIAGTIIGDIADVSRFPGRDHFASYNGTAPVEVSSGNRKTHRLSLRGNRRINHAIHMAAITQLRHKHSEGRAYYEKKLAEGKTHKEALRSLKRKISDAIFARLQADARQAAAAAPKGPGGHPGNDSASSAAGSHPARQLFGQATPGPGTSLRPATPAGTPSKPVPRKTQATT

SEQ ID NO: 252851 - protein, 421 aa, unidentified
MTAARRCIGLDVHRDFAQVAVWQGGVITQAGTFATTAEGVREFAAGLGPADEVALEATGNTWAIAKVLASRAGRVVVSNPAKTRAIAEARVKTDKVDAAILAGLLAADYLPAVWMPDAATSALRRQVLRRAHIVRQRTRLKNQVHAILARNLVPRCPAADLFGIKGRAWLAVQDLPADEHAAVIALLRQLDFHAQELALVDQDLGREALGRPEVLRLMTIPGVDATVALSIVAAVGDFTRFRTPDRLVSYLGLNPRVRQSGGQPASHGRITKAGPAHARGMLVEAAWSASKAPGPLRAFYCRVRTRRGMQVAAVATARKLAVLCWHLIIKDEDYAFALPSLIAHKQRKLELRAGATPARGRKGSAARYSLKDVRAAERDLAARSEAAYRTMVAAWQPARPAARAVTGAAASKGARLSKPAG

SEQ ID NO: 252852 - protein, 377 aa, unidentified
MDKVCGLDVHKDSVFACILDENGEKIFEGRFGTLTPDLDRLRDVLVEHCAGRVAMESTSIYWMPVWRVLEFDFELTLVNPYLIKQMPGRKSDIKDAHWIAMCLQKDMLRGSYVPDACLQQLRQFARRYRYLTKQTVRVEQRLDNHLQRCNVRFSNYVSNQGSNVSIRKVIKAMIGGERDSDKLCKLVHGRIKNKHGAEIISAALTGVITGADVEMFRQCMEELELLEKQQLLCIKLLEELATKYYAREISLLCTIPGINKLSAMCILAELGGDLKAFYTAAMLVGWAGLRPRNEESAGKIRSRKTLHGNNYLRQMLVQVSWVAARTHKSFPGKKYCQLAQRMKPRKALLAITRKLLVIIYNVLSKKQPFDPYRNMQV

SEQ ID NO: 252853 - protein, 384 aa, unidentified
MDSIMQEQSRVVVGGVDAHADAHHAAVLDERGVLWGSSAFPATSAGYRELLGWLESFGMVAAVAVESTSSYAAGLTRYLCERGVRVVEVNQPHTYTRRRRGKSDPIDAEMAARRFLSGEAIGLPKQTDGVVESIRMLRVARNGAVKARTAALLQARDLIRTAPQDLREQLTVRKTLRAQLNLCGRWRPTSKLGCPTQAAKFALRTIARRVSDLDREIAGLDGQLAVLVKRTAPRTTSLLGVSTHNGGQLLVTAGQNIDRLTKESSFAALCAASPIKASSGKTHRHRCNPGGDRQGNRALHLIAVYRLKCCPRTQAYAHRRTQQGKSKAEIIRCLKRAIAREVYHALRADLADLTTPTPPPPKPPRYSTTIHCGNPGHGITRHRT

SEQ ID NO: 252854 - protein, 391 aa, unidentified
MVCVGIDVAKDKHDCCILDSDGMVRADCFTIPNNMDGFKQLLQTIRNCTKKSDKIKVGLEATGHYSYNILGFLLDNGLPTYVINPLHTNLYRKSLSLRKTKTDRVDARTIATMLLSDVDLKSYTDIAYHNEELKSLTRYRFDKVQECAKLKQSVSRLATILFPELEGLVSSIHGTSIYALLSEYPGAKQISEVHLTKLTNLLTTASKGRYGKEKAIQIREAARASIGSVMPAKSLELKHTIKLIQELASEINEIEDSIQKIIDELNPPILSIPGMGVNSAAVILAEIGDFSNFSSPDKILAYAGCSPSTYQSGKLTNCYAHMEKRGSRYLRHALYNATKYVCYWNPVFAEYLAKKRAEGKHYNVALSHAMKKLVRLIYALQKSGKAYLAAA

SEQ ID NO: 252855 - protein, 478 aa, unidentified
MAMARTAGVNRKQRKELARRLQSDDPGLEVMHPHAAGIDVGNSAHYVAVRPDRDPDSVCRFDCFTADLHRLADWLQQCGVTTVAMQSTGVYWIALYEILDARGLDVYLVNARHTKNLPGRKTDVQESQWLLKLHTYGLLRNSFHPSAAIRVVRTYWRQRGDHVQGVSTCIQRMQKVLTQMNIQLANVISDLSGWTGQRIVRAILEGERDPATLAALSHPGIHATRDAIAKSLEGTWQPDLLFVLQQEVAMYDAYQQRIAECDHELEQHLKGFGDKVADPAADAEPSPTTSPKELRSGPKRRRKAGSHAPQFDLGRELHRISGVDLTRIDGIDVGVAQTVISEVGLDMTRWKTEAHFASWLGLCPDSRITGGKVIRSGTRYVINRAATSLRLAATTLLRSQSYLGAQYRRLRARLGAPKAITAMAHKLARLVYRMLKWGHEYVDKGLQYYEERHREQQVQLLKQRAAKLGLQLVAPEVA

SEQ ID NO: 252856 - protein, 473 aa, unidentified
MGKGNGMTRGDRRRNARREQLRGMLPRDGAVIGIDLADEKQALAVIDHDVRVLARKTVRVKAFRLGEALDWAAAQARAKGLAAVTVACEPTGPRWLQVQRLCAERGLPMVCVQPLVSHIARQQQDYTTHKTDEADCVMIARLAVELHCYIPEELDEVWAGLRHLGRRRAALITSETASVQRIRDFLSVAWPVVPEACAQPFESMTWLAALQAVTSRCGGQPGELAIIGLEAFTALVRDALPGWGGQRIHGPICKTVFAALTSTEGVVRGHRRGLLRRVAAELGDLQRARTQRQETEAAMIAALGDLGLARLGDIPGLTATGAAAILAETGDPGRYDTSSSVVKHAGLSPADNASGAFGGEAHISRRGRPGLRLTVWRAVWAVLIHNPVMAAKYAAMTQAADQAAADARAGNSGHATSAAQAARRRRAKARVACAAALLRWIYSMVVHGTCWDPGVAAGRKDALAAPSCQPEAA

SEQ ID NO: 252857 - protein, 341 aa, unidentified
MSNNTTICIDLAKDVFQIAIFNKAGKVKSNKEVSVKKLCEIISQHPDTSIFMEACGSAHYWARRFSKNGHKVGLIPPHIAAKYRSGNKNDKNDAVAIYEASKSSRLNCVPIRTLEQQDIATLHKYREGYKKERNQIANRIRGFAREYGVNFPLGIKPLQKRIPEALEDAENELTPISRKILSDLSMQLGRVSECLAESTKEIEGLAKQIEPCRRLTSLPGFSWLCVSMLYAKFGTGESFKRGRDASASLGVVPAHSGSGGKVTIGRITKRGDIYLRSLLVNGARAAVSNIRDKTDGLSCWIRKLLITKSFNATVVALVNKLVRMALAMLKSGDEYRQPVAQ

SEQ ID NO: 252858 - protein, 355 aa, unidentified
MSIVAHVHPFVIGVDTHARNHVLAVLTASGEAVDTAQFPTTIAGMARAISWAGRRTGGDLAALWVIEGVASYGAGLAAALGRAGYTVVEAARMNARANRSLGKSDSLDAHRIATAVLPLDTAQLRQPRRAEGVRSALRVLIAARDHMTAERTATVNALIALVRVVDLGLEARRPLTRVQIATVARWRSRDEDLGIATARTEVIRLAKRVAELDEQIASNSTRMDELVRASQAAPLLEKTGIGTVTAAICLTAWSHHGRVRSEAAFAALAGVNPIPASSGNTVRHRLNRGGDRRLNRALHIAVLTRMTHHPETRAYVEKRQAEGRTTKEIRRCLKRYLARQIYRILNANETRLSAA

SEQ ID NO: 252859 - protein, 455 aa, unidentified
MPKRTTGDRPELKPFNVGAAAIDIGSKLHMAAVAPTSTDTPVRAFGTFTQDLHDLADWFKACGVTSVAMESTGVYWIPAYEILEQRGFEVILVNARYAKNVPGRKTDVSDAAWLRQLHSYGLLRGSFRPDAEIATLRAYLRQRERLVEYAAAHIQHMQKALMEMNLQLHHVVSDITGATGMRIIRAIVAGERDPDVLATYRDVRCHSSIETIRAALVGNDRDEHIFALTQSLELYDTYQDKMLDCDRKLEFLIAALTDKGAKPVGKLSRPRVKTKQVNTPSFDVRTALYGVLGVDLTEIHGLGPSLALKLIGECGTDLRAWPTAKHFTSWLCLAPGNKISGGKVLSSRTRRSSSRAAALLRLAATTIGRSDTALGAFYRRLFSRAGKAKAVTATARKIAVLFYNTLRHGMTYRDPGADHYEEQYRSRVLANLKRRAKSLGFVLQAVPCDPEVAVS

SEQ ID NO: 252860 - protein, 330 aa, unidentified
MKNYEEVVGIDVSKKTIDAYCYQAQVHKAFVNNVVGYKSLLKWVFKVTKDSSVFYCFENTGYYSLKLALYLSSQSIIYVEESPLKIKRSSGIVKEKTDRLDAQLIARYAWLYREELEPSTVKSNSQLELGRLLALRDQLVRNNAGLKGTLKEMKVLLSSPSTDVGCLSLKRSIDYLEKQIKGIEERIKDILCEDASMRKNYELLTSLKGVGFVVACQLIYHTGNFTRFDSWRAFSSYCGTAPFKHESGTSIYRRKQCHYLGDRKMKSLLSMASISAIQHDSELRLYYQRKLAEGKETMIAVNNVRNKLIARAFAVVKRGTPYVVLQQHAA

SEQ ID NO: 252861 - protein, 444 aa, unidentified
MHYQKVLKMPESIPYLSVGFDVGADFTWMSIMLPNGILIGKPFKIIHSDPQSRELAISKIKEAQEMYSLESRCFLESTGIYHIPLLCFLRDKGFDCAVINPIITKNSTNMNVRKLHNDKFDSKKAAKVGLDASLKASIVPDDAIIDLRNLVRDYYYFKDLQSAIVLKLHAELKVSFPAYLNVFSKVTTQTSLKLLEAYPLAADMLAAPKDELVEIIRSTARFGETYALARYDAICTAAKDAAVFGRALPSNALRIRLYIKMYREYQAHLDSILEELHQAVGKLEGTPDYDRISFIQTLHGVGFLSAVVLIAEMGSFDLFSSPKKLYAYFGLDPGVNDSGKFHGDRVHMSKRGSSLARRILHMVAINNLKVDKATKTPVNPVIYDYYTRKCASKKKSVAVGAVMHKICNIIFAMLRDNKPFELITPEEHRERYAAEHPESVNPAA

SEQ ID NO: 252862 - protein, 343 aa, unidentified
MDHFAGLDVSVKETSLCIVDEGGRIVREVKVASEPEALLAVLTNPACHFKRIGLEAGPLSQWLFKALAEAGLPVICVETRHMRAALKAQINKTDRNDARGIAQMMRAGLYRPVHVKTLRSQKLRMLLTHRKLLQSKAIAIENDLRATLRNFGLKVGVVGTVKFEARIKGLVDNTPDLVVLVEPLLIVRRVLREQIGILHRRLLAIVRNDAVCRRLMTVPGVGPVVALTYRATVDVPYRFRNSKAVGAVFGLTPSKHQSGESNRTGGISRCGDEMMRMMLYEAAHIMLVRSAKWSWLKAWAMKIARHRGLKKAIVALARRLAVIMHRIWVDGTEFRWTREVAAA

SEQ ID NO: 252863 - protein, 414 aa, unidentified
MLPSEIRCVVGIDVAKTAHVVCALDAPSGSVRLKSTPIPATADGYARLVGWLREWDGDEPGTLLIGMESTGSLWEPLYDALTQASYPVVLLNPHQTAAWATSLGLRAKTDGIDAHTLARGLLAGWARASAVPDETVQALRTLTRARRDLVASQSAARQRLHDELVPVFPELVSHLPEHADLGASAVLRLLSVYSSAQALAHAPLDDVVRTLAEVSAGRWGPAHAQALVELAQHSAASTRAVAARAVVVRTLAQHLLDLHARIAELDAAVAEVLRTDPPSQQLQGQVPGLGPTWTATIRAEVGDVWRFQRVDQLVAYAGLEPRTHESGRFAGQRRLSKRGPGALRHALYMATLVAVRSRPEWHIRYQRLLDRGRAKKEALIILARKLLKVIFHLLRTGVAYDPAFLNGQPPTVAR

SEQ ID NO: 252864 - protein, 363 aa, unidentified
MEEEKRRHVGIDLGKREYTMAVIGKNRKMTIHHGKTCIQGRQALYRLLEPTDKIALEAGNLAFIMAREIMERTGCEVRVLNSAKLPFIWDAPTKTDKEDAMKLAHLVEERRDEKLPIVPLPSEKEMERRKTISSYGREMNNRTRLINTLHAIFVHQGHTTIVKKNLATAERRQQAIQVLTGHEREEAEWLLKYLELHEQRINELRIKIKEEAKNDEDMKRLQSIPGIGPVVAYAYLAHVGDGSRFSKGAQVSNYIGFVPRLDYSGTIQRHGHITKRGNGYLRGLLVQAAWTMTLCKKGGALSTRYKYYTLCQEVSKKKTIVSIARKLAELMYSVLRNKTIYEIRKWDGPKNNPAVITGQTMCV

SEQ ID NO: 252865 - protein, 388 aa, unidentified
MQVIADRPEAPSAIRTNLGAIFASLELSHSTWLITSLSPGSGEKMSKHVVHGGDIAGLLQRFAQLREKAVAQTGRNFPIIVIHEAGLDGFWIDRVLKNEGIESHVVDPASVATSRRRRRAKTDKIDGEALVRTLLAYKRGEPRVCAMVKAPTPEEEDRRRLCRERKVLITERVRHVNRIKGLLFSQGVCGYEPLHRNRRRRLDELRTGDGRPLPKHLKAQISRELDRLELLLEQIKAVETERDALLAAQQIAAPPSAAMLLAIKGIGPDFAAILWSEGLFRHFDNRRQIASYAGLAPTPWKSGSIDREQGVSKAGNPRLRTTLIQLAWLWLRHQPQSALALWFKERVVRNGGRLKKAAIVALARKLLVALWKYVAAGVVIEGAIMKAA

SEQ ID NO: 252866 - protein, 354 aa, unidentified
MQNDRQSSETVILGVDTHLDIHVGAVISQAGKLLGTHIIQTNQADYLELLDWARSFGSLERAGIEGTGTYGAALTRYLIKNSIYVVEVNRPDRSKRRLEGKSDPLDAENAARTVLSGSSKAIPKMQSGACEALRIISVARRSAVKACTQAINQLRALLVSAPQDVRDKLWKSKPHECVTACINSEVSEHSPLRIALCSTLRSLAKRWMALTEELNELDESLDKLTRKYASNLRSQFGVGPQTAATLLAVAGDNPERLKNEAALASLCGVNPLPASSGKTVRHRLNRGGSREANNALWTIALVRMRSDPRTRIYVDRRTGEGLSTKEILRCLKRYIVRELYPLILSDLAYANRRS

SEQ ID NO: 252867 - protein, 271 aa, unidentified
MTIEILGVDIAKNVFQLYGVNRGGHVVLKRRVMRDQLIEVLAQIDRCTVVLEACTGAFYWARKFEALGHKVKLISPQYVKPFVRRQKNDGNDAEAICTAARQPHIPFVPNKTVEQQDIQALHRARQRMVNHRTAVVSQIRGLLLDRGFAFAKSITRARRAIPEILADQDNELTAMARDAIAELYDLFRDLDRRISSFDKKIEQVFRNSDACLRIAKIKGVGPKTATAVVAAIGDGSEFKNGRHLAAWVGLVPRQFSSGDRKVLMGVSKCGN

SEQ ID NO: 252868 - protein, 419 aa, unidentified
MESSRSKVCGIDVHKRFLIATILERNGPKKTKKFSNTLEQLLELKEWIITEQCQAVAFESTGEYWISLYDILQGDVEIIVANSYHIKWIPGKKTDTIDSEWIAELALNDLISPSRILSKDKRDTRALTRLREKLVNERTDHKNRVHKVLDSACIRLSAFFKDLFGKSGLKILKCILSGIPPEEIARKLPKRLQGRSDAILDAIRTQLSVQQLIQLQTSVTMIELLTEKIKELEQIILNDLKKDRRKLQILMSIPGIGTVGATTILAEIGDVNDFSSPDKLTKWAGITPRVYQSANKLHTGSITKQGSKHLRWILVEIAHSCIRTRNTAFRIFFERIFNRSGYKKAIVALARKILKLVWHLLTNDEFYEEKNTLVAKSSHLPISSEMESFSVSAAIELLVKAGFQVINGEEHSDKRVLGT

SEQ ID NO: 252869 - protein, 354 aa, unidentified
MSQTPNTAITVIGIDIGKNSFHVVGHDARGAIVLRQKWSRGQVEARLANIPPCLIGMEACVGAHHLSRKLASLGHDARLMPAKYVRPYSKGQKNDFNDAEAIAEAVQRPTMKFVATKTAEQLDLQALHRVRERLVSQRTGIINQIRAFMLERGIAVRQGIGFLRTELPTILATRTDALSPRMLRVIEELAGDWRRLDQRIDGLSGEIEALARQDQACSRLMTVPGIGPIISSAMVAAIGTGDVFSKGRDFGAWLGLVPKQISTGDRTILGKISRRGNRYLRVLFVQAAWVVLVRIKNWERYGLKSWIEAAKRRLHHNVLAIALANKLARIAWAVLAKGRAFELTRTDDTGVRPA

SEQ ID NO: 252870 - protein, 375 aa, unidentified
MAEITRALIARVGVDLAKNVIQVHAVDAAGRRVVTRAFKREQFVAWCAQLPPGCLVAMEACSSAHHFARRLRAVGLDARLIAASFVSPYRMEGKSGKNDMTDAAAICEAASRPTMRFVPVKSCEQQGVMSLHRVREGLKEERTGCINQIRGVLGEFGLVFPKSAKALRAVLSDVIEDAGNELSGVARLVVQRAFEHWRELDAHMSWCDQQVGQHVRTSAPAKRAAKVIGIGELGASALTASVGEFKQFKSGDQFGSWLGIVPRQNSSGGKASLGRITKRGDDYLRTLLIQGAKAAVMSAGKRDDPISRWLVQLTARVGWQKACVAMANKNARILWSVMTREQGYDPHHVSVKPAAKQPSPPKVSAAVPARQACAA

SEQ ID NO: 252871 - protein, 402 aa, unidentified
MNSAGIDISKDRSTIAVMRPFGEVVISPFEVGHTDSELSELAKLLKSLDGETRVVMEATGNYHTPVVHVLHNAGLYASVVNVKLVHGYGNNDLRRVKTDKKDAVKLANYGLDRWLTLPRYIPEEDTRLLLKNCYRQYKQYSKVQTVLKNNLISLLDTAFPNANRLFTSPARADGSEKWVDFVSEFWHCECVSKHSEKAFTNKYHRWCKKHGYNFNEEKEHNIYTEASGHIGVMPVSGTTKLLVEQAVSQLKASSAALATLKQEMQALASRLPEYPVVMGMFGVGPAPGPQLMAEIGDVRRFYSKKALVAYAGIDAPPNDSGDVTGRHKSMSKVGSSSLRRTLFLVMTVYLQNFPFDEPVCQFMDKKRAEGKPYRVYMMASANKFLRIYYATVKAYLETSEQI

SEQ ID NO: 252872 - protein, 320 aa, unidentified
MDVVLGIDIAKAKFDVALRDPDGRLRRKAFPNTAPGFAALHAWLQRQGVTRLHAALEATGTYGLALAEFLYDAGHVVSLLNPSITHAFAASQLRRAKTDRVDAALIAQYCATQHPTPWTPAPREIRELQGLVRRLAALHEMRTQETNRIAAGEVVAAVRGSIDAVVETLTAQIALVQRQIRDHLSNHPGLREQRDLLTSIPGIGDATAAVLIAELFDKPYRSARQAAAFAGLVPRVWESGTLRARGRLVKIGPSRVRKAMYFPALAALRANPTLRALKTRLSAAGKPKMVIIGAAMRKLIHLAFGVLKSRRPYDPTHAHA

SEQ ID NO: 252873 - protein, 351 aa, unidentified
MSNVPQFFIGVDLHKIVIQICIVDKQGEIIKESRYRADNLSEGLDVVQELMPYKKNGIISVEAVGFNRWFVNALKENDFEVIVCNPNMLNLKMSGKKTDRRDAYEIARRLMLGDIQKCAKTYYPDDDCFGKRKVIRTRHRLIEARQTLTNQIRANLSAYKLPSGLDLKTKKTRKVLWGLEWPTEDMEVVFQSLMTAFEHMTESIALLDYRLEEMSLDPMVSLLREHLPSCGPVTSTVIYYELGDVTRFKNSRTVASYAGLVPRVNQSADKSHHGRLTKRGNRELRHILGEWAIRLMHSDERVVAWAEPRLKRTHKNKIRMALARRLLIGVYKMLLTGELFSMERCLGMERG

SEQ ID NO: 252874 - protein, 425 aa, unidentified
MSKKQKNNKKKIVVPMLHSLNPNAAGVDIGATEIYIAVSADRDPQPVRHFSTFTEDLHAAAAWLKACQIETVAMESTGVYWIPFFQILEARGFRVLLVNARHVKNVPGRKSDVSDCQWLQYLHSVGLLNGSFRPAQAVCTVRSILRHRNDLVQIASSHIQHMQKALDQMNLQLHHVISDLTGLTGLAIIEAILLGERNPHVLAKLRDRRIKASEETLAKSLVGDYRREHLFTLRQSLESFRHYQNLISACDTEIQQYLETFESKESKLNPPAGSTPASPEEQKPQSSEPRFDLKTHLHRIFGVDLTTIPGISVLTAQTIFTEIGPDFSKFDCTGAFTSWLGVCPDNRVSGGKVLSAKTRPVNNRATTALHLAAQSLHHSQSYLGDFYRQMRAKLGAPKAITATAHKLARIIYCLVPNLCTESGLF

SEQ ID NO: 252875 - protein, 411 aa, unidentified
MHNRQNYLYVGVDLHKEHHTAVIINCWQEKLGEIQFDNKPSAFSKFLLEVETYVCDGITVVFGLEDVGGYGRALAKYLVDHERIVKEVNPALSFLERKSQVMIQKNDSWDAECVARILVNKFNQLPDAKPNDLFWSIQQLVSRRNALVKAQSALKNQLHIQLNHHYPSYKKFFSELDGKTALAFWQQYPSPSCLEGANIKQLTAFLLDVSNNTCSVKKASEILKLVKEDGHTMKEYQETRDFLVRSIVRDIEFKKTEMKYIERELKQLVKLLDYQLETMPGIELVTASALIAEIGDVRRFPNANKLARFAGIAPVYFGSGGKGKTHKSKQGNRALHAVFYNLAVQQVQVAKGSKMPRNPVFHTYYQKKLKEGKTKGQALVCIMRRLVNIVYGMMKYKTAYELPIVEEKEVV

SEQ ID NO: 252876 - protein, 313 aa, unidentified
MYKYIGIDVSKRTLDVYDGEKSSKTTNDLVGFKEIKKLSKKGNELCLIFEPTGIYSHALIEYCQKCKIKAIIVGSKEARDYARSIKQRSKTDKIDAKVLYRYHTQIEPKDITIPSLDLHMRKVTQRRNVYEKYQKMIGQLNNLIEATHKIDQSLIKSLKKQIISLEKSSQKVLDEIEKLLLEKEEHQQAFIHLQTIPGIAKKSALVILMEFLRYPKANSHEMVALMGLDPVLKESGKFKGKTRISKQGGKYFREKLYMSTVVAIKHNDRLKSFYEHLIQNGKPKKLALIASMKKLLRIAFAIIKNKEPYLALI

SEQ ID NO: 252877 - protein, 392 aa, unidentified
MRYWVGFDVGKAFHWLCVLDEEGEEVLSRKVEATEEDLEAACSEVERLGGGRTIGIDLLGGPATLLEAVLLGRNERVFHVPGIAVNRARDAYPGEAKSDSKDARVIADQLRLRRGSLHEVCSRDETTAEMRVLVAHRRDLLQEQTRRAARLREVLLGVFPGLEATLDLKREGALLAVTRVATPATARKLGAARLFRWLKARGVRRARELAEQVVGAAKAQRRELPAAAAKAALVAEIASEILRTRERIADLDRRLEELLGEEPKARIVRSMPGMGVVFTAEFLAEVGNLGRFVSADSLAAAAGVAPVLRASGATSHRRRARRGNKVLKRLLYRSAFSCISHHEPSEAFYRKKRAEGKGHHQAVIALARRRVDVLWAMLRDGQTYSERPSQAA

SEQ ID NO: 252878 - protein, 349 aa, unidentified
MNFYTNTHPYYCGIDLHTRLLYVCIIDNENNILVHEKIDDSPEKLLALLTPYLGNIVVGVECMHCWYWVSDFCEQHNIDFILGHALYMKAIHAGKTKNDKIDALKIAKLIRGGNFPLAHAYSKEHRSIRDALRRRTHIMRMSAQLKAHVASTISQYNLPALETRLNLQNSPDRQKMHHFFPDEAVQKSMDLNLNIISTMVHELYKIEHYVKIQAQTHNARDLHILKSFPGIGKILALTILYEVGDIQRFPSVQKFASYSRLVKCKAESAGKSYGTQGNKIGNAHLKWAFSEAAVLYLKGNDNAKRYLANLQKRMSKAKALSALAHKIGRCIYFMLKNQQVFDEERFLNG

SEQ ID NO: 252879 - protein, 423 aa, unidentified
MKPLHTHPFSAYVGIDWADTKHDICLQVAGNDRREFDCIPHQVARIDEWAKSLHKRFGGTIAIALELAKGPIVYALQKYDFIVLFPINPSTLAKYREAFKPSRAKDDPTDAELALDLLMRHPERFAPLQPQSVPMRTLLSLTEHRRELVDDKTRLTNRLANTLKQYYPQALEWFDQRDTILFCDFLTRWPTLAQVKRARQASLKAFFHAHNGRRPKVIGARLDSIKAAASLTEDRGVIVPCRLHVLVLVEQLRVTLQAIDRFDREIADLAPTLPDYPLFQGLPGAGPHLAPRLLAAFGEQRQRFQGADELQKYTGIAPVTERSGKKSWVHWRWQCPTFLRQTFVEWAGQTINKSFWAGAYYRQQREKGSSYQAAVRALAFKWIRILYRCWITRTPYDETTYLNALRKRGSPLLNNLKLNPQIA

SEQ ID NO: 252880 - protein, 349 aa, unidentified
MTRYIGLDAHSESCTIAVLGQSGKRLRYERLQTSAELLKSFIKEVPRPRHLCMEEGTLSEWLYEELTPVVDKLVVVLPDRTPGNKSDLIDACKLADDLRRDAIRRPVYKAPGCFRTLREAARTHYVLQRDKVRTKSRLNALCRGCGHPELGKSLYASKTRTEALKQLPEHLRPRAALFGQQLDALLECTSQAESWLREECSRVPIVKRLATAPGIGLVRAAYLVAVVMTPHRFRTARQFWSYSGLAVVTRSSSDWVSDGSGKWRRSKTQQTRGLNHNRHPLLKNVFKGAALQITLMPEHPLGQAYQRLLMTTKPNLARLTIARRLAAAVLSMWKHGEDYDPSKHGEKTM

SEQ ID NO: 252881 - protein, 354 aa, unidentified
MMIIGCDYHPGFQQIALVDSETGDLQERRLEHREEAEKFYRDLSVQGVRVRLGMEASGQARWFERLFSELRFELWIGDAAEIRTKRVRKQKTDRQDGQLILRLLLEDRFPRIWVPSSENRDLRQLLWHRHRMVQARTRIMNQLQAVALNEGLRCKKKLWREAGREQLDSFKLAPWASRRRRDLLELLDRLSPTIAELTQAIEQEVEKCPEAQRLQTHPGVGCLTALAFVLIIGRAERFPCGKQIASYLGLVPSEESSGDRRRLGHITKQGSSLLRFLLVEAAQVTVRSDPEWRRRYFHLAMRRGRKIAKVAMARRLAVRLYWMWRKGWDYEQMTKFSSHAGEPGHRDGVKYNTE

SEQ ID NO: 252882 - protein, 340 aa, unidentified
MNATAALPVVAVDVAKSVFQLAIADHTWRLVEQHRLSRTQFERWFINRAVGLVVMEACGSAHHWARWLSGLGVEVRLLPAAYIRAYVKCNKTDAADARALLEAARCAEITPVKIKSIEQQALQGVHRTRSLWMATRTSRINALRGFCREFGIVIAQGSRLGVEQIGRVLADPRSCVPPLIRGTMTLLVEEIRLLEVRIAQLERELTTLARQSPACTTLLSIPGVGLLTATAMVAATSGEVSHFRDARHFASWFGLTPKEHSSGSTRHLGRISKRGDRYLRMLLTHGARSVLRAASVAVRAGKTVDRLRQWALGVQHRSNPQQGSLRTRQQAGKNLLRHAT

SEQ ID NO: 252883 - protein, 356 aa, unidentified
MNEGSCVGLDVHARSVVAGVIDVGSGEVRSLRVPPGSDATVTWLKTLPAPVRVVYEAGPTGYRLARACAEAGISCVVAAPSRIRPAADRVKTDRRDAERLARLLRLGEITPVRVPGPEEEAARDLVRAREDARGDLMRARHRLSKLLLRHGAVYDATAWTRAHDAWLRRQRFQSGPLAIVFDECYGRMVDAKTRRDALDEAIAELAASEPYVDVVERLVCLRGVSTLTAFALTVELGDWGRFRPESLGPFLGLTPSENSSGERRRQGGITKTGNTHARRLLIEAAWHQRRPPRLSVTLERRRTGKPLAVRAQADRSARRLHGRWQALEARGKPRLIVVVAVARELAGHCWALATME

SEQ ID NO: 252884 - protein, 427 aa, unidentified
MNETDAIRIEEFRQFKKEIRGSREYLVVGIDVAKEKHHAFFGTAMGKTILRGLVFENNLEGFRKLLEQSEALGVQEQLSKVAYGLEPTGNYHKPLGEHLIKCGKLVVLVSGVALKRNRELLDGRWDKHDVKDAANVADLMVQGKCLFYEYPDSQLRDLRVLLSLKRRLRRQEHGYRVRIRNHLVAQYFPELDRVWGHSESESLAIVRWCLDPSVVAGLDLDEFVRRVSARDRGVRQRARLERIWNLAVDSVGCEVPEAVSVECKLMVEGLRRLREEIGEVLEEIEGICLRFPEYSCLLSIPGFGPEISAQVLGAIGDPHRFRNAKEVLKMAGLDLSADRSGKTAETARPVISKKGKAHLRYMLYQAALIASIRNRHFMNYYTAKLVGRQQERGIKTKMRVKLAAKLLVIAWTLMKKKEPFDPRHLTN

SEQ ID NO: 252885 - protein, 328 aa, unidentified
MFFVGIDVSKATLDVFIYQSNYSFIVENNPQGFSELLDIICNVAKCTVNEIFICFENTGKYSRMLSVFLHSNSITFVMEQALKIKKSQGVTRGKNDKIDAKRISLYAYEKRDNLTPTVLSGLKIDQIKSLLSLREKLIKHRTAYKNGLSDLHDCYIEGENDVIIETQKRLIQSLNKEIDEIEKHIHNIIKSDERMLNNFKLLLTIKGVGQILAFYLIAFTANFTLFGNARSFACFAGIAPFEYSSGTIIGKPRVHPFANKQLKSLLNLAAQSVIQIPGEYSQYYNRRVEIDGKSKMSTLNIIRNKIVFRVFSVIQRQTPYVDLYKFAA

SEQ ID NO: 252886 - protein, 412 aa, unidentified
MQALVERCCGLDVHQETVVACLLIGAPGAQPTKEVRTFRTMTRDLEALRAWLLEAGVTHVGMESTGVYWRPVYSVLEGCFDLIVGNARHIRNVPGHKTDVKDSEWIADLVRHGLIAKSYVPPRPLRELRELLRYRRKLVESQAAERNRLLKLLETANIKLASVASDVFGVSGRAMLRALIAGEESTEAMADLARGRLRHKRADLILALDGRVEEHHRFLLTMQLRRLEAIEADIAALDLRIDERLEPYRAPHTLLMQIPGVDWVVAAVLIAEIGVDMSVFVSVYHLAAWAGVCPGNHESAGRQTSGRARKGNIHLRTILVGAAISASRTTGSYLKDKFHRLKARRGALRAALAIAHKILVSAYHMLANNLPYRDLGEAYLDQIGQSRTVANLKRRLERLGYRVILEPSAQPS

SEQ ID NO: 252887 - protein, 338 aa, unidentified
MNYVGIDHHRQYSHITWLDGKGEVVKSGRVTNLRRELEEFLQGAMDVKAVIEAGRSSYTMVDVLADLGIETTVAHPKDVKAIAKAKIKTDERDSYKLAHLLRTGYIPEVHKRSRENRSSQRVLRQRAFYVGKKTAVKNRLRALLAQQGEEIRLEVERVEDLFTDKGMKILRGLALPEREAKLEGALVRTYDHLQARINETNALVKELYEKMPSAQLIQTVPGFGIFLAVLVAVEIEDIGRFEEVSQFHAYAGVIPSTHSSGDRSWHGKIIKEGNRWLRWAAVEAVWPALRADFDIRCFYDRLKSKKGANSAKVATARRLLTIIYRMLKENRSYIPYKR

SEQ ID NO: 252888 - protein, 310 aa, unidentified
MEAIFVGIDVAKDRLDVHVRPSGEAFAVARDGEGLAALTERLQGMAPCLVVLEATGGFETVAAAAVAGAGLPLAVVNPRQIRSFAKALGRLAKTDALDAEVIALFGEAIRPEPRPLPSEEAQALSEMVARRRQLVEMIVAETNRRRHLTQRRLVKNIERHLQALQKELTELDTDIDDEIRGSPAWREKEDLLTSVPGIANKTARTLIADLPELGTLTRRKIAALVGYAPMNRDSGTLRGKRHIAGGRHSVRCALYMAALTATRCNPAIRTFYIRLRNAGKPAKVALAAAAHKLLTIVNAMLRDKTTWQSA

SEQ ID NO: 252889 - protein, 330 aa, unidentified
MRQIYGIDMSQEKFDVNFLTSNNKAKGFIVKNNLNGIIDFLENLPKGAVLCAEHTGVYGELLIFVCSYLNIPISLSTGYEIRHSLGLLKGKSDKIDAERIREYGERFYDKLRFVKYPEEQLKELKELYNLRAQLVKERKMLLTHEKGKIHMPYNSIRVHEISKNIVQSLSKAIEDLEFEITGIIMSNQELKSNYKLVTSIKGIGDITTCDLIVKTGNFKDIDTAKKAASYAGVCPFPNTSGKMVKKSRVSHMADKELKTLLYLCSVAAVNTNAEYKLYFQRKKSEGKPYFLIMNNISNKLLRTIYSIIATQKEYTLGHITSDPRKLKKVA

SEQ ID NO: 252890 - protein, 405 aa, unidentified
MLLVGIDWADAEHIYCLMDDTGATLAAGTIDHTAEGLERFMELVRARGRDPQDVLVALETSQGPLVGALLDQQFTVYAINPKAVDRHRERFRVAGAKSDLRDAWVLANLLRTDRALYRPLLPDSDVAQELRALTRDRAELVRTRTMLSNQLTSCLKAYFPEFLTLFADPDRPVALALLQAFPTREALQAVSLARLEAFLRRRHCPHSHDRAAEIYARMQARGFHIAPPLVRTKARLAGTLVSQLQTLAEHLDAYDREIQRVLRLHPDGELYHSLPGAGDFLAARMVGELGDNRDRYRDASSAQCEAGTAPVTRKSGTVRTVHVRRACIHPLRDTMWQFAFASKRRCEWAQAYYLRARKRGKKHAEALRMLGNVWLRIIIAMRRDRRPYDEILFLSRSSHPSLALC

SEQ ID NO: 252891 - protein, 388 aa, unidentified
MQVVADQSAAPTRIGADLCAIFISLELSRSTWLATSLSPGHGEKMSKHSVSAGNIGGLLARFSELKRKACARTGKSFPIIVIQEAGLDGFWIHRVLLSEGIESHVVDAASIATSRRRRRAKTDRIDGETLLRALLAHKRGEPRVCSMVRAPTPEDEDRRRICRERKVLIMERVQHVNRIKGLLFSQGASGYEPLRRDRRARLDALQTGDGRRLPQHLKAQVCRELDRLELLLEQIKAVEAERDALLNAEQTKASAPPPMLLGVRGVGPEFASVLWSEGLSRHFDNRRQVAAYAGLAPTPWQSGSVNREQGISRSGNSRLRTTMIQLAWLWLRHQPRSALTLWFKDRIERNGGRRRKTTIVALARKLLVALWKYVSAGVVIEGAMIRPA

SEQ ID NO: 252892 - protein, 341 aa, unidentified
MKHEMHVLGIDIAKRLFHAVGMDEKGQIVYRKRLSRHDLMPFIAKLPPVRIGIEACGGAHYWARRFRTHGHAVKLMAPQFVKPYVKSNKNDSRDAEAIAEAVTRPTMRFVPIKDVDQQDIQALHRVRERLIGERTALVNEVHGLMHEYGIVMPQGVAKFRQAVVSKLEADKDKLTPLSQEMFWKLVAEFVALEEQLAYYQAKLEALATTHPECQRLMTIPGIGPLTATALVAAVSDASAFKNGRQFAAWLGLVPRQHSTGGKERLLGISKRGDSYLRKLLVHGARTTIRWVGRKTDRRSQWVRQLVERRGKNRTAVAVANKNARIVWALLTSHQDYQPATG

SEQ ID NO: 252893 - protein, 318 aa, unidentified
MWHLGIDISKDQLDWAAVDASNREVIHEGHQPNTATGIRTLVKQLQAFRPELIVLEATGTYHFPLLAGLVAAELPVAVVNPAQIKGYRQSQLGRTKTDRQDARLLARFGVARASELRVYTPPSPCQRQLSAWMSYRDSLIAEQTRLAGRREANHFHGDDQVRRWLEDERQAVNQRLADVDAAIERLLATFPEASVLREMIGVGPLVAAAVLGYLPVGVWGHAKQAASFAGVIPQLAHSGRRQRSWLSPHGHARLRRYLSMGARSAVRHDPTMKAFYDGLKARGKPEKVALCAAMHALLRHMMGRLKAWYRTQPAVAMA

SEQ ID NO: 252894 - protein, 345 aa, unidentified
MTLYAGLDVSVRETSVCVVDDTGKVLAERKVASEPEAIIELLRSISSEYGRIGLEAGPLSQWLVNGLAEAGLPVVCVETRHMKALLKAQQINKSDRNDARGIAQMMRVGLFKPVHVKTLASQERRMLLTSRKLLQKKLLDVEADLRGTLRNFGLKVGMVSAGGFEARIRELVEGFHSLAVIAEPMLAVRKVLREQFAVLHRMLLGLVRRDPICRRLMTAPGVGPVVALTYRAAVDQPQRFLHSKAVGAHAGLTPKRIQSGESDYDVGISKTGDVMLRTMLYEAAQSLLTHRGARWSWLKAWGLRVAQRRGLRRATVAVARRLAVVLHRMWVDETDFRWSNKSTAA

SEQ ID NO: 252895 - protein, 423 aa, unidentified
MAKAKKRKYRKLDRNLPVMRPNAAGIDIGATEIFVAVPADRDAESVRSFPAFTQDLHELADWLQRCHVDTVAMESTGVYWIPLFQILEARAIEVHLVNAQHVHHVPGRKSDVMDCQWLQYLHSVGLLRASFRPEQAVCEILALMPHRENLVQMACVHVQHMHKSLDQMNLQIHHVISDITGVTGLAIVDAIVAGETNPEELAKLRNHRIKASLETVRKSLVGDYRPEHIFTLKQSLTAYRYYQQLIADCDREIQERIERFQNHADPSAPAESCNKSPLTTDSTFDLRNHLERIFGVDLTRVPGFDVLRIQTVFSELGVDLSGKFSTEDAFSSWLNLSPKDGFSAGRRIRGPKIKTKNRVTQVFRMAAQSLHNSQSYLGHYYRSQRARHGAPKAIKNTAHKTRPYFLSPGDHLSAVRRNRVCKT

SEQ ID NO: 252896 - protein, 343 aa, unidentified
MEIATVGIDIGKSCFHVVGFTRAGMIVVRRRFSRRQLAVYLANLPPCVVGMEACCGAHHLGRLLITYGHDVRLLPPQFVRPFVKSHKNDIRDAEAIGEAAQRPTMHTVPLKTSDQLDLQAVHRVRTRLIARRTAVINQIRAFLLERGITIRTGRAPLRRALPDVLADATNPLSPRLSRLLERLRREWDTLDAAIADLDQEIRLITDEDEACRHLMTVPGIGPLIASAVVAAIGNGAAFRRGRDFAAWLGLVPHQHSTGGKPTLLGISKRGNAYLRQLFIHGARAVLLKRPRYRGQLATWLDALCARAHPNVVAVALANKLARIAWAILRHQTVFRGELAIVSA

SEQ ID NO: 252897 - protein, 414 aa, unidentified
MEKERIDIYHKRNTCFVGIDMHKDAHCAVVIDCWMNKLGEVNFENRPSRFPAFVEDVRKICGTKEVVFGLEDTRGFGRNLAAYLVGRKFEVKHVNPAYTSAVRLANPIIYKDDSYDAYCVARVLRDMVDTLQDAKHEDIFWTIRQMVKRRDLIVKNNVMNKNQLHSQLAYSYPSYRKFFAMVDSKSALCFWENYPSPEYIWNTTPEEIYQTIKPVHQALKMQRIHEIISMIERDGDTRKDYQPERDFIVRNIVKDIRHNKELIAEIDDELRKLIPLTGYKLHTMPGIDLVTEAQIISEIGDINRFPDSDKLARFMGLAPVQFSSAGKGKDQRCRNGNRALNAIFHFLAIQMVAVSASGKPRHPVFREYFEQKVKVGKNKPQALVCVARRLVRIIYGMMKTRTEYRPYEKTDDKN

SEQ ID NO: 252898 - protein, 323 aa, unidentified
MNKYKETFGVDISKDVFDVQGSASGHKQFKNEAKGFVSFLKTLPQGWLVVMEATGYYHYRLAQFLYKNKVMVSVVNPLSVKRFIQMKLAKVKTDKSDAKAICDYGLAIEVPLYNALTDVQSECLQLFRLLDSYLKKRTATKNKLHGEETLGIPSRFVYRSLKRNLKHLNKEIEGIDQRLLALVKEEQQQQLSLLTTVPGIGLKTALFLIVVTDGFSKFETASQLCSYVGITPTIRESGSSVRGRSRISKVGNKKLRNLLFLCAFNACKHNKACREMYERIVNKGKSKKLALIAVANKLLKQSFAIAKSGRPYDQNYVSVLKLQ

SEQ ID NO: 252899 - protein, 456 aa, unidentified
MAKAAKTKKKTKGEWDEGLFALNRNAAGIDVGNADHYVAVPIGRDPEPVQTFGSFTSDLHRMAQWLKACGVETVVMQATGVYWIALFQILESYGFQVNVVNARHTKTLPGRKTDVLECQWLQKLHTFGLLNNSFRPPEEIQILRTYLRQRENLVTAASTCIQHMQKTLTQMNVQLANVISDISGVTGMAILRAIIAGERDTERLATYKHNRVRASREEIARSLEGNWREELLFVLEQSLQLYDLYVEKIAACDQQIERHLKTMTSKLEPVQPSDPIALSAPREQPRFNLKDQLCRITGVDLTRVAGLEVQTVQTIISEVGVDMSRWNTEKQFASWLGLCPDNRISGGKVLKSGTRHVVNRAATALRLAAWSLIRSQSALGANFRRLRSKLGAPKAITAMAHKLARLIYRMMKFGADYVDKGMAAYESKYRQQQMKWLAKQAASLNLQLIPAQEITS

SEQ ID NO: 252900 - protein, 343 aa, unidentified
MEHFAGLDVSVKDTSVCIVDDTGKIVREVKVASEPDALLPVLTNPTYHFKRIGLEAGPLSQWLFSALAEVGLPVICVETRHMRAVLKAQINKTDRNDARGIAQMMRAGLYRPVHVKTLRSQKLRMLLTHRKLLQSKAIAIDNDLRGTLRNFGLKVGMVGTAKFEARIKELVENLPDLAVLVEPLLMVRRILREQFCILHRRLLAIVRDDEVCRRLMTVPGVGPVVALTYRATVDVPARFRKSKAVGAVFGLTPIQHQSGDSDRPGGISRCGDEMMRVMLYEAAQIMLTRTNKWCWLKAWAMKIARHRGMKKAIVALARRLAIIMHRIWVDGTEFRWTREVAAA

SEQ ID NO: 252901 - protein, 370 aa, unidentified
MTISNILFIGMDVHKDSIEIAIADGDSHEVRRYGRIGGTHDAMRKTLRKLVSQGKSLHFCYEAGPCGYELYRYLVSEDHDCWVVAPSLIPKRPGDKVKTDKRDAVQLARLLRAGELTPVYVPNREDEAIRDLSRAREDTMLVQKSARQRLKSFLLRHDIRYQGKTSWTEAHLRWLADEVRCPSPAQQIVFQEYVNTVTESQQRLQRLDEQIKHFAQAWRLYPAVEALMSMRGVKMIVAITVVSELGDLSRFENPKQLMSFLGLIPSEYSSGPRQKRGGITKTGNGHVRRILIEAAWCYRYPAKVSREMQLRQEKLPLVIRDIAWRAQLRLTQRYQHMQRKGKPHNVTVVALARELTGFMWAIVNEVKYPR

SEQ ID NO: 252902 - protein, 461 aa, unidentified
MAESRARRPRVSRRASPTVLERINPDAAGIDCGGSMHVVAVPPDRDDHPVQSFRTFTTDLHRLADWLVACRVTTVALESTGVFWIPVYEILEARGLTVQLVNARHVRNLPGRKSDVSDAEWLRDLHSVGLVRGSFRPTADIVALRTYLRHRHTLVELSAMHVQRMQKALVQMNLQLPSVVSDITGETGLRIIRAIVAGTHDPAVLATYRNWRCRASPAEITAALTGHYRPELVFALRQNLELYDACQRQIDVCDQAIEAHGRELTAAITPPGPLPPARAARQRIEPAFEVRAVLHHLTGGVDLTQIDGIGAYTALKLIGEIGTDMRRWPTAQHFTSWLTLAPKNKVSGGRLLGSQTQPSANRAANAFRLAAAALGRTSTALGAFYRRLAARTGKPHAVTATARKLAVLVYHVLKGDFVYKDHGEHAYEAHQRARHLRQLRQRATRLGFALVDPHTGEVFAG

SEQ ID NO: 252903 - protein, 360 aa, unidentified
MRIIGCDLHARQQTLAMLDTTTGEVVNRTLLHEGNQVREFYGELPRPVLVGIEAIGPMQWFLDLLQELGIECQVGDATKIRAAEPRKQKHDRRDAELILKLLVEKRFPAIWRPSTEQLDLRALLLHRHHWVRLRTQIQNALQAIALANGLRRGPGLWSHDGQAKIAFLPLPPHASYRRSALQTLYRKMAEEIENLTEQVAEQAEQRFGARLLMTHPGVGPVTALATDVFLGDAGRFADGKALASFVGLIPREYSSGERQRLGAITKQGSPLLRFLWGEAGAHAARRDPELQRFYRRKLVQKGLGKARVAVARKLGIRLWIMLRDQIDYQEFCRRGQKQSGAVCAGMLETRFGANRHRPVD

SEQ ID NO: 252904 - protein, 336 aa, unidentified
MTIIIGCDYHPRFQMIAMLDKGTGEVKVMRLEHENGEAKKFYASLPPGTRVGIEATGATQWFERLVAECGHELWVGDPAEIRAQMVRKQKTDTRDALHLLDLLMTERFPRIWVPSPEERDARQLLQHRQKLVRMRTSVKNQLHGLAMGQGLCRKQKLWSERGRKQLEALELGPWASRRRQELMKLLDELEPQITELDRAVEAEAEKRPEVRRLMVLRGVGPVTGLAYVLTLGPVERFPRSRQVVGYLGLDPEEDTTGGHQRFGHITKQGNTMMRWLLVEAGQTAARLDPELRRVYKRLKVRRGANVAKVAIARRLAVRMYWILREAPTAPAGSHVR

SEQ ID NO: 252905 - protein, 323 aa, unidentified
MNKDIKYFGIDISYLVFDVTDSDGNYDQFKNNPSGFKKFAKFLNLDSHCVMEATGYYHYQLAYFLLESGIKLSVENPLAVKRFIQMKLSKIKTDKSDSKLICEYAKQVELKLWQGNSKHQTECLQMTRLLSVYTKQSTMLKNKLHGESVLGNPSKAVVGSLKRSLKQVQKEMKTLEEKLMILVKQVHQDVLTRLKSIPGIGNKTAVMLVVLTDGFERFTNGSELCSYAGLTPVIRKSGSSVNGRSRISKIGNQKLRNLLFMCSFNACKYNKACREIYERLVAKGESKKLALIAVCNKLLKQAFAIAKSGLIYDDTYRSTLVKS

SEQ ID NO: 252906 - protein, 334 aa, unidentified
MNFCATLGVDVSKEWLDLCLIKDGAKVWQGQIDNCKTDIRATLTTLRKSFDVTLSQMLVVMESTGVYGNLLLEVLWAKKVPTWVEHASHIKSSSGMTRGKNDAIDAERIAIYGVRFQDKARLWTPPRDVIRKLSVMASLRSRLIRAKTMLTLPMKELNSFSKPEMACLVSENSTPVIEQINERIKNIDKQIQQIIEQDAQVSRKVDQITSVKGVGMVTAVALMIETNEFTKYENAKKLACAAGVAPFEYSSGLYKGKRHVSPRANKRIKTLLHQCARSAIAVPGELSDYYCRKVAEGKHKMSVLNAVRNKILHRIFALVRDDTMYDPNFQHMIA

SEQ ID NO: 252907 - protein, 386 aa, unidentified
MKRNDLSRSLVAFDQASTMVAVVELSFRSWLVAGLVPGLTCQPLKKLGPDAQALLTLLRRWQGEATKAGSTINRIVVAFEAGRDGFWLARWLRARGIEAYVIHPTSIPVSREHRRAKTDRLDTGLLMRAVLGWLRGEPKHCSMAAIPTIAEEDARRPNREHQTLVQERTRIVNRMKATLIRFGIRTFNVKLRKASDRLAVLRSPEDEPLPPNTGAELRRDMARLQLIRDQIKVIEEARLQQLKHAPRKGTHPMLLMLAEIIGVGVETADMLVHEVLSRKLRDQRAVARYGGLTGAPDESGTKRREKGLARAGNARVRRGMIQLAWRWLTHQKNSELAQWYQTRTTGAKPAARKTMIVALARKLLIALWRYVTTGEMPAGVTLHPAT

SEQ ID NO: 252908 - protein, 374 aa, unidentified
MIVIGADTHKRTHALAAVDEGTGRVRGHRQIKAEEPGHLAAVRWARGLDEERVWAIEDCRHVSRRLEQALIAAGERVVRVAPHRMGASRRGEREPGKSDQIDALAIARAVVKDGVERFPAAHLDERAMEIRLLSDHRKDLVAERTRVQNRLRWHLLALCPELEQSLRRGSLADPRQLGRIDRRLRRMPSGARVRVAREQVAQLRVLSRQADALERELLVLVKAHRPQLLAEIGCGALTAALLIGRTAGAERFRSDASFARQAGTAPIPCSSGQRDRHRLDRGGDRQLNHALHIIAITRARHDPATKAYLARKEAEGKTKKGALRCLKRHLARRFHRLLSLAAQTPHSVAEVPARPQRDATTNTGAAPTPMPCLT

SEQ ID NO: 252909 - protein, 346 aa, unidentified
MKITTIGLDLAKIVFQIHGVDERGKVAARKQLKRAEMSKYFANLEPCLIGMEACGSAHYWARKLEGYGHTVKLMAPQFVKPYVKTNKNDMADAEAICEAVGRPNMRFVAIKNVEQQAILSVHRARQGFVKARTAQGNQIRGLLSEFGIVIPKGIASITKQVPEILEDGENGLPGAMRNLIDRLTENLKEMGRQVKELEAQIQKWHREHEASRKLAEIPGLGPITASAIVATVGDAREFKNGRQLAAWMGLVPKQNSSGGKQNLLGISKRGDTYLRTLMIHGARAVIRVAENKAEPDSWLRKVMARRNKNVAAVALANKNARIVWALLAHDQMFRPDYTSAAVVAGV

SEQ ID NO: 252910 - protein, 370 aa, unidentified
MSNATTFVGLDVHARSVKACAFVPETGETVRRSFGYEPCEIASWASSLPQPAKCVYESGVTGFHLCRELRSMGVDCVVGAVSKMHRPAADRGRKTDRRDAQFLAVQLALGVVTEVHVPDAECEGARDLTRALADARDDAVRAKQRLSKFLLRHGFVYDERNSAGQRRNRWTRDFWAWVGRIDLGDVAAMATLDHYCARVREADAAKAALEAKVKALAQQPRWKPTCDALKCLKGVDAVTAVSIACEVDGFARFAAASGFAAWVGLVPSEHSSGESQFRGGITKAGNKHLRKLLVEAAWHYKGASRSPKGLAKGQIVDEATRRHANAGVRRLVDRRRAMDDAGKQSSVANVAVARELACWCWAVGRMAEGA

SEQ ID NO: 252911 - protein, 375 aa, unidentified
MSGAVEFAHIDSPYRRYAALPDRERIQWVQADRWIGFDQAQAALDRLNALLDYPARDRMPCLLIFGNTGMGKTKIIRKFEREHPPVFCQATGELIAMGHQVKIMPPSYVKAYVRRGKNDAADAAAICEAVMRPHMRFVPVKTEEQQAALMLHKARELLVRQQTMLINAIRGHMAELGMIAPQGSAKIKDLIAVIQESEDQSIPALARAALQPLVRQLHSLDEQVETFDREIKAWHKTNETSRRLATIPGIGILTAAAIAATVRDPSFFKSGREFAAWLGLTPRQNSSGGKDRLGRISKKGNTYIRRLLVTGATSMLRYARAKTAAGADWVNGLLQRRPARLVTVAMANKTARIAWAVMMKGENFRVPARLVTEAA

SEQ ID NO: 252912 - protein, 346 aa, unidentified
MLYAGLDLSRKRLDVHLLDEAGATLEVSAAPPDADGLHRLAAHVERFGEPVQAAIESMNGARFVHDRLEQAGWRVEIADAVRVKGLAPLACKTDRIDAWVLAELARRELVPAIWLPDPAVRAERERARFRLHLVRHRSSLKQRVHALLLAHGKPCPVSDLFGASGRALLERLGLPEPWAGTLAASLRLIDELDAEIAACEAELRRLGAGHRYVPLLMTVPGIGFVLGYTIAAEIGAIERFASPGKLAGYSGLCPRVYQSGASDRRGALAKNGPRYLRWALVEAATVACRHPVYRERYQRTKYRLGRQRGAKVAQVELARRLAETIWHMLTRNQPFAPAGATGPLTA

SEQ ID NO: 252913 - protein, 445 aa, unidentified
MPMVHANAAAIDIGATMHMAAVRADRTSEPVRSFGTFTTDLHRLVDWFTECGVETVVMESTSVYWIPIFELLDARGFTVFLVNARDAKHVPGRKTDVSDAQWLQRLHSYGLLRASFRPKGQIAELRAYVRQRERLLEYGASHIQHMQKALTEMNLQLHHVVADITGATGLRIIRAILAGERDPKVLARLRHYQCHASADTIEKALTGSYRSEHLFALEQALALYDVYQEKAAACDIRIEAVLKELSIGRGPRSDPLPSPRRHRATQANGLAFDVRAALFALLGKDLTQINGLGPYLSLKLIAECGDDLSAWPSAKHFTSWLGLAPSNKISGGKVLSSRTRRCGNRASALLRLAAVTVGRTDTALGAFYRRLSARIGKTKAITATARKIAVLFYNALRHGMEYVDPGASFYETRYRARVVDNLHRRAKAFGFVLQPIEPTPSSVVS

SEQ ID NO: 252914 - protein, 348 aa, unidentified
MVIVGIDAHKRSHTAVAVDASGRRLGQRTIGTSSEDHLALLGWAEQFGPQRSWAIEDCRHLSRRLEADLLAAGESIVRVPTKLMAHARDAARSYGKSDPIDALAVARAALREPDLPTAQLDGPARDVRLLSDHRDHLIAERTRVINRLRWHLHELDPGHEPPARTLWRHKHLTAIAARLVEFDGVVARLARTEIEDCRRLTHQIQALDEELQTIVKQLAPTLLDICGCATLTAAKIIGETADVRRFRSRHAFARHNGTAPLPVWSSNKPRHRLSRTGNRQLNAAIHRIAITQAHYHEPARQLLDRRREGGNNKAESLRVLKRRLSDVVYRALLSDAEHAASPIPLAAA

SEQ ID NO: 252915 - protein, 384 aa, unidentified
MVAVSGLTTKDGDKHMKEHKHYVGLDVHKDTIAVAIAEAGRSGEVRSYGTIANTLHAVERLVDKIGGVAVELHVAYEAGPTGFVLYRWMKKRGIDCIVVAPSRTPQGPGPRQKTDRRDAVQLARLHRAGELTAIHVPDEADEAIRDITRARADAVADHTRARHRLKGFLLRNGYRYPGAANWSEAHMRYLRSLSLPSAIHKAVLEECLLAVDQAVERIGRLEALIEAKAPQWRFYPAVQALMCLRGFRLTAATVLIAEIGDVKRFSHPRQLMGFLGLVPKETSSGMSRRLGSITKAGNTHARWILIEAAHHAFHTPGVSSVLALRQAGQPEPYKSLSWKAQSRLYKRGWHLLRRGLMKQKVVVALARELAGFVWALLQQAPSPA

SEQ ID NO: 252916 - protein, 354 aa, unidentified
MKGTTKYVALDVHQAMTVVAVREENGRIIARSIIPTEEQAILEFFRGMRGSIHVTFEEGTQAQWLYDLLVNRVDSVLVCDRRGEKRHGSKGDQADADHLSELLRLGSLRAVYHGSPHLSTLKELTRTYQNVVEDSTRVMLRLKALFRARGIKAPGKRVYHPRNREEWLAKLTDQGVRFRAQVLYTQLDVLRELRPKAKAAMVAEVRKDPAWEVLRTIPHLGPVRVALILAIMRTPWRFRTKRNLWAYCGLAVVTHSSSDFDWVNGQAVRRKRAPLTRGLNRNYNRELKDVFKAAATAATGRPGPLRDYYQARIEGGMREELARVTLTRKLTAVTLRLWKRGEPYDPEKLTVQAR

SEQ ID NO: 252917 - protein, 345 aa, unidentified
MKKIIIGIDFSKETFDATLLDCRNSELSEAVQSAVHEKFTNNKEGFQAFVTWIKSSVKKITPDELLLCGEKTGKYSLPLSNFLYAKGYSIWLDSGLRIKRSLGISRGKSDKADSLKIALYAYRYQDMAVCYVPLSKNVSRLKELFLYRQHLVSQVKAMAVRKNVTDDFKKELGDVKFIVDSAAKIIQQIKATIKKCEEKMQELIEEDDELKTTHDSITSIKGISLINATAFIAYTNNFKDFGGNAKKIATYWGVAAFAQESGTSVHKVARVSKIASKMLKSLLTQAARIAVRWEPKFRQYFEHLISRGKHQGVALNNVKNKLIHVITALAVSKEKYNREYEYIKR

SEQ ID NO: 252918 - protein, 480 aa, unidentified
MNVKARRTKKQVNVENQAINLLPKEELSKKIEVVEKELRSYTWRDLETNGKFAKNDKLSFITDDMLIVGCDIGSENHYIRAIDVRGRELSRGAFEFSNTSEGFENAKAWVLALAAKHDKKQIVLGLEPTGHYWFALAAWMISNGISVVQVNPYAVKQSKEIEDNSQLKDDRKDPKLIANLVKDGNYGMPYLPEKVYADMRRLSMFRDQLTEDRIRNINRLHRELKIYFPEYMDAFGKIYGAFTLEILKVSAIPADITALGAEAIKNIWHNAKLRGRGYSRANEIVSYAEKSVGLTDGTDAGREEVKWYAEQILRLDEQLAEIESALHEKCREIPYAENILAINGVGENILAGILAEMGDISRFDDVKEIQKLSGMGLVACSSGKHKGQTKISHRGRKRLRYWLFQAAKSAVSHADEFKQLHEYYTTRSNNPLKKMQSLVVIACKILRVIYTILKTGTTYDSQKLLKDIKYPVSAQAAMAV

SEQ ID NO: 252919 - protein, 406 aa, unidentified
MFYSGIDVAKYRHEVCVVDESGNVVLQMFMNNTKKGLDKLLQNLNRLEIEVSNVEFCLEATGHYWLSLYCHLTELGYKIHVINPIQSDAFRNFYVRKTKTDRKDAQLLADIIRFGHVSETKLASETVLKLQSLSRLRFEFVRQVGGLKNRVLGILDRIFPEYPQCFSNVFINTSRELLKSFTAPEDLAAADLSELTAFLNEHSRGRLGADRAKQIQALAKGTFGINIALDAFTLELRLLVEQIEFIEEQISVIEEAIDQVMEEMRPSNDTAYRHVLETIPGIGPVLAASIIGEIGDINRFPNAKALVAYAGLDATVRASGQFEGTCNRISKRGSPVLRHSIWLAAVSARRFNPEMKEFFEKKRSEGKHTQVATGAVARRLVHLIYSLWKDNRPFDPNYQWSPTNSH

SEQ ID NO: 252920 - protein, 353 aa, unidentified
MKYHTSTTQFNCGIDLHARQMYVCVLDRDGKKLVHTNIKNNDFAYFLKLVAPYRHDLTVCAECMFGWYWLADACADAGIHFVLAHALYLKAIHGGKNKNDRLDSEKIAHLLRTNFIPPGYVYPTEKRPLRALLRQRLLYVWNRTELLARIQSHQLAHNRPTTRQTLYNREPWGKNLLASEPDPVRQLALQNDLALIGHYDAQLASLEKELLKLTKQTASRDFTLLQTVTGIGDYLGLTILHEIGDIARFPTVKDFLSYCRLVKGTVASAGKIKGLRGAKLGNPYLRWAFGEAAIIAKRDALLGPLAQRLEARLNNKFKANTVLAIKLARAVYFMLKTKTVFDPERLVAALSKN

SEQ ID NO: 252921 - protein, 418 aa, unidentified
MVISLAEKRRIYMKQIVSVGIDVSKGKSTVCAMIHPNTIIKESFEVLHTVEEMSMLADYIGSLDGEIRIVMESTGHYHLPVAQFLYQKGFFVCVENAYIIRQFSRIMLHGAKTDPLDAKKLAKYGLAYWSELKPYKFHPSCYTELSLLSKQYQTYIKLLIAAKQNVIHLMDEMLPGFKEALDTASSVQFSKVKYVDFAKEFYHVDMIKTMGKEIFRENYKQWCKEKGYRFQSEKADELFHLAEDGIPTLPTEFPSTRLCMEVATEQVSQLGYALEQILSQMQNLAKTLPEYQTIRQMGGMGEKLCVRFIADIGDVRRFHNGKALVAYAGIDAPPYQSGQYTGTKRRISKRGNSALRKTGYEVMKSLKSHPPKTDTRVYDFIIKKENEGKSKKQAKIAGLNKFLQIYYARVMEIYKNIV

SEQ ID NO: 252922 - protein, 423 aa, unidentified
MDVIHQRVAGLDVHKETIVACVRIMADARVSRECRTFATTTAGLQDLLAWLTASGCSHVTMEATGVYWKPVWNILSDGTFELLVANAAHIKNVPGRKTDVNDATWIADLMACGLIRGSFVPDQAFQELRTLLRTRKQLTREQTRHVQRLQKTLEEANIKLDSVISDVMGLSGRRMVEAMIAGERNPQKLAALADRRIKASPKALYDALHGRLTDHHRFRLRLHLAQYDVLAAAIGAVDQEVDAAIDQMDEVEKGGQAFFRSLIRLLSGIPGVNTLSAQTILAEITPDMTRFATAGHLVAWAGLCPGQNESAGKRKSSRLRKGAPWLKTTLVQCATSAVKKKDSYFKAQFQRLKSRRGPQKAICAVAAAMLTTIYHMLKDGTQFQDLGAHHFDRRPPEAKARHLVAQLTKLGYTVQLQPLAEAA

SEQ ID NO: 252923 - protein, 455 aa, unidentified
MARPKKSTAKSKADPFAALPPLNLNAAGIDVGNAAHCVAVPPDRDPQPVRTFGSFTTDLQRMAQWLKDCGIETVVMESTGVYWIPLYDILETSGFTVFLTNARYVKSLPGRKTDVLDCQWLQKLHTFGLLNNSFRPPDQIRVLRSYLRQRETLVAEAGTCIQRMQKALTEMNVQLANVISDISGVTGLAIIRAIIRGERKPEELLKLKDPRIQATDEQIVESLKGTWRPEQLFVLRQSLELYDVYQEKIGDCDSCIRALLQTFDSQVDPNAKPLPKPKRGKKPHGNAPNFDLRTELYRISGTDLTRIDGIDVVTAQVLISEIGLNMNPWPTEKRFASWLGLCPDNRISGGKILKRSTRHVVNRATTALRMAASTLVRSKSALGSNYRRFQARFGPAKAITAMAHKLARLVYRMLRYGSQYVDKGMQHYETKYRQQRISWLIKQCAEFKMKLVPIT

SEQ ID NO: 252924 - protein, 339 aa, unidentified
MIIQSEIIVQESKPLFAGIDVGAEELILVIRKNGIPHKAQKFANNPADRARLVKKLVNLPGIIVCLEATGVYHFDLSIALHDAGVALMVVNPKASHNFAKVLMKNSKTDAVDAETLAQYAERMDFVAWTRPSDEKIALRSFARRIDALTRQKAAARNNLHALSASQETPKAVLRDVKLAVSQLEKRIDRLSNEALALIGKHAELERVFRLLTSIKGIAKTSAIALMGELLLLPPGLSHREWVKFAGLDPRAFDSGKSVHKQARLSKAGNRHIRSALYMPALSAKQHDPHVKAYFQHLVDNGKKPLQAVCAVMRKLLHAIHGMLKDNTPFDNTRFYAIPA

SEQ ID NO: 252925 - protein, 369 aa, unidentified
MDHHSVAYVGFDTSKTKHAVALAEGGREGEVRYLGEIEATPAAVERLLGKLERKYKTLHVCYEAGPTGYGLYRHIRALGYACDVIAPSLVPKRPGDHVKTNRRDAVTLARLLRAGELTAIWVPDEVHEAVRDLVRAREAAAQDLRHKRQQVLSFLLRHGRIFTGHRHWSRAHLRWLAGQAFNHPAQQIVFQDQVDAVADAQARLERLDGQLAELVPTWSMAPVVAAFQAMRGVSVLVAVTFVAEIGDVRRFESPRQLMAFLGLVPCERSTGDTVRRGGLTLAGNRRVRRALVEGAWSYRHPARVTERIRSRLEGLPKAVREIAWKAQVRLSARYRRLIAAGKKAPVAVAAIAREMAAFLWAIGRVVEPA

SEQ ID NO: 252926 - protein, 329 aa, unidentified
MTTPNATDCIFAGIDVAKLKLDLALTGIQQVATFTNDSAGFTQLVELLLKAPPKLIVVEATGGLERPLLDALLEANLPVHLANPRQVRYFAISLGILAKTDPIDAHVIERYAAQLSPRLLQKRSENQSELEALVTCRRQLLHLRTEQTNRLGATRSRSARKSIAAVLKVLQKQIDSMDCQIQKLIESDDDFNDIDKLLRSVPGIGKVASATLLCEMSELGKMDRGQAAALLGVAPFNRDSGRFKGKRVIRGGRSAVRSVLYMSAVCAIRFNPVLKAFAQRLRKAGKLPKVIIVAAMRKLICFMNAMVRDGLRWEELDIVKKLNCAESVV

SEQ ID NO: 252927 - protein, 413 aa, unidentified
MDRIIERCAGLDVHKDSITACVRVPGEHGERHQETRTFATTTRSLLALRDWLASFAVTLVGMESTGVYWKPVYYVLEDDIECWLLNAYHLKAVPGRKTDVKDAEWICQLVEHGLVRASFVPPRPIRELRDLTRYRKALINERTREVQRLDKVLQDAGIKLSSVATEVLGRSGRAMLEALVAGTHDPEVLADLARGRLRAKLPQLRAALEGRFRAHHALILGELLGHIDYLDEATARLSAEVEARIAPFSDEVALLDTIVGVDRRAAEVILAEIGPDMSRFPSSRHLASWAGRCPGNDESAGKHRSGKTRKGSKWLGATLNQCANAAARSKGTYLSSQYARLKGRRGHKKAIGAVAHSILVIAYFVLQRRRPYSDLGPDYLLLRDNAEAYKNRLVRQLERLGHKVTLEPLAQTA

SEQ ID NO: 252928 - protein, 405 aa, unidentified
MSELEKGLVFAGVDTHKDTHTLCLLDHMGRAIGTFGFAADAKGYDALAGKIGGPATCAGVGIEGTGSYGAGLTRRLLELGYCVHEVMVPGRARRKPGRPKSDPADAEVAARQVLARGNLSKPKDQPGWTEELRQLMIARDRLVQATAAMINAAKSLIVTAPEDLRRSLEGLSRKNLRSALSTLDPAAGGIILALGSLGKAWDLQDREADAIEERMKRVLEANAPALLAIYGCGTVSAAALAVAGGGNPERLRSEAEFASPCGVAPLLASSGKTERHRLNRGGDRRANRALYQIAVTRMSYDRRTKDYVGKRRRDGKSKKEAIRCLKRYIARELFRALRNPLEIKGPSWKDLRPARQALGITLVEAGKALNVGFQRVSYAETGRLMNVRFLEEYDAWLKSQAKRES

SEQ ID NO: 252929 - protein, 354 aa, unidentified
MTRILAIDLGKFKSVSCLLDTTTNATEFWTLSTERHYLQTVLKNYTPDLVVIESCGLAGWVHDVCTAEGYKVLVCNPNQEAWKWKNVKRKTDRDDALKLAKLAALGQLVPVYVPSQQQREYRRMVKYRKVLVGRVNRVQNNIRAIFAQRGIDMVRGQKAWALERHDQIADHRKPLAECALDELWRGELDLELQQFASLREHQHEVHKKLKSLAAADERVQLLQTIPGVGRKTAEVVVAYIDDPHRFQNARQVSSYAGLVPRRYQSGEMDRQGRINKRGPRQLRSALVEAAWLMLRYNPWAKSVYDRLTSGQKTRKKKAIVAVARKLLVRCWVMLLRKEPWKETLTTNTVAANAA

SEQ ID NO: 252930 - protein, 350 aa, unidentified
MFVGVDVHKHSLCVCYYRSAKQYRYQSYPFTEQGFQAFLDSLTRRDEVAIESVTQAYYLIDQLGPRVKRAVVVNTFAFDLIRRSRAKTDEKDAFHLAQQLSYGHLPEVHLPERTIRDLRVYQNARVALVEERTRLKNRIHAAFLMHGVVTARKHLSSRKGREMMRRESSRYGGYPELELVALHLDRIDQVEEQMGAIEQKMFELGSHLPDLPVLLQVGGIGPLLAITILAEVGDFRRFPRSSKVASYAGLVPSTRSSAGRAKSGRCGYGRKRLRTAMVQAVRSLTVHEPENPLAQHYQILKARRGAGRATIAVARKLLEILWIMVTTEVHYRQLVPSLYETKLRSFKTAA

SEQ ID NO: 252931 - protein, 426 aa, unidentified
MQPHYNCVCGVDVHKEFLQVCLLKREEDPVSFRVFNNFSGIQALKQRIEEEGCECMACESTGVYWYRLYLAFEGQIRVIVGNAYQIKSIPGRKTDVRDAQWIAELAMNGLINPSRVFQKNDRELRELTRSRESTVKSRTQIKNRIHRILDSAGISLGKGVRDIFGKSGVHLILGLLNRAKADDIIKTLPSARVKKKAEILREILSGSLSDLQIILIKRNLDMMAHINEHIRALDEQIIARMTEQDTIRDVEIACSIPGINVTSAVTILAEIGDYHDFENAEKLASWAGLVPSVYQSAGKNCSGKITKHGSEHLRWILVQVAKAAGRTVNTTFRKFFNRIAYRKGGNTATVALARKILCILWHLLKNKELYVDSLKNAKPTKPLIIQKFSKNSSSDVQQAIDFIIECGFEVIHPDSSLDLKFREVSH

SEQ ID NO: 252932 - protein, 342 aa, unidentified
MNHYAGIDVSLECSSVCVVDANGKILREARVASEPEALIGWFRLLGFGLERIGLEAGPLSQWLFAAMREAGLAAELLETRHVRKAFEAMPVKSDRNDARGIAQLIRLGWFRPVHCKSMSAQETRTLLTARKLVQSKLRDVENSLRGILRGFGLKVGKTTERGFAGRIEELVAGHPHLQVIARALLSVRAVLRSEFAAFQKQTRKMAQSDARTRLLMSTPAVGPIVALTYASAIDDPARFTSSKQAGAHFGLTPKKHQSGETDYTGRISKIGDSSVRTALYEAAHIMLTKPVKGCSQLKSWAMRIAKRAGMSKAKVALARRLAVIMHRMLADGTPFNPATAAA

SEQ ID NO: 252933 - protein, 402 aa, unidentified
MNAVGIDVSKGKSMVAIMRPFGEIVSAPFEIKHTASDINSLVELINSVEGESRIVMEHTGRYYEALAHQLSEANLFVSAINPKLIKDFDNDSLRKVKSDKADAVKIARYTLDKWQNLKQYNVMDELRNQLKTMNRQFGFYIKHKTAMKNNLIGILDQTYPGVNTYFDSPARSDGSQKWVDFASTYWHVDCVRKMSLNSFIDHYQNWCKRKKYNFSQSKAEEIYGKAKELVPVLPKDDITKLIIKQAVNQLNSASTTVESLRTLMNETASKLPEYPIVMAMKGVGASLGPQLMAEIGDVSRFTHKGAITAFAGVDPGVNESGSYEQKSVPTSKRGSSDLRKTLFQVMDVLIKTHPQDDPVYQFLDKKRAQGKPYYVYMTAGANKFLRIYYGRVKEYLSSLPES

SEQ ID NO: 252934 - protein, 404 aa, unidentified
MARILSENSKSSFSQVIHFPGVRRIIKRRPFGCKFVALALALEKKGAPVMESTKYVGLDVHKEATTIAVMNSAGKLIMESIIETKAITIRQFIQGLHGDLHVTFEEGTWAAWLYDLLKPYVTKVVVCDPRKNTLLKVGNKSDRIDPKKLAELLRNGSLSEVYHGENGVRTLKELARSYLTISKDLGRVMNRVKALYRSWAIPCAGTQVYALCHRSEWLSKITEAGVRRRAEHYYQQLDALQTLRREVRKDLLLEGRKHNATKLLRQVPCIGPIRAAQLVALMQTPHRFRTKRQLWTYSGLGLETRDSAQYRYVEGQLQRSKKPQQLRGLNSNHNHDLKNIFKGAATTASVSAGPFHDFYQALLTKGMRPTMARLTLARKIAAITLIVWKKGARFDPQHLKQQAA

SEQ ID NO: 252935 - protein, 340 aa, unidentified
MDEYAGRQYVGVDLHRRRSVIVRMTPEGERLGQAERIVNDPWELAARVASWGESPEVVLEATYGWYWAADVLAEAGAKVHLAHPLGVKGFAYRRVKNDELDARDLADLLRMGRLPEAWIAPPEVRGLREEVRHRCKLVAIRSGLKAQIHSVLAKQGVQVPVSDLFGVAGQKLLDEIGLDAPFQARLLSLRRLIDAFTFEIDVLAKRVGAGLKHHRGFRAIQALPGVGPVLAAVFVAEIGDVTRFARPQQLCSWAGMTPRHRESDTKVHRGRITKQGNHLVRWAAVEAVQRLHGGAIGASRDRLTQRRGANIAKVAAGRKLLTLVYYGLRDGHIRCLARPV

SEQ ID NO: 252936 - protein, 355 aa, unidentified
MNDAKYIGLDVHQATISVAVLDSAGKLVMEAILETKAETILQFIHGLRGSLHVTFEEGTCAAWLYALLKPHVTRVLVCDPRKNALLKVGNKSDRIDARKLAELLRANLLSSIFHEDTGLRAVKELARSYLTMTKDLTRVMVRLKALYRSWAIPCATKQVYAPRHRAEWLAKIREASVYRRAELYYQQLDALRALQQQVKKELLIEGQKHSAMKLLRQIPSIGPIRAVLLVALIQTPHRFRTKRQLWSYCGLALETRTSAEYRVAHGQLKRSKKPVAIRGLNKNHNHDLKNIFKGAALRAAAVEKPFQEFYAAMVAKGIKPEMARLTLARKIAAITLIVWKKGARFDAEQLKQQAA

SEQ ID NO: 252937 - protein, 401 aa, unidentified
MKVSGLDVHKDSIFCGIYDGNKSTEVKKFTTFTQGIKEMGELLKKQGIQKVAMESTSIYWIPIWNILEEMGFSLMLVNPYLIKQMPGRKSDIKDAQWIATLLHKGLLRGSLIPDKTIRQLRSYSRKYVKMQAMITSVFQEMERILEMCNIRITSLVSKNNSVSIKRVIEHIIQGKDSLEELACCIHGRILNSKGDMVKQSLEGYVQDHHRFTLELAWEQYLLYSRQLNQLDKQMEAICQEHYSQHMELLISIPGIQRKAAMQIIAETGADMKAFQNSRKLTGWAGLRPKNDESAGKLKSTSVTKGNRFLRRIMVQCAWAASREKGSFYKTKFEQLCIRKSRKKALIAISRKLLTVVWHVLEEKSPYNPKIVPVYNPEKMKQKMKYFQRELDKLQALGYSLT

SEQ ID NO: 252938 - protein, 471 aa, unidentified
MNNHRRRPGKHRRHRPGKPRTSPSVLERINPNVAGIDCGSAEHFVAVPPDRDPCPVQSFRTFTGDLVRLADWLVACGVMSVAMEATGVYWIPVYDILEARGLNVLLVNARHIKNVPGRKSDVSDCEWLRELHSVGLLRGSFRPTATIVALRTYLRHRQTMIEDASTYIQRMQKALVQMNVQLPLVVTDITGVTGMSILRAIVGGQRDPERLAECRDPRCQASKAEIIEALTGHYQADHLFVLQQNLALYDACQQQIAACDRAIEAHVQILVATVEPPSTPLPPARARTGLKNEPAFEIRSPLHQLTGGVDLSQIEGIAPYSALKLLSEIGTDMTRWSTEKHFTAWLTLAPKNRISGGRLLSSKTQSSANRAAQILRMAAMSLGKTQTALGAFYRRLALRIGKPQAITATARKLAVLVYRALKGELVYRDPGADAYTAKQRTRIVRHLRQRAGSFGFDLVNRETGEIVSAVS

SEQ ID NO: 252939 - protein, 427 aa, unidentified
MSYRIAGIDVHKKMLAVVVSDVEIEQEYQFERRLFGSSPEQLRSLAAWLLGQEAEEVVMESTAQYWKPVWEALERYWKPLRQKREGARPTSGRLHLAQAQSNRGPRGRKKDFPDAERLVKRLVARELTLSFVPDAEQRLWRTVTRRKYQLTRDHVRLQNQLESLLEETHIKLSSLVSDLLGVSARRMLKALADGETNPTTLAALADQHLRATPAQLCDALGACTDLKPVYRRLLRMALEQLQFLEQQIGQLDQEMASLLSQHQHAVQRLAEVPGLGVDSAQQIIAEVGATAATFPSEKQLSSWVGACPGDDESAGVNYSHRSPKGNRPMRRILNQAANAAVKTKGSIFEMVYRRLVPRLGHNQTIGAIAHRLCRLIWKILHQEVRYEERGPAVSKRSIQNRTTKMIRQLRSLGYRVELVTSQTASPA

SEQ ID NO: 252940 - protein, 416 aa, unidentified
MRDGDKKKEMIHIYQKRNTCFIGIDMHKDIHCAVIIDCWMNKLGEITFENRPSKFPAFVDDVKRICGTKEFVFGLEDTRGFGRNLSAYLVGRRFDVKHVNPAYTSAVRLSNPIVFKDDSYDAYCVARVLRDMVDALPDAKHEDVFWTIRQLVKRRDLLVKNNVMNKNTLHNQLMYSYPSYRKFFAMIDGKSALCFWENFPSPMYIKNTTPEQVYETLKAINQGLKLERIHDIFAMIERDGDTRKDYQEERDFIVKSLVKSIKNNLEQIKEIDVELEKIIPLAGYKLRSMPGIDLATEAHLISEIGDINRFPDSDKLARFMGLAPVSFSSAGKGKDERCRNGNRVLNAIFHFLAIQMVAVSKGGKPRHPVFREYFEQKVKEGKNKPQALVCVARRLVRIIYGMMKTKTEYRPYEKAE

SEQ ID NO: 252941 - protein, 337 aa, unidentified
MNKSELNFVPCGIEVSSETLLVARGSKAPREFPNTAAGHQALLRFLEQGGGRVRVCLEATGRYGLDLALALHAARLPVMVANPRAVRHFASALMERSKTDPLDARVLAEYAARMPFQSWQPPSPTVLKLVGVVRRLQALTEMRAAEKNRLHAASLSEALSGYVRLEIAHHLRTLEHSVQRLTRAAEQFIGDDWALAERYQLLQSIPGFGPTSALHVLAELSLLGADLDVRQWVAAAGLDPRHYSSGSSVHQKTRISKLGNARLRRGLYMPALVAIQHEPHLAAFYRKLLGRGKAKMQALVAVMRKLLHAIYGMFKHHQTYDGSKIHALTPLPEALCV

SEQ ID NO: 252942 - protein, 484 aa, unidentified
MSKPKKHSKQLSEKKTVAGKGKRGLKRKGMCLEDRPILEANAAGIDIGAREIFVAVPPDRDEHPVRVFPTFTEDLEQMAQWLVSCGITTVAMESTGVYWIPLYDVLEKHGVRACLVDARGMKNVPGRRTDWHECQWLQFLHSVGLLRAAFRPEGAVCAVRSMMRHRTELVAMTSQHVQHMHKALTQMNVQIQHVISDLTGVTGLAIVDAIIAGQRDPMVLAKLRDPHIKADEETIRKSLVGNWQPEHLFTLKQSRQSYQHYREQIAACDEQIEKLLVAFQPRVNPEEKPLPPDRKKKQSGRRKKNVNPKTGFDLRTESYKLFGVDLTQIPGLMAIVLALFSEVGRDMSRWPTASHFISWLALCPDNDISGGRVLWRGMRRVQNRAGHLFRLAAHSLHHDQTPMGDYLRRMKSKLGPAGATTATAHKIAIIFYTMIKKQVEYDATIWAERDAEREKRFEAKLRRQAQQRGYKLVPIEENPARVNA

SEQ ID NO: 252943 - protein, 387 aa, unidentified
MPQPNDLSRSRASFEQDATIVAVIEMSQSSWLIAGTVPGIERQPLKKIVPDAVALLRLLQRWRDEATRGGRCVARIAVAFEAGRDGFWLARWLMRHEIETHVIHPTSVAVSREHRRAKTDRLDTAMLMRVFLGWLRGERGHCGMVAVPSLEEEDARRPSRERENLVSERTRIVNRMKAALARLGIRGFKPELRKAAQQLESLHTPEESPIPPNTLDELRRDLARLAILRGQIIAIEQTRLERLEPAPHTGANAMIRLLASVIGVGIETADMLVREALSRGLRDRRAVARYAGLTGSPDESGTRRHEKGLAKSGNARVRRGMIQLAWRFLMFQRDSVLAQWFRARTEGVKGARKTTMIVALARKLLIALWRMVTTGEVPQGVVLRQPT

SEQ ID NO: 252944 - protein, 494 aa, unidentified
MHCPAISSHRRFGHPRADEIGEDLWGRLLTPCRPGASEPVISLARVSPRHPGLCFEHAHQTRRLFVRLPGRRSLIATGGRYQVKQVFERLFERVAGLDVHKAQITAAVRVPDGRGGRLQEVAEFKTTVRGLLALRDWLKAHGVTHVAMEATGVYWKPPWAVLEDEFECLLVNARHVKQVPGRKTDVSDAAWLAQLLEAGLLSASLVPPKPIRALRNLTRYRKTQIEERQREANRLHKILEDTGIKLDCVASDVLGASGRAMLDALCSGTTDPVVLAELAKGKLRQKIPALQEALEGRFDSLHALIVSSILAHIDFLEEAIDRLSDAIEEQLRPFAKAVELLCTIPGVRARNAQVILAEIGTDMSVFPTSKHLASWAGQCPGNDRSAGKRRSGRTRKGSRWLGIALTETALAATRTKNTYLAAQYRRLRPRRGHKRALGAVRHSILTAVWHMLATGELYNDPGGDYFTRDPDRQIKRLVTQLQQLGQHVTLEAAA

SEQ ID NO: 252945 - protein, 351 aa, unidentified
MKTEQTAQPKLYIGIDIHKRSWKIHCATDLFSGKSFTMPPKPEGLKVYVEQHFSDYEVTIAYEAGCCGYYAHRSFESYGWSSLVVNPADIHRKGKERFTKTDKIDAQLIARELKDGRLDSIHVPEVEREQLRSLFRRRNDLVKDFRRIKSILKMQLLYFGVSIPEEFDNDHWSHNFRHWLDSLVFSHPTARETLDSRMRSFRFIDKELRDVSSKLRAYCRKHYKKDYYLLRSIPGIGGIVACGIICELGDLRRFNSIKHLAGYVGLAPGVHQSGDNQRHTGITMRAHRLMRSYFIEASWQAIRTDPIMQAYYRKHIGKNVKSVIVKVARKLLSRTLAVIKTEIPYTIGVIE

SEQ ID NO: 252946 - protein, 341 aa, unidentified
MAQVTTIGLDIAKHVFQAHGTDAAGQVLFRKRITRGKLIGFLAVQSPCIVAMEACAGAHYWAREIGKLGHSVRLMAPAYVKPFVKRQKNDAADAEAVCEAVQRPSMRFVPVETEEQQANAIVFRARDLLVRQRTQCVNALRGHLLEYGYAFSQGIGQIASLVALIEDPGSSLPEGLRSILKLLVDTFTGLEAQIAVLDAEINRRSRTDPAACRLMTIPGVGPIVSTAITALAPAAHSFAAGRDFAAWLGLTPLQRSTGGKQKLGAVTKRGERTIRRLLIIGASAVVRQASRRGAPKGTWLAQMLARKPKMLVTVALANKMARIVWALLVKGGSYRAQVAAA

SEQ ID NO: 252947 - protein, 355 aa, unidentified
MKNQQVNEKPNFLGQEIYVGIDVHKKQWNVFIMSKLKEHKGFAQPPRAAVLADYLRSNFPGAIYYSVYEAGFCGFWPHRDLIKEGINNIVVNPADVPGMDKEKKNKSDKVDCRKLCRGLRNGDLKGIFVPDRVLLEDRELVRLRSKLVRDIRRCKCRIKGMLNFYGIHTPSSGWSNAFINWLKELEFNTPSGTFALRTLIRELEHITDLKKQIARQLRSLIKQERYAGPIKLLFTIPGIGLVTAMTFLTEVGDTSRFNRLDQLCNYIGLVPSIHGSGDTIHVGSLTPRKNTHILTLLIESAWTAVGKDPALMHTYHKLCTRMKSQEAIIRIARKLVARMRFVLLNHTQYQLRLAA

SEQ ID NO: 252948 - protein, 368 aa, unidentified
MKDVTTYVGIDAHKKDLFIAMLVGTQATPLTWTVANEPNAIRRLVRKLEREAPGPVRSCYEAGPCGYALQRRMTTTRVVCQVIAPALIPRKPGERIKTNPRDARKLAELLRAGLLTEVQPPTPEEEAVRDLCRARDDAREDLQRSHHRLGKLLLRRGLHYSGRNWTRAHRQWIDSLEWAHAAERVVVDDYLLAIDHLEARLIELDARLTDIAQTDPYREPVAWLRCFRGIDTLTAILILAELHDFRRFQSPRALMAYVGLVPGEDSSGEKHRRGRITRTGNALVRRLLVETAWHYQHRPSVGVALTRRRKGQPTRVIAIADKAQQRLFRRFRRLAEHHKPAPKIAVAIARELAGFLWAVLQPASVSAS

SEQ ID NO: 252949 - protein, 340 aa, unidentified
MQVSKKNYLGIDVSKPWFDVSLLTVLDHLKQPMVTERFANNASGMQDFKKWLKIHKVSLDENSLLVIENTGIYHRLIWNFCSKHHLQLHIGNAARIKWSLGITRGKNDVIDSQRLCMYCYKQADELKTAAALNPVFMKLKDLVSSRNRLVTQLQSTKNYIKELQGTSSKDLFRTLAKAHKSAIEGIKKSIQQIEVLIETIIKEDAAVFANYKLIKSVPGIGHFTAVYIICCTNNFTAKISGKQLASYAGVVPFGYSSGISIKGRHRVHKMANKDLKKMLHLCALTAIKYYPEFRQYFERKKAEGKNGMLVLNAIKNKLVLRVSAVVNNQEPYVDKTNKAA

SEQ ID NO: 252950 - protein, 311 aa, unidentified
MNSEAYVGVDVSKVSLDVKVLPTNDTLQISNDDVGINKLIKRLTQIDPTLIVFESTGGLEMLAVGNLIENQLPVVVINPRQVRDFAKATGRLAKTDAIDADTIARFARDIRPEVRPIKDEHAQLLSALNARRRQIVDMLVAEKNRLSRAPKPNRKSIQKHIHWLERSLTDINKDIDKTIKKSPIWRENDKILQSFKGVGPVVSATLLCDLPELGTLNRKKIANLVGVAPLNCDSGHFRGRRRIKGGRANVRRKLYMAAVASLRHNPLMKDFYDRLVEAGKPPKVALTACMRKILTILNAMMRERTYWNAIW

SEQ ID NO: 252951 - protein, 400 aa, unidentified
MSVEYAVFLGLDVGKGEHHACALDPSGKKLHDKPLPNDEQRLRALFTQLSRRGRVLVVVDQPASIGALPVAVARDAGCQVAYLPGLTMRRLADLHPGNAKTDARDAYIIADAARTLPHSLRRVDTGQETLAELEVLVGFDDDLAGESTRLVNRIRGLLVTIHPALEKALGPRLHHPAALELLIAHGGPDGLRAATTDELLATTRPLAPRMAGRLVEAVKTAMDAQTVVVPGTTAATTVLPHLARSLRSVHDQREQVAVQVEEILDAHPLARVLISMPGIGVRTSARILLEIGDISAFATPGHLAAYAGLAPVTRRSGSSIKGEHPPKGGNKALKRAMFLAAFASLSDPRSRAYYDRKRAEGKKHNAALICLARRRSDVIYAMLRDRQPYQPSRTPAARAA

SEQ ID NO: 252952 - protein, 365 aa, unidentified
MKKIAYVGIDYHLNSLSIAVMVQGEKDPSDMVRLKNDDKIIRKYMKKLSERFEIKACYEASSNGYCFQRKMTAWGYPCDVIAPSLIPRRPGDHRKNDFRDARDLAQNYAHGMLSIVHPPTEEEEAVRTLVRCRFAFKEAAKKVKQQINSFLLGQDQHWDHSKWTHQHLKWLWEMRMPNAYLQQVLEEHLAHLDYLEARLKHLDEQIEQIATSPVYAPAVKKLAAMKGIRTLTAMLLIAEITDFRRFPNPRALMAFLGLIPSEDSSGDKRKGGAITRAGNKRCRTALIESVQHYAKSPHMSAQMKSDLSQLDAHSAAIAVKCLKRLHKRYWALVLKGKLRPVAIIAIAREFVGFIWAMMQPQPAIA

SEQ ID NO: 252953 - protein, 392 aa, unidentified
MRMGPVLRCGQGIAEMRIAIGIDVHKENCAACAVYAGTGEPPQRHCDNLEKFNKDFRRFSSDAKGMKELAERIRDHDAYVLIENSTKSHDVYWMLRNLDINVTVAHAADLYRITKSKTKNDDNDATELAGYMRRRLMGEIEFAESHIPPQDVLLQRELCRFSLGDRSELSSLKRRIRSHILIRGLKLKREYDDIACAIALAELKATGDHVLCLDAAKAESIKLREKQTERMIWHKMVGNRTFDIVWSIPGFGILSAAYVTCMADDMKRFEDGRSFAASTGITPKLYESADRPKNCGISRRGDPDIRRLLCQATYVHTLHADSFITEKYKRLKARGKHHNEALVACANSMARMVWAMVTEDRKYSADPTVLVKTRTLANSYDIEEAMEGAEKG

SEQ ID NO: 252954 - protein, 422 aa, unidentified
MQVIYERCAGIDVGKDVIAVAVRKPGNGPDGRVTVKRAYKTFYGVLAEAAKWLVSQGATHVAMEATGIYSMPVYHALLEHGDFERVLVCNAGHVKNVPGRKTELADAEWLAQLLECGLLAGSFIPPAEVKAVRDVIRYRAKIAQQRVSEIARLGNVLQDAGIKIDSVASSIVTKSGRAMIEALIDGERRGAVLADLAKGKMRSKIPDLSMALEGRFGEHHAMLCRLHLDHLDHLDGMLAALDAQVEKMMQPFRAARDLLITIPGLGPLAAAAVISEIGADVRGYFPDAAHLASWAGLCPGNHESAGKRHSGKRRPGNQHLQPVLVEAAWAAVRHEGYLKALYHRHVMKWGGYRSPVAKNKAIIVVAHAILVIIWHVLATGKPYGDLGADYFTRRQDPGRETRRLIAKLEALGHRVTIEDPAA

SEQ ID NO: 252955 - protein, 387 aa, unidentified
MGVAAKPTTKHGDKHMKTVIKYVGLDVHKDTTVIAVADGGRDGEVRLYGEISSDLGALEKVLRKLGGEAVTLRVVYEAGPTGFVVYRRLGQLGIECIVVAPTKTPVEKGPRQKTDRRDALMLARLHRAGELTAIHVPDAVDESVRDLTRARADAVHDLTRARQRLKSFLLRQGYRYSGKANWSAAHQRYLRELVLPLPALKAVLEEYLLAIDQATQRVTRLEDLLAVQVPLWRMYPAVEALMGLRGFQLTAAAVLVAELGDVRRFQHPRHLMAFLGLIPRENSTGTARRQGSITKAGNAHARWILVEAVQHAFLPPKVSAPLAVRQAEQRPAFRELSWKVQVRLHKRGWHLLHRGVMKPKVTVALARELAGFVWDLLRQVPPPNAQA

SEQ ID NO: 252956 - protein, 351 aa, unidentified
MSHKLNSAIAVIGIDIGKNSFHVVGHDKRGAIVLRQKWSRGQVEARLANLPPCLIGMEACVGAHHLSRKLQMLGHDARLMPAKYVRPYSKGQKNDFRDAEAITEAVQRPTMKFVATKTAEQLDLQALHRVRERLVSQRTGIINQIRAFLLERGVAVRQGLRFLRAELPRILAAPCDALSPRILRVIEDLAGDWRRLDQRIEGLSSEIEALARQDKGCERLMTVPGIGPIISSAMVAAIGTGDAFSKGRDFGAWLGLVPKQISTGDRTILGSISKRGNRYLRALFVQAAWVVLVKVGPKHWERYGLRSWIEAAKKRLHHNVLAIALANKLARIAWSVLAHGRTFEVSKIQAA

SEQ ID NO: 252957 - protein, 433 aa, unidentified
MQDVEDEPLFTERVAGLDIAKAEVEVTIRVPGDTRPDRRQQETMTFGTTRRQLLSLADWLRCWGVAKIGMEATGDYWKPVFFLLESRGFDCDLYNAAQVKALPGRPKTDRADSIWLARITERGMISSSFVPPEPIRRLRTHTRYRRHLTQARTAEKQRVEKLLEDGHLKLSSVISDIHGVSGRDMLSALVTGERDPKVLAQLARGTMRAKIKRLEEALECAFFTAEHAAVLAMMLTTIDHYSAQIDNLTAKIEALAEPYLHQIRQLDEIDGVGQVCAQDIIAEIGADMTVFPTAAHLVSWARWSPQVKQSAGKRKGSNATGRGNPYLSAALGEVSISAGRTQSFLGARYRRLARRMPKKKALVATGNSALTIIYALLSDPDARYTDLGADYYEQRMHARRQARNHVRSLERLGYKVTIQAINTDTGELQAAAS

SEQ ID NO: 252958 - protein, 399 aa, unidentified
MTNLKARIAGIDSHKDTIHVAVITSTGVEVTDKEFPTTQIGYRQVIAWLFTHGPIGQVGIEGTSSYGIGVTSTLRRNGITVIEVNRTRPAERRKQGKTDRMDAYRAARSVLSGEATTAPKSDSIEALRAINVARRSASKAQQAAWRQIGCILINASPKLRDKYRNLPRIKMVTLLAATRPDMVHDKHDALTLHALRSLARRHLHLTEELGDLETHMAMIATAANPGLMSIKGVGPVIATQLLITAGNNPDRLRSSSSFAALCGTAPIPVSSGRTDRHRLSRGGDRQANAALHHIAKVRLTCDPRTRAYRDTHLAKGWSKAAVFRALKRAIVREVYQALLGNCLVPNYTDLRPARQAKNITLDAVATHFNLWPAQISTLELGKRRDDTLAKTYREWLQTA

SEQ ID NO: 252959 - protein, 443 aa, unidentified
MKKKRTYKSVAVQRVAAAQLGADFAGARCIVGIDVAKKDMFASLSTAAGETRSIVRFEHPAETRLFVDLCRHLRDAGATVEVAMESTGTYGDAMRAQFLAGGFPVFQVNAKRCHDAAIVLDGVPSSHDRKSAVLIAWLHAQRVSREWRAMTDPERAARAALTRRELYADPFERNRGRLEALLARHWPELPEQLALDSIGLLTLVAKYPSPAEVHAHRDDATDLLRQATHGALRSEKRRDVIASAAMTLGQTMTSEEEFLLRELAAQSLELVRALERIDSEIADIVKGDTVMQRLATALGSVSAAAIVAHLGDPSSYESAASFVKAAGLNLKERSSGKHVGQLKITKRGPARVRVYLYFAALRLIHTDRIVKAWHRRRGNHGVKRGMSGVVAVMRKLARALPHIANGATFDSAKLFDKRRLGLAETAAPSGASPVAANRMEVSA

SEQ ID NO: 252960 - protein, 341 aa, unidentified
MSKRSVPSCAVLYCGIDVSAATLAVAVQPEGCDHFEQCTLPNTVAGHRKLIAWLGRWKAPVRVSLESTGIYSLDVAMALDAAAGIAVAVLNPRRFHQFAESLRRSRNDAADAVALAEYSRRMRFEAWSRPSPEVLALRGISRHLATLSEEHARLKNRLHAACGSASMPHCVREDLRRALARVEKSLQRMHREAVAAIRKDDGLQQKFQHLIGIKGIGEASAVQLLGELAGLDPAMTVRQWVAQSGLDPVHQISGTSVHKQSRISRRGNPRLRRALYMPALSASRFDPHFKAFYTLLLARNKTKLQALTAVARKLLHAIFGIFKTGTKFSGAKLFPHLIPTS

SEQ ID NO: 252961 - protein, 343 aa, unidentified
MKKLYCGIDLHARILQICIIDAQLKKVLERKLPCDLALLLELLKPFKKRVSIAIESTFNWYWLVDGLQDAGYEVHLAHALGLSRITKAKVKTDRRDAFTLAKYLLNGDLPEAYIYPKESRPIRDLVRQRQRLVDMRSREYAALRLRLYQHGFLTHSRNGCKTSDPEDFSSVFADCRLSVLLTQERERIQLLSSQIDDLEDKILDAAGRDPSYLRLTQIPGFGKALSAIVFYETGDARRFRSPRHYASYCRLVPGAAESAGHSKRGRSPKEGNHRLKCAYTQAAVHAARCYPKIRSLYDRTAAKHPGRGSKLIAMNVVAHKLSTAAFKMLTEGTDYNETLIFGN

SEQ ID NO: 252962 - protein, 366 aa, unidentified
MKKISTVQVLGNEILQEQKQTIGVDLGDRWSFYCVLEEAGKIILEQKVATTPEAMKQTFAKIPRSLIALETGTHSPWASRLLTELGHEVLVAHAQKVELITKSNRKDDRHDARTLARLARIDPELLGPVRHRSAKAQIHLTVIRARAELVSARTALVNAARGLVKSYGQRLPKCGTQQVNRELAAGLSTELREVLEPLLQEIESLNERIPEYDERMEKIAQEVYPEVSLLKQVKGVGTQIALTYVLTIEDPYRFEKSREVGCFLGLKPGRRNSGNSEPQKKISKEGDRYLRTMMVQGAHYILGPFGEDSDLRRWGLKLAERGGKNAKKRAVVAVARKLAVLLHRLWVGGEVYEPLRNSQKAMRAVA

SEQ ID NO: 252963 - protein, 407 aa, unidentified
MDVLHPKCAGLDVHQQTVVACARTGAGKAVTYDVRTFGTTTAELLALSDWLTAHGCTHVAMESSGVYWKPVWHVLEGHFELVLANAMHIRNIPGRKSDVNDATWIADLLAHGLIRGSFVPPEPIQELRDLTRTRKQLVREIAQHTLRIQKTLENANINLTAVLADVLGSSGRAILRALARGERDPERLAELASDRVKASRAELVAALHGRVPPHHRFMLTLHLTQIEALEAAVREVEARLGDALAPFRAALDRLITMPGVSETVARVIVAEIGFDMTRFPSAGPLVSWAGLCPRLHESAGKRLSNRTRSSNPWLKTTLVQAAWAAARKKDSYCRAQFLRIKSRRGPKKAVLAVAASMLTAAYYMLKHGVDYRDLGADHFDRRDKAKLAKRLIARLHDLGLTVEVRAA

SEQ ID NO: 252964 - protein, 367 aa, unidentified
MKQFNKIFVGMDVHKESIDITLAEQGGELRRFGSVGGDRLSLLKAVRKLTSRGRALVFVYEAGPCGFWIYREITALGHACLVVSPSLIPQRAGDHVKTDRRDSENLARLARAGELTGVHVPDARDEAVRDLVRARDDAVIAQRRARQQLKALLLRNEIRYVGKTSWTPAHCRWLAELKLAQPAQQIAFQEYVDAITVATARIARFEQAMRAEVGIWRFAPAVAALQAMRGIQFVHAMTLVAELGDLTRFASARQLMAYLGLVPSEDSSGQRHRQGSITKAGNAYARRALVEAAWAYRHPARLTRIIALRQGTLPKQACDIAWKAQLRLCAKYRRLRARRVLETKIIVALARELSGFVWAIGQSVKPL

SEQ ID NO: 252965 - protein, 370 aa, unidentified
MSEITRVLIARVGVDLAKRVIQVHAVDTTGRRVVARSLKRDQFLAWCAQLPAGCLVAMETCSSAHHWARKLRALGLDARLIAANFVSPYRMEGKSGKNDMTDAAAICEAASRPSMRFVAIKSCEQQGVMSLHRVREGLKEERTACINRIRGVLAEFGLVFGQSPKALRVVLAEVIEDASNELSTLARRVLQRAFDHWRELDEHMRWCDQQVGQHVRSSATARRAATITGIGELGASAFIAAVGDFRQFRSAHQFGAWLGLVPSQNSSGGKTSLGRITKRGDDYLRTLMIQGAKSAVMSAAKRDDPISTWLVQLTARVGWQKACVAMANKNARILWAVMTRDQGFDPRHVSVKPQAKRPAHERTAPAATPA

SEQ ID NO: 252966 - protein, 400 aa, unidentified
MADETGVGVYLGLDVGKGEHHATAVNLAGKKVFDKQLPNNELKLRELFDKLRAKHGTVLVVVDQPASIGALPLAVARNAGCQVAYLPGLTMRRIADLYPGEAKTDARDAFVIADAARTMPHTLRTIDPDDETVAELAMIAGFDDDLAGESTRTANRLRGLLTQIHPSLERVLGPRIQHPAVLRLLDQFGSPAQIRKAGRRRLITLIRPKAPRMAERLVEDIFTALDEQTVVVPGTDAAALIVPSLASSLRSVLDQRKLLAARIEELLEAHPLSQVLISMPGIGVRTAARILIDVGDGSGFATAGHLAAYAGLAPVTRNSGSSIRGEHPSKRGNKQLKRAFYLAAFASLSQPESRAYYDRKRREGKHHTAALIALARRRIDVLFAMLRDGTFYQPPTPATA

SEQ ID NO: 252967 - protein, 414 aa, unidentified
MGIPRWVGRAVGLDVHREFCEVAICEEGVVRSAGRVPATPEGVRSLADSLLPSDRVALEVTGSCWEVTRILEPHVNRVVVVSPDDTGITSARAKTDKLDARTLAGLLWKGELEAVWMPDERCRILRRRLARREQLVRSRTRAKNEIHASLQRRLQPKPPCSDLFGVKGRAWLASLELPPEERESVDAGMRQVEFLDAEIAAVEKLIAQQALSWPEIRRLMTVPGVNLICAASFIAAVGNPNRFLSSRKLVAYLGLDPRVKQSGEGPARSGRISKRGSPSARWALVEAAWTAVLQPGPLHAFYVRTKNRRGHGKAIVATARKLAVLFWCMLTRGEDYAHQQPSLTRKKLRRLEITAGSPKYTRRAAGIWATNDLMREAELELAQQAETSYNRLVRDQLAGAPARKAGASVTLERA

SEQ ID NO: 252968 - protein, 343 aa, unidentified
MKITITWRFIVGIDISKNQLDCFLLDRQTDLGYTDQVPNTDKGFEQLASWLADHGADRSQTKLISEHTGRYGEHLLRWSTSNQWPHAVVKTTALKKVGNEHHRKTDAFDAEDLADYGVRFSDKLSLTKAPKPAIGQIKRLQAERRAMVDRRAALRSKLTEADIHDADMERVMDMWTQQIALLTEHITEIEARTKELINQDTAIKNRYRIMRTAPGIGKVLGPLWLSLFAGRQTLDARKISSRFGFAPHPHQSGSSVKRAEKSSGFGNAEVRRVMHQAALSVKTHYPHYREYYQEKRAEGKEHLLVINNIINKLIRLYCAMWNNRAEYDPGYIQKNEHKWKKSA

SEQ ID NO: 252969 - protein, 346 aa, unidentified
MEIIRVGVDLAKNVYQVHGVDRKDKPVWRRQLSRQNWLAAIVKKVEPGSEIGIEACAGAHHWARELQARGYVVKMVAPQFVKPYVKSNKSDCNDAEAICEAMSRPTMRFVSIKSVEQQDIQAMHRIREELVGARTAKSNQIRGLVAEYGLVAPQSLAKLRAAIPQWLEDAENGLTNRFRGLLAGVWADLLALERRVKELDDEIGALAKSHPAARRLQKLRGVGPMTATALIATLGSGEQFCKGRDFSVSLGLTPRQHSTGGKQRLLGISKRGDPYLRKLLVHGARSAIHAAKGKDDPLSQWLMRLTSRRHMNVATVALANKTARMAWSMIRNELDYEPQRAASPLG

SEQ ID NO: 252970 - protein, 430 aa, unidentified
MKSNTQNAKIEAITEKTLVLGIDVGSETHYARAFDYRGVEYSKKPFKFSNTEVGFVTFKAWVLDIKEKHGKDKVIPGMEPTGHYWFNLGKFLQDNEMKPVLVNPHHVKKSKELDDNHPTKNDRKDPKVIAGLVREGRYMIPYLPDGVYADLRTASNIRFQLQAELTRIQNRINRWFNIYFPEYKTVYGKPDAKSGILILKEAPLPEDILTLGIDGVNQIWRDAKLRAVGKTRAKTLIEAAEHSVGSKEGVVSARMEIRMLLEDYESRNIRLQEVMALIEELVNQIPMAEKLLEIKGVGIKTVSGFLAEVGDIRRFNNPKELQKLAGLALVENSSGKHKGKTTISRRGRKRLRYLLFEVAMSLVAKNPEFRELHNYYTTRRLNPLKKMQSLMAIAAKLLRVFYAILTKNVGYDPKKMVNDIRRPATYAQAA

SEQ ID NO: 252971 - protein, 342 aa, unidentified
MENVSIIGLDLAKNVFQAHGARADGSTVFRKKISRAKLLSFFASVPVCVVAMEACASAHYWARQIGALGHQVRLIAPIYVKPFVKRNKNDAADAEAIAEAACRPTMRFVAVKSVEKQASGMAFKTRDLLVRQRTQTINALRGHMAEYGVVAPQGPVHVERLAEALRDPSGGLPAPVISLCQLLLANIAALAEQISLLEQELRERARRDQTAKRLMTIPGVGVICAVAMEALAPPLEGFAKGRDFAAWLGLTPRQNSSGGKTRLGGTSKMGQRDLRRLLVSGAMTVVRWASRKGAPEGSWLGRMLKKKPRLVVAVALANRTARIAWALMTKGGVYQAPDAVRA

SEQ ID NO: 252972 - protein, 348 aa, unidentified
MRIIGCDLHARQQTLAMLDTTTGEVANLTLLHEGNQVREFYSTLPRPVLVGIEAGGSMPWFLNLMEELGIECRVGHPAQIRAAEPRKQKHDRRDAELILKLLAENRFPAIWLPSQELLDLRALLLHRHQWVRMRTRIQNALQAIALAHGLRRGPSLWSNDGQEKIACLPLMPHTACRRSALQGMYWSIESEINQLTQQVAEQAESRCAARRLMTHPGVGPVTALATEVFLGDPRRFADSKALTSYVGIIPREYSSGGQQRLGGITKQGSPLLRFLWGEAGAHAVRRDPELKRFYRRKLVQKGLGRARVAAARKLGIRLWIMLRDEIDYPEFCRRGQRQPSDAACGGDA

SEQ ID NO: 252973 - protein, 385 aa, unidentified
MTATTRTFDPTALENTLCLSLELGEGRWKVTSSAGFGGGIVRWSVAARDGEALLRRIAWAKERLGEDAGARVVSCYEAGRDGFWLHRFLVAHGVENLVVDSSSIEVSRRKRRAKTDRLDGEALLDLLQRHLAGGRKKVWSVVRVPTVEQEDQRHLHRELQSAKRDRTRVTNRMKGLVANHGLTLDLKREVPAQLAALYQWDGSSLPAGLRARLAREWERVVFYTELIEGLEAERRELFRHSPDPAVEKARQMNLLRGIGMNSAWLYAMELFGWREFRNRKEVGAIVGLAPTPNESGQQERERGMSKAGNRHVRAMAIEIAWGWLRFQPNSELSKWYQRRFGSGSKRVRKVGIVALARKLLIELWRFLETGVLPAGAELKTDVRIR

SEQ ID NO: 252974 - protein, 412 aa, unidentified
MLFVGDDWAEDHHDIEIVDETGRRVARQRLPEGLSGVSRLHALIAAAMPAEWAELETGEAAGRVKIGIETDRGPWVAALVAAGYEVFAINPMSTARYRERHCTSGAKSDAGDAHVLAEIVRLDRAHHRPVAVDSEAGEAMKLVARSHQTMIWERTRHVLRLRSALREYFPAALTALGDLDEPDTLALLTAAPDPDRAARLSTSRIAAALQRANRRNVDARAAEIQAAMRAPALRQPPAVQAAFTVIAAGEVRLITALNREVDALGEVVAEHFGRHPDADIYASQPGLGVILGARVLAEFGDDPHCFTDAKARKNYAGTSPITRASGTKKKVIARHAKNDRLADALQQWAFGSLRGSPGARAYYDALRARRIGHQAALRQLANRHVGILHGCLKTRSLYNENTAWPDQNTAAA

SEQ ID NO: 252975 - protein, 414 aa, unidentified
MNGDVVHSRCCGVDVHKDSIAACMRWIDDNGNVAKESRKFGTTTQEINAFADWLRSRDIRLVAMESTGVYWRPVWNLLEGQFEVKLANSEHIRNIPGRKTDRKDGEWIAKLLQHDLVPTSFIPPKEIRELRDLTRSRTKLVHGRSAVANRVQKVLEDANIKLASVATDILGHSGRAMLDAMVQGQSDVAVLADMARGRMREKIPRLRLALEGHITAHHRMLLRELLDQIDFLDGKIFALEGEIWQRSKQFEEPIRLWSAIPGVDRLSAATLVAEIGVDMRQFPSAGQLASWAGLCPGNNESGGKRKSSKLRHGNPWLRSLLCQVAWAASRTKKTYLSAQFHRLAARRGGKRANIAVAHTILVIAYHILKEKRPYQELGGDYFDRIRAEGLKRYYVRRLQGLGMEVTLTPVAVSS

SEQ ID NO: 252976 - protein, 332 aa, unidentified
METKETIGIDVSKKTLDVHIHNKKMHRVFENCPKDIAKMIKWVLKNTDFDREEMMFTFEHTGLYSLQLSATLSELGMRYVAIPGLEIKRSLGLSRGKDDKVDAAKIALYAYRLREELESCQMPSEDLQSLKRLLSLRNRLVKQRAGYKASLKEEKRVLKQKDNKILLNAQEEMIGHFSKKIKKVEKEMDRIIKENRELDKIYGLVTSIKGVGPQTALYMIAYTQGFTKFENWRKFASYCGTAPFPNSSGTSIRGKTKVSHLANKKIKSLLDQCSKTALQHNPEIRQYYRRRVDEQGKNEMSTINVIRNKLLARIFAVVKRGTPYVDTLKYAA

SEQ ID NO: 252977 - protein, 435 aa, unidentified
MDEVTDEPLYRDRVCGIDIGKAGLVATIRVPSERNPARRAAETRSFGTTRREVLALADWLRSWQVPAVVMEATGDYWKGPFYRLEAEGLECVLADAKQVKNLPGRPKRDPADSRWLAACFERGAITPCFVATPEFRIIRLHTRYRRDLTEERTREKQRAEKLLESAAIKISSVVTDLHGVTGRDIMDRLIAGERNPKILAQLARRRARRKISQLEEALDGAEFFTTAHAVLLAKVLERIDRLAADIDQLTVVIERLLAPYEEQLQQAESMPGWGRRAAQDTLAETGPDMGRFATGAHLASWAGRAPLDHQSGARAGRAKAKKGNRYLGAVTGETAVAAGRTQTREGVRHRRLARRRGAAKACVATGNTQLKVYHKLLSNPGMRYVDLGPDYYERQRGIRRQVAHHIGKLGALGFEVTLCRIPEPEGPMGSQSSMI

SEQ ID NO: 252978 - protein, 316 aa, unidentified
MKYYTSTTKFNCGIDLHARQMYVCVMDRDGKKLVHTNIRNNDFEFFLKLVAPYRHDLTVCAECMFGWYWLADACQAAGLHFVLAHALYLKAIHGGKNKNDRIDSEKLAHLLRTNFIPPAYVYPADKRPLRALLRQRILYVWRRSELLSRIQSHQLAYNRPTCRQNLYNRQSWTEQLLASEPDPVRQLALQNDLALIGHYDAQLASLEKALLKLTKQTASRDFNLLQTTPGIGDYLGLTILHEIGDIARFPTVKDFLSYCRLVKGTVASAGKLKGLRGAKLGNPYLRWAFGEAAVIAKRDGVLGPLAQRLEARLGEL

SEQ ID NO: 252979 - protein, 385 aa, unidentified
MIYVGIDIAKLNHFASAISSDGEELIKPFKFTNDNDGFQLLISKLAPLDKDSLIIGLESTAHYGDNLVRYLVAKNYKVCVLNPIKTSTMRKNNIRKTKTDKVDTYIICKTLMMQESLRFVTFYDLDLMDLKALGRFRQKTIKQRTRLKIQLTSYVDEIFPELQYFFKSGLHQKSVYALLKEAPTPEAIASMHMTHLLKVNSHGRFDKKMAQQLRVLAQKSIGASDSSLSIQVTHTIQQIELLDSQLERVEAEMTEIMKFNDSVIMTIPGIGYINGGMILGEIGDIHRFSSPNKLLAYAGLDPSVYQSRNFQAKKTRMSKRGSKVLRYALVNAAHNVVKNNATFKAYYDAKMAEGRTHYNALGHCAGKLVRIIWKMMTDNLEFNLE

SEQ ID NO: 252980 - protein, 315 aa, unidentified
MAEQEVYVGVDVSKERLDVALWPGDEFFSVTNDARGVRSLVERLKRLKCGRVVAESTGGYELRLTAALCAERLPLVVANPGRVRSFAHGLGQLAKSDRLDARALARYAANPELKVRQLPDQETRNLRELCARRDELVEMLGAEQNRLEHASAALRHEINGHIDFLRKRIKRADHDIDQAVKRSAVWRERSELLRSVPGVGKVLCASLLARLPELGRLNRREIASLVGVAPLTRQSGKSRRHEAIGAGRPVLRRTLYMSALCGIRRHPVLRDQYQRLRAAGKPGKVALVAAMRKLIVILNAMIKNQKTPWRSSCVA

SEQ ID NO: 252981 - protein, 363 aa, unidentified
MNATAASPIVGVDLAKSVFQLAVAEGSWRVVESHRLTRTQFERWFVNRRVGLVVMEACGSAHHWARWLNGLGIEVRLLPAAYIRAYVKRNKTDAADACALLEAARCAEIVPVRVKSIEQQALQGLHRTRSLWMGTRTSRINALRGFCREFGIVIAQGSRLGVEQIGRVLADPHAAVPTLIRGTLSLLVEEVRLLEVRIAQLERELTALARTSPACTTLQSIPGVGLLTATAMVAATSGAVSHFHDARHFASWFGLTPKEHSSGSARHLGRISKRGDRYLRMLLTHGARSVLRAAGAAVRAGKSVDGLRQWALTVQSRSNHNKATCALANKLARICYATLRDGEPYGAARLNKKVTRTAFALPT

SEQ ID NO: 252982 - protein, 409 aa, unidentified
MDRQLERCCGLDVHKETIAACVRIGGWRGPAEQHVQTFRTTAADLVVLRDWLAAHGVTHVAMESTGVYWKPVFYALESDFTCLLVNAAHIKQVPGRKTDIHDCVWIAQLLEHGLLRGSFVPPAPIREVRDLTRYRKALIQDRTRVANRLHKALEDAGVKLATVASDILGVSGRAMLEALAQGTTDPTVLADLARGRLRGKLPALRVALAGRFRTHHAFLVGHLLTHLDYLDEAIGTLSTEIERHLAPFADQLTRLDSIPGINRRTAEVIIAEIGVDMSAFPTAAHLASWAALCPGNNESAGKHKSGKTRKGNHWLRTALIEASAGASRAKDSALQARFRRVLRHRGPKKAVVALAHTLLRIVYHVLAQGTTYQEHGGDYYDRRHTQRLTRRAIRLLEGQGYRVTLEPAA

SEQ ID NO: 252983 - protein, 352 aa, unidentified
MDDPILAIDLGKFNSVCCWYEPASKAATFRSARTTRAELERALTQQSVACVVIEACSPAGWISDACDELGLRCLVANTTGAAWQWKNVKRKTDRDDALKLARLAAIGELATVALPPRRIRQWKSLIGLRKRLVGERGRGQNRIRGLFVGQGLAAPVGNKAWTEVGLYGLDALAKPLTECRPEEFWRGELTLLLARHRFLDGQIHAAESALDQWAKSSPAVQLLLSVPGVGVRTAEVIATHLHERRRFKNAEEVSAYAGLVPRQYQSGICDRRGRITKRGPKLLRAAMVECAWCSLRYNRWALATWRRLTGNGLSKKKAVIALARKLLIRCWALLKSGQPWRNPLPARTPLAG

SEQ ID NO: 252984 - protein, 458 aa, unidentified
MKTRKGKRTKGIEEAHPFAGMSQVNENAAGVDIGAVEIVACVAGDETTQIVKAFGNYTVDLQAIGRWLSEHHVKTVAMESTGVYWIPLFEELERQGFECLLISSRSLRRVPGRKSDIMDAQWIQTLHSYGLLESSFRPQADLVALRTLLRHRAQLLEHRAPHIQHMQKALLQMNVQLSQALSDVTGETGLRIIRAIAAGERDPEKLAAMRDRNCKKSAEEIGRALTGTWRAEHLFVLEQSLEVYDFYTKQVDACDAEIDRMYTLARPDWEDGELKPLSVKKRSSHSKNAPQSKEEIRKHLKRISGVDLSVVDGFGVSLAQTVITEVGTDMGKFPTEKNFCSWLGLAPKHEISGGKVLKNKTLKTKNRAGQAFRMAAQSVKRADCVFGSFYRRLHGRLDKAQATVATAHMIARVVYRMLKYKVEFETIDIEEYEAKYKEQQIKYMKKKAAKLGFQLIPA

SEQ ID NO: 252985 - protein, 328 aa, unidentified
MSDQYIGIDLHKAFFQACAVSPTGDRLWEGRFPRTPAGVEALTARCTGQTALAVEASTPTWHFADGVVDRVGELRIVDPLKTKLKAGYAAKTDRLDARRLADALRRDSVVGIYYPPLAIRELRELCRSRHALVQVRTALINRLRAVLLRQGIADARRLAKTTDDGWLTGLTLPPRAAASIATLRCVLAVVRTEAARAETEVRRLTDADAIAITLQQLRGIGPVLALTIRAEVGDIHRFATGAHLASYAGLVPRVDMSAGHYRYGRITKRGSPWLRWALIEAAMHGPTRTDRIGRWGRGLAVRKGALKARVALARVLCEEIHRLWRAVR

SEQ ID NO: 252986 - protein, 400 aa, unidentified
MNTEYDVWLGLDVGKTSHHGCGLDPAGERVFDHELPQDEAALRDVITTLQDDYGRVLVVVDQPNTIGALPVAVARDCGADIAYLPGLAMRKAADLYPGQAKTDARDAFIIADTARTMPHTLRSVDRESDVLANLKVLAGTDEDLAHDITRAINRLRSLLLQIHPALERVFKGTVLTRSIVLDLLIRYRGPTGLRAAGKSGVKRWARNHTRKDPSALIDAIFDALAEQTVTVPGSEASESVVPRHAARIKALKAERKEIEAEAEELADSLPLLQVLTSMPGVGVKTASQILLAAGDFSAFKTAGHLAAYAGIAPVTRRSGTSIRGEFPSRAGNKRLKNALFHSAWVASCHDPLSKAYYDRKRAEGKRHNAAVMCLARRRLNVLFAMVKTGTFYEVKTPVAA

SEQ ID NO: 252987 - protein, 392 aa, unidentified
MSQQHCHFDASRSLTALEQDSTIIAVIEMSQSKWLVAGLVPGVERQPLKKLDAQEEGLLKLLHRWHNEAGQAGREIKRIVVAYEAGRDGFWLARWLRARDVEAYVIHPTSIAVSREHRRAKTDRLDTELLRRAFVGWLRGEKRHCSMVAIPTIEEEDARRPNRERQNLVTEQTRIVNQMKAIFARFGIRTFRPTLHKAEEKLKALRTAEGSPLPENTRTELCRHLRRLRLVREQIRAVEQERLRKLLAVPVAEKSSQAMVRLIARVVGVGIETADMLVHEVLSRRWRDRKAIARYAGLTGSPDESGKRRRERGLARAGSARVRCGMIQFAWRFLRFQKDSALAQWFAARTADRRGSTRKTMIVALARKLLIALWRFTITGEASDGIVLRPAS

SEQ ID NO: 252988 - protein, 448 aa, unidentified
MSELSRATPTEPEWVAFAAIDWANRKHFWRLLPAGSQRYEEGELDNTPEAIEVWAANLQRRFGGRSIAVCLEQSRGPLVYTLTKYPHLVLFPVHPTTAARYRETFSPSGAKSDPHDAASLLDLLVRHRESLCPLQPDTQETRLLHFLVEERRQLVDEKTRHSNRLTAALKLYFPQILHWFDDLNSPLVADLLQRWPTLEELQHAHRGTLRKFFHAHNCRSEERIQERIESIYQATPATKDASVVEAAAMSARAAMAVMATLRSNIAVFELRIAELVAAHPDREVFGSLPGAGEVLLPRLIAAFGTHRDRYQNAYEMQCYSGIAPVTEASGNSEWVHFRYACPKFLRQTFHEFAEISMRYSIWAKAYYDHMRNDQNAEHHVAVRSLAFKWIRIIYRCWKDGKPYDEEAYMETLRRRGSPLVGALAFATSIEWKTIAGFQKLSLKKHLTE

SEQ ID NO: 252989 - protein, 438 aa, unidentified
MSNKVFFNLNDLFISVGIDVGADFSWMSIALPNQQFVGKPYKILHNSIDSLTTAVSKIKEAEELYSLESRIFLESTGIYHYPLFCYLRDKGFNCSVINPIITKNSTNINIRKVHNDRFDSKKAALVGLKPDLKVSLMPSDLALNCRNLCREYYDLMDNRSAYVNKLQGELRMAFPQYLGIFSKVTINTSLTLLETYTSPSAFLKADKQEIIDIIKSTARFGLTYAQNKYNAIIQAATDANQFGYIIDSNIKRIRLYISFIRKYDEEINSILESLHELVDANEDSDFVKQIHLIETFKGAGFLSAVSIMGEIGDFSAFSKPKQLFAYFGLDPSVKQSGKFEGTKVQMSKRGSAIARRVIHTLTLQSISISRNREAKNPVLREYYLKKCDSKPRLVAMGAVSHKVCNMIFAILRDNKPFKIIAPQEHIKQYNSAKCDIAA

SEQ ID NO: 252990 - protein, 342 aa, unidentified
MNVKQQIQQTFIGTDVSKLTLDVSIITVDGLNQHGQFENNIKGFKQLQTWLLSTNLFSYNNALFCMEHTGIYTRQFVQFLLMHEAKVWMESALHLKRSMGMTRGKNDKIDSYRIARYAMTNVDNVKHVTLSSKTLLLIKDLMSNRDRINKSYQSIKVSIREMERVDKATGKELVKLNKAAINGLQKSKTAIEKRMMELINQDEELKNIFELVTSIKGVGEILATELMVYTHAFTRMNNAKQLACYCGVAPFTHTSGTSVKGRTGTSNFANMNLKSTLHMAALSSTRYVPDIKQYYERRVAEGKSKMSVLNAVRNKILQRVIAVVNRGTPYVENYLEINLEYS

SEQ ID NO: 252991 - protein, 352 aa, unidentified
MHMIAFDSHKHYTVASVQSINGHIIKEARIDHGRGNIVRFLAQWDKGSPVAVETIGNWYWIVEEIEHAQMHPRLVHARKAKLMLGMINKTDKLDARGLNRLQQTGTLPTVWIPPLEIRDKRELPRTRMVFAHQRTKLKNRIHSVIDKYGLQNKFTDISDIFGKRGRQLIQESLRLLPEQTRYAMETLLHHLDAVERQIEEIEKRMKEVFQPDEETRLLMTMPGIGFILSVVIYLEVGDVSRFSGPERLASYSGTVPRVHASGEKVRYGRLRPDTNRYLKWAFCEAGSSIAMNRNKWPHRHISKVYARVRSRQGHAKAVGAVARHLAEATYWILTRKEPYRERGVSRVSLAEA

SEQ ID NO: 252992 - protein, 353 aa, unidentified
MKEQTSNERVVKVVGIDLAKRSFHVHGVDERGQRVFGKTFNRMRLKEFIANLPACTVAMEACGSAHDWARLFRTYGHEVRLIAPQFVKPFVKSNKNDAVDAEAICEAAQRPAMRFVAIKSVEQQDIQAIHRMRSLVVERRTAQVNQIRGLLLEYGIEIPQGRAAVGQRLPAILEDADNGLSDCFRAELQELAEELRHLDARVAHYDEQIEAMARGDRRVQCLMTIPGLGAKGATALVAAVGEDPRLFKSGRGVAAWLGLVPRQQSTGGRDRLLGISKRGDVYLRQLLIHGARAVLRWVERKDDPTSRWAMALKGRRHTNVAAVALANKIARIAYAVLTTGQPYDPAMGAWVKP

SEQ ID NO: 252993 - protein, 356 aa, unidentified
MSKYIGFDMDSKKTVCCVVEAGQKDKYRTIGPDVKSMRKFLKAEKQGGYRVEIVFEISGQAGFIYDSLIDYVDDIKVANPSKMTWIYRTSKKNDRIDARKMAVLLSIGEIPEVYMPSREVRQWRETILHRKKIVCKVVQVKNRIRATFKSQGYSKAVYKGSWWKKANRFWMRGVCEASTGNSDLWHIHVSNLLDELELLDAQLKRVTRYLDGELDRQPGGKLLMSIPGVGPRTSEAVLAYTDNVERFGNYKQYCSYFGLTPKLDESGDSRRIGHISKRGPSVVRWVICESSWKVIRKSKSLREFYERVMAGQQGRKKIAIIAVARKLLSIMRAMMLTGELFNEELVNKADELIKTA

SEQ ID NO: 252994 - protein, 412 aa, unidentified
MSVVQFTQVLSRGCGMDIHKKVVVATVQGEGICKETRSFDTFTRSLTQLREWLVSLGITHVAMESTGVYWKPIYNVFEGFIPHIWIVNARHIKNVPGHKTDKNDSEWICQLLMAGLLKPSFIPPKAQRELRDLTRYRRKLIQSVSANKNRIIRILEDGNIKLSSVLSDTSGATAVKLIDMLCDGKQITLSDIESVRHGRCQHTKEEMLEACTGCLDEHKVYMLGKIRECNASLKEDILDFDKRIKDVLSSYHDAIERMCEIPGIQNRVCEDLVAEIGLDMSKFPTSAHLCSWAGMCPGNNESAGKKKSGRTNHGDKQVKETLVEAAWAASRAKGTFFMERFNRLAPRKGSKKALIAVGHSLLKCIHYVLSTGGHYKELGDNYVPNKKEQKRKEYLKKELQKLGYSVKLSKED

SEQ ID NO: 252995 - protein, 355 aa, unidentified
MTQQYSTTCDYDIFIGIDVDKRSFALTAVDHGTMKKSCKLPSDPDQLLRTIKHRYDGQRVLCVYEAGPTGYHLYDYLMERNQPCLMVSPLSIPKPPNSRVKTNRIDSEKLAVELRGGKLVSIRVPVGPYRELRHLITARANYARSRMIARQRIKGLLLFAHLSTGLPENAENWCRRHIEELEQLTCTPAVRLRLNMLLADMKHAREQTLSVIKQLKAFCTVHQDIDRYRNYLQSISGIGFITAMTTLGRIGDPRYLRNVREGGAFMGLVPCEHSTGETICRGSITHLGNRTARSLLIEAAWVAIRQDAELDQFYHRVKQRHHPTVAARKAIVAVARKLTARIYCVLKEQRPYHIH

SEQ ID NO: 252996 - protein, 377 aa, unidentified
MQRKELSFSGQKIFIGIDVHKDSWRVATVPEVGVVKGHSQKPSAKELLDFLKKHYPDGEYHAVYESGFSGFSTYYALQEVGIDCIVIHAADVPTTQYEETMKTDKIDAVKLVKSLKAGLLTGIYIHKRDDIDARAVVRLRKTIQKQLGGYKSRVKHLLHSNGVAFPERFSTPGTHWSKAFINWLKQEVSLLSSTRISLDLLIVQVESIRHTLLMATRKVRELSRSERYRHDYELLTSVPGIGISVAMALLTEIGDFNRFRNEREFASYLGLVPTSHSSGGKVAYGEKTFRGNKKLGPQIVEASWISIYRDRGLGCAYVNYKKRMEPQEAIIRVARKLSNIIFSVLKTGKKYESYQWDEIEKHTDKQATSKKTTPVHS

SEQ ID NO: 252997 - protein, 327 aa, unidentified
MEQVTTIGLDIAKSIFQVHGVDATGEVVLRRRLTRGRVLLFFEKLAPCLVGMEACASSHHWARELRKLGHDVRLMPPSYVKPYVKRQKNDTADAEAICEAVTRPTMRFVEVKTTEQQSVMVLHGTRSMLMRQRIQLSNVIRGHMAEFGVVAPIGREGLLALIDTLHEETDDRVPAEARHCLQMLAAQLRLVNAQILENDRRIRLSARATDVGRRLMGIPGVGPVLASAFVATVPDPHAFRSGRNLAAWIGLVPRQNSSGGKERLGGITKQGNRYLRQLLFVGAMAVIRYAERHGTRRPWLVQLLARRTTKVAAAALANKPHGWFGPS

SEQ ID NO: 252998 - protein, 394 aa, unidentified
MRFAGIDIASETHVVAIVNAEGAVELKATSFPEDATGYQKVLALLGNPNEVLIAMEATGHYWKNLFAVLAAAGHSIALINPLRTHRFAGVDLERTKTDAIDALGIARFAAEKRPSATPLPDTLAEELRELVHLRERLLQDFGDRVRQLHRLVDLGFPEFTRYVRTLDSELAVAILRDYPTAAAYRGVSVRRLAGLRYDGRHQVGLDLARTLIDAARRSVGQHHSATYRLQIRYACDDLDVLRHRLRDIDRDIEGKLREHEVGRLLTTIDGIGPQTAACLIAELGDPAHFRNAAALAAYVGTIPGLKQSGKRRTPHAGLTPVGNARLRAALWMPTLTAVRFNPWLRAHYQRLRARGKLPKVALVACMHKLLLAIYSVAKHRRAFIAQLPKPSAVR

SEQ ID NO: 252999 - protein, 316 aa, unidentified
MTSSNQKHYVGIDISKPILDVMVLPQKKYVQIDNSQAGIKKLFKILQDYSNPHVVLEATGGYEKLLVNHLHTNEIKVSVVNPRQVRDFAKASGKLAKTDKIDAFIIALFGQKMEPKPATQKTENQQKLAELHARRKQLVDMIVMEKNRLDKTPLHSKKSIQRIIKALEKELETINQEISEMIMNDPEYAQKLKLLRTVKGVGAVIAAGILAHLPELGQLDEKQIVSLSGLAPFNCDSGNMRGKRVIWGGRAPVRCILFMATIVAIRHNKQIKPFYDRLCAAGKPKMVAITACMRKLLIIMNAMLKNNQPFRNVSPI

SEQ ID NO: 253000 - protein, 358 aa, unidentified
MKTHRVQDFVIKGKEIFVGLEDSKRTWKIAVRCERMLIHEVSMEARYPALIGYLRNKFPECAIHLIYEAGFKGFDLYDRLTGEGIDCVVIPPHMVTEPKVNRVKTDKRDAKRLAYVLENQDYKDACHVPDKERREDRQISRSLIAVQKDIIRTRNRIRGFLKYYGIEVPFAGKENWGRKEFQALRELPISEPLGIGLKVFLSQLEQLWDHQTTLRDYLRDLCRKERYSKAFGIAKSFPGIGWFTAIRLVLELGEDLSRFASGKKIASFVGLTSSEYTTGETERKGRITGMGSGFIRSFLIESSWAGIRKDPALLSKFMRVWRTSGMKKKAIVAVARVLIVRLRACILSGRPYMIGVVR

SEQ ID NO: 253001 - protein, 349 aa, unidentified
MDQDTTTIIGCDLGDRTSHLCLLGIDGTVLRRTKIASTRRAFHKFFTGLQSALVVLEVGTHSRWSSAVIAELGHQCLVANPRHVRLIYGGTHKSDRLDAEALARLGRLDPTLLRPIEHRGKEAHTELSSLRARDALVRSRTRLIASVRGITKSAGMRLVACDADYFTRKVTLPPALQPALGPMLESIEALSAQIKDYDTQIAQLCAQHPETRLFQQVSGVGPITALAYTLTLERPERFSSSRDAAAFVGLVPKQRQSGRHDPQLGITKAGDRFLRRLLVQCAHCILSARGRDSDLRRFGLRLAAQGGKRAKKRAVVAVARKLAVLLHRLWVSGEVYEPLRLAPEHSHAA

SEQ ID NO: 253002 - protein, 336 aa, unidentified
MFYVGLDIHAKQITVCVLDGDGKVFQRCQVRQIDQMMQVLEKLPGPCQACYEASTGYGMYFEHLSKVAQRVVVAHPGLLRLIFRSKQKNDRRDAEKLAKLLYVGQVPTVHVPSANVRAWRELITFRRRLIEKRTRAKNGIRGLLRSLGTQIPGKAGLWSKRGMAWLRQLPFANAMHALKRDLLVEEIENYSAQARRVEAELARYSAGSVAVQILRSIPGVGPRTAEAVAAFIDDPHRFPNSKRIGAYFGLVPSQDQSGSRNRLGHITREGSATVRKLLVEAVWQASRRSPTVRAYLERVQRGEKDRRKIAIVATSHYLVRVMWSMLKNGTLWQEAA

SEQ ID NO: 253003 - protein, 343 aa, unidentified
MSNTIRIGMDTSKSEFQLHGVDSQEKPVLKKKLRRAKVLGFFAKLEPTKVGIEACGASHYWARELVAIGHEVVLLPPQYVKPYVKRGKNDAADAEAICEAMSRPTMRFVPVKSQEQQAAQMLIGLRDGLVRRRTQLSNMIRGYGAEFGLTAAKGLVRVEPLLARIAQDEGLPALAKELFDTLGQEYARLQAQLRKIEAKLMAWHRHNEMSRRLAQVPSIGPVIATAMAIKVPDPKAFRSGRDLAAWIGLTPKDHSTAGRTRQGVITRAGDEKLRSMLVVGAMALIQQVKRGRGHPSPWLVELLARKKPKLAAVALANKTARIAWKLMVSGEHYMPQPGTRELA

SEQ ID NO: 253004 - protein, 472 aa, unidentified
MVVPNKDPKQSPKPANAKSRQAPKRPRKPASAVPEPMGIINPNAAGIDVHSDNHVVCVPADRDPERVRTFGANTADLHEIAAWLKKCGVTTVAMESTGVYWIPLFELLESEGFQVHLVEPGQLSRCGARPKTDVLDAQWIQRLHSYGLLRGSFRPPDSVLALRAYWRQRQMQVCCAASHVQHMQKALEQMNVKLTEVVSDITGLTGMSIIDAILAGRRDPMKMAELRHERCHKSVAEIARALEGTWRPEHIFELRQARALYYFHHQQITECDEQIRLELTKLVNRAGTKGLTGKPRRRGRKSNDIRFDAKFPLLQALGVDLTKIEGIDVGTAMAILAETGGDMSGFPTEKHWASWLGLCPRQHESNGTKRRTRRKGRHRLAIALRTAARSVGRTMTPLGHFYRRIRSRIGGLGAVKATAHKLARLVYQMLKYGEEYVKTSMEDYAAKMEENLLRSLKRKALAMGYELAPLRT

SEQ ID NO: 253005 - protein, 387 aa, unidentified
MYYIGIDISKFKHDCAVIDDSGEIVTPSWSFTNDAKGFSQLKLLLNSLDTETRIGLESTGHYGMNLKLFLESNNFSFMEFNPLLINRFVKSKSLRKTKSDSIDCMMIAHYLMTVEYKPYPSSFYHTEKLKSLTRFRDSLIRFRSRQLVELTNILDKVFPEFKPFFGSRFSVTALYILSNYSSPEKIANMNSKSYEALRKLSRGRFSTVDFAKLKQLAKNTIGTTEDYLLLQMQIVLDIYRQLDSKVDETEVSIKECVSDMNPPMLSVPGIGIESAAVILAEFGDFSKFKNASQMLSFAGLEPGYFQSGTSETTGKMVKHGSSYLRYALMNCAQTVVNYEPTFAMFYSKKRAEGKPHRVALSHVVKKLLRVIYTLQTKNIAYDADFVR

SEQ ID NO: 253006 - protein, 325 aa, unidentified
MDDGSWVGLDVHARKVVAGLLDGASGELRVLRVPWRSEETVAWLTGLPHPVRAAYEAGPTGFDLARACQAAGIACTVAAPSKIPRAPGERVKTDRRDAERLARLLRLGELTAVRVPSPAEEAARDLVRAREDVRGDLMRARHRLSKLLLRHGLVYEGSAWTGAHDAWLRRQRFDRRPLRLAFDDAYEAVAQVKARRDALDAAIAELAGEPAFAAVVGRLVCLRGVSTLTALALTVELGGWERFSPQSLGPFLGLVPSEDSSGERRRQGAITRTGNGHARRLLVEAAWQQRRPLRASPALEKRRRGQPAAVRACAEASARRLHQRW

SEQ ID NO: 253007 - protein, 427 aa, unidentified
MAEEIAWFVGIDWASQSHQVCLVDARRECLGERAVAHGGAGIEELCDWLMARTGATPEVIGVAIEMTQGPVVEALLERGFCVYGINPKQLDRFRDRFTVAGAKDDRRDAHVLADSLRTDRHAFRRLSTDEPVIVKLREWSRMADELQQERTRLASRMREQLWRYYPQMLELADDLAADWFLDLWNQAPTPAKAVRLRETTIERFVKAHRLRRWPAPEVLRILKQKPLSVAPGVVEAASDHIRTLTVRIRLINQQLKAAHRKLDELCAQLIPSEEGEPGQRCEQRDVVILRSMPGLGRIILAVLLPTGQARGLKADEVWQPLRRRDYHALRSLSGVAPVTRRSGKTCVVVRRYACNKRLANALYHWARLATQHDVLSRRRYAALRQRGHSHGRALRTVADRLLSVACTLLEQQTLFDPSYEVRDAAGA

SEQ ID NO: 253008 - protein, 417 aa, unidentified
MMKLKYSICCGLDVHKNVIVATIVITNKDGISEYLQKSFSTINSDIQRFHNWLIENNCYHVCMESTGKYWIPIFNYLEKDIEVCLTHPKYVKAIKGKKTDKKDSKWIADLYKFDLVRYSFIPPKDFRQYRFKLVCMKSSEKNRIQNCMTVSNVGIASVLSDPFGKTATEIMSYLLEHTADSIDEKAVRKLIKKGAKAKSDEIIEAIRGCNIETDQAKKLELALGHLEYLDGMITQTEVELYVRIKPYYEFVEFVSTMPGMTELSSTIVLAETGVDMNIFDDAKHLCSWCGLSPANNESAGKKKSVRIAKAGDYLKPMMVQCALAAIKNKKQPYFAIKYGRIKKRRGHKKAIIAIARMMMVCIYHMVSERNPFTPTDYEELMDPQNHVERVILNENNVFAYLESLGYDSSKLVKRNDN

SEQ ID NO: 253009 - protein, 406 aa, unidentified
MTKIVYVAIDVSKTKNDVLFEYENGKRKKFKIFNKMEDFKQLESLLMFSKDCIIGLEPTSNYHRPIAYYFSSRGFNIRFIPSISLARTREALHNSWDKNDPKDAQVMIHMLRNGITNHYHDPVLNNINEVQELSKTHFQVSQRKTRIQHNLLTHYLPLYFPEVQKYFQASRAMWFFRLLKMFPTPSSITKYTEAEFIKLAWRPVGRKVAKENFLKDLYETAENSIGVPVPSESKAVQMYRLLLDEVISLCEKREYLEKEAHEYLQNDNQYKILRSVPGIGPIIALTIIAESGDLKRFKHHRQYLKFCGFDLSTQQSGQYRGQSKLSKRGNARLRYVFWLASTVAVRMKENTFRDKYSRCIKKDPENADLKRKALTATAIKICRVTHSLIKNNKEYRPYFDEAGPRS

SEQ ID NO: 253010 - protein, 451 aa, unidentified
MEIVNPHCAGIDIGSKSHFVAIGQSLDDVREFGVYADDLTAVCHWLKESGIASAAMESTGSYWQNLYVELVSHGFEVVLCNGKFTRNAKGKKTDVKDCRWIQKLHTLGLLTGSFLPDFTTEQLRTYCRQRTNWIELSSGASQKMQKYLRLLNFRLDVVVNDICGLTGLTIIEDICKGNLDAQKLASHRHYNCRKSEEEIAKALKGNNREDYLFGLKQEFESYRFYQKQIDACDKQIALFLKTQINAYPEKKKLKAEPKNHKKINKNTVKNLDINQAAFQYFNGIDLMKIEGLSYSTVLTIMSEIGSDGFSKFKTAKQFTSWLRLAPNNKISGGKILSNHIPRGSNRLKIVLRQAANAIGNLKDTHLSDFFRRVAYRKGRQAAVSATARKLAVIIWNMVTRRIQYQPPTDYLFLDQKRKLKLVSGIKQNIVKFDIKPEDVGFCNSLNLSAIL

SEQ ID NO: 253011 - protein, 350 aa, unidentified
MTMVGGFDVHRQQITFDYVDGDGVVRWGQIRPATRKTLRRWLSEHCPDGDGEFALEGCTGWRYVCEELAAAGLGVHLGDPAEIAALRGPKKRAKTDRADARLLRTLLLEGRFPESWVPPAQVVEIRTLGRLYCTLMDERRAWQQRIHAQLFHQGCPPIRALLSEAGRAALTEAELSAAGRQYVDTALRRIDELSTEIDPLRKQLVDFARRQRGCRALQGHFGIGGLCAAIIWAEVGDARRFGSSDQLVRFAGLDITVYSSDGKRSPGHLARQGSPQLRWAAFEAAKSAARRGSPDYAYYHNLAAKHDGHNGKNPTLAVARKILRRCYHTLRELGDAALAVPATRPQEVAA

SEQ ID NO: 253012 - protein, 351 aa, unidentified
MKYYTTTTEYNCGIDLHTRQMYICVMNRQGEVLVHRNIRNNDFGFFLKLVASYRHDLTVTCESCFVCFWLADACEDAGIKFVLAHAYYVKSIAANKHKNDKEDARELAECLRTSRIPPAYVCPRDLRPVRKLLRRRNKYVKNRAVLTGHSTCEVMAAGHQPLKTSANSKERWREGIRSSFDDPLDSFTAEAELFVIESYDRVIMQMEQRIEKHARDFKQQDYRLLRTVPGIGKILALTILYETIDIKRFLSERNFVSYSRLVAGTNESGGKDFGGKGRKMGNPYLKWAFMQAAILGKRADPKLNAYFEKLNRKKGKHTANAIVAAKIARAVYFMLDRKTGFSVEQLIRGRR

SEQ ID NO: 253013 - protein, 341 aa, unidentified
MSEVSTIGLDLAKNMFQAHGANASGAVVFRKKLRRDRVLKFLAAQPACTVAMEACASSHYWGREIAKLGHEIRLIAPDYVKPFVKRQKNDAADAEAICEATQRPTMRFVAVKGEEQQAAAVVFRARDLLVRQRTQIINAIRGHLAEFGMVVAKGPFHVAKLVAAIEDNHAGVPAMAQPILRLLADQLRSLDERVVVLDRELARRAREDEEAKRLTTIPGIGPITATALVALAPAAQAFKRGRDFAAWLGLTPLQRSTGGKQKLGETSRMGERTLRRLLIIGASATVRWAMRKGSTTQPWLARMLNRKPPMLVIVALANKMARIAWALMARGETYRAPAMAK

SEQ ID NO: 253014 - protein, 406 aa, unidentified
MLNAVGIDVSKGKSTVAVLRPAGEIVRKPFPVTHSAKCLHDLVSYVRGLDGETRVVMETTGHYHEPILKAFLDAGIFVSAVNPSLIKRHDSDENPLRKVKSDPADAKKIARYTLDRWENLRQHSVMDTTRTQLKTLNTQFHFFMQQKVSLKNNLISLLDLTYPGANALFDSPVRSNGSEKWIDYVHSFWHADCVRKIGLKAFTERYQNFCKHHGYNFQPDKPQKLFEASKDLVPVVPKDPVYKQLILSSIEQLNTVSKQIEIFRCTMNELASTLPEYQTIMSMYGVGPTYGPQRMAEIGDISRFDHRSAITAFAGVDPGVNQSGTMNYESSRASKHGAPRLRKTLFQIMTTLLQLAPADDPVYRFMMKKKSEGKPYQVYMTAGANKFLRIYYGRAKECFASPSATE

SEQ ID NO: 253015 - protein, 339 aa, unidentified
MSIVMGLDQHRGQITGEWLDTETGEVRCARVTPADREHVRRWLSRFAGRELEVALEATTGWRFVVEELRRVGAVVRLAEPAETADLRGSKKRAKSDRADARHLRELLMIGRLPESWIPPEHVLDLRERVRLRHTLSEQRGEWQQRIQATLYHHGCPQRRQLMTGEGREWLAVQPLAAAAREQITVATLMVDALDRQLAPLDKELRGYARRQAGCKALMAHYGIGELTAVTILAELGDCTRFSSSRQAVRYAGLDITVYQSDRRRAPGHISRQGPPALRWALYEAAQVARRGERSPDRAYYLQAKERVGGNRACLSVARKLLKRSYHTLRELGEEALAPA

SEQ ID NO: 253016 - protein, 347 aa, unidentified
MNFYTKQHKFYCGIDLHTQNMFVCILDASGNVQVHQNIHTNPEAFLHIIAPFREDIVVAVECMFTWYWIADLCIQENIPFVLGHALYMKAIHGGKAKNDKIDSRKIATLLRGGMIPQSYVYPAKMRATRDLLRRRNHLMRKRAELFAHIQNTRSQYNLPDPLGCIAKPQNREGIAERFHDPSVQKSMAVDLEVIEAYDHILTQLERDIIACAKEHDLRSYALLQTISGVGRILGLVLLYEIESIDRFPSVQDFVSYCRLVKCIKESNGKKYGSTGKKIGNAHLKWAFSEAAVLFLKGNEPAKKYLQRLAHKHGKAKALSILAHKLGRAVYFMLKNKEAFNQKKFLGL

SEQ ID NO: 253017 - protein, 391 aa, unidentified
MFLLGIDIAKLDHVASCIDSSTNEVVFSNFKFKNDFRGFCSLLDKIRTFDAENLIIGMESTSHYGENLISFLFKQHFKVALINPLQTSHLRKANIRDAKNDRLDSLNIARSLIFGKLNFVSEKNIDCFSLKKLTRFRSNLIKQRSKAKIQLTSLLDLLFPELQYLFKSKIHSKAIYSLLKKYPSAEEIAALKDDEISNLLYASSKGHFRKEKSIELKSLAKTSVGIKDTSISLHVIQLIELIELYDRQIKDIVTKITDTVDKLDTKLLSVPGINIISCAIILGETGNLDNFSDSKKLLAFAGLDPKIRQSGNFYASSCRMSKKGSPYLRYALVFTAWNIVRHSEKFNTYYCLKRSQGKSHYSALGHVAHKLVRVIFTLIKKDIIYQEENLR

SEQ ID NO: 253018 - protein, 422 aa, unidentified
MLEETHDTEEIIARVAALDIGKAELVCCVRVPSAQGSGKRAQEVRTYPTMTRSLLVLADRLRELGVTRVVMEATSDYWKSPFYVLEAHGLEVWLVNAKDVKHLPGRPKTDRLDAVWLAKVAERQMLRPSFVPPPPIRRLRDLTRYRADLVAVRTAEKNRVEKLLEDAQIKLSVVASDIFGVSGRDMMAALIAGERDPKALAQLARRRLRAKLSLLEEAFYGHFSDHHAFLLQTMLARIDQASADIATLEAHIEAEIAPFAQAADRLDEITGVGRAAAQVIIAEIGVDMGRFATPGHLASWARFAPGVKESAGKKKGKGTTGHGNPYLARVLGEAAAAAGKTSTFLGERYRRIARRRGTKKAMVAVGRSILIIIWHLLSDPDARFHDLGPGFYDTRIDADRKKRNHVRQLEALGYTVTLQPAA

SEQ ID NO: 253019 - protein, 370 aa, unidentified
MGWTSFSPGLSWAMGRTHQHWEVQMELSIVGIDLAKRSFQFHGADTKGHLLIKKRLSRAHLPEFLAQLPKTTIATEACASAHYWGRLCRDLGHEVRLVPPQYARAYVKTHKNDPADAAAIVEAAGRRTMRFVPLKSEEQQSIQALHRVRDRLKRDRTALGNEIRGLLGEFGMVFPVTLSRLRRELDSLLMDPSSRLPTMMVDLLQGLRRDLTYLDRRIVDIETAIKALNRQSDACRRLMTIPGIGDLNASAFAAAIGRGDQFRCGRDLACWLGLVPKQHSSGNRERLLGISKRGDSYLRRILIHGARAHVSRVMHRKEHPRNQLEKWIVRLLERKHLNTVVVAVANKLARIIWAVLYRQTTFVSPPVHPA

SEQ ID NO: 253020 - protein, 324 aa, unidentified
MNTIGIDVSKEKLDCALMREQDKIKTKAVVNKLLGWQELLYWSLKNTGLAIAELHFVMEATGIYHEQLATFLYGAGAKVSVVNPAQVKFYAQGLGVRSKNDKKDSVVLARYGARENPALWQPEAREIRTLKALLARFDGIEKDLQREKNRQEKAQISVAPDEVIHSLNLMIEQLETEQQRLKKLIEEHINRYDKLRENKALLESIPAVGNVIATRMLMVIGSRQFDDAHQCAAYLGLVPVQHESGSSVKGRAHLSKAGNPLIRAKLYMAAVVAIRYNPDIKAQYERLTSKGKSKMSALGAAMRKLVHICFGVLKHQQPYQPQTE

SEQ ID NO: 253021 - protein, 395 aa, unidentified
MIVIGADTHKGSHALAAVDEGTGKVRGHREIKADDAGHLAAVRWARGLDDGRVWAIEDCRVCSRRLEQALSAAGERVVRVPPQRMGASRKGEREPGKSDPIDALAVARAVVKDGVEEFPVAYLNERAMEIRLLLDHRQDLVADRTRTVNRLRWHLLELCPELEASLKRGAFNHARVLDRVDRRLHKDPAGARVRIAREQIAQLRGLNRQIDQLHRELQALVAAHRPRLLAEQGCGAIVAAVLIGHTAGNERFRSEAAFGRQTGTAPIPCSSGTRTQHRLNRGGDRQLNHALHIIAVTRAQRDPTTKEYLARKEAEGKTAKGALRSLKRHLARHFHRLLSEPPADQQQATNGKPTVEAQPAAINGKLPEIPPRPEPRGPVDPNIKGQAPCPMVCIS

SEQ ID NO: 253022 - protein, 344 aa, unidentified
MNSTTIAVDVAKSVFEVAVSSQPGHVRDRHRLSREGFARWLSEQPPATVLMEACGSAHHWARHAQRHGHRVVLIPPHVVRPYVHGNKTDRTDAKGLLEAFRNDEVRPVPVKSETQQALAALHRLRSTWQATRTARLKPVRGLLREFGVVIPVGARQVVPHVRALLEDADASVPGLLRPALAEAVQEIGELEARLRAVEHQLEAAAAASLVVGHLRTIPGIGMLTATALVATVGDVQRFPSARHFASYLGLTPREHSSGARRHLGAISKRGDTYLRMLLIRGARAVLWHAKRPRALPLDRLRTWALELERLRGHNKAAVALANKLARIAWAVWKHGTGFTTVPAA

SEQ ID NO: 253023 - protein, 416 aa, unidentified
MKIVRPICCGMDVHKNIIVATIGITNKKTRITEYIQETFSTLNPDLLNLKQWLINHKCFDACMESTGKYWIPIFNILEDEINIYLTHPKYVKAIKGKKTDKKDSKWICDLFKHDLIKFSFIPPKEIRALREISRYRYRLVGMRSSERNRYQNCMTVSNIGIGSVFSDPFGKSAQAIMKEVLESDIIEDEKILKCIHRSCKNKDKILDSIKHCNIETDQRFKMNESMTHMEELQVHIDNCEIEMMKRAAPMFDQFMHITQLPGISTLSAILIISEIGVDMKQFESDKQLTCWAGLAPANNESANKKKSVRISKAGQYLKPLLVQCALGAIKDKEGYFGIKYSRIKKRRGHKKAIIAIARMMLVSIYHMILTGETFNPSDYESFRNPNPPIKQQVLTEESAIEFLKKSGFDVSKLTKS

SEQ ID NO: 253024 - protein, 416 aa, unidentified
MDMDVLHERCAALDIGKKELKACVRSPNPQRKNSRRQQIRTFATTTNALLELRDWLVAEQVTLVVLEATGDYWRGVFYLLEDVVNVILVNAAHAKGLPGRKTDVSDSAWLCQMGECGLLKASFVPPEPIRHLRDLTRYRATLATERTREAQRLEKELEDAGIKISSVATDILGRSGRAMLTALIDGERDVHTIAEMARGRMRPKIPALVEALTGNFGEHHAFLCRMHLERIDQISATILELSTRIEEEMRPFSSQLQHLSTIPGVGRATAEVIIAETGGDMTRFLTPEHLASWAGVCPGHHESAGKRKSGKTRHGNKWLGGALGTAALAAARTKDTTYLGARYARLVRRMGGKKAIVAVEHSILTAVWHILTDNVDYHDLGGDYFARRDPETAMRRIIRQANALGYTVRFDPIQAA

SEQ ID NO: 253025 - protein, 338 aa, unidentified
MTKVSTIGFDLAKNVFQVHGVDDAYQVVVRRANVLAFFAKLPPCLVGMEACASAHYWARELTELGHTVRLIPPAHVKPYVKRGRKNDEVDAAAICEAVTRPHMQFVPIKTEEQQAALMLHRARRLLVTQRTMLGNALRAHFAEYGTIAAQGQAGLGTLIVAALDAGDATLPQAAREALAMMAAQLRDAEAKIDALDREILACHRADADSRRVATIPGIGPLIASAMVAAIGDANRFKSGRQFAAWLGLVPMQNSSGGKERLGGITKMGDRYLRSLLVIGATGMLRRRRGETGTWLAGLLARKSAREVTIAMANKMARTVWALLAKGGVYRKPTAELAA

SEQ ID NO: 253026 - protein, 312 aa, unidentified
MVSQQVFVGIDVSKGRLDVHVRPLGIGFSVSNEAAGYAALIARLQPLRTTRIVLEATGGYERALWLALSEAGLVAAVVNPRQVREFARAAGRLAKTDRLDAAVIAHFAETFAPPIGKPDAVADRLGEHVLYRRSLQAELVGLEHQLRRLETPALRQRAERRHAALRAEVKEIEAAMRAIVDGDPAKKALFACLTSLKGVGPVLACTLIANMRELGSLTRQQTAALIGVAPFHHDSGSMRGYRAIAGGRRRVRNVLYVATLSAARSNPAIKEFYRRLRAKGKPAKVALVACMRRIAIILNARVRDHLAAATAA

SEQ ID NO: 253027 - protein, 464 aa, unidentified
MEVINIGVDLGVTAKHHAEVINSEGTEICSSAKFTGTKQGFDMVSKHVLKHVDEEVKLRFICEPTSMSWFPLAVYAKRNGHEIMRVKAQKSHDLRKYYSRHTKSDKLDARALAMMPIVERESIEEVYLPDRVTNALNRRCRQREKISKEIVSIKTRIKSLYHWVMPGLTDCFEDPYGERAKAFYKKYTNPFKVKHLGIFRLHRVLEKTGRQQPSEGLAERLYKAAIRGCELYDRCDEYIDFDELQKEVECELQLLESHEQIQKKVDEAINRLYKQAHPTKNIETIPGIGETLGPVFLGIIGNPERFSSQSKARGYSGMIPRQKDSGESSKKGLNITKDGPSRYRRALYLASDTARQWDPQLAKVYYDQMVHKGHCHNQAVCAVSTHLIGRIIRVLKDKRPYELRDLERKPITKRQAKILIKKELAVPEETRKRTRSRRKTKGYKRNHIRGIAQKQSSRSALYPS

SEQ ID NO: 253028 - protein, 426 aa, unidentified
MKSTQNEKISQIKTSTLVVGIDVAKEIHYARAFDYRGIELSKLLKFSNTAEGFQNLEQWMQDICQQYNKTDIIVGFEPTGHYWFTLGDYLKNQGHRLAIVNPFHVKRTKELDDNSPTKNDRKDPKTIAMLVKDGRYREVYIPEDLYQELREAVAERDRLVQRMTSINNQVDRWLDIHFPEYQTIFSDWQGKAALLTLRHFPTPEKIVSAGPEKLEAIWKASMKRSAGLKKAQVLVAAADKSIGRKTGLVAAEASLQNLLTEYELYREQYEQLEQLMMDLLKQVPNAEKLLDIKGVGLITAATFVGEVGDINRFQDPRQIQKLAGFNLVENSSGKHKGKTRISRRGRRRLRHGLFMAMITILATNQEFRMLHQKNLTREKNPLTKMQSIIALCGKLIRVFYGLLRNGTDYSAEKMLGDIELGMRAAA

SEQ ID NO: 253029 - protein, 420 aa, unidentified
MKFSKTKKIKVINEKTMIATLDIGKIAHYAYFRAPHGKDIKPFPFYNFRKGFHEFWTKLCQFKREHKLEDIVVGFESSGPYAEPLFHYLRKKPVTLVQINPMHSKRVKELTGNSPNKTDKKDPRVIADVISLGHALTLVVPEGPAAQLRRLSQARERALKRRTAAINQLQDLIFIIFPEFLAIMKNISTKTASYLIKNYPTPESIVALGVESLAMIVKRVSRGKLKQQRAEELFNAAQNSIGVSEGKRSILLEVEYLIFQIGADNRFIVNLEKQMEDYLEKIPYSYSLLSIKGIGRVTVAGLIGEVGDFKKFNTISEIMKLAGLDLYEISSGKHKGQCRISKRGRSLMRKLLFFASINAVKSNGIMHEPYQKMLARGMPKMKALIAISRKLLRIAFALARDDTVYVENYSNIHDRFKLAA

SEQ ID NO: 253030 - protein, 350 aa, unidentified
MEHYAGLDVSLNETSVCIVDGAGKIIRETKVASEPEALVGYFSSLEIKVVRIGLEAGPLSQWLYAALTQAGYAVVLLETRHVKAALSAMTVKTDRRDARGIAQLLRMGWYRPVHCKTLPSQEVRAIITARKTLLGKLIDIELSMRGILRGFGLKVGPVTHKSFEIRVRELIAGQATLSTIMEGLLNARATLIAEVAKLHRELLTIARADGVCRRLMTVPGVGALTALTFKTAIDDPTRIAKSRDVGPLFGLTPGRYQSGETDIIGKITKVGDVMVRTALFEAATVMLTRTTQTSRLKAWALDLVKRRGTKRAIVALARKLGVILHRIWVDGSTFRFAKEGTAMPALITAK

SEQ ID NO: 253031 - protein, 346 aa, unidentified
MQPVVGCDAHKKFSVFVSVDQQGKASRPVRVDHDRDVYCKYLRSLPAGSDIALEATGHWYWIVDAMEQAGHQPHLANPFEAKRRMAKSNKTDALDARGLAILLRCGTLPESWIPPGELRDQRELLRTRMALRDLRTSLKHRIYAAIDRYGLHPEAISDLFGTKGRKYLASVLNALPSETSQMTAMQLDAIDQLEEKIETIERRIAEKLRTSPEIRLLRTVPGLGPILAPLVWLEIGDVDRFPRAEHLASYAGLVPRIIASGGHVRHGGTCRNVNHYLKWAFVEAANIAIRTKDQRHQHIGLLYQRLYPAKGHGRAAVAVARHLAEASYWVLRKRQNYRAPQPHSTG

SEQ ID NO: 253032 - protein, 339 aa, unidentified
MQTVTTIGLDIAKSVFQVHGVDAEGNVVIRRQLKRRYVLAFFEKLPPCLVGIEACASAHHWSRELRALGHTVRLMPSAYVKRHKNDATDAEAICEAVARPNMRFVPTKTEEQQSCLTLHRTRHLFIRQQTSVINAIRAHLAEFRIVAPIGRNGVEQLLGVVADAGDKRLPEIARACVGALGAQLQTLKTQILQFDRMITAWHRSSEVSRRLDDIPGVGPALATALVASVADPQAFRSGRDFSAWIGLVPKQNSSGGKDKLGSISKRGDRYLRSLFTTGALAVIRYAKIHGTKHRPWLTALLMRRPTKVAAIALANKIARMAWAMMARGERYKEPVALAA

SEQ ID NO: 253033 - protein, 341 aa, unidentified
MVIAVLGIDLGKNVCSVVGLNDGGRVLLRRRLKRPAVVEFARQLPGCVVAMEACCGAHHLGRQLAAQGHEVRLMSPEYVRPYVKAQKNDDRDAEAIAEASLRPTMRFVPVKSEVQSDLQSLHRARERLVAERTALINHLRAVLLERGIIVAQGRRKLAKELPVIVADAASGMSPRIRQLISDLREEWHSLDDRIASFDAELVSLARTDEAARRLASVPGIGTINATALVAAVGDGSAFARGRDMAAWLGLVPRQATTGGKPRLLGISKRGNRYLRNNLIHGARSVLPYLIQRDTPLGRWLTGLMTRAHKNTVVVALANKLARIAWAVLVHRRGFDAAHVAA

SEQ ID NO: 253034 - protein, 320 aa, unidentified
MNQEPFFVGIDVAKAQLDIAVRPTDQRWQVDYTEKGVQELVKQIAKLHPTLVLLEATGGLELLMVASLATASLPVVVVNPRQVRDFARATGKLAKTDSLDAMVLAHFAEVIRPLTRSLPDAEAQALTALVTRRNQVIGMLIAEKNRLHTSRPPVRQRIQLHIDWLEKELEEVDQGLKETLHNSPVWREKENLLRSVPGVGPQLAVSILAYLPELGTLDRKRIAALVGVAPFNRDSGTLRGKRTVWGGRSHIRAALYMGALVASRHNPVISAFYQRLLASGKAKKVALTACMRKLLVILNAMLKHRCSWQCLNPQIIGPCS

SEQ ID NO: 253035 - protein, 342 aa, unidentified
MLIIGCDYHPGMQQIAWFDDESGECGEQRLEHGTGEAERFYRELKRRGVPVRVGIEASGHTRWFERLLAELEMELWIGNPAKIAAQRVRKQKTDRGDAQLLLQLLRENRFPRVWVPSPENRDLRQLLWHRHRLVQMRTRVKNQLHAIALNEGVQRRSRLWSKQGRAQLESFALDRWTARRRHDLLELLDQLTPQIAELSQAVEQEAERRPEVQRLMTHPGVGPITALAFVLVLGTPHRFRCGKQVGSYLGLIPCEDSSAGKQRLGHLSKQGNTLLRYLLVEAAQAAVRCDPQWRRRFVHLAMRRQRNVAIAAMARKLAVSLYWLWRNAEDPPAAPQSGSHVG

SEQ ID NO: 253036 - protein, 341 aa, unidentified
MGEVTTIGLDIAKQVFHVHGADASGAMMISRRITRAKLSDFFASQPRCVVALEACGGSHHWARELKRLGHEVRLIPPAYVKPFVKRQKNDAADAEAICEAAQRPSMRFVPVKSEEQQASAVVFRARDLLVRQRTQLINALRGLLAECGWVAPKGLFHMAGLMARVEDPASGLPQSARAVFLVMIDSVKALSERIAALDREIARRAKEDPVARRLMTIPGIGPITATALLALAPPVETFRKGRDFAAWLGLTPLQRSTGGKQRLGAISKMGERTLRRLLIVGASAVVLQASKRGAPARSWLAQMMARKPRMLVTVALANKTARIVWALLAKGGVYRAPAVAA

SEQ ID NO: 253037 - protein, 425 aa, unidentified
MSEKIVVGIDVSKAFSDICILSPNNDIIKRMKISNDVIGMQSLISVLEKVENEYEDRAVIIMEATAHYHQILANFFRKHNYEVIVINPIQSGALKNINIRKIKSDKTDAYNIALLYRIKNYNETITHSDTVNSIKKLCRQHKELTDEIVEHINRLIAFLDISFPDYKKVFPDLQGKTPLSLLEKYPTVQDVLSPKNKQDMIQLIKENSHKSYSYAEAKYEKLLQAAEKSIEVCIVNLSSAVLIQTTVSVIFSLQEALKAINDEIKRLSLLDEKFHKEIVLLQSIPGVGEYTACVVLSELGDVSNFSKPKELVAFFGLDPGVSQSGTYNRKNNKISKRGSPHVRLILHMLAKSNVYPNRNREYLNPVMRAYFEKKIAEKPYKVVMCAIMRKMVQIIFAVLRNQKSFELRTPEEHQKLIRENSKLVA

SEQ ID NO: 253038 - protein, 348 aa, unidentified
MLDHIGMDVGMVSSHICELTEAGEVVERQVRTERRRLHEVFGSRPKARILIEASTESEWIACCLEELGHEVVVADPNFAPMYAQRSRRIKTDRRDAHALAEACRLGAYRSAHRTSQTQRDVRAVVGIRELLVRTRTRWIVHIRTLLRRDGLRLAPGRAERFVARVNDVSLSPRLAAQIAPVLALLAPLNVEIAELDGQVSNHARADKRTRRLMTVPGVGPLTSVVFVATIDQVARFRNAHQLESYLGLVPREWSSSETQRKGSITKAGNTRMRWLLVEAAWCILRRKKKPETALLRDWADRIALRRGSHVAAVALARRLAGILYAMWRDQTEYDPNQIGRRGHMRQVA

SEQ ID NO: 253039 - protein, 416 aa, unidentified
MEVVHPRCAGIDVSKKDAKVCVRIQRRGRRGTSATVSTWGSTSGEILALREHLVEQQVSCVVIESTSDYWKPFYYLLEDALKVELVNAAHVRNLPGRKTDVSDAAWLADLGAHGLVRASLVPPPPIRVLRDLTRTRTLITRERTKEIQRLEKLLEDAGIKLSAVASNIVGVSGRAMLEALIAGERDPAVLADLARNSMRNKIPALTAALTGRFSEHHAFMVRLYLDRIDAHSADIARLNERIEELITPFRLTRELLMSINGWSTVIAEVFIAETGADMSVFPTAAHLASWAGVAPGCNQSAGVIKSAATLPGNRYLKAALGVAALSAARSKDTYYSVKFKRIAARRGRHGSLIAVVAIEHQMLIDAWNMLRNGAFYRDPGPDYYTRRNPQRVKARALKQLHELGYNVTLEPLSPAA

SEQ ID NO: 253040 - protein, 408 aa, unidentified
MVVQAFPVTSSTVVVAVDVGKTEFAFSVTDASRAALLRPRTGCPMTGPSLAQVVADIAQVLPVDAVVKVGIEAAGHYHRPLLNAGWPIGWEVLELNPGHVTEQRRVLGKRTVKTDVVDLQAMTELLLAGRGQPVRDRSLVLGELTAWSAHRAGRVSLRTATKNQLLGHLDRSFPGLTLALPDVLGTRVGRLVAAEFADPARLAALGSGRFIRFGATRGLQIRRPVADRVVQAARDALPTADAAVARAVLAADLALLADLDAQIEQATDQLARLLPGSPFAPLVTVPGWGTVRAGNYGGALGDPARFDNHRQVYRTAGLNPIQYESAGKRRDSVISREGSVELRRALIDLGVGLWLSDPAAKAYGSQLRARGKRGLVIACAMANRANRIAFALVRDQAAYDPSRWTGED

SEQ ID NO: 253041 - protein, 391 aa, unidentified
MDRVWVGIDAGKEVHWAHVLDASGEKLLSRKVENDEADLAKLIDEALSFADEVVWAIDQPGGGATLLLGLLWEREQRVLYIPGLTVERSRDTYPGESKTEARDAHVIADQARMRPDLEELTAGEGELAELQILLARRRDLVTDQTRTINPLRDALLSSFPALERALDLNNRGALTLVSHYQVPAQIRRAGRKRIATYLRNRGVKGADALSGQALTAAKAQSVTLPAEDVTARIVAELAAEVLSLKESLKTLDEELEKRFFARKEARVLTSLPGVGVILGAEFLVRGGDLSAFESADKLAAYAGLVPAAHDSGKRVGNDRRMRGGNKALKYVFYQSAFASLRSSPESRAFYDRKRAEGKRHTQALIALARRRVNVLWAMLRDGTTFEARFVA

SEQ ID NO: 253042 - protein, 370 aa, unidentified
MRIDTFTIRNNIADFERFDAAIRSHICSTEEIVIAIDHTGHYSEPIVHFLQAKGYSVYYLESRAVKAARERLLDQENKSDTIDSIGAAYLLYLRDLHGVSFRISSMTPELGSTAAVLNSLVLQRWQFNKLASQATNRLHQFLLAVFPEGESQYFTRLMKITHFYSTPKEILASNGLEKIDKLPQKDRERILELAANTVGVSGDIYGWLIKHLSAQRLQALAKRDELTSILRAQVAAHPYGDILLSFPFLGEIAAATIIGIIKDIERWPDKKKFKKALGVYSNLTQSGTSLGRTRQGKEGSRSGRRVLFQVCFGCIRTNAHDNDSRDYYLRQVARGKLRIKALVGTMGKLAEIIYHCLTAGESYHYQGIYR

SEQ ID NO: 253043 - protein, 409 aa, unidentified
MLLLVGDDWAEDHHDVEVQDETGRRLGKARLPEGIAGIARLHALIGRHVGDDDEPVEVVVGIETERGPWVQALLAAGYQVYAINPLQVARYRERHGVSGAKSDPGDAHSLADMVRTDRHQLRPVAGDSDLAEAIKVVTRAHKTLIWERTRHTLRLRRALLDFFPAAVTAFDDLDAADTLELLAAAPDPVTAAGLDGEQITAALRRARRRGIPDKVAKIQEALRAPQLAQPSVVAGAYAVTVQAQVAILTTFNTQIKLMEQQVGAHFGRHPDGEVYLSQPGLGQILGARVLAEFGDDKVRYADAKARKNYAGTSPITRASGKKKIVLARYVHNDRLVDALGQQAFAALKASPGARAYYDQQRERGIGHRAALRQLGNRLVGILHGCLKTGTPYDEHTAWAHHQQDQQLAA

SEQ ID NO: 253044 - protein, 409 aa, unidentified
MGYFVGLDWAAHEHAVCVVDERGAVTVRFTVAHTAGGMKDLVERLTKVAPVAELRIAIERPSGLLVDTLVDGGFAVAPIHPNVVKATRSRYSAAHNKTDLGDAYLLADVLRTDGHRFRTMTPLSDETKALRGLVRTRDDFVERRVATANQLRSFLDEFWPGAAAIFTEIDSAIALDFLERYPTPQSAANLGEKRLAAFLARHQYSGRRSATDLLERLRGAAVSVAGELESEAKGECVRAFVALLRPLVAQIAILTGAIEHAVDAHPDGKIVTPLFRAGRICAAQLLAELGDDRARFASADQLAAEGGVAPVTRESGKQRAVTFRWACNQRLRVALNTLADTTRHTNPWARNVYQRARDRGCQHAHAIRILARAWCRVIWHCWQNRVAYDPAKHRAARDFTLRLVDQAAA

SEQ ID NO: 253045 - protein, 295 aa, unidentified
MVSNDASGWAKLVEQLRGSSIAAIGIEASGGYERGVIRALLAAGIPLRQVGPFKLRQFARASGVLAKNDPIDARMIASFVGIMPTRPAQRQARAAERLTEMLAIRRQLSAEKIAAENASRLLEDVMLQRLSRRRIGRLTADIDILDKWMFEIVATDDALVHRYRLLCSMPGVGPLLACTLIALLPELGCMSRKQIAALVGVAPYAFESGTIKGRRCIWGGRAHVRQVLYMAAMSASNWNPVLKIFHHRLKAAGKLPKVVIVAVMRKMITTLNAMVRDDVAWADRLSGRHSVATAR

SEQ ID NO: 253046 - protein, 354 aa, unidentified
MSQIPNTAVAVIGIDIGKNSFHVVGHDARGAIVLRQKWSRGQVEARLANTPPCLIGMEACVGAHHLSRKLASLGHDARLMPAKYVRSYSKGQKNDFNDAEAIAEAVQRPTMKFVATKTAEQLDLQALHRVRERLVSQRTGVINQIRAFMLERGIAVRQGIGFLRTELPTILATRADALSPRMLRVVEELASDWRWLDQRIDDLSGEIEALARQDQACSRLMTVPGIGPIISSAMVAAIGTGDVFSKGRDFGAWLGLVPKQISTGDRTILGKISRRGNRYLRVLFVQAAWVVLVRIKNWERYGLKSWIEAAKRRLHHNVLAIALANKLARIAWAVLAKGRAFELTRTDDAGVRPA

SEQ ID NO: 253047 - protein, 388 aa, unidentified
MEAQRVDTLPPVAADHDPVRCLLAIEMSKKSWIVAITTALSDKISRYTLDGCDWKGLLELMERIRTRVAREVGRPVEMISCYEAGYDGFWLHRLLERQGVRSHVIDPASVQVDRRARRAKTDHIDAKRLLRSLMAYLRGEPKVWSVLRVPSVAEEDDRRLHRERDRLIAERGQHVNRIKGLCAIHGIYDYEPMRHDRMRRLEQLRTADGREFPSRLKAEIARELQRLELILGMLKEIETERDAVALTENVSAHTNAKKIQNLVKLKAIGAEIATVLTGEVFYRPFNNRHQVASYVGLTPSPFQSGPKCRDQGISKAGNPKARSTMIELAWLWLRHQPDSPLSLWFRERVGTLKGRIRRITIVAVARKLLIALWRYLETGMVPTGAVLN

SEQ ID NO: 253048 - protein, 382 aa, unidentified
MQASTVDTPTAGHCGTIFVAIELSQKTWLVTLHSPDRDRISRRTLEGGDDAGLLALLEGVQTRVAGKLGTAPKVVTCYEAGYDGFWLHRLLTAAGITNLVFDPASIAVEQRSRRAKTDRIDGELLLRTLMAHLRGEPRVVRIVRVPSLEQEDVRRASRERDRLVKEQTGHTNRIKALLRLMGVAVSNPRRSDWLNWLAQQRNRQSRPVPPHLMSEVVREHARLMLVREQLAVLEQAPAAAVAPAPGPMAERRNLLLRLKGLGPVFAATLTNEVFYKDFRNRREVASYCGLTPSPWRSGGIDREQGISKAGNPRARLKAVELAWLWRRHQPDSALSRWFAARTANAGTRARRIAIIALARKLIVALWRYLTTGLVPEQAVMKV

SEQ ID NO: 253049 - protein, 370 aa, unidentified
MKKLQRHRDRFKGVTVGLDLHKKVLVYSVMDEQGDELANQRVLSKAEELSRLIDGLTAGGQAVQVALEASGCFMWAYDLLVQKLGPDHVHVAAPSRVKVIAESGEKTDATDAWWLAYLLWDGRLPEAFVAEGDLRELRIAARERRSVVDERSDLVRRMRSHLAQLGIVLGKSDFKSVVGRERIRQVVLEVEQTQGLRGQAVARLWSRIDQLTQEVLHWEGCVSELSKRFDQIKTLDEELAGVGENIAAVVWAELGNPRRYRSAKAYAKATGLTPGYRESAGRRNKKSITREGSAHVRWALTRAVIACRSCKKGDGLAVKRWVANMKKRKSPKAAVVAAARKLAEAVWRLFTLGDAFDLTLAFGGPARAEP

SEQ ID NO: 253050 - protein, 482 aa, unidentified
MTLVSSDDDLDWEFVFDSRLGHPTGRSEEPMVKRSKKRCEELPILHPHAAGIDVGASELFVAVSADRDPQPIRSFPTFTRDLNALADWLQQCGVRSVAMESTSVYWIPVYQILESRGLEVCLVNAQHVKNVPGRKTDVSDCQWLQYLHSVGLLRASFRPPGFICAIRSLWRHRSSLIQMAAEHVLHMQKALDQMNLQIHRVLNDITGLSGLRILEAILAGERDPVTLARLCHGGVKNSEDTIAKSLEGDYRPEHLFALRQSLAAFHYYQQLVVEVDQEIQGQLGSLETATTAEPTVPKRTKASAYQRRRYEPKTFDLRGELYRIFGVDLTNVPGISAITAQTVLCEIGTDVSRFRNASAFASWLGLCPENKISGGKVLYTKSRRVRSRVATALRMAANSLHHAKDYLGEFFRRITRKLGKPQAITATAHKLARIVYHLLSTKEAYNETVFHRCDEEAIKRAQYRLRKQAAHLGFQVIPLQNG

SEQ ID NO: 253051 - protein, 349 aa, unidentified
MRFYTKQHQFYCGVDLHANAMYLCIINALGEIVLHKNIPTRPKSFLRLIKPYREGLIVGCECMFSWYWLADLCEDEGIEFTLGHALYMRAIHGGKAKNDKIDSYKIAVLLRGGTFPLSYVYPKAWRATRDLLRRRNHLNRKKSELVTHIQNTATQYNLPDPLGRIAKPSERGELLEKFSDPAVRRMVQLDLEMIEHYEQLLGTLERDLERMTQHHAPVELALLKSIHGVGRILGMVILYEIEDIARFPRPQDFSSYCRLVKPAKESNGKRSGSSGKKIGNAHLRWAFGEAVVLMLKGNDPAKAVLQKLASKYGKGKALAILSHRLGRAVYYMLKNQVPFDQEKFLRLDT

SEQ ID NO: 253052 - protein, 343 aa, unidentified
MRHYAGLDVSIKETSVCIIDESGKVCRETKVPSHPEDLARALHDRAWCLERVGLEAGPLSQWLFSGLAATGLPVVCIETRHTKAFLQAQVNKSDRNDARGIAQMMRVNLFRPVHVKTLTSQKRRALLTARKLLQEKALAVDNDIRGLLRNFGLKVGPIGASRFETRTRELVDGMPELAEIIDPLLEARRKLRELFAVLHRKLLAIVRDDTVCRRLMTVPGIGPVVSMAFTATIDVPARFKSSKAVGAALGLTPILNQSGESKRLGRVSLCGDGMTRTLLYEAAQVMLTRTTKWSWLKAWAMKVAARRGIQKAIVALARRLAVILHRIWVSGTDFRWTREVQST

SEQ ID NO: 253053 - protein, 339 aa, unidentified
MRFVGADLHKKSITFCVVEIVDRRTRLIERRRIDCRCVDEIAKFLVSHSPYEVVVEATIGYEWFAGLAERSARRVVLAHAGKLRVIAESTRKTDKIDAFVLAEFLAKDMIPEAWRPTPRVRQHRALVRRRCKIQSRITSIKNTIRGVLTRYNADRENLFSISGRTQATPSDVLLQDSWVLDDLWEDLDQNNKRLAKIDRRLNEFAETAPFREAEARAILGSMPGVGFVTIETVLAELGDWRRFRNADAVVSFAGLDPAVRESDGRRKDMRLTKAGSPLLRWIMIQLAHRVKRATARWASLFEKMQRRTGKKKATCAIARRLLIVMYAMLREGRAYRMAA

SEQ ID NO: 253054 - protein, 339 aa, unidentified
MKLYSAIDLHANNSVLIIIDENDKVVYEHRHPNELPIILEHLAPYRENIEAIAVESTYNWYWLVDGLMEAGYSVKLVNTSAVKVYEGLKYTGDEHDARHLAHLLRLGVLPTGHIHPKEDRAVRDLLRKRSQLVRCRTAQILSIQGLVSRNSGKGISTELIRKLNNETISQYCGGGDILALAIKSNLSVLRCLDEQIFGLESVVLKQARLKPGFKKLLTVDGIGKILGMTIMYEAGSMERFKEVGHFASYARCVGSSRWSNGKKKGEGNRKNGNKYLAWAFIEAAHYSVRFNERVRRFYQRKKAKTNTIVAAKAVAHKLARACYHVLKEQTPFDEARAFA

SEQ ID NO: 253055 - protein, 346 aa, unidentified
MEHYVGLDVSLKLTAICIVDHTGKIVREGMVASDPEAIAGFVQSHAPHVARVGLETGATATWLWSELKELGLPVICIDARHAKAALKMQINKNDRNDAAGIARIMQCGWYKQVHVKDRGSHAIKALLASRALLVKLKRDLENQIRGLLKNLGLVIGRAKMKVFARRAAELLENQPDLAVAAVPLLRVREAVEQEIMDLDRKVLRLARRSTQVRRFMTAPGVGAITALCFLATVDDPTRFKRSRSVGAYAGLTARGYASGETDWTGRISKCGDTMLRSYLYEAANVLLTRVAKWSALKAWGLRLAKRSGLRKAKVAVARKLAVILHRMWMDGTDFRWSSQEAAQQAA

SEQ ID NO: 253056 - protein, 280 aa, unidentified
MSAKTRQDFSAVAVIGMDIGKDVFHLVGFSSDGSLVLRQKIKRMAFVATFQTLPPCIVGMEACLSAHFVSRTLRRMGFEPRIIPAIYVKPFNKGQKNDYNDAEAIAEAALRPNLRTVSEKSQDQLDLQALHRVRSRLVSRRTATINQIRAFLIEQGITIRKGLRAVRNSLLSLLDERQDEISPRMRHIILDLHDDWMRLGARIEAVSDEIEGIGQSEAHCRDLRAIPGVGPIISTALVAAVGKGEAFESGRDMAAWVGLVPRQYSTGGRTTLGRISKRGS

SEQ ID NO: 253057 - protein, 341 aa, unidentified
MQHIAIDLGKMKSQICVREADGKVVQEQKLETKALGRFLERQAASRVIVETCSEAFRVADLALSHGHEVRVVPTTLVKSLGVGARRIKTDRRDAQVLSEVSCRIDLPSVHIPTDLARQRRSMCTVREELLAQRTSLINCVRGWARTQLLTIPSGGAEAFPKRFRAAALKTCDGMPEYIERMLQVIDSLNAQIAPADQELTALSAEDPVCVRLMSVPGVGPVTSLRFVAALDDRARFPSAHSVQAFLGLTPGEKSSSERQQRTGITKAGPAPVRRALVQAAWNFRRLRPLDPISRWAAQIEQRRGKFIATVAVARKLAGVLFAIWRDGSTYQPNHSRQPRST

SEQ ID NO: 253058 - protein, 411 aa, unidentified
MELLRQAVPATALVVAVDPGKVSNRVWLTSGERGLIGEPVSLPVLREGIDTLAGLIAASGVAGVPRIGVEATGRLHHAWVAELERRWPGSVRLFAPSETQAARTQLGSRRSKTDDRDCAALVWLVRQGAGRPAATDTVDALLGAVRHRRGLVADRKVLQQRLHDQLQALCPGLSAPAGQGRALDLADSTGQAVLACAAAFAGRPPTVRSLQARTPGRLTRATARFWADRWRRLLPPPKDAALRAERLGRDLARHQRLQADIAATEGQVTQLLAATPGQILTTLPGVATVPAASFAAHSLPIARFPTPEQLYAATGLAPATWQSASLKRRGRISRQGLPEHRDALMGIAWGLSQYSSSFRERDQELRGRGMRPIQARVALARHACRLCYALLTTQQPFDEARYRLARHSRGR

SEQ ID NO: 253059 - protein, 337 aa, unidentified
MSVYVGIDVHRKRSQVAVVTEEGQVQLNKNVVNGSEPFLRLIGDLPSGTPVAFEAAFGWSWLADLLEEYGFDAHLVHPLRCKAIASARLKNDKVDAAILAQLLRADLLPEAWIAPPPVRQLRAVLRHRIGLVRLGTQLRNRIHAVAADHGYDRPASYWTGPGRGWLAELDLPAASREIVTDCLAVIDGLAPLTDRIDGELHTHAKTDPRVKILRTLPGVGEFTALVMLAEIGDITRFGSARKLASWAGLTPTVRGSDLTVRHGHISKQGSAWLRWVLNQAAQTAKRSPEFAATYSNIAKRRGKKIATIAIARKLLTRAYHLLAGLQATSTNEPPRRP

SEQ ID NO: 253060 - protein, 421 aa, unidentified
MNADCPVVGIDVGKNFSYFCVLASDGQVHRKPSKVYHDAKGLTGLVACLRETEETLGTTPAVLLESTGHYSERLVCFLIRNNFRVFLINPLQTHSIKNVRIRKVKTDKMDCEEIAKLYSILDLREYQMPEDDVANLKILTRSHYHLGKNRVQIINQLTSKTDQAWPGFTEILDVQSKTGQSLLFAYSAPAQLLNAPKKDVVELIKTNSRRGQEYANEKYKALKQCAQDALRFGTQLEGHFIGIEIYADMLQQLDEKLSQLETEINVFAVRVPAVELLKSIPGLGPVTASILASEIGDIDRFDHSKQLVAYFGVDPSVKQSGNFVGTKNKFSKRGSPYARRALYLAALVSVRKNKSGDYVNKVIHDYYQKKLKNKTKSQALGAVMNKLVRIVYSILKNKKTFIMITPEEHNKMYAAGLLPAA

SEQ ID NO: 253061 - protein, 345 aa, unidentified
MDHFAGLDVSVKETSVCIVDDTGRIVREVKVASEPEALLAVLRNPAYRFKRIGLEAGPLSQWLFSALAEAGLPVICVETRHMRAVLQAQINKTDRNDARGIAQMMRVGLYRPVHVKTLRSQKLRMLLTHRKLLQSKAIAIENDLRGTLRNFGLKVGMVGKAKFEARIKELVESLPDLAILVEPLLIVRRALREQFVILHRRLLAVVRDDEVCRRLMTVPGVGPVVALTYRATVDAPARFRHSKSVGAVFGLTPSKYQSGEINRTGAISKCGDDMMRMMLYEAAQSMLLRSAKWSWLKGWAMKIAKHRGLKRATVALARRLAVIMHRIWVDGTEFRWTREQAAAAA

SEQ ID NO: 253062 - protein, 340 aa, unidentified
MNITTLGIDIAKSVFHLHGTNKQGKLELKKRLRREQLLTFMKNIPPCLVAMEACGGAHYWARKFQSYGHTVKLIAPQYVKPYVKTNKNDYNDAEAINEAVGRPTMRFVGIKALWQQDIQSLHRARSRLMQLRNTLSSHTRGLLMEYGIVVPRQIGQLRQKLPLILADADNELSTDMRALFAGLYEQLQNADRLISEKDKQILAIHRESELSQRLGEIEGIGPLTATAFISAVGDAKMFKRGRDCSAWLGLVPRQYSTGGKTILGSISKRGDRYLRTNLIHGARSVIAKASNKTDARSRWIQQLKSRVGMNKACVALANKNARILWAVMASGERYRASKQL

SEQ ID NO: 253063 - protein, 423 aa, unidentified
MEVVYPCVAGLDIHKETVVGCVRLTTGGKALRECRTFATTTEGLLDLLAWLQASGCSQVAMEATGVYWMPIWKVLCDGDFTLLVANAAHIKAVPGRKTDLNDAMWLADLAACGLIKASFVPPEAIQDLRTLMRTRKQMVREQTRHVQRIQKTLTEANIKLDSVISDIMGVSGRRMIEAMISGVRSPARLAELAHKQVKASPKQIYDALHGRLTAHHRFLLKLHLDQWDTLAAAIETIDEEVEARLARMDEEAAPGEATFSRLTALLSSIPGVSLLAARSILSEIGTDMSRFATAGHLVAWAGMCPSQNESAGKRKSSRLRKGAPWLKTMLVQCAWAAKRKNDSYYKAQFLRLRSRCGPQKAICAVAASILTAIYHMVKNRTRHQDLGGGYFDKRSTSDKAKRLVGQLTKLGYEVTLQPIAKAA

SEQ ID NO: 253064 - protein, 419 aa, unidentified
MFVLWIFSKLKYITTSFANNQPGAEELALKILECLNQHPDLTMVVAALESTSVYSIHIANYLSSCEELMRFKPYVFVLNPKCTANYKKSYIGLGKSDPIDAFVIADYARAGNIESEPWRGSQFLALKRLTRHRLHLVECMTREKTYLISNLYLKFSELQMLEGDDQPFCDIYGATSSSVLMEYLSPEEILASSEEDLIAFLAEKSRNRIKDISKTADLLKKAARDSYRLDKALYEPLNVSIASSFNCIETFKREIKVIDNAIEKEIKGLNPNAFIILQSIDGIGPVFAGGIIAEIGDITAFHSSDALAKYAGLTWKSNQSGDFDGEDTPMIKAGNRYLRYYLGEAANSMRKHNVEYGAYYRKKYNEVPKHQHKRALALTSRKFVRLVYGLLARNNCTPAYRWIHQLKILTSRTYVLLKS

SEQ ID NO: 253065 - protein, 345 aa, unidentified
MTNNIQFSSVCGIDIAKSVMQVYKVTSDGVVSNKAVKRADFLNEFRNIPPALIGMEACGGSQHWARELQSLGHTVHLMPPKLVKPYVTGLKNDKNDARGIYKALEMSVREVPVKSAAIRDLALLQTMRTKRQREKIAKINHIRGILTEYGLVMGKSINAFLAKAGSLIVQLKERADVSPYIVSELTALFREVKEAMEKIKELETNIDSIAKTLKQYDLFRSAPGVGPITAATMLVLLCNPAVFKNGREFAAYIGLAPKSSGSGGKNFVTHIPKKCECNNDVRALLVQCAHSICRCKHKSDWVSSILARKPKKVAIIAIANKLARQLWIMAKKGEKFEKRFILAAV

SEQ ID NO: 253066 - protein, 332 aa, unidentified
MKIKKEVIGIDVSKLTLDVFIHSLKHHFIVSNNPSGFSKLLQVIWKELPDKKENLFFCFEDTGRYSLPLCIFLNGEKLNFAMVPALDIKRSLGLVRGKNDKKDASFIALYAWRKRDEIKPTVFPAGSIVRIKQLLSLRNKLVKHKKAYQTAMCDIQDYFKEGDSQFYLEVNKRVIKSLSSEMASIEKEIETIIKSDPEVQKNYKNLKTVPGIGKIIAFYLIAYTHNFTKFENARKFCCYCGIAPFENRSGTSLKGRTKVNPLANKMIKALLNMGSLSAVRNHPEFKTYYNQRVENGYNKMSTINIIRNKIVFRAFSVIKRGTPYINLHKFAA

SEQ ID NO: 253067 - protein, 341 aa, unidentified
MDISVLGIDLGKNSCSVVGLDAIGKVVVRRRMRRETVITYAATLPACVVAMEACCGAHHMGRALARQGHAVRLMSPEYVRPYVKAQKNDDRDAEAIAEAATRPTMRFVELKTEEQLDMQTLHRIRDQLVGDRTSLMNQIRSLLLERGYIVPQGRAKLALRLGEMLDGDEPVLGSRIHRLVSDMRLRWSALDERIADLDAEFTAAARADERTRRLLTIPGIGALNATALVAAIGDARTFGRGRDLAAWLGLVPRQATTGGKPRLLGITKRGSRYLRKNLIQGARASLPVMSKSDTRLGAWLRGLLSRSHHNTVVVALAAKMARIVWALLRHERTYDPVAQAA

SEQ ID NO: 253068 - protein, 355 aa, unidentified
MNSVRYIGLDVHRDTISAAVLNESGRLIQQSVLMTRAAAILDFIGGVRGTVHVTFEEGTHSAWLYDLLSRRVDKLVVCNPRKNALLKSGNKGDAIDARKLAELLRAGLLSAVYHGETSALEVQHLARSYLMLTEDTTRVMGRLKAVFRSQAISSAGKKLYGSKHRGEYLAALGACALRRRAECLYQQLDALQQLRHQARRELIVECRKHDEAKWLQSVPFLGPLRAAILIGRVQTPHRFRTKRQFWAYCGLALETRDSAEYRVVDGQVERRKRPAQIRGLNWNHNHELKNVFKAAATTASVCPGVFRDHYLGLLKKNMRPEMARLTLARKIAAITLKIWKKGEAFDAEHLKLQAA

SEQ ID NO: 253069 - protein, 342 aa, unidentified
MFMKPTQQFFIGIDVAKLTFDAALMVVVNHQKQPILTKRFANTTKGLKAFDHWLKNHRVTFNEHTLLVMENTGIYHRLLWQFCSEKSIPVYIGNAAHIKWSLGITRGKDDTTDSIRLCMYACKEADGLKAAPSLDPVIIRLKDLWTSRHRLLSQLNSNKTYLRELKHVSDPATQRLLEEAYKTTIAGLAASIKAVEAQIKTILRESDALQTNYKLLLSVPGIGHITAVYLLGCTSNFAGKPSGKQLACYAGLAPFAHTSGTSIKGRTRVHKMANKQLKTLLHMGARSVVQHNEELRTYYERKMKEGKHDLSVINAVKNKIVLRVAAVIAHQKPYVDKTKLAA

SEQ ID NO: 253070 - protein, 350 aa, unidentified
MQKIYIGVDFHARQQTICYLTTDSGEMLFQQLQHQDKAAVRAFYAQFSGDVIVGLEASGYSPWFERLLEELGCQVWLGHATEIRRRARGRHKNDRRDAELILDLMLHDEFPRLYLPPLPSREVLRMLRYRQKLIKMRTIGKNSLQALALQAGLAKGPHLFTKAGLQELRTVAMSPAMQWQREQWLQLLEPLNQRLLETMLWLKQQSQADQRIHRLRTHPGVGLLSALCLVHSLEPVSRFANTRKVTAYAGLDPLERSSAERKRFLGISKGGSRVLRFLLVEAAHTALRKDAELRRFYQRLAERHGRPKAKVAVSRKLLIRAYIMLRDEIDYAEFQRRAVAARSAPPAHGH

SEQ ID NO: 253071 - protein, 422 aa, unidentified
MMTDTAGTRTRDRSDDEPWVVAGVDTHKDTHHVAVLNAATGAGLGDMRVPATPAGYDQLHDFVRSHGRIRMIGIEGTGSYGAGLARALRAAGAPIREVIRPKRPQRRRGKSDPIDAYAAAGRALAEADALPVAKTGTGPCEQIRVLLVERRSAMKARVAAHRQITALLTTAPDAVRTRFARLSGGELINALARTRPAPATDTPASATARALRRLARRHRILTDEIADIDTELRALTARAAPTMLATKGYGVITTATLLVTAGDNPGRIRTEASFAALCGAAPIPASSGKTNRHRLNRGGDRQANWALHQIALVRLSSDPRTKAYAARLTATGKNCKEILRCLKRAIAREAWHLLTHPQPAPRTDDLRRLRHERGLTLTQAAHHLNTHPARISELERGTRPDTTLTAAYRQWLNTQQPQTHTA

SEQ ID NO: 253072 - protein, 421 aa, unidentified
MTTPAGAIVVVPSVSCLLEPSDQRLPSSLPYAKALTAMTTDIDLSASPVAGVDTHTDTHTVAAVTPTGRHLATETFPTTRPGYTHLAEFLSKHGVGAVGVEGTNSFGAGLTRHLIDRGYTVVEVLRPTRSIRRRDGKSDPVDALAAARQVLTGEGLSTPKDSTGPVESLRALQITRKQLVSTTAKLITTMKSLLVTAPDDIRTRYATMTNHTLVNALVYCRPSSDVTDPRNGVLTSLKILATTYRALRVQCDELETRIAALVSVINPHVSNIVGCGAVVSADLLISIGDNPERIHSEAALAHLCGVAPLPASSGRTNRHRLNRGGDRRANSALYRIAMVRMKCDQRTREYVARRTEEGLSKKEIIRCLKRAIVREIYRVICTKRSTPQPPSSAQHPVGFFQPGVVVILMLCDAPVVLGTCF

SEQ ID NO: 253073 - protein, 347 aa, unidentified
MKKVTVIGMDMGDKNHKAIGLSESGEIISREEVPCTPEGVRDYLKRYPGALLAVETGTHCRWVSRVGLELGHEVLVGNARKLRVIWESSRKNDWRDAEMLAKVARTDRSLLHPVKLRGDEDQGLMRLVKARDLLVKGRTGVVNQIRGFCKSEGAPLRKCSAASFARLEEEVAPAVREVAKPLFSVLGELSQKIGLYDALIADTVKRLHGEDAALLEPIAGVGPVTTAAFLAAVGDPATFGSARDAGPYFGLTPGQDQSGGKDPQKRISKEGNALVRRHLVTAANYILGPFGPDCELRRHGLRLAERGGMNARKRAKVAVARKLAVLMLAILRDKSEYRPLTKVEAVA

SEQ ID NO: 253074 - protein, 462 aa, unidentified
MTDKKLGGNRKERKEWARRLQSEEPGLEVVHPHAAGIDVGNGMHYVAVRPDRDPQPVRRFECFTADLHRLADWLQRCGVKTVAMQSTGVYWIPIYEILEERGIQVYLVNARHTKNLPGRKSDVQESQWLLKLHTYGLLNNSFQPPSEIRVLRTYWRQRGEHVRGAATCVQRMQKALTQMNVQLANVISDVSGLTGQTIIRSIVAGEHDPRKLAELSDPRIHASREEVAKSLEGNWRPELLFVLQQELAMYDTYQKRIAECDQQLQKHLASFANTISLPPTEEEPKRKKIKPAKNAPRFELRSELQRITGVDLTRIDGIDVMVAQTLVSEVGLDMSRWKTEAHFSSWLGLCPDNRTSGDKVLTRGTRRVVNRAATALRMAAVTLMRSRTYLGAQYRRLRTKLGAPKAITAMAHRLARLAYRMLKYGQHYVDKGAEYYEHRYRQQQIEFLRKKATKLGLQIKLA

SEQ ID NO: 253075 - protein, 372 aa, unidentified
MNSIVYVGMDVHASNYTLSCYTPTSDECFATVQMEPDVKNILTYLKKVQRNLGTPCEFRCGYEAGALGFSLYYQLQKHGIPCTILAPSTMPTFHRNEIKTDRRDAMKIARCLAFGAFRPVHIPTKEDAAVKDFIRMRDDHKIALKKIKQQIQAFCMRYDLHFTEGRSYWTQRHLAWLKALALDDLLREVLDEYLVTLHQLADKIERLDARIEELAQGERYAENVKKLSCLIGVRTHTALALVAETGDFHRFAKAEQYAAFLGLVPGERSSGDKQSRTGITKAGNTHLRKLLVEASQCYGRGKPGYKSRLLKARQQGNTSEVIAYADKANERLRRKFYRMVLRHNKKHNVAVTAVARELSCFIWGMMTGHTAI

SEQ ID NO: 253076 - protein, 380 aa, unidentified
MNRIWAGIDSGKTHHHCLVLNESGERLLSRRVANDEPELHKLLDSVLALGDQVTWAVDMAGGEPALLLALLVNHGQEVLYIPGRVVNRASGGYRGEGKTDARDAFVIADQARIRQDLQELRPSDEAIIELRLLTNRRADLVRDRTRSINRLRSALTGMFPALERALVLTSAGPLVLLAGYQTPAAIRRLGTGRLTRWLRTRGVRSPQELAKNAVEAAERQHTAVPGETVIAQLVQTLAQEVQTLNEKVAEVDQLIEARFRTHELAEIVASMPCIGPLLGAELLAAIGNDLAAFASPDRLAAFAGLAPAPHDSGKRNGNLHRPRHYHRGLKRVFYMSALMSVRYDPNSRTYYDRKRAEGKRHSQAVIALARRRVNVLWALI

SEQ ID NO: 253077 - protein, 413 aa, unidentified
MPLRFIGLDVHREFAQIAVLEGGQVRHAGRIPTTPAALRGFAETVGSDDHVALEATCNTFAIVRLLRQRAGSVVVSNPLRTRAIAEAKIKTDKVDAQVLVRLLASGWLPDVWVPDDQTQILRQQVAHRARLVQQQVRLKNRVHGILHRNLVLGCPRSDLFGKGGRRWLELQALPALPSHERITAEATLREQDLIGTEPATIERILAGTALGSSEVCRLMTIPGIDAMTAVALVAAIGAVQRFASPTKLVGYLGLDPRVRQSGTQPASYGPISKQGRAYARGMVVEAAWAAVRAPGPLRAFYRRIRARRGPQIAVVATARKIVVLAWHLLTRGEDYAFARPSLLAQKQRHLELRAGRPYQRGRRGAAHAYNLKEVRRREWALAVQAERAYKALTDHWHRARPGTDAGASKGERR

SEQ ID NO: 253078 - protein, 370 aa, unidentified
MGKSILYIGLDVHKNTIDVAIADGRYESQVRSYGKIINTPDALDKLLKKLQSGKSELSVVYEAGPCGYQIHRHLTSKGISCSVVAPSLIPKRSGSRIKTDRRDAANLARLFRAGELTCIYIPTREDEAMRDLTRCRDDIKRLQRKVRQRLLAFLLRHGFRYSGTKNWTKAHTNWLAGVKMAHPAQQIVLQEYIDAANECTDRVERITEQIHALLSEWSRAPFVRAYQALRGVSMIVATTVAAEIGDMSRFKKPKELMAYLGLVPSEHSSGNTVRRGSITRTGNGHVRRVLIEAAWAYRMQARKTITILKRQEDLSKSICDISWKAQTRLCTRYRRLYAKGKSKQAAITAIARELSAFLWAIDKEVQQTIV

SEQ ID NO: 253079 - protein, 452 aa, unidentified
MPARKDKIMQHKKVLMMLQNIPYLSVGLDVGADFSWMSIMLPNGTLTAKPFKIIHSDPLSRELAVTKIKEAQEMYSLKSRCFLESTGIYHIPLLCFLRDRGFDCSVINPIITKNSTNMNVRKLHNDKFDSKKAAKVGQDASLKTSIVPDDAVIDLRNLVRDYYYFKDQQSAIVLKLHAELKMSFPAYLDVFSKVTVQTSLKLLEAYPLAADMLAAPRDELVESIRQTARFGEKYAISKYDAICAAAKDAAVFGRALPSNALRIRLYIKTYREYQAHLDSILEELHKTVDNLQGDPVYDRICLLQSLQGVGFLSAVVLIAEMGAFDLFSSPKKLYAYFGLDPGVNDSGKFHGDRVHMSKRGSSLARRILHMIAINNLKVDKAAKAPVNPVIYDYYIRKCASKKKIVAVGAVMHKICNIIFAMLRDNKPFELITPKKHCERYAVEHPGAVNIAA

SEQ ID NO: 253080 - protein, 433 aa, unidentified
MKVLYERVAGIDVHKEMVKVAIRSPGEKPWTRKTEVLEFRTFYGVLQAMARELRRRGVTHVVMEASGVYTEPVYYALCEQDFEQVAVINPAHAKALKGHKTDAKDCARLAELFECGLCAGPNIPPAELKEVRDLTRYRIKTVQARTSEIQRLAKALESAGIKLGSVASDITGVSATAMIESLIDGERRGAVLADLAKGRMRTAGKLADLSMALTGRFTEHHALLCRLHQDRIAGFDAAVADLDERVAGKAARWRREADLLTSVPGFGDVVAQAWLGEIGPAPHRHFATCEKLASWVTLCPGNNISAKKRKHGRTGDAGTYIKPMLIQAAWAAIRVKGRLQARYNRLVRRFGGDKNPAAKKKAITAIAHTLLKIAYQVLKSGMPYQELGADFYTRRESPEQRQSWLERQLQKLHPGCTVTITISPPEAALLPGA

SEQ ID NO: 253081 - protein, 338 aa, unidentified
MTIVMGLDQHRAQITAEWMDTESGEVMRSRVAPAHRAGVRRFCERFRGQELEVALEATTGWRFVADELRRVGAVVHLAEPAETAARRGNKKRAKSDRADARHIRELLMIGRLPESWIPPDHILDLRARVRLRHTLSHQRGEWQQRIQAVLYHHGCPQRSNLMTGEGRSWLAAQPLPSAAREQVSVALSVIDALDAQLAPLDRELRAVARSQAGCKALMGQFGVGELTAVTILAELGDARRFSSSRDAVRFAGLDITVHQSDQRRAAGHLSRQGPPALRWALFEASMCAARACSPDYEYYSQAAERLGSNRARLSVARKILKRSYHLLRELGEEAMAPA

SEQ ID NO: 253082 - protein, 311 aa, unidentified
MKEPERFVGIDISKEELVVAVRPTAELQSFPNTEEGLATLVGFLQPLGAHSIVLEATGGFARAAVNAMALAALPVVVVNPRQIRDFARSVGLLAKTDAIDARIIARFAEAVRPELRPLKDLETQKLEDLNNRRRQIVEMITAEKNRLVMAPPWSQKDIRTHIAWLEKRLKRINDDIDDLIKQSPIWRQKEKILTSVLGVGPVVTTTLLCGLPELGSLSARKLSALVGVAPFNRDSGQSRGRRSCWGGRAHVRAALYMAALTASRCNPVIREFYLRLRLAGKPAKVALVACMRKLLVILNAMVKNNTCWQQA

SEQ ID NO: 253083 - protein, 344 aa, unidentified
MADNTLVAVDLAKTVFQVAFSNHPGQVSKNRRLSRTQFAQLLGQLPESTIIMEACGSAHFWARRMQALGHTPVLLPAHTVTPYVDRNKTDRADTKGMLEAHRNEAIRPVPVKTVTQQALCSLHRIRAGWIAERTARINTIRGLLREFGIIIPVGAQHAVPDAWLHIEDAESEIPDSLRPALAEICTEIRELERRVKMIETQLGALAEQTAAVARLMTIPGIGLITATALVAFVGDIHRFPSARHFASYLGLTPKEHSTGSRRRLGAISKKGDVFLRTLLIHGARSVLNAAQRKKSPDRLHAWALSRHAARGHNRAATAVANKIARIVWAVWKRDQPFISTPLVA

SEQ ID NO: 253084 - protein, 341 aa, unidentified
MKNLFIGVDFSKEKVDVAIIFADGLTETAARVFNEFKTTVSGYKQLVKWVEQNSYGIDSSLWLFCGENTGDYSKGLCNFLYGKGYDMWLENAKSIKDASGLRRLKSDRADASMIAEYAMRNYDKAVMYEPLSESLVQLRELFLYRQMVVRHRCSFQVRRGEKRLTMEKSPVKTMISQSGRHIVSELNKEVEKIDKRIAELIKSDEELTEVFTIVTSVPGIGTQNAVSLMVYTDNFRRFNYDSRKIACYYGIAPFGKDSGTSVHSDPHVHYMANRQIKSMLTQAALAAVNFNPVMARYYMRLVERGKKKQVALNNVKNKLVHLITAMVRNRQLFTTEYKITA

SEQ ID NO: 253085 - protein, 280 aa, unidentified
MNYHTALDVSLRSVSICIVDDEGSIQFEAKVPSEVEEIDKCLRRFNAEIKSVGFEAGTLTQYLTYGLQAAGYEVICLEARQVHAALSAMRNKTDKNDARGIAQILRTGWYSRVHVKSMESHLIRALLSSRKTILKKCVDLENEIRGLIRLLGIRLPGTLYHGVYDATVRQAIEADASMVDALIPMLDARLVLYQTYLKLDNQVKVPAREDTICQRLMTVPGVGAITALTFKAAVDDPTRFKRSRTVAAHFGLTPRRFQSGELDNPGRISKAGDPDVRCAL

SEQ ID NO: 253086 - protein, 368 aa, unidentified
MDDFITASVGLDVHVDSIAIGAAAAGRAPPRFLGTVPPKLPSLLKALGQLGPPRALRIVYEAGPCGYGLVRELRSRGYQCEVVAASKIPRQTGERIKTDRRDALKLASLCRAGELVSVTVPDERDEALRDLSRAREDAVRARLKARQQLKAMLLRHGKRYTGKTSWTAAHERYLAEVGFAHPAQDIAYVEYRQAIREAHERVERLVEALRAQVQTWRMRAVVEALMSLRGIDFVAAVTLVAELGDLRRFAHPRDLMGYLGLVPSEHSSGNTRRLGEITKTGNGHARRILIEAAWNYRFPARIGLVLERRQQSQSKAVRDIAWRAQRRLCQRYRRLNARQLHHNKICVAIARELAGFIWDIARQVSPNP

SEQ ID NO: 253087 - protein, 409 aa, unidentified
MEVRYPRCAGLDVHKDSVVACARIVGDAGVQQDVATFGTTTSALLALSDWLERHGVTHVAMEATGSYWKPVWHVLEASFELVLANAMHVKNVPGRKTDVNDAMWIADLLAHGLIRGSFVPPTAVQELRALTRTRKQLVREKAAHVQRIEKTLQGANLKITSALSDIVGQSGRAVLRAIIAGETDPETLLAAIGKRRLKASRAQLLEALRGHITPHHRFLLKLHLQQVETLDRAIATIETEVGESLRPFRTAADRLTTIPGISDVAASVIVAEIGVDMSRFPTVSHLISWAGLCPKNDESAGKRRSTRIRKGAPWLKTALVQSAWAAVRSKETYLRAQFLRLKSQRGPRKAIIAVAASILTAAYFMLRDGTNYQDLGGDYFDRKDRVRAAARLVRRLQHLGYEVNVREAA

SEQ ID NO: 253088 - protein, 467 aa, unidentified
MKNNDYNLFVGIDVSKGKADAAVLAVPELRSVKPRFLRKKLSFKFIKSDVVEFLNSVRKYSSDQHCLHTYFALEVTGIYSTNVYSFIKENCNSDEEIHQLNTDFVNKWRESHNISKSDPLDAQTISTIVGTDDDVRYVSDSVFENKNGYQDLKALVHRHYQIKKLHSQETNRLIALCDCYFPELQYVFEPKSAAFLAVLSQYPTSHDIINASKNEVFSLVYEASKHRCNMDKIDKLFNYAQDTLVPHVSDHIRCVIFNTVESIFNIRAQLKLIEKDIRKLASTFNVYSLLMTITGCGPLTAAVIIAETGDIFRFKNADHYVSYSGSSPRNKRSGKSVEIMGKISKKGSKYLRHALYMIAEFARRHNPVLKHLFERVKNGNKKRHKLAVIAVANRIARYIYSIMKNESSFVIMHENIMRLPEETRNTFFNSISLDFPKNTRKQIYQYSDVNGEIHRFVYKNETTESIA

SEQ ID NO: 253089 - protein, 356 aa, unidentified
MQTQVTKKIDFSGKDLFIGLDVHKKSWSVTIVIDGMEHRTFTQPPDPLALNNYLQRMFPGGSYNSAYEAGFCGYGTHRELKSLGINNIVINAADTPTSQKDKLHKRDPTDSRKIARELEKGSLRGINVFDRELEELRSLNRTRFYLMRDLRRSKNRIKSFLMYYGVPIPPEFDNNQWSLKFISWLKQVRMTTEAGQQAFSHLIESYEHYRQQLLILSRIVRLRISHYDKELYSLLTSISGIGPLTASALITEVGDINRFTHINHLASYVGLIPRVRESGETTHIGGITFRCNTFLRTLLIESSWQAIRMDPALMQYYHRHVINSKGHKVIIKVARKLLNRIKYVMKNRQPYVTGVA

SEQ ID NO: 253090 - protein, 383 aa, unidentified
MSGKAAIVVVVGVDTHKATYTLVGADAGGRPVGELTVRATDAGHLKALGWARELFGADLVWGIEDCRNLSSRLERALLDAGQQVVRVPPHLMARTRASARTRGKSDPIDALAVARAVLREPDLPVASHDDVSRELKLLVDRREDLVVHRTAAMNRLLWRVHELDPSHAPGPSSLVRVNPRRVLGAWLATVPGLVAVLAREELAEIGESTEQINALERRVAARVRLQARSLLTIVGCAELTAAKVVGETAGVSRFRSEAAFACYAGVAPLPRSSGGIRVRARATRSGNRQLNVALFRIALTQTRHPGPGQVYYQKRRAAGDTHAEALRRLQRRVVRSVFGCLRADDANRAAASQTTQRFCELQRFPELERINDEWSRALALHGS

SEQ ID NO: 253091 - protein, 358 aa, unidentified
MNRNTGMNAGQIIGTMNGLQVVGMDIAKHVFQLHTVDMGTGEISNIQIRRAAVVELFANRQPCLIAMEACGGAHHWARELKNLGHTVCLIHAKAVRPFVSGNKTDATDARAIWLAVQQPGVKFVGVKSTDQQATLTLHRQRELLMKMRTMQTNALRGLLYEFGATFAKGRTALFKDVEQALDDLADKLPQMVRDSLREQVDRIKALGQDMQAIEKRLALQLKADPQMQRIAQIPGVGVLTATAVIATMGEASAFKSGREFCAWLGLVPKQTGSGGKVRLGNISKRGDTYMRTLLIHGARSVLHHVKDPGPWLQQIKERRPGNVVIVAQAAKMARTIWAVTAKEQDYQRGFKSVRPLTA

SEQ ID NO: 253092 - protein, 349 aa, unidentified
MTTMALMAGAVIGGVDTHAEIHVAAACDGLGAVLETASFPTTAAGYRQLLGWLRGFGSLGRVGVEGTGSYGAGLTRHLLAEGVEVLEVNRVSRQTRRRRGKTDVVDAIAAARAVINGDASAAPKSRDGAVESLRVLKIVHRGAHKARTQAINQIRAMVMTAPEQLRADLRELKRPVLLATCLAFRPLDRDDLISTTKVALRMLARRITELDAELALLDTRRRRLTTTIAPELSAAYGVGPDTASGLLLAAGDNPQRLRNEASWSSLLAANPIEASSGKITRHRLNRGGDRQGNSALWRIVIVRMANDPTTKAYVERRTKEGKTTPEIIRCLKRYVARETFDLLPRELRI

SEQ ID NO: 253093 - protein, 332 aa, unidentified
MSTFVGIDIGATAFEVVIRKNDKNGAVKSYKQTHQDHEKLAAQLLKLNPASVVMEATGIYYLNLAVVLFNSGLNVSVINPKSFNHFAKLTLTHSKTDGIDAALLAEYAQRMTPRLWTAPDPKLLSLRDIGRQINRLIGRRTEAKNNLHALQAKGSTHQPLIDDELEGIEYLEFRIERMRNMALEIIANNENLKQKLENLTAAVGIGTNSAIMIICELELLPEHLKSSQVSRFAGLDVRLTQSGTSINKPGRLSKAGNSYLRTALFMPALSAATHDANARAFYQSLIQRGKRKMQALCAVMRKMLTGIWACLKLNMPFDSSKLFSEEHKKACA

SEQ ID NO: 253094 - protein, 417 aa, unidentified
MRIVRPICCGADIHKDLIVATIAATNQDGITEYIQSSFSSQNFDLVRLKAWLIEHHCFEIAMESTGKYWIPVFNVLEGEIKVFVVHPKYTKAIKGKKTDKKDSKWIADLFKHDLLKFSFIPPKEIRELRELSRYRIKLIAMRSSERNRYQNSMTISNIGLASILSDPFGKSSRAVMKEVIRSSSVTEEKISKLLERNAKKKVKEVLHSLEGSHIESDQRLKMNIASQHMDQIDSHVRRLETEMAIRCIPYATLINLLLDIPGISYLSAMTIIAEIGTDMSVFETSKQLSCWAGLAPANNESASKKKSVRISKAGSYLKPLLVQCALAAINSKSNPYYRIKYNRIKKRRGHKKAIIAIARMILVNIYHILSTGEVYSPCDMEQIINPKPVKKVMTIQNAIEFLQSQGFDTSKLISSSS

SEQ ID NO: 253095 - protein, 401 aa, unidentified
MSLQSPESKRFIGLDIHKHYLVACGVDADLNPVLGPQRVEYVNLDRWISKSLRTDDAIVIEMTTNTWQIYEDLLPHVGSITVVHPPHVALITRSQVMNDKIAALTLARLLAKGLLMGIWVPPQEVRDLRALIAQRNKMTRLSTQAKNRLHAILHRHHILPPQGNLFQPDLREWWLGLELVPAEKTNLLSNLDTLEFADQQIAQIETTLKSLAAQDERVPRLVQLPGIGMINALAILAAIGTIDRFPTPKKLVGYSGLGGRIHESGMTSRKGAITKSGRRDLRAAMVEAAQSAANFHPHWKAELVRLEPHLGRNKAIVAIARKLLIAVWFVLSQPVSDRFAEPELVARKFITYANVLGKANRPAQQTAAQFVRLQMDALGLGTELKELRGRNHKTRLLTLPP

SEQ ID NO: 253096 - protein, 346 aa, unidentified
MELFIGLDVSLANTAVCVLNSHGIEVNEVTVASEPEALVEFMRGLSGRVAAVGLEAGPLSQWLHGHLTEAGFETVLMETRQVKGALKAMPIKTDRRDAAGIARLLQMGWFRPVHCKSVSAQEMRAVLTARKSIQQACVNLELSIRGILRNFGLKIGKVSRGNFEFRVGELVEGNSMLKAAADPILRVRAVLRSELAALDKLTRDRAKADSVCQLMMTMPGVGAVVALTVKAAIDDPERFRSSKDVVPWVGLTPRRTQSGERDIIGQITRAGDTSLRTALVQAATIMLNRGRPNWLTAWAVRVAQRRGKRRATVGLARRIGVVLHRMWLDSTEFRFARKPNMSPGVA

SEQ ID NO: 253097 - protein, 479 aa, unidentified
MTAGRMNRKQRKELTRQLRSEDPGLDVVHPRAAGIDVGNGAHYVAVRPDQDREPVRRFECFTADLHRLADWLQACGVETVAMQSTGVYWIPLYEILEERGFEVYLVNARHTKNLPGRKSDVQESQWLLKLHTYGLLNNSFQPTAEIRTVRTYWRQRAEHVHAASTCIQRMQKVLTQMNVQLANVISDLSGLTGQTIVRTILAGEHDPQKLAELSHPRIKASREEIAKSLEGNWRSELLFVLKQEVEMYDIYQQRIAECDRELEAHLKRFADNVHQKPAEAGPVSEEQKDKKVRAKLPRSGKRAQGNAPCFDLRSELYRISGVDLTRIDSINVVVAQTVISEVGLDMSRWNTEAHFASWLGLCPDNRISGDKVLSKGTRHVINRAATALRMAATTLLRSRSYLGAQYRRLRTKLGAPKAITAMAHKLARLVYRMLKYGQDYVDKGMQYYEDRYRRQQIELLQKSAAKLGLQIVEIQAVGG

SEQ ID NO: 253098 - protein, 340 aa, unidentified
MKKVFIGIDFSKLKFDAAIYDGETNENIGSQVFDNEVTGFKDLIKWVCTKTKIKRNEWLFCGEHTGLYSFALPVFLCKKGIDICLESGLQIKRSQGIQRGKTDKIDAFRIAEYAYRHKDKLKTFNPLSKTIDGLKDMLAFRERLIKAKKMFVISSKELKLAKQTGIIAEYIHLDSDLEIKSLEAKIKSCEIKIKELIQSELDLNTNYELLISIKGIGLVNAATILAITANFTLFTDPRKFGCYCGVVPFKYKSGTSIKGRTKISKLANKKVKALLTQAARTCVMHDAEIKSYYQRKIAEGKSDKIVINNVRNKLIHRMFAVVTSNTMYDPNYLNPLRCAS

SEQ ID NO: 253099 - protein, 417 aa, unidentified
MARRLRLEPEDIIVGLDLAGEQHQAVICRAAGERLTRFRVSHSLRGFDDLLMRTRLLAPQADRRRVFAFEATGHVWEALAHYLDTHGEEYVIVNPLATFRLREARQMNRHKTDLTDAEQIAELVRNDLVTETKLEVEPYLELRRAWGEYARLREERARLKTLLSHQLYGVFPELRSVWSDLFAPGCLAVLRLGLSPHEIAALPLNDFIRRAKDASRGRRLWRFKLIDVHEWAERTVVSAVGLAPLARELARLVERADLLTHQIDELAKEIQERLTSLEEARYLLSIPGISWSSAAGILAHIGSIDKYRHGRQLIKLAGTNPSRRDTGQRIGRQQGMTHRGRAGLRQVLYMATLSCLQHNPRIRAHFDRLVAREERPLVRMQAFGACMNKLLLYAFAVMKRREIFDVEHVGKGVALVA

SEQ ID NO: 253100 - protein, 340 aa, unidentified
MRKLYAGCDLHSNSNFWGIRDETGEKVFHKKLPNDLALMLAMLEPFREELVGIVVESTYNWYWMADGLMEKGYQVHLANPSAIQQYEGLKHADDKHDAFWLAEMLRLGILPEGYIYPKQERPVRDLLRKRGHLIRLRTSMVISLENIICRNVGRKVSANDVKRLGEDRVTPYLEGQEDLALAGQVSKNTVDFLSEQIQEIEKAVLKRVRLKKSYRLLLTIPGVGKILALVIMLETGPIRRFATVGDYGSYCRKVPSQWRSNEKKKGSGNRKSGNRYLAWAYAEASEFARRYYPEPRVYYQRKMQKTNAAVAHSALAHKLARAAYYIMRDQVPFRMEKLFG

SEQ ID NO: 253101 - protein, 416 aa, unidentified
MNAVGIDVSSRKSTVAVLRPLGEVVCLPFDVTHDIAGLASLVEKLKALDGETRVVMEHTGRYYEAVEKALHEAGLFVCAVNPLLIKEYGANSLRRVKTDKADAVKIARYALDNWADLRDFTPMDAIRYDLKTLNRQFQLASKQRTASANNLIALLEQSFPGIRKCFDSPVRSDGTQKWVDFAHSFWHVDCVRKQPFPAFCERYRKWCKRHAYLFKLSNAEEVYALAKRAVVLTPKSKVVKVLVQEAANQLSSISRSVEVYRAEMDRLAAMLPEYPVVMAMYGVGKSYGPQLMAEIGDVRRFERKQALVAFAGIDPMPNQSGDKNVRSNKSSKRGSPYLRKTLFNVIRTYLQCAPQDEPVFQFLNRKRAEGKPFYVYMLAAANKFLRRYYAKLRDYFASLDTLQPVAPIPAILKATL

SEQ ID NO: 253102 - protein, 322 aa, unidentified
MNKYKETYGVDISKDVFDVHGDLTGHSQYENSESGFNKFLKALPNDTLVAMEATGYYHYRLAQFLYRNGVIVSVINPLSIKRYIQMKLSKVKTDKSDAKAICEYAMVNEVPIYNALTDIQSECLQLFRLLDAYIKQRTATKNKMHGEEVLGLPSKFVYRSLRRNRKQLDREVAAIEAKILSLVKEDQQQQLTLLTSIPGIGQKTALFLIVVTDGFSKFEKASQLCSYVGITPTIRESGSSVRGRARISKVGNRKLRNLLFLCAFNACKHNKACRELYERIVNKGKSKKLALIAVANKLLKQCFAIATSGRPYDETYVSVLPR

SEQ ID NO: 253103 - protein, 338 aa, unidentified
MTLYGGIDLHCNNVLISLIDDFDQLVCEKRLPNKLDTIRSHLQPFKADVCALVVESTYNWYWLVDGLQDEGFDVRLANTIAIKQYEGIKHTNDASDARYLAQLLRLGILPEGHVYPREQRAVRDLLRRRLLLVQQRVTQHLSLQSLIARHSGIRLPSLKVKQLTSESLSEYLIQPAALTSARIFLEQMNSLNQAVKELELAVGVQCLATQEYKLLNSIPGVGPIIGQSILLETGSISRFAGVGNYASYARCVPSERLSNGKVKGRGNRKNGNRYLALAFMEAAHYATIWEPTIKRYYQRKLTKVHKMVAKKTIANKLARAVYHMLKNNQPFDVHRAFH

SEQ ID NO: 253104 - protein, 333 aa, unidentified
MENIALIGIDLGKNSFHIHCQDRRGKAVYRKKFTRPKLIEFLATCPATTIAMEACGGSHFMARKLEELGHSPKLISPQFVRPFVKSNKNDFVDAEAICEAASRPSMRFVQPRTESQQAMRALHRVRESLVQDKVKTTNQMHAFLLEFGISVPEAAVISRLSTILEDNSLPLYLSQLLLKLQQHYHYLVEQIKDLESQLKRKLDEDEVGQRLLSIPCVGTLTASTISTEIGDGKQYASSRDFAAATGLVPRQYSTGGRTTLLGISKRGNKKIRTLLVQCARVFIQKLEHQSGKLADWVRDLLCRKSNFVVTCALANKLARIAWALTARQQTYVA

SEQ ID NO: 253105 - protein, 341 aa, unidentified
MKQFIGLDVSLKDTFVSVREDGERIWRGKCPSDPKLIAELVRKRAANVERVVFETGPLSVWFYHALRQEGLPAICIDARHAKAALDMARNKTDANDADGLAHLAEVGFYREVRVKSFDSMLTRTLIAARNQLLKATTQMLNQIRGLMKTFGLIVPKGAGRVFEGHVRSLLASNAGLEQILLPVLEAWRGMRARAAELSKQLVASARASEQCQLLSSIPGVGTVTASSFVAAIEDPKNFRKSRSVGAWVGLTTRRYQSGEVDYDGHISRRGDSHLRGLLYEAAVVILTRTTADSALRIWGLKLKEKIGFKRAAVAVARKLAVIMHTMLRTGELFDRSIAAEV

SEQ ID NO: 253106 - protein, 450 aa, unidentified
MSKPKPQVIEDEEHQRVFERVAAIDVAKASGMVCVRLPGRDGRPRASKVWEVPAVTSAVTELGRRLLSDRVQMVTLEATSDYWRIFYYLLEALGLAVQLVSPAQARQLKGRPKTDKHDAMWLARLTEWGMLRPCFVPPAPIRALRDYTRARTDYVRERTRCYQRLEKLLEGALIKLSSVASKLTTESAKDMVRALIAGERDPHVLAGLARTRMKAKHDALAEALTGMFDAHHGELAQLELDQVKFLDQNITQLQARIRDTLAAIPEAQGVDADGTTGPAAGTGADAPVLPAAARLAEIPGISPDLAATIIAETGLDMSRFPTAAHLVSWAGLCPAANQSGPRVRAGKKKHGNAYLRGALGQAALGAARTETFLGERYRRVARRRGKAKAQVAVARSILTIIWHLLADPAARYTDLGPDYVASRTDRDKKIRNHVRQLQALGLQVTLTPAT

SEQ ID NO: 253107 - protein, 343 aa, unidentified
MSDVALIGIDLGKHSFHLHGQDKAGRMVFRKKLTRSQMFTLLSNFPPCTVVMEACAGAHWVARRVTALGHQAKLISPQFVKPFVQGNKNDFADAQAICEAASRPSMRFVSPRTETQQTISALHRVREALVRDRTATINQIHGFLLEFGISLPKGPAIIKRLPAVLAEHDAILPPRLVGILERLRAHFNYLSEQIAQLERELTQQLAQDEMSSRLLEIPGVGPITASVLATELGDAKQFANARQFAASVGLVPRQYSTGGRPTLLGISKRGDKNLRRLLVQCARVIMLRIEQRHDALGKWVRKMLMRRHSNVVACALANKLARIAWAILAKGTHYDSGQAAATA

SEQ ID NO: 253108 - protein, 409 aa, unidentified
MERVVERGCGLDVHKKSIAACVRIPDERGQRRQQVRTFGTVAAELLALRDWLEAHGVTHVAMESTGVYWKPIYYVLEEAFTCVLVNPVHMAQVPGRKTDVQDCVWIAQLLEHGLLRGSFVPPTPIRELRDLTRYRKTITQERSRAINRLHKTLEDADIKLASVATDVLGVSGRAMLETLVRGNTDPDVLADLARGALRKKLPALRQALSGRFRRHHAFLVSQILAHVDYVEEAIEAVSQQIDVVIAPFTSALERLSTIPGVKKRTAEVILAEIGPDMSAFPSAAHLASWAGLCPGNNESAGKHRSGRTRKGTPWLRTALTEAALGAIRHGRGALATRYRRIMRHRGHKKAVIAVAHAILVVVYHLLTRQTTYHELGDDYYDRRHAERAKRRALETLERQGYRVVLEPAA

SEQ ID NO: 253109 - protein, 349 aa, unidentified
MKKIVKQVLGIDVAQKELVVCLGRMYEDWTPELYSHGTFANSKKGFDAMVKWAKKLTIEATPVRYLMEATGVYHESLAYYLEGKGYEISVVLPNKISNYFRTLEVKTITDKTASEAIARFGLERKLDTWKRPKQIFKSLKQLTRERDQIIETRTSAKNQLHAEMVEAFPNPSSLHRIKAHIKFLDKQVTEILKEITELVKQDVQVNESIELICSIPGVGRLTAATVLAETNGFELIRNKRQLTSYAGLDVREKQSGTSIKGKARISKKGNRHLRKAMHLPALAAIRHEKKFKAVFVRLVSKHGIKMKAAVAVQRKLLEIIYTVYSKNTTYDKNYLNQNEAEVHKQPSLV

SEQ ID NO: 253110 - protein, 362 aa, unidentified
MAQVRSWAGLDVHRASVFAAMMDRDSGELGVRRLPGSTDDVVAFCAGLPGPTRVAYEAGPTGFALARALHAAGVQCVIAAPGKIERPTSERVKTDERDAQRLLRLLMIDALHAVRVPSVEEEALRDLVRAREDIRGDLMRARHRMSKLLLRHDVRFDGTAGAWTTHHRAWLGRVDLGERGAQVTLMDYLGAIDALIVRRDTLETTIGELVPGSPWADTVARLRCLRGIDTLSAVGLCAEIGDWQRFPRAAHVMSYLGLVPSEHSTGQTRRLGSITKTGSGHGRRLLVEAAWHYRRPPRKGDTLKRRQAGQPAHVIAISWQAQQRLHRTWQRLDGERGKRRTLVAVAVARELAGFCWAAANAD

SEQ ID NO: 253111 - protein, 408 aa, unidentified
MLFFLGDDWAEEHHDVELQNGAGTVLARAKLPEGIVGMAKLHAMIGEHLGDEDEAEVVVGIETERGPWVQALVTAGYRVHAVNPLQAARFRERLGVSGAKSDIKDAHVLADMVRTFAEQLRPVAGDSAEAEAIKVVTRAHKTLIWERTRHLLRLRHALREFFPAALLAYDDLSAVDTLELLAAAPDPASAKALSIDRIEAALKRARRRSRAVKAQAIADALRTEHLGQPAIVSTAYAATVRAQVAILTVLNTEITTMEDQVDAHFGQHPDAEVYLSQPGLGVVLGARVLAEFGDDKNRYTDARARKNYAGTSPITRQSGKRKVVLARYVHNDRLVDALGLQAFSALRASSGARAYYDQLRARGTGHRAALRQLSNRLVGILHGCLKTRTPYDEDTAWPPPQQDQQTAA

SEQ ID NO: 253112 - protein, 424 aa, unidentified
MKVTYQTCCGVDVHKSFLVATIVKTTGGIEPSYQKKRFSTFNNSILEFKQWLLDNHCHAVCMESTGKYWVPVFNLLEDKINVVIANPKWVKAVKGNKDDTKDSKWIGDLFRLGLVKGSYIPCKKVRILREYTRYRYKLVSCRSSEKNRYQNALTVCNVALDSIVSDIFGKSSTSIIDYLLEQSGTSINHEEIASKLLRSLKSKEDAVIESVEGYQMTDAQKYRMRLVRAHMDYITAEINDVDKMIENMISSNPDFENAVQFLCTIPGVKRDSAITIISETGTDMSQFSSSKRLCCWAGLTPGSNESAGKKKSVRITRAGVYLKPALVQCAHAAVKSDKSPYYKKKYESLVKRRGKKRAIIAIARMILTAIYQMLSTGEQWNPSDLYKIDMPVALVEKQKAKAIKQAKKLLQREGLLPPDEPLAS

SEQ ID NO: 253113 - protein, 428 aa, unidentified
MDEVDRNRLEEFRQLRKEVRHSEEYLIVGIDIAKDRHHAFFGTARGKTFLKRLVFSNDYEGFRKLLDQAEALRVRHGLKRVVYGMEPTANYHKPLGEFLIHLGRTVVLVSGVTVKKNRESLDGRWDKHDVKDSANVADLVSQGKCLYYEYPSAGLRGLRGLLSLKRRLKKEEHGYKVRIRNHLIAQYYPEMDRDWERLGAEGLSMMRWCFPPAQMTVLDLEPFIEQVTSGRIRVEKRRRLEAIWEKAGETIGCDGVPGVEHEAKVMVEGLRQIRQMIKETEDKIQELCGQFVEYPSLLTIPGYGPDVSAKVLGALGAPDRFQNGKQVLKLAGLDLSANRSGKDSDKAIPQISKRGKADLRYALYQAAFIASTKNRDFMRYYTSKIRGREKEKGIHRKLLVKLSAKMLLIAWSLMKKKEVFDPGHLNAE

SEQ ID NO: 253114 - protein, 427 aa, unidentified
MLNNDYNKQYERRQRIKRTTLVMGIDIGADFNAIGFMNKDGNILGRLPKVYNSREGFDKFVRTTEELKAKHGFKDVLIGLEPTGHYWRKIAYFAKDQGYAVRFIRTTSLKHERELNESSSAKSDIKDALTLTNLTREGKYIDTIIEDGVARQLRTLSKVREKIQKHNTGAKSMLHAVLDDYFPELKKIFWAMNSKGLWAILDTCPFPEDVLKFKQSALANIIAKASRRKAEAVQKASALYLAAQTSIGLKMIGAADRYRLMVCLKEVRRTERMLKEIQKELKALLNQLPSSRYLLSIPGMGHLSAAVFLGELGNPVYFHHAKQIIKYAGYDPQESDSGKKIGRKVISKKGRWLLRKFLYLMSLRAVVHSKFFHAYYQRRLETKNRFGQLLKKKEALCAVAIKMIKVIFALLRDKREFQDTVSFSLAA

SEQ ID NO: 253115 - protein, 344 aa, unidentified
MEISTIGLDLAKSVFQVHGVDGSGRAVVRKALRRSQLLPFFGKLSPCLVGMEACGTSHHWARELAGLGHEVRLMPPAYVKPYVKRGKTDANDAEAICEAVTRPTMRFVAVKSPEQQAALSLHRTRNLLVKQRTQLVNMIRGVLAEFGLETPRGLHHALALAARLVDGEATDVPALAQRVVAGLARQIETLQAELTAIEKEILAWHRSSDVSQRLATIPGVGVISATALAASVTDPQQFRSGREFAAWLGLTPLQNSSGGKERMGRISKMGDKYLRRLLVVGMTSLVRRARANPTSVDPRINDLLARKPVRLATVAMANRTARIVWAVMARGETYRRPATMGLAA

SEQ ID NO: 253116 - protein, 359 aa, unidentified
MIVIGIDPHMKTHTAVALDAATGRSLGEKTVACTDTGHDELLAWARRLDPARVFAIEDCRHVSGRLERHLIPAGERVVRVPPKMMAGARASARTYGKSDPIDAACVARAALRESGLPEARLSGPEHDIRLLTDHRDGLVKERARIQKRLRWHCHDLELPLELPPRVLDRYVWLDRLEAALRALPESTRCRIALDELARCRELTVAVRGFEREIRELTKALIPELLAFPGCSTIGAAHLVGETAGVTRFGRESAFAMHVGTAPLPVSSGKSERHRLNRTGNRKLNSTIHMIALTQARMHPPAIAFMEKKRAEGMSHREALRCLKRHISRAVFKAMLRAERTRSASVVRVEFGPGPVAVAV

SEQ ID NO: 253117 - protein, 445 aa, unidentified
MHPQAPASPRLVNMNCSPTPAIQTEMKTNDYAAYLALDWGDSQHAFALQMADTQKTEKGQFAARPEAIHDWLKELGSRCSHGRVACAIEAGGDALVSALLEHKWIEIYPVNAAMSARFRKALVPSGAKDDVPDANVLLTLLLRHGDQLKPLQLDSAKTRELAALVLARRGAVDRRSQLGNQLRAVLKGYFPQALALVGDDIHGVMALDFLERWPDLATLQKARAATVQSFYVLHRVRRPELIKSRLELVAQAQPLTQDSAVIGPAVLQVQMLTAMIKTLQRHIARFDESIQERFAAHAESALFRQLPGAGPQLAPRLLVAFGDNRQRYPDATSLQKYAGLAPVKEKSGRQLWVHWRWNAPIFVRQTFVEWAGQTVVYCDWAGVYYARQKRAGKGHHAIIRALAFKWIRVLWRCWHRQEAYDEARYLTALRQRRSPLIQDLDLALS

SEQ ID NO: 253118 - protein, 355 aa, unidentified
MKILAIDMGWSNSVSCLFDSSSGEVQYQTLITGKEPFARLLKEINPEQVVIEAGPMAGWVKDLCEQMKLKLLVLNTNDEPWRWRNVKKKTDRKDAFKLTQVAALRQGSGVHVPEHAVRQWRQLIYYRQTLVDEMVAIKNRLRAVLLQEDLHLPSGQKAWESASWQKLSAMAKELEECGKDDLWRGMVKLELRRLEELAAHLGSVEKKLDGLAREDERVKRLKQVPGVGTRTAELVVALIDDPKRFGRGRKLSSYAGLSPRKHQSGKMDRDGHISRCGNGLLRKLLVQAAWSGKRNSLRMGRIYERVRKNTPKRTKQAIVAVARHLLVWLWAMLRDGSSWQVGHQPPPPKELSAVT

SEQ ID NO: 253119 - protein, 318 aa, unidentified
MAQNGTIVGIDVSKLKIDGFIRSLQIGLSQPSTPEGEEKMIAWLQENGVQVAVMEASGGYEKRWATALRMAGITVRIVDPKRVRHFAKSAGQLAKNDPIDAKMIAWFAETFAGAVGQPHEPEHEEIDRLVTARAGLLNVQTQIENQGEHHQLPTVVKAQQAILKTIRAQIAKLDAAIAAKIETSPRLARRAEIIASVPGLGGQTVAGITAWLPELGQISNKTAAALVGIAPYDDDSGEHKGKRVIKGGRRKLRNLLYMPTMGAATQHNPVLKAYYQRLRAKGKEPKVALVACMRKLIVILNTMLAHDETWKPQARATT

SEQ ID NO: 253120 - protein, 370 aa, unidentified
MEETIRYLGLDVHKESIEVAIAEGGRGGEVRHYGRIAATPAAVAKLIARLRERGGRLVACYEAGPCGYGLHRQLISLGVESMVVAPSLIPRKPGERVKSDRRDCLSLARLHRAGELTPVWVPDPAHEAVRDLVRLKAAAQRDFTRARQHLQSFLLRHGLIYQGRTPWSRAHRLWLASLRFPHPAQQIALQDMLHAIEAHQLRLRGLDVELRRLLPDWSMAPVVAAYQALRGVSEISATTLAAELGDLSRFSNPRQLMGYLGLTASEHSSGKRRRQGAITKAGNAHARRVLVEGARSYRLPARIAKAKLASLERQPKVVRDIAWKAQTRLCARYRRLAASRGSSNIAVVAVAREMAAFLWAIAQVAPPSFG

SEQ ID NO: 253121 - protein, 410 aa, unidentified
MEAIIEKCCGLDVHQATVVACVLVGDTRTKKQVRTFRTVGRELRALRDWLTELGITHVGMESTGIYWVPVFRALEGNFEIVVGNAQHIKNVPGRKTDVKDSEWLANLVRCGLIRPSFVPPLPIRELRELTRYRRSLVNDQARERNRIQKLLETASIKLASVASDVFGTSGRAMLRALADGDTDPTRLAQLAKSTLRKKIPALVEALEGNFESHHRVLLGFQLDRLDEMEKAIVKLDAILLEKLEPYKRELELLMKIPGFNRVAAASFIAETGGDMSVFPTSRHLAAWSGVSPGNNETGGKRRQAGARHGNVHLTTTLVLAASSAVRQRGSYYKDKYWRLRTRRGAMRALVAIAHKLLIAAYEVLRKGEPFVDLGDQYLTKRSQSDSTRKHVKKLESLGYDVTLTPREVAQ

SEQ ID NO: 253122 - protein, 315 aa, unidentified
MTTKSECFVGIDVSKEKLDIGILGETKLTQATNDESGIITLRNRLLELKPTMIVVEATGGYEEALVLDLFEAGLPVALVSPQRVRQYARARGLLAKTDKLDAINLAEFGKNVQPRLFVAKSEQSRHLCDLLTRRRQLWEMLKAEKNRLRTAHSTLKVSLETVITCLKTEIKDMDQQVRAFLDKHTSLQKQEELLRSAPAVGVVTAATLLAELPELGKLDRKQIAALVGVAPMNWDSGKKRGYRKTKGGRPEVRSILYMATLVGMRYNPIIKAQYDSLVNRGKIKKVALTACMRKFLTILNAMMRDQKPFRTATQS

SEQ ID NO: 253123 - protein, 337 aa, unidentified
MEYFAGLDIAMEETQVCVLDRDGVIICEAKAASTAEAITDLLARAPSCRRVVFETGRMAPMLFHGLSRRGLPVVCVESRQAYQALKSLATHKTDRNDARGLAHLARTGFFKSVHVKSLSAHAVRSLIIARKKLVGQRVTLENQIRGLAVVFGVRLPRALSPTFIEQALAASEGIPGLSAAMRGLVAARAAVLAAVVAIDADMKRMVRASEACRRLMTIPGIGQLTALAFTAAIDDPGRFRRSRDIGAYLGLVPRRYQSGEVDYTGSISKCGDRRVRTLLYEAANVMLTRYKGSLRLKDWALAIAKRSTMRKARIALARRLAIIMHAMLRDGTEFKAT

SEQ ID NO: 253124 - protein, 343 aa, unidentified
MKLIRVGVDLAKNVFQVHGVDRHEKAVWRRKLSRENWLKVLLETVEPGCEIGMESCGGAHHWARKLQAHGFGVRLIAPQFVKPYVKSNKNDANDAEAICEAMSRRHMRFVAVKNVEQQDIQAVHRIRAELTKQRTAKANQIRGLIAEYGLVAPKELLHLRRALPCWLEDAENGLTERFRRLLNGLWGDLRVLDERMTELDREIAVIAQKDPVAKRLQQLRGVGPITATALVAAVGNGEQFANGRQMSAAFGLTPRQHSSGGKERLLGISKRGDAYLRVLLIHGARSVLRNSKDQDDRLSQWATRLAARSHPNVAVVAMANKTARMAWAMLKNGTDYQPAIVTS

SEQ ID NO: 253125 - protein, 326 aa, unidentified
MAMLSFCGVDVSKQRLDVMVLPEQQRFSVRNDAAGWAELIARLRSFAIAAIGLEASGGYERGAMRALLAAGVPACRVNPFKLRQFARASGVLAKNDPLDTRMIASFVAIMPTRPARPRSPALERLAEMLAVRRQLNADKVAAGNAARLLEDAMLQRLSRRRIARLAADIDMLDRHLVEIVETDAALAYRYRLLTSMPGVGLVVACTLIALLPELGTMSRKQVAALVGVAPYAFESGKFKGRRCIWGGRAPVREALYMAAMSAGNWNPVLKAFRKRLKGAGKMAKVVIVAVMRKMITMLNAMVRDDVVWADHLHGRHSVPTAWQPLR

SEQ ID NO: 253126 - protein, 413 aa, unidentified
MIVGIDVGSEKHYFRAFNWRGIELTRKPVAFSNSMEGFNSFYNTIVELMQKSEFEEALVGIEPTGHYWFDLGQFMGENNIKFVMVNPHHVHKTKELDDNSPSKNDRKDPRVIAGLVRDGRYFYSYMTTGVYAEMRNASNRRFVLVEEQTRAKNRLQKWIAVYFPEYKGIYTHIDAKGGLLVLKQAPTPEEIVRLGVEGIIKIWKDAKLRGNGHKKAMLILNAAMKSIGLKAGLTEARMEIQDLIEDYELQTKRLERVNDLIKELCRQIKYADKLLEIKGIGITTVAGFIAEVGDIMRFDSTKELQKLAGLELVADSSGKHNGKTKISKRGRKRLRYLLFEAAISVVGKNEEFKEIHRYYTTREKNPLKKMQSLIAVACKLIRVFHVILTKGISYDASKMLKDIRHPGEQLKAA

SEQ ID NO: 253127 - protein, 355 aa, unidentified
MDKAKYIGMDVHKETVSIAVLDSSGKTVMESVIETQALTIVQFVQGLRGELHITLEEGTWAAWLYDLLRPHVNEVVVCDPRKNALLKTGNKSDRIDARKLAELLRSNLLRPVYHGERGVRALKELSRSYLTISGDLARVMTRLKALYRSWAIPCAGKQVYAPRYRSEWLGKITEGGVRRRAEFYYQQLDALRSLRQQVRRELLAESGKHPASKLLCQIPSIGPIRAAQLIAILQTPHRFRTKRQLWAYGGLGIETHSSADHRYVDGQLQRSKRQVSLRGLNRNHNHELKNIFKGAAIIAATKPGPLQQFYAALVAKGMRPEMARLTLARKIAAITLIAWKKGVCFDAEHLKPQTA

SEQ ID NO: 253128 - protein, 315 aa, unidentified
MRQSTTTAGIDTGKHSLDVALDTSDKTLKADNSPEGWRQIARFLKANNVRRAAIEASGGYEQGVLAHLRDQGLTVLHLQPMQVKAFARYTLKRAKNDRLDARLIAQCAARLKARKAPDKRLAKLASHLTYIEQIEEDIVRFQGRLEHTRDPRIKADIRKHIVAFRDLLKAEKKQLAAELKASPDLARRLALVRSIPGIGERTAIALVIRMPELGEISREEAAALAGLAPFDDDSGKHNGHRHIAGGRARLRRSLYAAAFPAAFHWNTALIDLYARLTARGRTHKSALVACARKLLVYANTVVQRGTPWQTKTAST

SEQ ID NO: 253129 - protein, 317 aa, unidentified
MASHKETFIGIDFSKKQLDVAVLPDAKHKVYANNEEGIGQLTTFLKSLSPSLIVLEATGGFEMPCVGVLAAEGLPVVVVNPRQIRDFAKATGRLAKTDAIDAQTIAKFGETVRPEIRDLKSPEMQELAALNTRRCQIIQMITAEKNRLATATKWTREDIKENLAWLKERLNGVNDEIDKSIRNSPVWREKDDLLQSVPGIGPVASATLLSQLPELGMLNRKQIAALVGVAPLNRDSGMMRGKRSVWGGRSSIRCALYMATLVATRFNPIISTFYHRLCNAGKAHKVALTACMRKLLTILNAMVKNRTHWSPVCPANA

SEQ ID NO: 253130 - protein, 375 aa, unidentified
MNQFIKYVGLDTHKDTIAVALADAAGGKPRFYGEIANTPAALSKLMKDVSPNGEVISYCYEAGPCGYGIYRQISGSGHDCSVVAPSLIPTKPGDRVKTDRRDSENLARLHRAGELTPVWVPDQEQEAMRDLTRAREDMKHLERHARQRLCAFLLRHGQRYDGGKSKWTQAYWRWLERIKFSHRVQHTVFQEYIDSVKQQQQRVADLERAMHEALADWSLTPVVEGLMALRGCRLITAMTVVAELGDITRFDSPRQLMKYLGLVPSESSSGPKTRRGGVTKTGNGHVRRVLVEAAWCYRFPARKTAALQRRAEQAPDEVQAIAWKAQKRLCGRYQALSKRGLLPQKTCMAVARELTGFIWAIACEVMPKNANEASA

SEQ ID NO: 253131 - protein, 343 aa, unidentified
MNVTTIGLDIAKNVFQVHGVDGHGKVVVRKKLSRGKVLEWFANLPPCLIGIEACPGAHYWARELLKLGHSVKLMPAQYVKAYVKGNKNDGNDAEAICEAVSRPGMRFVAINTEPQQEIQMLHRIRSRVVAERTALLNQIRGLLGEYGIVFGQGPSQVRRGIAALLTGEDPRLSAMARELVLGFQAELRELDERIGHYDARVKATCAGDARSVKVAALPGIGPLTATALVAAVNDGKQFQNGRQMAANLGLTPREHSSGGKQRLLGITKRGNTYLRTLLIHGARTVLRHATGKTDRLSRWALAIQARRGANVAAVALANKLARIAWAVLARDRIYRADWAEQSV

SEQ ID NO: 253132 - protein, 357 aa, unidentified
MERYIGLDVHAESCTFCVLNGAGKRIGREVIETNGQALVAYLENLPGNLHLAIEEGEWSQWLYEILSPHVAEMVCLQGEWQPGLKSDSIDAHGLAERLRTGRIGHPIYKAPRNFAKLRELARVYGMLTRDVVRTKNQLKGLFRRRGVQCRGERIYKPETRRKRARELPVAIRPAVELLGTHLDGLVALKAEAGSVMVAEAHRYPIARILETCPGLGPIRVAQMLPVVVTPHRFRTKRQFWSYCGFGIVTRSSADWAQIDGHWVRAQVAQTRGLSRKHNRILKTIFKGAATTVIAHGGSDALREAYDRLLDSGTKPNLAKLTIARKIAAIVLAMWKSKEEYEPERQPAQISAQSTNHA

SEQ ID NO: 253133 - protein, 316 aa, unidentified
MTKAERFVGIDVAQATLEIAVRPTGESWQVANDEVAFGALVDRLRELAPTLIVLEATGGIQLPVVGALAAAGLPVVAMNPRQVRDFAKATGKLAKTDRIDAQVLAHFADAVRPEVRPLPDAATRELAILVARRRQLLEMRVAEQNRSRGVPPRIRAQIREHITWLNRCLAELDRELGQLVRSSPVWQERVDLLRSTPGVGPVLSATMLADLPELGTLSHKQIAALVGLAPLNQDSGKKRGKRVVWGGRASVRGALYMATLVATRHNPMIRAFYQRLLATHKPKKLALTACMHKLLTILNAMVRSQTRWAPPVALVG

SEQ ID NO: 253134 - protein, 339 aa, unidentified
MQLYAGLDLHSRNTFIGIMDQEFKRVFGKRVLNKLPVILETLAPFHDQLNGIVVESTFNWYWLIDGLMDAGYQCVHLANPSAMKQYEGIKHTDDQHDAFFLAQMLILGILPQGYIYPKEARPVRDLARKRLFLVRHKTAHILSLQSLIARCCAQRISANEIRKFTVEDLQQLLKEEHIVLSAQANLDTIMFLKQQIQRLEKAIQKKVKLNKAFQQLLTVPGIGLILAMTIMLEVGDISRFPQVGNFASYCRCVSSQRLSDGKSKGHGNRKNGNRYLSWAFTEAAHFSRRYNENFRSYYNRKLAQANTSLATKALSNKLARICYYIMRDQVPFRKELVSH

SEQ ID NO: 253135 - protein, 368 aa, unidentified
MTMIAHYVGLDVHKDTITIAVAEAGREDPRLVGTIPNDNHKLLKRLVKLGPCESISCCYEAGPTGYGIYRLLNSAGIRCEVIAPSLIPKQAGKRVKTDKFDALKAARCLRSGDLTPIWVPGQEAEALRDLVRAREDAKTTERAARHRLDKFFLRHDRRYPGGRHWTGMHLDWVRVQKFDHDAQARVVREYLHAVELATTTVERLDLDIAELVPNSSLNPLVKALQALKGVRLLTSAGIAVEVGDLHRFRRASHFMGFVGLGVAEHSTGRDRRQFSITKTGNAHVRRLLVEAAWAYRHPPKLDHNLRKRSEGLSPDILEIAWKAQDRLHRRYRRLRARRKPHQVVIVSLARELAGFVWAIGQHIELVAA

SEQ ID NO: 253136 - protein, 345 aa, unidentified
MKKGITIGMDLGDKKNQVCILDETGKIIAEEGIDNNRKAVTKFFKRYCGAVVAMETGTHSRWVSQVAETEGLEVLVGNARKLRMIWESRQKSDTRDAVMLARIARFDPALLCPIRHRGEQVQMDLEIIRARDLLVGERTRMVNHVRGVVKSMGERLPASSAESFGRKAKIPEALNEALNPMLEMIRELTDKIRGYDLMIKEAAVNKYPETERLSQIGGVGPLTALAYVLTLEEPERFAKSRMAGAYLGLVPRLDQSGQIDKQLRITKHGDGYLRRLLVGSAHYILGPFGPDCDLRTFGLKLMQRGGKNAKKRAVVAVARKLAVLLHALWRNGSIYEPKRIQPLAA

SEQ ID NO: 253137 - protein, 350 aa, unidentified
MHSTTAPLASIGIDIGKEVFHIVGLETDGKIAFRRKIKRLALVESFKKMAPCVVGREACLSAHFVSRVLRQLGHEPRIIPAIYVKPFVKGQKNDYNDAEAIAEASLRPNLRSVREKTQDQLDLQACHRVRSRLVSRRTATINQIRAFLIEQGIAVRTGATALRNSLPAILKNRQDEISPRMRGLIAGLYEDWICLDERIETITGEIEKIGEKEANCRRLMSVPGIGPLISTAVIAAIGTGEAFERGRDFGAWLGLVPRQYSTGGRSILGRISKRGSKYLRTLFIQAANVILMRPHNWERFSFGTWLSNAAPRLHRNKLATALANKLARIAWSILRNEKTFDAPRHEVMAI

SEQ ID NO: 253138 - protein, 498 aa, unidentified
MIRSVGIDFGEGGPHKVRCLDEQAQLCDGFTFYTTPEGLATLGERIFRDGANPVIVFEPTGLAWLVVATYLRARRPDCHLVRAKTQKVAALRKYLRGRSKSDRIDALTLAKMPFIDPEQLYEVYLPPMEFHALQRLTRQREQLEKGIAARKARIGTIIDGYLPGLRQAFEDRWSPCARAFYQYRLNPFAVVRAGEKALHTFLTKATPRGKVSSAEAHQVYVACVNITTIYVQSTAAGVISEDFFADLQDEVARELRLMEAEEAEAKALARRIEELYQKLHPEDNLRTIPGVGEHTAPVFLAAIGDPERFRSQSAFANWNGVVPGARQSSQAESKGLKMTKAGPSMMRRALYQAGEVGRQWDPQLAYVYYGQIVYHGKTHQQAMGAVMSHLGARVLAVLREGRPYELRDIDGKPISGQEARSLILSRYKVPDEIRRERRRRNPKKSNASRLPKGKRGMTQNHRICEAASAPQPDIAPVIPQRSVYPVGSARSSPAPDCT

SEQ ID NO: 253139 - protein, 393 aa, unidentified
MDVAYTRACGIDVHQKSVSVSLLIGDFDTNRPKRTNRKYDTTTNSLKDLACWLDDNDVQVATMESTGQYWRPVWQILSRYSHVELKLVNPQKIKRMPGRKTDKKDAEWLVDLTRVGMIEPSYVPELPTIELRESTRLRKNLTQQLTVIKNEIHNILQRSNIKLTSYLSDIFGPTGMKMLGLLLNGEAINTKTVTPLMHHRMKATVEEIVESLNGRLSKNDRYLIDVQLELFEALTRSISDIEAHIQEQTNDFEELRIRLLAIPGVSDNTAAIILAEIGTNVDSFENEQAIASWAGLCPGSYESGGKTYSSKTNRGNKYIKSALSQSAITARKKRDTDLANFYYRLAGRIGTAKAVIALAHKLLRIIYVMIRDGVEYDECKLKSRPFPLEQPTS

SEQ ID NO: 253140 - protein, 329 aa, unidentified
MSDVVVGLDVHLKDTQVTVMKLNGEIVKRERVRTNRAELRKSLQSVPKGTRVALESVGFCWPWIDFLDALEFEPLLANPVKVKYRAEDVKTDRVDSKLLADLTRMNWLPTCYVPPTELRALRNLLRHRAYRTRLCTGVKNRTRSEFRKRDVELDVNLGTMKGRKAASGLQIFEVNQNMELLDVMDRQNKEVEAMLEHKYGEVKPVQLLMSIPGVGFISALTLYAEICDVKRFSNPEKLAHYAGLVPRVHQSGEHSFMGRETRGDAWLKWILIEAAWSHVRYCPMGHLAEVFKEARNRKGNSRDAIKIVARKLVNVVWAVLTYEEEFMVK

SEQ ID NO: 253141 - protein, 377 aa, unidentified
MRIVGLDVSRSVAEIAYLEDGTLHAGGRTGLRRDELERFAVKLRATDHVVLEATGNTTAIVNVLRPHVARVAIANPLQVRLIAEARVKTDKIDAAVLAQLYASGFLPEVWMPDERTLALRRQIARRSQLVRQRTRLKNEIHAVLIAHLIERCPATDLFGKKGRAWLGVQPLPLDERLGVEQRLRELDRLGDDLREVEQALAQATIDDARLRVMLTITGVNTTVAIGLLSAIGDIARFPNPEKLVSYFGLNPSVYQSGPAPARHGHITKRGRSYARAMLVEAAWGATQAPGPLRALPTRVRSSRPTNCRRRDCSQARGDRMVCADTRRTVRVGSSCVDRTQTARTGTTGRNAGAAWLAQRFGCRLQSEERPPAGTSRG

SEQ ID NO: 253142 - protein, 343 aa, unidentified
MNTNTFYVGLDLGSTQCYQVVMNERGKIIRSRPFATNEQNLRVAFQTLEGELLVHTEAGELADWVRQVIQPLVKQVVVSHPQSLAWIAKDARKCDRLDARKLADLLRCGLTHEVFLPVNQARRTFKQLVRHFTEATRAQAKCKARIKARLRCQGIIERGEQVFTQTGREQVLRQISDKFLRRMFDGLFSTLDRLLDQMKTAKKLMLEAARQFPEVRLLQTAPGVGVTGACRFVALVQNPRRFSNKRKLWRYCRLAVAHRSSDGKLLSHPRLDRNGCGALKDVSRKAFEAALRCREDNSFKRAFEKSLAATRDKVHARLSTQRKIVACLRAMWLRNEPYRADLP

SEQ ID NO: 253143 - protein, 341 aa, unidentified
MSDYSYFCGIDLAKNHFSLHAVEQNGKVILHKSVTRSKLLTTIANMPLMRIGVEACGGAHYWARTLNKLGHDARIMAVKYVIPYRTKGKNDLNDAVAICEAVQRPSTRFVPVKSPEQQAILSVHRMREHWVRERTALMNRMRALLSEFGLIIPVGRSSLMKHVPLMLEDAENELPHLARTVIADAYHHLGELNQRIADTEQVFDSFAKVSTNVQRVMKVRGIGPQTATAILASIGNGSQFDKSRDFSAWLGLVPKQYSTGGKPRLGRITKHGDKYLRTLLVHGARTVIANLGDKQDKLSQWCRGVLERRGMNRAIVALAAKNARIIWSLLHNQTEYENYAA

SEQ ID NO: 253144 - protein, 402 aa, unidentified
MEKFAGIDWASAEHALCVVDEDGRRLREGLVPHDEAGIAALCDELVALGIGRVAIERPDGILVDRLLETGIEVIAVHPNQVKAARERYSVARGKSDRFDAFVLAELARTDAHRLRAICPDSQETKALRVLTRAREDLVATRVEMANQLRAQLDAFWPGALIFSAVDSPTSLAFLRRYPSPADAKGLGPKRLGAFLARRGYSGRKAPEELLAAMRSAPGGRAGEIESQARRAVVLGLVAALEPVVAEIGALTAQIRAALAAHPDAAIFAPLFKDPKTAVCPAVLIAELGDSRRRYPSDAALAADAGMSPVAVESGKRRTATFRRACDKRLRNAVAALANSTRHWHPWAREVYARARARGQDHPHAIRTLGRAWIRVLWRCWRDRVPYDPARHGNFRQLQTAGG

SEQ ID NO: 253145 - protein, 387 aa, unidentified
MARKRTLSTLDTSIAYEAVGLDLAKEDTAIAAFGPDHEGPYLIDRMPYDKLYELLADMAPTLVAMEPCSGAHQIAEQIQELGHEVMMISGRHVQAWVKDHCNGQKTDLNDAFAILNLAYDRWLTPIRGKTREECRLLALQASYRQLKGQRTKTMVHVKATLHAWGFPIRAGSFNQKVLHELIDANREAFGDEVAETLHLMINRVRDLDHDIATVLKLLTEATKRDPRASLLRSIPGFGVLTTSRWCAVIGDIARFDFPKQTMAFIGLVPNNRITGHHTATSSGREARGQGRMSKRGDKMLRSLCIMGAGSLCLMVRNDRLPDCPFVASIKERLASPRPWFKVLVYVAAKLVRIATALLKYGETFSFEKAGISKAVLKQWELEQAKAA

SEQ ID NO: 253146 - protein, 317 aa, unidentified
MIALGIDIAKLKFDIALLTQGKFKTKVFANDSAGLSACLKWLRTHASEPVHACLEATGPYGEAIACALHDAGHTVSVINPARTKAYAQSLGLRQKTDAVDAKMLARFVQTQQPPAWTPAPAELRALQALLRRLDALVEMRTQEKNRLGVAEPTVSASIGQHLDYLEAQIDALKAQIESHIDQHPGLKQQHDLLDSIPGIGPATSAWLIGELNLTRFDSARQAAAFVGLTPRKDTSGTSVRGKPRLSKQGNSLLRKLLYFPALTAMTHNPLVRALCLRLKAKGKHNMAIIAAAMRKLIHIAFGVLKSGKPFDPTLADT

SEQ ID NO: 253147 - protein, 363 aa, unidentified
MKIMVGIDLHSNNALCGLMDESGRRLVHKKLPCDLAVILQLLKPYQERIATIAVESTFNWYWLVDGLQDHGYHVVLANPARMQPYSGMKYTDDVSDAYFLAELLRLKLLPTGHLYDRQSRPVRDLLRRRLLLVRQRTTLILSFKSLHERTLGQRVPLARVKTLKPEEAQARFIAPADQLLSGTEIELMGHLTAAITKLEQHLLGVAGKWPTYQRLQTLPGIGKILGLTIALETGDAQRFADAGNFASYCRCVKSLRQSNGKKKGENNRKCGNKYLAWAFVEAAHFACRYDDQSRRFYDRKKQQTNPVVATKSLACKLAKAAWHVMTEDVPYDATRVFGPGKKTNFGQAGREPAKGSGPPSQQN

SEQ ID NO: 253148 - protein, 352 aa, unidentified
MQCIAFDSHKHYTWALVEDEAGKVVREERINHVRGALRRFLAGCERGSPVAVETIGNWYWIADEIEEAGMVPRLVNAGRAKMMSGSINKTDKLDARGINKLQRSGTLPTVWIPPRELRDARELPRTRMVLVCQRTKLKNRIHANLAKHGLTAKGASDLFGVHGRKVLEGCLVELPSETRYATGCLLDQLDHLQHVVKGLEKRMSELFGEMQELKVIRTLPGVALILGVVILTEVGDVGRFPSASHLASYAGTTPRVHASGGHVRYGRTRPDVNRYLKWAYAEAANASMIHRRCHPERHVSRLYERVKRKRGHPKAIGAVSRHLAEATYWMLKKSETYRDPAVQRAEESTREA

SEQ ID NO: 253149 - protein, 434 aa, unidentified
MTLINFVAANQKYYAFNLLSVFIMVFWSVQYLLQHLLVQTQLSAQLLQPLILILQLPQPPQFRYARPGKFFLPVNGMDYLLPLRLTVRNVLTRRITMNIVFLGIDLAKNVFQLCGLNQAGKPVYTKRTGRKELLQTLANIPACLIGIEASTGAFYWQREFEKLGHKVKVISPQYVKPFVRGQKNDGNDAQAIAVALMQPTMQFVPPKSPEQQDIQALHRARQRIVNHRTATVCQIRGLLLDRGIPIGSAVSRARRAIPLILEDAENGLSSRMRRTIAELYDLFNDLGRRIHFFDKEIETVFRQSEACQRIAKVKGIGPETATAVVAAIGKGTEFKNGRHFAAWQGLVPRQHSSGDRQVLMNMTKKGDKHLRTLFIHGARAVVRVATNNNDGHMNQWVNQLKERRGFNKTTVAVANKNARIIWSMLRNETGYQVV

SEQ ID NO: 253150 - protein, 313 aa, unidentified
MDSSVTFVGIDVSKDRLDLAVRPSGQSWQCANNPRAFAAVLVELNALHPTLLVMEATGALELPVAAALAAANLPLAIVNPRQGRDFAKATGHLAKTDRLDAAVLAHFAEALRPSVQTVPSAEQQHLSALLTRRRQVIEFLVAERNRLATAVPTLQERIQAHIAWLQTELDDLDLDLQHSIEASPAWRAAEDLLRSVPGVGPVTARTLVAALPELGHISSKGLAALVGVAPLNVDSGRFRGKRRIWGGRAQVRSALYMATVSGVRWNPVLRKFYQRLVKAGKPKKVALIAAMHKLLTILNAMMKQQTPWRVQAI

SEQ ID NO: 253151 - protein, 470 aa, unidentified
MQAPAPGGLARVGKTLIFQASIGWRQEMDMEAVYRRCAGLDVHKDVIEVCVLPPAGQSGSPQRRRFATFTSDLIRLRMWLVSLKATEVAMESTGLYWVPVWRQLEGHIGKRLLCNPQQVKALAGRKSDRRDGQRIAEFLQDGRLDPSFVPPKEIQQLRELLRMRVSLVQEHNRLSNRVEKLRQSYGVKLSSVASDILGKTGQRILTALAEGQTDPDRLSWKAVGSLREKEAQLRRALRADFDEHSCWMLGVLLGQLKENEQWREQLEQRITEGMKPYEPIVIRLMTIPGVDRLTAWSMVAELGTDMSVFPDQRHCASWAGVCPGTNESAGKQHSTRTRRGNRYLRRILTQSAWATSRCKRGYLRAAFHRIAQRRGHKKAVVAIAHKILVAAYFIIRDQTTYLELGEDYFDLLHPERTARRLARRLERIGYQVTLTKAAATAPRSSEGQQPKKRGRPCKCAERGIDCKHKR

SEQ ID NO: 253152 - protein, 356 aa, unidentified
MTKALMAGIDLHSNNVVIGIVDQAGGRVKHQKLACDLEQIKQFLRPFKSRLKSVAVESTYNWYWLVDGLRELGYPVVLANPAKMEQYGGIKHADDKNDAYFLAELQRLNILPTGYIYDPQLRPVRDLLRRRVGLVHQRTALLLSFKSLYTRTTGQELKLSRLKGMAMAEAQTLYEHPANQLIATVQKEHIQQLDESVARIERVVLQSARALPCYRRLNTLPGVGRILGMTISLEVGEIGRFKGAGNFASYCRAVAARRTSNEKNKGANNRKCGNKYLSWAFVEAANFAKRYDEPCRRWFDRKAAQTNTIVATKALACKLAKAAWHVMAHQVDYDGQKVFGRAADSQTKGLAPANRN

SEQ ID NO: 253153 - protein, 411 aa, unidentified
MEILHQRCCGLDVHKDRVMACVLIRESPREHKRKEVREFGTMTRDLLQLADWLRDRGVKHVAMEATGVYWKPVWNILEGEFEVVLVNVQHIKRVPGRKTDVKDCEWIAELLQHGLVQASFVPPAEVRELRDLTRYRATLVEEGARVVNRIEKVLEDANLKLASVVTDILGVSGRAILASIVRGEEDPERLAEMARCRLRAKLPALREALRGRVTEHHRFLLRRLLEHVRFVELEIAKLEERIVEQMRPFQKEVELWSSMPGVNQVAAWSMVAELGPGLTAFPSEQHLSSWAGMCPGSDESAGKRRSGKMRKGNPWVRRMLCQVGWRSPRARGTYLSAKYHRIAARRGKERAIIAVAHNVLVIGFHLIRNQCQYYELGPDYFDQLHRCRLERYLVRRLEGLGNQVVLQPLHP

SEQ ID NO: 253154 - protein, 460 aa, unidentified
MEQVPVIGIDLAVTAASELAVAAGATIEASRKVASTPRGLTEGIRQAAKGRAVAIVVESTAMAWFIAAVAAVRSGVEYRLYRVSGRKSAALRAFYRSHTKTDHIDARVLARMPAVDDSLLIYTLPAPSELAMKRLVVARHKLTTETTKLQNRVRSLLAWAAPGIMKAAGGTVSAGLVRVLGRWSDLTSLAKTRVATIALQGDWGTERAEAVRTAAAEAVAFYEGHVDFSAVSLELELSLAQLGFLASQVARLEERIAALHTQLYPKDRLLSIPGIGPVVAGVVRAVVGDLSHFANQASFRAYTGLVPRENSSGEVRQRGRISKAGPSVLRWALYLAGDAARHCDPALADLYRRLMVERGRTHTQAVCAVASHLAGRIYAVAREGREYVWRDLEGNEITKEEARAIAQSLRVDSETRARLRARREGGPRTPYARQPVVPQDVTQPSADKLIEAALELATRA

SEQ ID NO: 253155 - protein, 392 aa, unidentified
MLAAKERPEAPTAIRTDLGAIFVSLELSRSKWLITSLSPGGGEKMSKHAVAADDIAGLLMRFAELKRKAQARTGRCFPIIVIQEAGLDGFWIHRVLQAEGIESHVVDAASIATSRRRRRAKTDKIDGETLVRALLAYKRGEPRVCAMLRVPTPEEEDRRRISRERKALTNERVSHVNRIKGLLLSQGISDYQPLRRDRRKRLEELRTGDGRPLPAHMKAQVGRELDRLELLLEQIKAVEVERDAMLAAASVGPAQCADVAPAMLLALKGIGEEFAAVLWSEGLSRHFDNRRQVAAYAGLAPTPWQSGQIDREQGVSKAGNPRLRTMLIQMAWLWLRHQRQSALSLWFTQRVKQNNGRLKKKTIVALARKLLVALWKYVNAGVVIEGAVMTTA

SEQ ID NO: 253156 - protein, 322 aa, unidentified
MSEVAGSEVFVGIDVAKAKLDVGVHPSGESWTVEHDEAGITTVVERLVAAGPTLVILEATGGLELALAAALVAAAVPVQVVNPRQARDFAKATGQLAKTDRLDALVLARFGAALRPEPRPLPDAALQEVRALVARRRQLQAMVIAEKNRRASAPKRLHAQIDEHLAWLRRAVADLDRDLGTTIKATMAWQTAVTRWRSVPGIGPVVSATLLADLPELGTLTRQQIAALVGVAPLNHDSGAHRGSRSCWGGRAHVRAALYMGALVATRCNPTIKAFYQRLLTAGKPKTLALTACMHKLLTILNAITRAGTDWRDRATSAELAA

SEQ ID NO: 253157 - protein, 315 aa, unidentified
MQTPLDIGADVSKDYVIVACAKQSLRSSKLVNKRAALLPWLKSLPAGSRIGMEATGTYHELLATLALRLGFVVYVLNAKDVHHYAKGVGQRGKTDRVDAALIARYVAQEHTHLHAWQPASPAQRQLQRLVRRRAKITSARATLRSSLHTVPSLRNYLQTLLKHFDVLLAQLDAQTRKVVEASQEREQAFRRLQAIPSVGNAVGIGLLAALERWPLPRGDAFVAFVGLDPRPDDSGKKSGRRRLSKRGDPELRRLLYVAAMSASRTRAWKPLYQRALARGLSRIEALVILARHIARTAWSIYTHKTQFDPLRLQNH

SEQ ID NO: 253158 - protein, 347 aa, unidentified
MKYVGVDIGKRKCRAAIMSAEGRIVKELDFTNNSDGIASLTLLLTMDDRVVMESTGPYWLDLYNQLDQLHISVVLANPLKTKAIASARIKSDKVDARILAHLLRTDLIPECYVPSKEMREIRSLVRHRLSIVKLRTMVKNKVHALIDRNGLKHEFSDLFGRAGMQWLKSVELSGLDRLMLDNYLMHIESLELQIERVDLEITSRASFDGDVKILLSLKGVNVYGALLIKSEIGSILRFSDYKKLVSWAGLAPSLHQSGDVEFHGSITKQGSTMLRWMMVESARVASVFDSRLKAFYERVARRRGDQKAVVAVANKMLKIIWFMLTRKEPYESVDEGRYAKKLKSLNG

SEQ ID NO: 253159 - protein, 371 aa, unidentified
MKQKILRIHEKTLIVGIDVAKNTHWVRIMDHKGIDVIKPFKINNNIKGIKSLEEKIKKTKEKNKKKKVIIGMEPSGHYWKALAWQIKLKSIGDELVIVNPHHVKKSKELDDNSPEKSDRKDAGIIGRLIRDGRFFDVYLPEKEYAELRIISRSREQLVNKRRNAKNAAIAVIDEYFPEYNKIYKNIFSEGSIEIIKKYAIPEEIKKVGIEEIEKDLKKATQGRDWKNRAQKIYEAAKNTIGVKEGQRAAKIKIRMLIEEIEFITRQIEKLEEEMKRLMKEIGLSEYLESIDGIGPIIAATFIGEVGDIERFKSWKQIRKLAGLNLYEKSSGQQKGKTKITKRGRPLLRKIIYYAGESGKRHNTEMKKSMKN

SEQ ID NO: 253160 - protein, 316 aa, unidentified
MSVETWFVGIDVAKDRLDVALHPTDERWTGSNDPAGIEALSEQLVRLAPQLVVLEATGGFEVPLVGALGAPGLPVVVVNPRHVRDFAKALGRLAKTDRIDATVLAECAARVRPVVRPLPDEEARELHAWLARRRQWVEMITADENRRQQAAAPIRRQIEGHLRWRRCQLAALERELTTRVRRSPVWRESETLRRSTPAVGPVLARTLLADVPDLGRLNRQQIAALVGVAPFNRDSGPRQGHRSLWGGRAPVRGVLDLAALVATPHNPVIRAFSQRRVAAGKPWKVVLTACMRKLLTILNARMKHRTAWKPVPALGA

SEQ ID NO: 253161 - protein, 339 aa, unidentified
MMGKIVKQVAGIDVAQKELVVTLGHLLDDFSIELFAYKVFKNSDSGFKSLVDWANKLTNNEIDVHYVMEATGVYHQKFAYFLTDNNYRLSIVLPNKISNYMRTLELKTITDKSCSQAIAQFGLERKLDKWSKPKVTYKELQQLTRERDQIVQERSIIKNQIHAEITEAEPNQRSLERMQSRIRFLNSQEKEIKEDINSIVKENPDLRQIIDRITTIPGVGELTAVIVLAETNGFELIRNKSQLSSYAGLDVKEKQSGTSVKGKPRISKKGNRALRKSMHLPALTTVKWDDNFRETYARLVSKHGIKMKALVAIQRKILQLIYILFKNETIYDKDYTIKK

SEQ ID NO: 253162 - protein, 399 aa, unidentified
MLAVGIDISKSKSVAAILNQDGSMHTSPFEFHHTQPELDAFIKYILNSNQSATILMENTGHYHYPVLKAFREAGLPVCMVNAYQIKKFGDMDLRKAKTDKKDAVRIARYALEKSYSLVPYTSMEQKYEDLRFLARQYNQRMLTLKTNKVFLLNLLDETMPGITNILPLTTRTPETSLSVLFINRFKSYDRIKKMGKSRFLDAFEKITRKSRNRQTKTYGLAIYEAALRNITTRGENEYTLAAQDQCLELVCESQKAADSIILKMKTLAETLPEYAVLRSMAGVGNRLGPLILAEIGDIRRFHSGKALNAYAGNDAPPYQSGTFESHNRHISKRGNAALRKYCFEVMQALKLTRPQDDPVYLFLLKKEQEGNPYNVAKMAGVDKFLRIYYARAMETLKQQ

SEQ ID NO: 253163 - protein, 317 aa, unidentified
MSKTSTTAAGIDIAKEHLDIAVHGCGQNWRVANAPEGFADLVRLMRAHQVGRIGLEATGGYERDVVAHLRAEGFTVIVLQPRQVRAYAQLTLRRAKTDRIDATLIAALTADHAIVREAPDPRLAALAGRLTWLEQIEEDIARIKVRLEHIRDSETRRISQADLARLTQRRANTIAKLLIALRRHDDLATRLKLVLSVAGIGPRTAIALLIRMPELGRLSRGEAAALAGLAPFNNDSGKRGRQRSIAGGRTRLRTSLYAAALPAAFRWNEALKRLYTRLKAAGKPHKLALVACARKLLAYANTVLARGTPWLSATTNA

SEQ ID NO: 253164 - protein, 407 aa, unidentified
MRRKTHYARAFDYSGIEYSKKPFKFSNTETGFVTLKEWILDLKERHEKDKVVPGMEPIGHYWFNLGKFLQDNEMKLVLVNPHHVKKSKELDDNNPTKNDRKDPKVIAGLVREGRYMIPYLPDGVYADLRTASNIRFQLQAELTRIQNRISRWFNIYFPEYKTVYGNPDAKSGMLILKAAPLPEDILTLGIDGVNQIWRDAKLRAVGKARAKTLIEAAEHSVGSKEGAVSARMEIRMLLEDYESRNIRLQEVMTLIEGLAKQIPMAEKLLEIKGVGIKTVSGFLAEVGDISRFNTPKELQKLAGLALVESSSGKHKGETTISRRGRKRLRYLLFEVAMSLVAKNPEFRELHNYYTTRRLNPLKKMQSLMAIAAKLIRVFYAMLTKGVDYDPKKMVSDIKRPAVYLQAA

SEQ ID NO: 253165 - protein, 415 aa, unidentified
MALKIVYKICCGIDVHKTFVVACIASTNDKGVTSYESHRFSTYTSGLKTLLQWLIDRNCKDVCMESTGKYWIPVYNILEKGCSIVLAHPKYVKAIRGKKTDKKDAKWIADLFKHNLVAGSFMPPSDIRQLRDLMRYRFKLTCFKSSEKNRLQNCLTVSNIQLGNVVSDTFGKSAQAILDKILENPADTSFDLEPLVYKSLKKKLPQLRDAIDGFITPEQAGKLKIIKDHYENLGSRKAELEELILALAAPYQQELTILQTAPGISSEFTAIGIISEIGTNMEAFPSAKHLCSWAGLTPTNNESAGKKKSVRVSKAGCYIKPLLVQCANAVIKSTKHPEMRNRYLRLKKRRGHKKAIIAIARMLLTALYHMLKNGENYNPELYRKTDLPPAGREITIEQALMLIRNQGYKIKSATT

SEQ ID NO: 253166 - protein, 355 aa, unidentified
MNAIKYIGMDVHSATISIAVLDVNGKLMMEVTIATQAGALLDFIRGLSGTLNVTFAEGTSAHWLYTLLEPQVAKVVVCDPRQNPRRLGEKKSDRLDARKLAELLRLGSLKPVYHGNTLGPALKELARSYRTLVSDTARVMNRLKALYRARGIRCAGTRVYSPRFRDQGLEQLPEPGGRGRAHLLYKQLDLLLPLRQEARAAMLAESRKHPAHKILCSIPSLGPVRVALLIALLQTPLRFRGKRQLWTYAGMALVTRTSADYQIVDGQVARSRKPALVLGLNANHNHTLKGIFKDAAASALAHPRPFKDFYTMRVAQGMKPELARLTLGRKIAAIALTLWKKGECFNAEHVKAQAA

SEQ ID NO: 253167 - protein, 458 aa, unidentified
MRKPSNRKQGSRQNTKDWDTLPALNRNAAGIDVGNAEHHVAVPAGRDEQPVQKFGSFTADLHRMAAWLTACEIDTVVMQATGVYWVALYQILEEHGLQVNVVNAQYTKTLPGRKTDVLECQWLQKLHTFGLLNNSFLPPDKIRVLRTYMRQREKLVTAASTAVQHMQKALTEMNVQLANVISDISGLTGMAILRAIVKGERNPDKLADLKHTRIRASSQEIAQSLEGNWREEQLFVLEQSLALYDLYYQKISECDQRIASHLRSMDSKAGQPTVEAEIPPRRSKKSSGFDLRAQLCRIAGVDLTRLDGVDVGTAQTVISEVGVDMNRWKTEKQFASWLGLCPDHRISGGKVLKRGTRHVVNRAATALRMSAWSLIRSQSALGANFRRLRRRLGAPKAITAMAHKLARLVYRMLKFGKEYVDKGTTYYEDKFRQHQLNWLTKQAASLNLQLTPIMDIRS

SEQ ID NO: 253168 - protein, 402 aa, unidentified
MLFVGWDWASASHDVTVINDAGGVVDRWAMAHSEEAFQQTFERLAGHGSPAELPVIIERTSGLVVDRLLAAGHRVVPVHPTSFWAARPRWGASGAKSDPGDSYKLADYLRTDGHRLHCLHQLDPSLRRLQVLVRMREDHVRARTAASNELVALLEAHWPGPRHMFHRLASTIALDFLTDYPSPTAASRLGEARMAAFCRRHSYRGGKTPAELLSRLRSAPIAPVGLPAELLAAMVGAQVQLLRTLLVTIDGLDAAIKSEIGACPRAGLLSALPGVGTINLAQLLAEVGPILDRVSSAEEAAAQCGAAPVTRSSGKSTGVYFRWAANRRARKSLTAFAHNSRFQSDWANKLYTDARARGKRNPHAIRILSRAWLRVIYTCWTTQTAYDPALHHAARTSRAAAA

SEQ ID NO: 253169 - protein, 319 aa, unidentified
MIMTNVTFPQLIQRGCGIDVHLKVVVATIDGVGIQKETRSFNTFTSCLTEMKEWLLANGITHVAMESTGVYWKPVMRVLEEAIPNVWIVNARHIKNVPGHKTDKMDSEWICKLLLAGLVKPSYIPPKEQRQLRDLTRYRNKLIQTIAAEKNRMMRVLEDCNIKLSSVVANTSGVTATALIDMLCEGRKLTMADIESVYHKKLSASPQELLEACTGFVEEHHVYMLQMIRKSIAQTQGLIDELSKRIKDILAKYDNVLELLKEIPGFNIKVVEDLVSEIGLDMSAFPSEKHLASWAGICPGNNESAGKKKAEESLTAINK

SEQ ID NO: 253170 - protein, 323 aa, unidentified
MKYAFILGIDVASTKLDFCLLDQQGEKHFWSINNNLVSLTEFYQTNLANLVNPDNLLVALESTGDYHLQPAQFFLTKGHAVKLINPILTKQYTKTTIRGAKTDKQDSELIAKLALAGEGNWLSLEKISNQRKNLLRLGQSLTKTATKLKHQVSSLKRKSVSVAGLEDSIQGIENIIKQLKQLENKLNQQITKNRPPAEELIDSIPGFASKLSAIVSEEIGDISRFKNVKALVAYVGLDPKIKQSGGKQINGRITKRGSTHLRAALYLAAHTARRYDPDLKQYYEKKIAEGRKYSEVMVMISRKLLARIYAVLKEQREYVVKDS

SEQ ID NO: 253171 - protein, 388 aa, unidentified
MADSGSWQLRQLAERMGWMAPAHGIKVPKCEGYQAFTSIWEPPVMEISTIGLDLAKNVFQVHGVDADGNVVVRRTLRRAQLLPFFASLPPCLVGMEACGTAHHWARELIKLGHDVRQMPAAYVKPYVKRGKTDAADAEAICEAVTRPTMRFVPVKSPEQQAALSMHRARDLLVKQRTQLVNMVRALLAEFGINIPQGVRLALEMARKIVDGEAPPVPREAAKIAGRLSQQALDTHAQLREIDLDLLAWQRTNDIARRLMSIPGIGPIGATALAASVTDASQFRSGREFAAWLGLTPRQHSSGGKERLGRISKMGDKYLRTLLVVGMTSLIKGVKRKPETADPRLVALLARKPVRVATVAMANHTARVAWAIMARGETYRAGHQPRLAA

SEQ ID NO: 253172 - protein, 363 aa, unidentified
MKTKAPISSSFIKNLSAGTIKLGVDAHHNKYVVVIKVDGSAPMRARIFSREESFLGLVGELQAKCDQIYCSYEAGPFGYRLHRRLESMGVTNYVIRPINWDDHGKRVKTDNRDATQIVLALDGYLRGNTRSFSLVRVPGEQEERLRGVSRLRESLMKQRKRLGTQGRGIVLYHGGYLKWNWWSKRNWKKWSEQLEDYLLELLEPIQAQLVVIEQQLLKVLKRLEAMPQPALPKGMATIMFQSMEREVCDWHRFSNRKQVGGFTGLCPSEYTSSTHRLQGSINKHGNPRLRRLLIEAVWLLWQHNRTYCRFERWPEKLDAGGLSKARLKKLVVATARQFAVDWWRLRTGRVSAADLGLVMKPIS

SEQ ID NO: 253173 - protein, 466 aa, unidentified
MSGKRTRRKGQNRGRRKLPKSLRRVNLDSAGIDIGSTSHYVAVPEGRDEQAVRKFRSFTTDLNRLADWLEECGIDTVAMESTSVYWIPLYEILEERGFEVILVNARDFKSVPGRKTDVLDCQWLQELHMYGLLRGSFRPDAEIAAVRAYVRHRDMLIKSASRHVQHMQKALSQMNIQLHNVISDVTGATGMRIIRSIIHGNHDPEVLAEARDFRCRASRETIVESLIGNYRPEHVFALRQAVELYDFYQQQMYAVDQELEKLLQELEETSPEREEIGPARTKRRKGNEPNFDIRTRLHALTGTDLTQIPAIGPYSALKIVSEIGTDMTRWPTADNFTSWATLAPRNKITGGRLISSRTRSSANRLAEVLRMAAMSIGKTDTYLGAFYRRKAARIGKAKAITATARKLAVIIYHMIARGVPFQDPGLQAHDEQHRKRVLKNLRRRAKSLGFQVIPDPPLDDMGEAVT

SEQ ID NO: 253174 - protein, 369 aa, unidentified
MKQLITYIGLDVHKETIAVALAEAGKRNEVREYGKIANTPAAVKALVAKLARNGHELRFCYEAGPCGYGIQRQLTASKHDCIVVAPSLIPRRPGERIKTDRRDAINLAKLHRAGELTPVWVPDEAHEAIRDLVRARLAAVRTLRQARQQLSGFLLRHGHHYNRPAWTLMHRRWLAGLRFEHAVHHIVLEDCIAAVEAATARRDRLEAHIAAALPDWSLAMVVHALQALRGMALVAAATLVAELGDITRFANPRQLMAYLGLVPSEHSSGGTRRQGGITKAGNGAARRMLIEAAWSYRFPARISREQLLRQEGLAKPIRDTAWKAQERLCRRYRKLARAGKPPTVVTAATARELAGFVWAIARQAQPTDA

SEQ ID NO: 253175 - protein, 411 aa, unidentified
MDRVYDKCCGIDVHKKLIVACFKQGNRQEIRDFGATTRELLEMADWLKKGGCEMIAMESTSSYWKPLYNILEVCELNVIVVNARHMKAVPGRKTDVKDAEWIADLLQHGLLTASYIPDRDQRELRELVRYRKSLVGERNRELNRLQKMLEGANIKLSGTITDINGKSARNILEHILSGKKIDSAEYDILYQQKVIAHNLKATKEQIIDDLNGVMSDLQKKMMRILLNHLDELNAHIREQDDDIDNFMKPEEKRAAEVIQDIPGIGNTGAQAIISVIGTDMERFPTDAHLSSWAGLCPGSNESAHKRKSGRTTKGNALLRDTLVVCAHAAVKNKTSYFSAQFARISAHREKKRAYVAVAHSMLVAIYHILKDGVVFNDLGADYYNQFNRERKINAYLKKLKALGCEVPVVAA

SEQ ID NO: 253176 - protein, 422 aa, unidentified
MSEEHEEFQVYVGIDWASKAHQVCVLDARGAVRSERQVLHQAPALAALATALIEAAGGQAAAVAVGIEVPHGAVVETLLERGLAVFALNPKQLDRFRDRFTVAGAKDDRRDARVLADAVRTDRRAFTRVRLPAAAVLELREESRIHNELRTEWSRVTNRLRHQLARFYPQLLEVGEVDEPWVWALYELAPTPAAAAHLRPARLTRLLHTHRIRRHTADSVLAVLRTPALVVAPGTLEAAQRHIALLLEQVRVLHRQRRECEQRLTQLLSRQDLTTVSSTVAPRREHSDLEILLSLPGAGNLVAATMLAEAGELLAARDYSTLRTRTGVAPITRRSGNKLIVVMRHACNEYLRDACHHWAQGAIRWDPRSAQHYARLRAKGHRHGRALRGVADRLEATLIAMLRTGTLYDPTRHETTRVDTAA

SEQ ID NO: 253177 - protein, 433 aa, unidentified
MSLSLYVGIDIGKFSHVASLISPKLLFKHHRYEACPTLAFEQSRSGFEKLLSALTEHAPPSACHVLLENTGHYGRAIEQYLQEKGVQVYRISVSTEKRGKQKSDKRDAQALAVLLYNQIERHIIVTDKSQIAHRLVPPSDTARLLHGLVQHRLELVHETTRRKNKLTAICDELFPELTQVYADPNTPSALQLREKYPTPQAVASADLEDLCNTRKHHRPSKAKLAELQDLARSTIGTKDQSRLTCLLIEQRQLMKELALLNEHIEALNIEISKAVSTSREGRILTSFPMIGPIHAAVLIAAIGTIANFESIAKLRGYCGWSPLQQQTGTSKDSMVLQQAGNRLLKHTIYLITLQAVHMDTPFKVLYDRLIPIKCHYDERTGRYRGKMKVIGRVAGQIIKLIYVLLRRDHDLIAGGGQVPDPELYDPLKHKIKR

SEQ ID NO: 253178 - protein, 412 aa, unidentified
MVETIVERPAALDVHKAQVTACVRVPADGGGREQHVAEFQTTVPDLLALRDWLAAHGVTQVAMEATGVFWKPVWAILEDEFELLLVNARHVKQVPGRKTDVSDAAWLCQLLEAGLLKASFVPPKPIRTLRNLTRYRKSQIQERQREANRLHKALEDTGIKLDCVASDILGVSGRRMLDALIAGTTDPVVLAELAKGSLRRKIPALRQSLEGRFDRHHALWIGAILNHIDFLDEQISALSEAIEEEIRPFVPAVKLLCSVPGIQQRGAECIIAEIGVDMSVFPTSRHLASWGGQCPGNDKSAGKRRSGKSRNGSKWLDYALEEAAMAAIRASDNYLAAQYQRLRPRRGHKKALGAVKHSILCICWHMLATGELYHDLGGDYFHRRDPERQTKRLVKQLEALGHTVALQEAVAA

SEQ ID NO: 253179 - protein, 380 aa, unidentified
MEKDIRFVGLDVHSETIATGVVDSGGPVESLGTIAHRPESVRKLMRRLGRPDQLRVCYEAGPTGYGLYWMLTGMGIHCDVVAPALIPTKPGDRVKTDRRDAEKLAKCYQSGDLTAVWVPDAEHEALRDLVRAREAAKSDQTRARHRLSKFLLRQNRRAPKGVRRWTQRYLDWVRREVKFDLFTQQATLEDYLAEVLHAGERIRRLEQRIDDAIEEAPESTRAVIAGLQALRGIAKISAVTIVSEVGRLSRFARPRQLMGYSGTVSSEHSTGQRVRRGAITKTGNAHFRRILGEAAWSYRYRPYVGPVLRKRQEGLPAEVVEIAWKAQQRLHRKYQRLLGRGKVKQQVVTAVARELTGFIWAIGVHLEQGMGVEVMPRGTR

SEQ ID NO: 253180 - protein, 388 aa, unidentified
MQTVADRAAAPSAIQTDLRAIFVSLELSRSTWLITSLSPGGGEKLSKHSVRGGDVAGLLARFAQLRDKARARTGEVFPLIVIQEAGLDGFWIHRILQSEGIESHVVDPASIATSRRRRRAKTDRIDGEALVRALLAYKRGEPRVCAMVKAPTPQEEDRRRVCRERKVLIVERVQHVNRVKGLLFCQGVTGYEPLRRDRRERLDEFQTGDGRPLPDHLKAQLRRELDRIELLMEQIKAVEAERDGMLARDHAVTPAPAAMLLDIKGIGPEFAGILWAEGLFRHFDNRRQVAAYAGLAPTPWQSGAVNREQGVSKAGNPRLRTTLIQLAWLWVRHQPRSALTLWFEERVKRNGGRLKKPTIVALARKLLVALWKYVTAGVVIEGAVLKAV

SEQ ID NO: 253181 - protein, 355 aa, unidentified
MSQTPNTAIAVIGIDIGKNSFHVVGHDARGAIVLRQKWSRGQVEARLANIPPCLIGMEACVGAHHLSRKLASLGHDARLMPAKYVRPYSKGQKNDFNDAEAIAEAVQRPTMKFVATKTAEQLDLQALHRVRERLVSQRTGIINQIRAFMLERGIAVRQGIGFLRTELPTVLATRTDALSPRLLRIIEELAGDWRRLDQRIDGLSGEIEALARQDQACSRLMTVPGIGPIISSAMVAAIGTGDVFSKGRDFGAWLGLVPKQISTGDRTILGKISRRGNRYLRVLFVQAAWVVLVRIKNWERYGLKSWIEAAKRRLHHNVLAIALANKLARIAWAVLAKGRAFELTRTDDAGVVRPA

SEQ ID NO: 253182 - protein, 347 aa, unidentified
MKSIGCDFHPGYQQIAMLEDETGELTVMKLSHVGDDVRKFYTGLTGAVRVGIEASGHSQWFERLLAELGHELWIGDAGKVRRSTDRAQKTDRRDAELLLQLLLENRFPRIWVPTPAERDARQLLLHRSKLVRVRTQVKNQLQALALNQGVQRRRKLWSVTGRQVLESLPLLPWASRRRAELLKLLDELDGSITSLDGAVSQEALARPAVRRLMTHPGVGPVTALAFALTLGPAERFSRGKKVASYFGLIPKEHSSGGKQRLGHISKQGSSFVRGLLVEAAQSAVRHEPQMRREYQRLSQRRCRALAKVAIARKLAVRLYWMLRGGMDYAQLLQGSCAGQPESSRGRS

SEQ ID NO: 253183 - protein, 406 aa, unidentified
MYYVGLDVHQYRTSVEILDCNGKGVKRLEVRGRWPALLEELRKAPRPFAVCYEASCGYGYLYEELSKLAQRVTVAHPAALAWIYKSKKKHDRIDAIKLAKLLYLDEVPTVHVPAREIRLWRQTIEFRQKLLQMRVSAKNQIRAFLRERGLAAPKNLWSGKGLAWLRTLELDEAAGLHSELLIDALQEANQKMQRVEKYLNRVVDRQSGVALLRTIPGIGRRSAEALMAYIDDVQRFGSIKEVGSYFGLIPCQDASADKNHLGHITREGPATVRKLLCEVAWVAIRRSRTVGAYFQRVMHHDPERKKIALIATAHYLLRVAASMLRSGECWRESVELTQAATEADAPGGGENPSRPQGFSPPPNAPRLPTDRFLPSPLSPSPPPQPWAAQTTLKALHDAGGPSRQRK

SEQ ID NO: 253184 - protein, 355 aa, unidentified
MNDAKYIGFDVHQATISVAVLDSTGKLVMEAILETKTETILQFLRGLRGSLHVTFEEGTWAAWLHDLLKPHVTRVVVCDPRKTGVGKLRNKNDRSDARELADLLYRDRLEPVYHGEHGLRTLRELARSYLSLTRDLTRVMARLKAIYRSWGISCAGQQVYALRHREEWLVKLTEGGVRRRAEFYYQQFDTLAILRQQARQELLVESRKHPVVKLLQQIPAIGPIRAALLLALMQTPHRFRTKRQLWAYIGLALRTYTSGDYCIERGQLRRSKKAVAIRGLNRNYNHDLKNIFKGAATWAASNQGPFLSFYEACVAGGMKPHMARLTLARKIAAITLVVWKKGVRFDAKHLNVQAA

SEQ ID NO: 253185 - protein, 391 aa, unidentified
MINIGIDVGKFKHCAAVIDDKTGEVLIKQFFFSNDQEGFDFFYSKVKRYIHRRHAVGMEDTGHYMINLTNYLLEKKLSVKYINPRSTNLRRKELGISAKNDKKDTLLIAEMLSEKKFWRSVSKSSMETSKLRELTRLYHQLQEQQNQDMNRLQRALDIVFPEVNTLSWTRYSKAYIQFLAAYSSASSIASEDIRNLRRALKTEGRGRQCKVTAEEIKELAKCSVGDDNIAVELEVKSVIAIINTRAEQIRVLEKKIEEFSHQLNSPIISIPGISHITGMTILAEIGDIKDFPEAAKLISYAGMDPLVHQSGKYDAAHMPISKHGSRYLRKALYQAVFTVCKYDTTFQDYYTKKLNQGKSHRCAQGHCVRKLLRVIYKLLSNDLSFDSNLIH

SEQ ID NO: 253186 - protein, 343 aa, unidentified
MERYVGLDVSLKETSICVVDGGGKVVCEGAVISEPAAIARFVRSKAPSAKRIGLETGPTTTWLWHELSALGLPVICIDARHAKAALSMQINKSDRNDAVGLARIMQTGWYKQVRVKSVACHEVRAVLNSRAQLVKIKGDLENQIRGLLKNLGLVIGRAKGNVFVRRVEELLGQHGRLYDAVCPLLEVREKVGREIAVLDRQILHLARNDDHCRRSMTVPGIGPITALAFLTAIDDQSRFPRSRSVGAYIGLTPRRYASGEVDWTGRISKCGDRLLRTYLFEAAGVLLTRVAQWCKLKAWGHRLWKRIGFKKAKIAVARKLAVILHRMWRDGTNFIWSSKEEAA

SEQ ID NO: 253187 - protein, 463 aa, unidentified
MSRKEKSRNQGPADKPKMDWKALEVVNANAAGIDIGGSEHWVAISPERDPEPVRCFDCFTADVERMADWLVERGVRSVAMQSTGVYWMPVYEILQQHGLEVYLVNARHTKNLPGRKSDIAECQWLLKLHTFGLLNNSFQPSDEIRTVRTLWRHRGGLVAQASSAIQRMQKALIEMNIQLSNVLSDLSGVSGMAIVQAILEGQRNPSKLAALADPQVKASPEVIAKSLKGNWRPELVFVLRQEVEMYRTCQDKIAACDQQLKQHLQTMTAKVDLDEQPLGPRPKGKRARGNAPKFDLRTELYRLTGVDWTQVDGIDVQVAQSVIAETGVDLHAFPSEKHFANWLGLCPTNETSGGKVLNRRTPKVVNRAKVAFRQAASTLIRSQSYLGAQYRRLRTRLGAPKAITAMARKLSCLFYRLLKHGQQYVDKGVEFYEARHREQMIRSVIQRAHQLGLQVVQPQGTSA

SEQ ID NO: 253188 - protein, 316 aa, unidentified
MQSILDLGADVDSRFVVMACAAGSVRPQRIANARRAVLEWLRTVPRGSRLGMESTGGYHELLAELAHKAGLEVFVINARDLRRYAEGIGRRGKTDRVDAEVIARYVAREHGELHPYVPSTKAQRDLAQLIGRRAKLIQTKDTINQSLRGVPALRADAKRVIAGIDRLIARIESMMQRALQQTPAAREAAENIVTIPGFGTLSSTYLGHAFTRLPYANSDAVVAASGLDPRPDDSGKKKGRRRLSKRGPGEERRLLFNCARSASLTKLWKPYYEAQLAKGLSATAATVILARKMLRVAFAVYKHRQPFNPALLGGST

SEQ ID NO: 253189 - protein, 360 aa, unidentified
MTGTILAIDLGKFHSVACFYEVADGRHEFKRIETTPRAVNDLLAERKVVKVVIEVSGQAGWVVDLCRALNMEVEVANANGEAWRWRNVKDKSDRNDALKLARLSVMGQLSLVHVPAKEVRQWRSLIQYRHTLVERRVAIRNSIHALLTVAGGAVVIRNWNERMVAELRKESRRLGKCGREELWRGQLGLELDAMEQVQQLIEQVEKKLDELVSDESQQWTERVKLLRTIPGVGPRLAEMVVAWIDDPKRFGTGRQVGAYAGLTPRRYQSGESERSGRISKAGSGRLRKLLVQVAWGMLRYNARGREVFDRLCKNHKTRRKQAAVALARKILVWCWAMLRDGKAWQEDHRAALALSGSVEL

SEQ ID NO: 253190 - protein, 310 aa, unidentified
MQIICGVDVSRAWLDAFVAPDQYQRFANSPDGVTALAGFCREHDVELVVMEASGGFEQPAFLALWQQGQPCAIANPGSVRHFAKAMGYLEKTDRIDASTIAGYAEAKRLKPTPPPSRDQQKLTALAARLRQVTGDLSVQKQRLHFTRDEQVLVSLREAIAFFTRQAKALAAEIAALVETDPLWTALDRTFRSVKCVADRTVAVILADLPEIGTVSNKAIAKLVGLAPIANDSGKRTGKRPIRGGRDTVRTILFLVADLARRYDPSLADFRKRLLDQGKPKMVVRIALARKLLVRLNAKARETRMQIAHDL

SEQ ID NO: 253191 - protein, 392 aa, unidentified
MLYIGIDVAKSKHDCFIIDSDGVVYTDNLRINNDRVGFNKLLETILDALDGEPVTNAKVGLEHTGHYSINIKRFLESQGFVVTSFNPLETNAFRKASTLRKTKTDKCDAKTIATMLFSNESIPTSPPSYQIQELKSLTRHRFRLVGYRGKLKVSFARIIDVVFPEFPSFVWSVNQKSSHQLLLQLPTPEAIARCHLSRLTNLIHKSSHGKYGREKAVALRDLAASSIGLSDEALAFELQQTIRMIQNVQAEIDALDRKIKSIVQELDTPLLTIPGISYTLAAIILAEIGDINNFSNPSKLQAFAGLDPSTYQSGKYTASYATMVKRGSTYLRWAMFQAARLVAMRDKTFADYLAKKRSEGKHFNVAISHVSKKLLRTIFYMLKHNEAFVSQS

SEQ ID NO: 253192 - protein, 475 aa, unidentified
MAAVMIGVDPHKASHTAVAISAAEEPLGELRVRACAAQAERLLAWATAWPQRTWAVEGAGGLGHLLAQQLLAAGERVLDVQPKLGARVRLLAAGDVNKNDPNDARSVAIAALRSAGVGEVRPDDHAAVLKIWSKRHRDLGRTRTQVVCRLHAVLCELIPGGVSKAITAGQAARILGSIAPPDAVAAARCELAAAFLEDLRGIDARILETKKKLIAAVQASGTSLTGLFGVGPVVAATVIGGVRDVSRFGGRDHFAAYNGTAPIEVSSGGRKVYRLSRRGNRRLNHAIHMAAVTQVRHRHSEGRAYYDKKLAEGKTRKEALRSLKRQVSNAMFACLQADARRAAARAEGPGGQQGNDSVASAAGLHPRHRLFGQATPGPGHHTTTAAGNPPSGPVPSQSDGAPGRAGHSPVAATLPSATPQVQVERPQRSEDERPGGAARRRPYSGREEGQRPRSAVKPQGPKATSHAAKRTRRNS

SEQ ID NO: 253193 - protein, 355 aa, unidentified
MKNQAIQYLALDVHQATVVATVRDEHGAIRMRATVPTEANAILGLVRGLGPRVHIAFEEGTQAQWLHDLLQPHAERVVVCNVRGRSETSNKSDRIDADELSEMLRVGSIKSVYHGASGILTLKELVRCYTNLVDDSTRVMLRIKALFRARAIPTPGTSVYRARERAKWLARIESRGGRMRAESLLRQLDTLLELRPKAKAAMIAEASRQPGWKVLRSMPFFGPVRVALLLAIMATPFRFRTKRQLWPYVGLAVVTRSSADQEFVNGKLRRRRRAPLTRGLNRNHNPVLKNVFKGAANAAAAKPGPLKDVYDACVGRGVREELAKVTLARKIASIALRLWKKGELWDPDKLTMQTT

SEQ ID NO: 253194 - protein, 316 aa, unidentified
MNETMVEKFVGIDVSKSTLDVCIEPAVQTLHVAYDEVGINQIAGRLQEVSPTLIVLEATGGLEVRIATELASLGLPVAVINPRQARDFAKATGRLAKTDQVDAAVLAAFAKAIRPQVRPLKDEDTLALDDMVSRRRQLINMRVQETLRLGTAASKPLQKSLAKHIAWLDKQVAEVDSDLNNRLRNSDAWRAKDDLLRGIPGVGAVTTLTMLAKCPELGTLNRREIAALTGVAPLANDSGKHRGKRFIWGGRADVRAVLYMAAISAMRCNGTIKAFAERLKKTGKPPKVVIVACMRKLLIIMNAMLKNNTPWNPNIA

SEQ ID NO: 253195 - protein, 343 aa, unidentified
MQDVATVGLDIAKQVFQAHGADASGETLFNTKIKRENVLEFFSKLKPCLIGMESCATSYYWARQLLEFGHDVRLIHTSYMKPFVKRGKTDANDAEAINVALTQKTMRFVPVKTLNQQAAITIFRTRSLFVSQRTQLVNALRGHLAEAGLIAAKGIQNYSKLLKLMESAADTVLPTVMKQALTDICDQIHRLNDLVTKLDKEIERRVQHDENACRLLTIPGVGPKTAMCVIATIPDIHRFPSGRHFSSWLGLTPRTHSSGGRSVLSRITKMGNSELRTMLYLGGTVIMMRDKKTPIGRWASRLRARRPYKVAAIAVANRIARIIWALLTNGGVYDPTYGREASA

SEQ ID NO: 253196 - protein, 406 aa, unidentified
MHSPTTTTFAGIDWAMRSHAVCVIDDTGTVLERHEVEHSGAGLATLVRRLTARQVSSVAIERPDGPVVDALLAGGLRVVVIASRHVKALRSRYGAAGNKDDRADAYILADVLRTDGHRLRPLLPDSPATIALRSSVRARKDLVHTRVGLVQQLEAHLAIVFPGALGLFSRLDSPIAEAFLTRFPSDTEAAWLSPRRFTAWLVRRGYAGKRRGAEFHARLIAAPAGVSGEGASALAAVTLGYVRAITALREQIAVMEERIAEQLTSHRDGAIFTSLPRSGSVRAAALLAEIGDCRERFPTPEALACLAGAAPSTRQSGQYHAVTFRFACDKKLCDALIDFAGDSRFANEWAADTYDRAIARGKRHPHAVRILARAWVYVIWRCWQDGVPYDPELHQALQRLTLARAA

SEQ ID NO: 253197 - protein, 370 aa, unidentified
MKGEVWSLSDFRHHSAQYGMHKAPSDWRLHNMKYTPVGVDIAKHLIQVHFIDEHTGEVVDKQLRSKDFLTFFSNREPCLIGMEACGGSQHWARELTKLGHQVKLMQGRLVKAFVMGNKNDVMDARAIWMAVQQPGKAIAVKTEEQQSILTLHRVRRQLVKFRTAQINALHGTFLEFGETLHKGRASLAKELPQAIERLKVRLPIYLTNLLEKQYQQLAELDSQIDDIERQLMAIARQNEVCRRVMDIPGVGPLIATAAVAIMGDTSAFKSGREFSAYVGLVPKQTGTGGKVRLLGISKRGDAYLRTLFIHGARAATLVAKEPGKWITDLKARRPTAVAIVAMANKLARMVWAIAAHDRKYDKNYVSIRPY

SEQ ID NO: 253198 - protein, 354 aa, unidentified
MNSTQVFEKRKIAVAIGIDLAKDHCDVVAYNADNKICFTKSNWAYPQLMEWLANAQPAVVLMESCKGSMVRARDIADLGHDSRLVKGADVKALRNVTQKNDIRDADYIARLFYVPGTKYVFVKNQRQQSLQFLQNEYKSLQELRIRVGNQIHAGLEEFGCPGSKSKKFIQSRMMAHLEKNAELIPDEVMASFLRRRDMWLNLFEQEEQAKTRMEEIAMTDDDAKRIMTVPGVGAQTAVGMLVHIGGDIGRFKNSGQFAASIGLVPKQNSTGGNITLNGITKCGPKRLRANLVQCGQVILMYADKLKGNFGDWVRKLRDSGKKRGVIACAIAAKIAKIIYRLMKDKVDYTLVPSR

SEQ ID NO: 253199 - protein, 410 aa, unidentified
MIYVGIDWADDHHDVAITDDSAKTLSQFQISHDSSGFATLHGQLAKFKQSPDQILIALETSRGLLIHELLRSDYSVYAVNPRAVNRYKDRYVLSKAKSDSLDALALAHLLRTDRQRFKALRPFPEDYRLLDRLCQDLRKLVEEKSRISNQMTSVLKEFYPKALELFSLDSRIGIAFLKAFPDPQALRSCKKKTLKAFLKKHHYSRPNKIEELWTLIQTPALEPDVVICKAGRFRLLALLDQLIPPREHLALYEKEVKTILDKLPEAKSINSLPGVGNRLAPELTAALGPKGSGSQSRFQSAEEIMNLSGCVPVTRQSGKWKTVSVRYACVKSLRRTFRDWAFASLGQSVWARAYYDFYKAMNMPHSTILRNLGKKWARILFALWAQGAVYNEALHIQSLKNHNVRWAMAL

SEQ ID NO: 253200 - protein, 408 aa, unidentified
MNPLFVGIDVSSKNNVAYLMKPDGSKHSSFSVQNNLGGAKLLSERIVSALGSMQLERVVIGLEATSIYGDSLVYALREDGRLGRFQRKIHVLNLKQVRKFKEAYSDLPKNDWVDAFVIADHLRFGRINREVYMDDYRYKALQTLTRARFDVIQNLTREKQRFANYLFLKCSGMAQDKDIQNTSATTIALMEHFETVDDLANADLEELTAFITETGRGKFADPDATAKAVRAAAKGSYRLPKTVNDTVNQAMAVSIASMRALKGQVKVLDKAIEQQFEIIPNTLTSIPGIGKVYSAGIIAEIGDIHRFDSQASVAKYAGLVWNRSQSGDFEAEHSRMIKSGNRYLRYYLLEAANSVRRCDSEFRRYYDLKFKEVNKYQHKRALALTARKLVRLVFRLLKDNRLYIPPEG

SEQ ID NO: 253201 - protein, 429 aa, unidentified
MNNADNIRLDQYRQIKKEIRGSSEYLIIGIDIAKSKHYAFFGTSTGKTLLKRMIFENNLEGFNKLRVYEDSVKTRYGFQKMIYGLEATGNYHKPLGEHLIKCARNVVLVPGVAVKNNRKMIYGRWDKNDTKDAAVIADLISQGKFAFYEYATMPLRDLRNLLSLKRRLKKQEHSHKVRIRNNLLAQYFPELDQYYSAWGKEGLAIVRWCLDPSIIYGLEYDEFTRRVAPDCRGGIPQQKRLKAVWETAIKSVGCAVGESLDVESKLMVEGLKYTRESIKYIEKKIKEICLGIPEYQYILSIPGFGPDISSKVVAAIGYPFRFNNGRQVLKMAGMDLSASRSGENSDNATPKLSKSGKANLRYALYQAAMIASIKDTHFMRYYTEKLRGREKEKGIKTKMRVKLAAKMLIIAWTLMKKHEYFDPGYLKIE

SEQ ID NO: 253202 - protein, 351 aa, unidentified
MGWIVGVRDGGGLNARLHRLCSGDVSGLLRVIEGVRLRGSERVVCGYEAGRDGFWLARYLGARGIDCVVLDPASLPVERRARRTKSDRLDVHLLLRGLMGLAGGERGACRVVRVPSRAAEDVRQVHREREALLRERVCHVNRIKVLLAAQGIDGFEPLRDGAAALAGLRDSEGRPLAPHLRSRLEREGGRLAVVVEQIAAVEATRDALAARQAGDSGAAKVRRLAALKGIGVQTTTVLTREVLWRDFTNRRQLGGYVGLTPTPWRSGGMVREQGIGKAGNARARTALIELAWLWLRWQPDSALTRWFHSRVGTATGRVRRIAIVALARKLAVALWRYVHTGLVPDGAVLKA

SEQ ID NO: 253203 - protein, 348 aa, unidentified
MAHFVGLDVSVKETSVCVVDDAGKVVCERKVPTEPDDIAVLLTSVGGDYVRVGIEAGPLSQWLVNGLAEASLPVICVETRHMKALLQAQQINKSDRNDARGIAQMMRVGLFKPVHVKTLAAQEQRMLLTSRKLVQRKLIDIESDMRGTLRNFGLKVGVVSTIGYEARIRHLVEGFPRLAAIIEPLLTVRRVMRQQLATLHKMLLDTVRHDPVCRRLMTAPGVGPVVALTYRASIDQPQRFVHSRAVGAHVGLTPRRHQSGELDYDGGISKSGDTMLRTMLYEAAQILMTQSRHWSWLKAWGMKVAQRRGMRRAIVAVARRLAVVLHRMWADGTDFRWGSQPAIAVAAA

SEQ ID NO: 253204 - protein, 327 aa, unidentified
MAQKMDVVGIDVSKATLDAYALTSQQARQFANDPAGHQGLVAWLQELGVGVAVFEASGGYERAAAQSLRRAGLVAHVVDPKRVRHYAQAAGQLAKTDRIDARMIAAFGAAFLLGKPSGVAGGDDPARQDLAELVGTRQVLVDHRTSLQQQADAVTSAIAKKLLLATLKQFDRQIETSDRQIAAAIARHEPFAALARRLDTVPGLGPVSIAALIAWLPELGQLDRRQLAALVGVAPFADDSGKRTGQRHIQGGRMKLRNVLYMATVGAATRHNPVLQARYRRLLENGKKPKVALIACLRTLLTILNAMVAHQQDWNPTKLPATEPVAA

SEQ ID NO: 253205 - protein, 356 aa, unidentified
MNEITTVGVDLAKEVIVVCAGDAEGRTVFFRQFSFAGFAEWAANLPACLIGLEACSSAHHWARFLTQHGHTAKLMAAELVEPYRLSRGAKNDRNDAQAILSAVRQPNMRFVTVKSIDQQAMLAWHRSRAGYLEERKALLNRTRGLLAEFGLWLGRSSAVLRRQLPRLAEDERLPARFRPILTHVIEHLRQIDARIDECDVQIREHARHSEHARRLQTVLGIGNITASALIATIANPRDFRNGRQLSAWCGLVPRQRSSGGKARLGVITKRGDAYLRGLLTQGARSTMQAALKREPLRRSRLEHWIVALHDRAGYHKTLVAIANKHLRTVWAILAHNENYDPNAWRRHPRAAAMRLS

SEQ ID NO: 253206 - protein, 404 aa, unidentified
MVDTVGIDLFLGLDLGKEFHHAHGLTGQGKTVHDRRLPNTEPKLQELFEKLVAKFGTVLVVVDQDAKIGALSIAAARASGCRVAYLPGLSMRRAADLYPGEAKTDARDAYVIADTARTMPHTLRAIDRDDEALAELTMLTGYDNDLAGEINRTTNRLRGLLAQIHPSLERVLGARLHYPCIQALLSRHGSPGKLKKLGRARCEALLKAHGSRKAKRLTEEIFTALAEQTLTVPGTDASALIVPGLAAQLAAAHTQRQATEAEIAALLEALPLFHLLTSLPGMGVRTTAAVIVAIGDGSGFPTAGHLASYAGLVPATKSSGTSIRGEHAPHRGNRLLKRALFQAAFAAIGCKSDLASRVYYDRQRARGKTHTQAILRLARQRVNVIHAMIRTGTFYEPRTLGLAA

SEQ ID NO: 253207 - protein, 340 aa, unidentified
MKVRTLAIDLAKNLFHVHGVDGQGRTVVQRQLRRRQLLPFVAQLQPCLVAMEACGGAHYWAREIAERGHEVRLMSPRFVRPYVKSNKNDARDAEAICEAVGRPSMRFVAVKSQAQQDMLALHRVRSLLVRERTALMNQMRGLLAEYGIVVVQGAVPLRRALALILEERDNGVSEILRELLVEMSERQRFLEDRLKRYDQRITEFARADERAGRLMAVEGVGPLTATALIAAVGNARQFRSGRELSTWLGLVPRQHSSGGRSVLLGISKRGDRYLRTLLIHGARAALRFAARKRDPRSRWIGAVRERRGANIAAVALANKNARVLWALLARNEDYRLPAAA

SEQ ID NO: 253208 - protein, 337 aa, unidentified
MKSYLFIGIDISKATLDVCVLCPSDIADVHHHSFCNGTKGFSQLMKWLKQKSEGVAIEDWRVCMENTGIYSLELNCFLNEKGIWQSMENALQIKRSMGVVRGKTDKADSKIIALYAYRFIDKLKPYVLPTGTLLRLRALFSQRERLVSMHSQLLVASQSIKGYPNDLVKDIQAQNEMLLENLGVQIKGIDKSIKECLQQDKDLQHKSKLIQSVPGIGPQTAAYLLIVSQGMKSFATPRQFACYSGCAPFAHQSGVSIRGKTRVHFIANRKMKMLLHMAAMNAITFNDELKAYYQRKVAEGKNPMSVLNAVRFKLICRIYSVVKRNEEYQKEYGKIAA

SEQ ID NO: 253209 - protein, 421 aa, unidentified
MADQRTLVRGKRAPLGSTKEKEGAMSAVVGIDVGAYKHAAAVCRSGEREAERAVFRLSANRAGFDGLERWLERQGPVERVVLESSGHYYWPLASHLHRGGYQVAVVNPLQAKYFAKSRLQRSKSDPADARTLAALGMSEEPRVKDPLLGAEAKEAARFWGGLVKEQAQVRQKLLRLVEIGFPELKECFEDPLCETALAVLREAPTARAAARQRVSSLADATRPGGRRRLGENKARRLHELVKDTIAPPELDAQMGFEVGLLIQQFDLLEKQIEIAEQRVSEVLDSELAQRLQTIPGVGPALAATFIAEIGDIWRFEEFDQLAAYAGVHPKEQSSGTKGQNPETSWHMAKTGNAFIRSAAYRMAVVGTQHNPVIRAHYLRKRAQGKTAMNALGHCMSKSLAIVWGVWRSGRDFDPSLGGPRT

SEQ ID NO: 253210 - protein, 344 aa, unidentified
MVEYVGLDVSKEETAYCVMTGEGRVLAKGKAASDPDALFEALKAHCLYPERIVVETGTLSHWLVRGLRERGLRVDLIDARQAHGVMKLQHNKTDAGDAELLAQIARTGFCRKVAVKSVAAQELRMVLKARAHVVGQRRDTENTIRGLLAAFGHRFPKGVGKFPKRVAAILEAHPELGAAISPLLAARASVLAALGELDDEVLAHAKVDPACRLLMTAPGVGAVTAMAFVATIDDPGRFAKSRSVGAYLGLTSRRYQSGEMDYSGRISKHGDAMLRSLLYGAANSLLTVVHRAHPLKAWARRIKKRTSHRQACVALARKLAVILHRMLADGEAFRWPTKDAGAAA

SEQ ID NO: 253211 - protein, 408 aa, unidentified
MQALVERGCGLDVHQATVVACLLIVRKDGKVQKQMRTFGTTTQELLSLREWLLSEGCTHMAMESTGVYWKPVYTILEGALEIVVANAQHVKKVPGRKTDVKDAEWIADLLCHGLLRSSFVPPKPIRELRDLTRYRRKLVESQAAERNRLLKLLETANIKLASVATDVFGMSGRLMLRALVEGKATPQEMAELAKGKLRKKIPELEPALEGKVEEHHRFLLRLQLDRLEAAEKDLAVLEQRIQEKLKPYEAQLTLLDEIPGVDWTLAAGFIAEMGVDMSVFGSVSQLASWAGVCPGNNESAGKRKSSRIPKGNVYLKTALVEAANSAAKAKGTYLRDKFYRLKARRGYKRAAVAVAHKILVAIYYMLSHRVCYNELGDAYLDKRNKHQLTRNLIHRLERLGRSSSPDRG

SEQ ID NO: 253212 - protein, 428 aa, unidentified
MNYNQNQRLNQLDENILIIGIDVSKKFHVARAQDFRGVEFKKGIKFDNSRQGFKEFEEWKDSLLEENQKTKVLVGMEPTGPYWLPFARWLQTEGYWTVTVNPAHVKKSKELDDNNQAKTDYRDARVIAQLLKDARFSEPNLLEGIYEELRNAKNIRKVIVNDLKRIKNQMANWFDRYFPEYKKGYANWEAESFLYLLEKYKLPARIAELNPSEVYEKIRKSFPRGVGQKKIENLIKASKESIGIKEGCRMAEKELDYLLKRYKEIVSDIDDIENVINGLCEELPEVNRIAQIKGIGITTASGVVAELGNIKNYRTPKQMIKMAGLSLTENSSGQKKGKMSISKRGRKDLRKILYQAVVGMIRSNKAFNELYQYYRYRAKNQLTGKQAIVVLINKLLRIIHTIVVKDVDYDEDKMLGAIKHPDEFSFAA

SEQ ID NO: 253213 - protein, 340 aa, unidentified
MYHVGVDLGDKCSSIAILNDEGKVFKQIEVKGGWGALLGRVAMLPRPMAICYEASCGYGYLHEKFSRLSDRVQVAHPGQLRLIFRAKKKHNRVDALKLAKLLYLDEVPRVHVPSVDVRSWRMMIEFRQKLLARRVSVKNQIRGMLKSQGITSGEIAGGKSLWTKKGIAWLNGVELPELESLRREMMIDELKELGGKMKRVEVELAKVADRHPGVSLLMTIPGVGIRTAETFVAYVDDVKRFDRLKQVGSYFGLVPCQDATGNVNRLGHITRDGPATMRKLLIEAGWQGIRRSVTIRAFFERVMRKDKDRRKIALVATGHWLSRVMASMLRSGECWRERVN

SEQ ID NO: 253214 - protein, 309 aa, unidentified
MKRAEMKYVGLDVHAAHCDVCVIDNETKVMFETSCETNGSELVKVLTAIAEPKVVVLEETTIADWVYRTLKPHVGRVVVSDPRQNALIANDENLNDKTAAQKLAMLLRGGFIHEVHHGALERHDFKRLVLFYHQQTRTLASLRNQLKAVFRSDAIPCPGTSVYDGAKRKEWLGKLTSRSAQFQARELLESIDYFEQSKARAFAQMKRRARQFPQIAAFDELPGIGIVRASTFFAIVDTPERFTRKSKLWAYCGIGIVKRKSGESSGPQHLNRNGNPLLKDVAKGAASAAISTPAAVSQAFSANSQNPSA

SEQ ID NO: 253215 - protein, 410 aa, unidentified
MRYHIGVDWGDQEHAVWVEDEPGQRVSAGNKVPHSAAGFSDWGQELNAWRAQGITLWAAIERPEGRVVDFLLDHGVRVYPVNPKALDRARDRFRQSGAKDDLFDARVLAGFLRTDHGHLTALEPSSEAAQELKLLTEDCHRQLREQTRLMNQLTATLKEYYPRALEVAELTTALLREFLQAYPTPESLTALTERQWQRWARAHRLSAARTTELWTTLKQPQLPVPAHVVRAKSRLMQALVAELAVVVQMVARYRQAVDDFFAGMPAATWARTLPVGEHGITVPTLWARLGDAPSRWDSAEHLQAQAGMVPVTVRSGKQLIVLFRFACDKQLRYTVDQLAWLSLSGSDWARAYYDQQRARGHRHRRALRALGAKWLKIIFVMWRRQIPDDEEHHLATMARQALRGPKKKIA

SEQ ID NO: 253216 - protein, 407 aa, unidentified
MRYYIGVDWADEEDAVWVANDAGDKMLSRRFAHTVAARSEWARWLRERQAEGIELWAAIERPHGRIVDFLLDHGVVVYPINPKSLDRARDRFRVGGSKSDPFDAKVLALFLRSDHLQLRPLRPNSEAAQELQGLTRDYRRQVHLQTRLLNQLTATLKEYYPRALELGEDLTAGWAQAFLARYPTPAAAAALTEPDWQAFAHAHRLSPTRTAALWETLQQPQLPLPAHVVRLKARLLQALLRELAPTLATIAEYRQAIDDFFATMPTAEIARSLPVGKSGTTVPTVWAELGDHADRWASFRHLQAYAGSVPETDCSGKHHVVKFRFACNPALRDAIHQLAFLSLPHSLWARAYYDRYRERGHTHHQALRALGAKWLKIIFVMWTRHVPYSETHHLATMARQHLHQTAA

SEQ ID NO: 253217 - protein, 422 aa, unidentified
MLEETNDREELVARVAALDIGKAELVCCIRVPGQGKRGRRLQEVGTYQTMTRSLLVLADRLGELGVTRVVMEATSDYWKPVFYLLEAHGFEVWLVNAKDVKHLPGRPKTDRLDAVWLAKVAERQMLRPSFVPPPAIRRLRDLTRYRADLVAVRTAEKQRVEKLLEDAQIKLSVVASDIFGVSGRAMLAALLAGERDPKVLAELARGRLRAKRSVLEEAFTGRFSDHHGFLLATMLSRIDASSTDITELDRKIDEAIAPFAPAADRLDEITGVGRTAAQVIIAEIGTDMGRFPTAGHLVSWARYAPGVRQSAGKKKGNSATGHGNPYLARVLGEAAIAAGRTDTFLGERYRRIARRRGAKRAIVAVGRSILIIVWHLLADPTVRFHDLGAGFYHTRIDTERRKRNHIRQLEALGYKVTLQPAA

SEQ ID NO: 253218 - protein, 440 aa, unidentified
MMQPSWFVGVDLGSQEHAVAIVGADGRRLRELAIPANPLGILQLLGVLGGAPGGVAVAVESPHNQLVEVLLDRQVPVWAINPKQLDRLRDRHTVAGSKNDRLDAYVLADSLRTDRPLFQPLAVDLPEVRALRELSRTLEELDKKRRQAANQLWQLLLGYFPGLLKLCSGADEPWLWELLRLAPTPRRAGALSPATLAPLLRRHRITRVTAADLQRCLAEAVTGLPAAAETVCGQHARRLVEQLVLFQAQLKEVTQQIEKTVPKPKPGEPADPSPPPAPAAAADSSPPPADEPAPDAEFRTICRLVASMKGIGPKTGATLIGEAYPALREGNYAALRGRCGVAPVTRQSGKKQVVLMRRACARRLRNAMHYAANVAVQQVPAWGSLYARIRSRGGSHSRALRQVADKMLKVLTAMIRTGTMFDLEKVKCRSTDFAGTTSAK

SEQ ID NO: 253219 - protein, 309 aa, unidentified
MAHLSNWVGIDDHADKLTIALYVGSQKQPTKEWEVAPTESGLRQLMRWLKELKGPVHCVYEAGPCGYELYRSLINRKIDCVVAAPSLTPRKPGERIKTNRRDARKLAELHRAGMLTLICVPDRRQESVRDLLRARDDARKNVLSARHRLSKFLLRQGRRYRDGTNWGDGHWRWIRSQVMAEPCDQIVLKHYIAALEDRQDELKGLDAHVLEAAQQPDDAPWVSRLCVLRGIDTLSAMVILTELGDLRRFTSAKQLMAAVGLVPSEYSTGDKTRRFGITKTGNAHVRSRAGTGGLALPAPADAPIHYSQA

SEQ ID NO: 253220 - protein, 316 aa, unidentified
MTGPAVFVGIDVAQAMLDVALLPSGETWQVANDEPGIRALLTRLQPHAPTLIVLEATGGYERAAVAALATAGLPVVVANPRQVRDFARATGQLAKTDALDAGILAHFADRVRPAVRPLPELATQELAALLGRRRQLIEMLGAERQRLSLAAASVRRSLTQHIAWLERQLGRVDDDLDALIQASPLWRAKDDLLQSVPGVGPVVSRTLLATLPELGHLSHKQIAALVGVAPLARDSGTLRGKRSVWGGRAPVRTALYMAALVAARWNPVLKVFYTRLRTAGKPAKVALTACARKLLTILNAMARSNTYWQAPVVRSA

SEQ ID NO: 253221 - protein, 386 aa, unidentified
MNVGADKPLTAIRTDLGAIFVSLELSRSSWLITSLSPGGGEKMSKHSVPGGDFAGLMERLAQLQEKARLRTGQSFRIIVVQEAGLDGFWIHRALQNEGIESHVVDAASIATSRRRRRAKTDKIDGETLVRALLAYKRGEPRVCAMVKAPTPGEEDRRHLCRERKALTAERVRHVNRIKGLLFSQGISGYQPLRRDRRQRLEELQTGDGRAFPQHLKALVNRELDRLELLLRQIKTVEAARDALLAVGQTAKPAPAAMLLDIRGIGPEFAAVLWSEGLFRHFENRRQIAAYAGLAPTPWQSGAVDREQGVSKAGNPRLRTTLIQLAWLWLRNQPRSALSVWFHERVSRHGGRLRKTTIVALARKLLIALWKYVTAGVVIEGVTMKVA

SEQ ID NO: 253222 - protein, 417 aa, unidentified
MSIDPKPVTVPTPVRVTAGVDWAKEDHVVCVVGDQGEVIDRFTVAHDAAGLKRMASRLLRSGVEQVGIERSDGPVVETLLAAGLIVFVIPPGQVKNLRSRYGSAGNKDDRFDAYVLADVVRTDARRLRPMVSDSSATIALRSSVRARKDLVIHRVATANQLRAHLQIVFPAAATLFAHIDSPITLTFLDRFATQESADWLSVKRLATWLKSVRYTGGVDPTVLHARLLAAPRGATGPDAATHAGTTGALTAVLRVLTAQIQVLATSIGEQLAAHPDAAIFTSLPRSGIVRAARLLAEIGDARGRFPTRDSLACLAGVAPSTRQSGKVKSVTFRWGADKQLRDALCDFAGDSRRASPWAADLYDKAIARGCDHPHAVRILARAWVHIIWRCWQDGVAYDPAAHGALQTLLNQDQPKAA

SEQ ID NO: 253223 - protein, 382 aa, unidentified
MPKVPHCLNVSLEEREVLRKAGLSCEADPENYLGGSSQIMYFIGLDIHKKTISYCVKDAAGRVHQEGKIGSSRLALDDWIRAMPQPRAIAMEATIFTGWIYDHLLPHAEMVKVAHPLMLRAIAAAKKKNDTIDARKIADCLRCDLLPECHMCSTEIRDRRRTLRYRHLVIRQMVQMKNRVAGLLLEGGVSYDRPRLHHQGYFTALLASNEEISDSIRPLLKLSREHILRAQRLDSALIASLEKDPLLSDRLRRLRTIPGVGPITALTWALEIGDYTRFRSVKEAISYCGLCSAEKSSADKMVRTPISKQRNKHIQQVLVEAAKLAHLRSHELALVRDKELQKGNKNRATLAVARKMVTYMLAVERRQQDFVSAENMVAKAVA

SEQ ID NO: 253224 - protein, 359 aa, unidentified
MQTQSNKLDFNGQNIYVGFDVHLKDWKVTIMSETLVHKTFSQPPDPRALYHYLVNHFPGGVYHSAYEAGFCGYWIHNQLLSLGVKSIVVNPADIPTTNKEKVQKEDKRDSRKIARSLKGGELTAIYVPSERTLEDRSFLRTRKMLTRDLTRYKNRIKSFLYFHGIEFPSVFKNPQSHWSKRFMVWLESIPMSQDSGKQSLLTLIEESTHLRESLLRVTKQVRKLSRTEVYQEQVKLLQSVPGIGLITAMTLLTELETMERFSNIDQLCSLVGLVPSSSSSGDTEKIGDITPRGHNILRSAIIESAWVAARIDPVLFKCYHDYCKRMEPNQAIIRIAKKLLSRIRYVLKNKQPYVCAVVK

SEQ ID NO: 253225 - protein, 325 aa, unidentified
MIGIDVSKATLAVCVRLADSGIELDHEFPNTATGHHKLHAWLKKHGEQTGWACMESTGPYHLNVAQFLHQHHYRVSVVNPKRIKAYGESRLSRGKTDKADARLIAEFGEKETLPVWQPPAPERVALKDLQDRLDELEESLRQHRQRREHCQNPSVLASLEREEAFIKQEIEALKREQGHLCDKTPCLREEIELLCTIPGVGELTATRLVARIDISLFDHAASFAAFFGVTPREHSSGTSVHKKARMSKLGSKRLRTALYFPAMQATRYNPQVQALYDRLVAKGHPKKSALGAAMRKLAQQIYGVWSSRRPYDATHGLPSLESFTA

SEQ ID NO: 253226 - protein, 409 aa, unidentified
MDVIVERPGALDVHKEQVTACVRASDEGGRRVAHVEQFKTTVRGLLVLRDWLKAHAVTQVTMEATGVYWKPVFHVLEDDFELVLVNARHVKQVPGRKTDVCDAAWLCQLAEAGLLRASFVPPKPIRALRLLTRYRKAQIGERQREANRLHKALEDTGIKLDCVASDILGVSGRAMLEALTCGTTDPSVLADLARGRLRAKIPALREALEGRFEPVHALLIGAILAHLDFLDEQIERLSEAIEVQLAPFGPAVELVCTIPGVAQRSAENILAEIGLDMSVFPSDAHLASWAGQCPGNDQSAGKRRSGRTRKGSKWLNDALKNAAMAAVRTNDSYLQALYQRLRPRVGHARAIGAVKHSIICACWHMLSTGEVYRDLGGDYFRRRDPERQTRRLIAQLERLGHTVTLQEVA

SEQ ID NO: 253227 - protein, 382 aa, unidentified
MQASTVDTPTAGHCGTIFVTIELSQKTWLVTLHSPDRDRISRHKLGGGDHAGLLGLLESIRARAALKLGAAPQIVSCYEAGYDGFWLHRLLTVAGITNLVFDPASIAVEQRSRRAKTDRIDGELMLRTLMAHLRGEPRVVRIVRVPSMEQEDARRASRERDRLIKEQTAHTNRIKALLRLQGMAVGYPRRGNWLHWLAQQRDWQGLPLSPHLLAEVTREHARLMLVREQLAALEQAQAAQASPVPAAMAERRDLLQRLKALGPAFAATLTNEVFYKDFRNRRQVGAYCGLTPSPWRSGGIDREQGISKAGNPRARLKAIELAWLWLRHQPESELSRWFRTRTANAGKRAKRIAIVALARKLIVALWRYLTTGLVPAEATIKA

SEQ ID NO: 253228 - protein, 367 aa, unidentified
MDASAVNPLGYDLFIGLDVDKKSYSLTVEDRYNLEKSYKMPANPESFYKFIQNKYFSKKILYVYEAGCTGYRLHDYLTEQREQCFVISPNSIPRASNDKVKTNRIDSKKLCELLKGGLLKPIRVPQEEYRELRHLVNIRKNYARKQKMAKQQIEGLLLFENICLPMGERKRWSAYHIQLLKKIACSPATRIRLDALLMDLSYARSQMLSIHCEIRRFCSQQPAIQKNIEYLRSIPGIGFVIATYVLSRIGDPRFLKNVREIAAFAGIVPKERSTGDTVRKGNITHMGDETFRYLLVEASWIAIRKDLELKQFYHRIKSRHPVKGGSQIAIVGVARKLTHRIYSVLKEQRMYMNHSCKTLKGKPEPRS

SEQ ID NO: 253229 - protein, 465 aa, unidentified
MTQKNTSSKFRLLLTWAVGKNPKLKEVYTMNVKSTKAKNQVTTVNIFEQQELIAKVEAIKSNLKASTWHELETKGKFTKNDKLSFISDDMLILGCDIGSDTHYIRAIDTRGRELSKSAFKFSNSFEGFQSAKEWAVQLAVTHQKEQIVLGLEPTGHYWFCLATWMISNGISVVQVNPYAVKQTKEIEDNSQLKDDTKDPKLIANLVKDGNYGMPYLPEKLYADLRRLSMFRDQLCEDRIRCLNRLHREMKIYFPEYKDALGKVDGAFCLELVKKAPFPEALIALGNEGIRQIWHEAKLRGRGYSRADEILKYARESIGVKDGADASSLAVKWFAERIIEIDVQLAKIENQLIQKCMEIPHAENILEIEGIGDRVLSGILSEIGDISRFDDVKEIQKLSGMGLVACSSGKHKGQTKISHRGRKRLRYWLFQAAKSAVVHSKEFKELHIYYTTRADNPLKKMQSLIN

SEQ ID NO: 253230 - protein, 355 aa, unidentified
MKRAYFIGWDVHCAFTEMAIVTQDGRLVKRLRCPTTIPDLAEALEAVPRPRHVAIEEGPLADWLWRNLAARVDGFLVSDPRRNRLIAQDADKDDPIDAEKLAQLLRGGYLKAVHHPQSLDRAVFKHLVLVYHDRVRQRVREANRVMGYLRRYGVFVREKAFKEKADRQALLERLPPNRLVPTNLQVLWQGYDVAVAQERQLRRRLVREARRQEPIRRFVALPGIAWVRAATLFVYLDTPWRFATKERLWRYLGIGLERRHSGAGPARVRLAHQANRVLKGVIVGAAKRAIASGTNPFAEQHRRWLRAGLAPANARRNVARSLAATLWGMWKHGSAYHPEWVGVPATAVEAAGVLS

SEQ ID NO: 253231 - protein, 394 aa, unidentified
MKLVGIDVGKNSHHFCVMDKETGEFNVAPSSFSNNKEGFDFLINSLKPYSKKSILIGMEDTGHYHVALLKFLLSNGYTVALINPKTTDLTRKMEGGITKNDKLDTITICDVLDTPERKKQYRITKVDRFDLYEQRQLTRHHHNLKEELNLYCNRLQKSIDLVFPEFNTLFSSKYSIVYMNLLKTFGSAEAIASTDIRTIRKCFEVKGRGGRISLTPEKLKECAKNSIGISSEVETIQIKHLVNQITLIKEQIAEIDKKIEEFSIKNNSPILSIPGISHFSGTSILAELGDIGNYSKPSQIIKFAGVAPYHYESSQYNAQHTGITKKGSKYLRKTLYQIILPVINNNPVFKKYYRLKISQGKGHRCAQGHCIRKLLRIIYHLLETGQSFDPALLR

SEQ ID NO: 253232 - protein, 344 aa, unidentified
MSNLDTCGIEVSAKELVVMLRRQEDLEPLRNFTNTPEGHTMVLRYLRRAGRVVRVCMESTGLYGLDLALALSGQEGVEVMVANPRAVRHFAQAMMKRSKNDQIDAGVLEQFALHMPFKPWQRPSPTALALHALARRLRELVEMQTAEKNRQHAAGLSQAIPAVVKRDLARSLRAQERAIERLTRQARKLIAQDPPLTERFELLDSVPGIGETSAVQLLGELSVLAPDLEARQWVAYARLDPRQYTSGTSVHKKPRISKAGNKHLRHALFMPALVAVQHDPHLRAFYQHLLAHGKFKMQALVAVMRKLLHALHAMFQTHQPYDGSKLFRLNSTPAQEVTRALVAS

SEQ ID NO: 253233 - protein, 318 aa, unidentified
MKKAFFCGVDVSKDKIDVCFLTSITSEKAKFETLPNNYELIKVYFNSFKNDEILVVFEATSNYHLALQKALSDLSIRYCVTNPYKSSLFLKHLSTIKTDTSDSYGLAVYARTFKSEIAPDKYNAEYLEIKSYNSTLNLLQKINTQLKNFKSSQKTLNNKVIDDVIANLIKEIAKLQAMLQKLAFDLVKKTIPETEEIIKENKGFGIDLALNLFPQLHFNRDKSEKQFISFIGLSPRIFQSGSSVHKSQKINKMGNSNIRRILFMTALCAIRFNAKFKLRYERLLANGKKKMTAIVAVMCAIVRYLKSLFPFNPEIKAI

SEQ ID NO: 253234 - protein, 319 aa, unidentified
MTTNSVVVGVDVAKDRLDVAVRPSGEVWSEANDEAGITALVTRLRPLRPALIVCEATGGFERAAIAALAAAGFPVVVANPRQVRDFARATGQLAKTDRLDAGILALVAERVRPTARPLPDAAAQLLDAVLTRRRQLLEMLVAEKNRLGFAPKPVHRGIQAHVRWLERQLDDVTKELAALIEASPVWRAKDDLLQSVPGVGPIVSYTLLGELPELGTLSHKQIAALVGVAPLARDSGTLRGKRLVWGGRASVRTALFMAALCGRRWNPALQRFYERLKAAGKPTKVALIACARKLLTILNAMVRDDKRWAVPAPSVQYSC

SEQ ID NO: 253235 - protein, 412 aa, unidentified
MEGETVIAGVDTHKDVHVLCLLDGLGRKIWSGSFGADPEGYDRLAEAIGDPGSCMVVGVEGTASYGAGLTRRLVELGYNVVEVLRPKRDKARPGEGKSDPLDAERAARKAASGRGCSVPKSQDGWVEAVRQLYVARRLAVATSTSCVACAKSMLTTAPGALRERFRGRERPKDLMPLLARGRKAGDALEESVLASLRSVAAVWKEARSQVESLDERIRALLEANAPALLGIEGCGTTTAAALVVAAGDNPGRLKGEAAFSMLCGVSPIPASSGKTERHRLNRGGNRQANWALYEIAIKRMAYDERTRRYVAKRTSEGKSRREAIRCLKRYIAREVYRVLMDPNPDGAAPEGPELAKMRKAMRVTQKQAAAGLGMSAASLGHLEHGRRRSTKLERRYYELLCELKGALPQTAY

SEQ ID NO: 253236 - protein, 468 aa, unidentified
MKLRNAIGIDPDSSGCQRAFVKLDGSQVQQREYLATEDGMQGFIRWVKRQDDAIVAIEGSNGLSAPIEKALRESEIVFYSFKPSDVDKFRKAVLGQNKNNKKDAESTARYAMALESQGKLDRCKRVWKADEELQGLTRSYAQKRKEATREVNRLWKLLRVASVDLYLALGGRHPEIEISENVVQNEGILALLAAKPDINEWKTLSEADFMAAMGNRNYKGRKQLLEEMQKVSKSFRPLSPAASLMIKNTAEQIMFLRQQLTEIKKMLECMTKDNKAVKTLAQHRGIGILTAATLMAEIVDIRRFVRNDNLASYSGIVNREYKTGKNDKEIPSRYFNHRLKNAFMSAAGNYVQFNPDMHLAGYYKNLVKSGMKKTEARKRVARALVRVFFRELSTVAKLDESDAVEEIERGKESDMANGSSRSDKDHSNISFQSLTENNTEGEEKIKKAKQEENADAEIRPAPEKIPIS

SEQ ID NO: 253237 - protein, 336 aa, unidentified
MAVIDHAGRVVRQLELPNQDSGYAWLLALLSSHNVVRVGIEGSGNFGWPAAIYLLERKLNVVEVPPLMTSRERLSRPGQGKTDPVDAVAIARITAREDALPPVRPMTGEAADLRVLTESRDQLVNERTATANRVHTDLLWLRPGYQHQLPHLTNMAHLRAALELLSGDDSVRAAVTRSRLDRMLTLTEQLAELRIQIDALVKASGSTLPEVYGVGPVVAATIIGHVVDVRRYPTRHHFATANGTAPIPASSGRTVRHRLNRGGNRQLNRALYTIAITQIRADTEGRAYYQRKRAEGKTSPEALRCLKRRLSDLIYRTLRADLANAAQRTSALSIAA

SEQ ID NO: 253238 - protein, 364 aa, unidentified
MNKCHLNTELSSLEGTRSEFNRSTAAIKLGIDVHQDFYVVVKQEGGTNPKPAQRFQKEAFLHWVAKLTKEGAEIHAVYEACGFGFELQRQLTALGIHCYVVCPQKLDERNKRVKTDGVDAKALCLKLDRFVEGNRDALALVRVPTQAEEQKRAIHRQREQLVKARKRLEAQGRSLIVNHGIEPVNKWWKRRTFAALQVPAWMKELLSNTQPILLALEEKIRALTAQLQEAAISRQPRGLGRLSSVVIDREIGNWDRFKNRRRVSSYTGLCPGEYSSGNTRVQTCVTKHGNPRLRAALVETAWRLVRFQPEYRAVKKWRHLLAKGALATGAARKKAIVAVARQLAVDLWRIRTGRVAIETLGLIN

SEQ ID NO: 253239 - protein, 439 aa, unidentified
MRLPTGVIGVALNWHAVSSGTARGEAQKGFVLLKVAVPSLLNITAMEERTPVGVIIGMDPHKRSATIEVVDDQRGNVLSSGRFGTDKVGYQQMLAAGREYPDRVWAVEGCNGIGKHIAHRLVHDGETVIDVPSKLSAQVRVFATGNGRKTDPVDAHSVAMAALHNPSLLRVEVDDDLVVMGMRADRRDELGRARTQTLNRLHRILLELFPGGAKQFLSATQARALVATIKPRDLPGKTRRRLAVELIGELEAIDRKIKTLKKELTALVQDRGSTLLELNGIGPSAAARLLADVGDIHRFSDRNKFASWNGTAPLDASSGDQSRHRLSRAGNRRINRALHIMAVVQLRHPTEGRAYYDRRKAGGLPSMMAQRALKRRLSNVVYSRMLEDQKRREAADPGGQSGNGSDSSAIDSHPGIDSSEKPHPEPATRQPRTDLAAVS

SEQ ID NO: 253240 - protein, 344 aa, unidentified
MNKNWFIGIDVSKKTLDASIFVAGEVINKFPHVQVRNDKQGFKDLFRWAKEQGMKTKDTLFGLEFTGYYSDALEQFLTKKQISYTMLPTTVVKHYQRGPHDKNDKIDSAKIADYLFRFNGTECIKLRVLPSKALQQLKDLKSERKFLVQQRVACENRQKVAKSKSEEKHLQKLIDLYKAEIEQVELQIADVIVQDEEIYTTYRLLNSIPGIGFVNAVNTIANTQNFTAFETARQYAKYVGVAPSEHSSGTSVQWRRRPSPHADLQAKADLSMAALHAIELSAEIRQLYERKLGNKPKDKDIQKKALNAVKFKLVREMFSVAKQARIFELRGLDKAQAETHNTEE

SEQ ID NO: 253241 - protein, 332 aa, unidentified
MNKRSIREMNVIGIDISKAKLDCAWLRENNKVKSKVFSNQIEGWKALISWAKENTQEDTAQLHFVMEATGVYHENFASWLYEQGASVSIINPAYVKHYAQGIGVRTKNDKKDSVVLARYGVKESPLLWQPAPLEIRVLKALLVRLDAVEKDLLRENNRLEKSAFTETPTAVLESIELTIAFLKKERKNLEKLIEEHLNKHDKLKADNALLKTIPGVGPVIAQRMIMIVGGHQFNSASQCAAYLGLIPVEKESGSSIKGRSRLAKNGNPTLRAKLYMAAISAKQYNPDIKAQYERLTEKGKSKKSALGAAMRKLVQICFGVLKHQQPYQPQIG

SEQ ID NO: 253242 - protein, 353 aa, unidentified
MIYRGCLHVPGIIVGVDTHKDEHVAVVVDKLGVRIGQHNLPTTNMGYVGLEHWASSLGEIDAFGVEGTGSYGAGLARFLRSQGHKVIEVNRPDRSARRRLGKSDPTDAEMAARAVLAGVARDRPKSGVDKVEMIRMFKSTKDSAMKGRTQAINQMKALIVTAPVELRAVLRGFTTSQLVTRCARWRYGQLGTPTAAAKYALRSLAWRHIQLTQEIVALDAQLVRLTAAFAPALTESFGIGSDTAAALLVTAGSNPERLKSEAAFAALCGVSPVPASSGKTNRHRLNRGGDRQANAALYRVVIVRLRYHDQTRTYFQRRMEEGKTKTEVIRCLKRYVAREVFSILHDIGKRRTA

SEQ ID NO: 253243 - protein, 451 aa, unidentified
MSKRQTVKPAPVAAPAPEFAARIGLDWADQKHFWTMLGGDGKKTRGQLDNTPEAIQVWAAELAQRFGGRPVALALEQSRGAVIAVLSKYAHLALFPVHPTSLANYRKSFSPSGAKCDSVDGDLILDYLVKHPEQLRCLRPDTVETRSLQFLTEERRKLVDAHTAVLQSLIHWLKQVFPQMVRWFDDPATPLVADLLLRWPTLQELQKVQPKILRKFFHAHNCRSEERTQERLDQIRQAVPATHDPALLQTGTLSIQNACRILTSMRQGIAEFDQQIAATYQAHPDHFITESLPGAGPALEPRLIAAVGSQRDRFASAYNMVCCFGVAPVTESSGNSLWIHWRWACSKFVRQTFHEWAACSIRTCDWARAYYDRQRAKGNGHHAAVRSLAFKWIRIFFRCWRDRVAYSDQRYEQALRTRAAKSKLPQTDTGVAPTVGWKSCGGFSKLVKVSS

SEQ ID NO: 253244 - protein, 311 aa, unidentified
MGGVNAAIEVGKHKLDVALGSSGELFSEPNQARAVTRLAKRLAGLGCERVLIEGGSYQNVLVGALRAAKLPVVIINPRRVREFAKSIGQLAKTDHIDARMLALYGERIQPPVRELPDEQTQELRGLWVRREQLIEMLVMEENRLEHAPKALHRSLRAHIDYLRKQIKQADNDLDREVRNSALWDKYELLSSVPGVGRVLSVALLSDLPELGRLNRSEIAALAGVAPFNCDSGTLRGQRKIQGGRKRLRRVLYSATVASVRCNPALRPFYQRLRASGKPAKVALVAAMHKLLHILNAILKTKTAWRPSCPDA

SEQ ID NO: 253245 - protein, 350 aa, unidentified
MKIIGCDFHSRFQQIAMLDTETGEFVERRLEHESGEAKTFYAALDSPARVGIEATGPVQWFERMLSKMGHELWVGDAAEIRARAVRKQKTDTRDAQHILQLLLSNRFPRIWVPSPVERDVRQLLRHRFKLVCMRTSVKNQLHALAMGQGICRRRKLWSAVGRQELEGLVLGPWASRRRKELLDILDRLNPSIEELDGAVKQEAQSRAEAVRLMQQPGVGPVTALAFVLTLGPVERFRKSKQVVSYLGLNPVERSSGGRQRLGAISKQGNTMMRFLLNEAAQSASQYDSGLRRHYQRLKFRRGSGVAKIAIARKLAVRLYWMLREAAQRVPPTRMQGSPACPVVDASPSFR

SEQ ID NO: 253246 - protein, 376 aa, unidentified
MKECTFIGLDVHKATISVAIAGGERGGEVRHWGTIPHRPDHVRKLVEKLTEGGGRLHFCYEAGPCGYGLHRQLVEMGHDCIVVAPSLIPVKAGDRVKTDRRDAVMLAKLHRADELTAVWVPDAAHEAMRDLVRARATAMGVLGKARQHLQGFLLRHGRVYPGKKGWTVAYRRWLTTVRFQHPAQQIVFQDYVDAVADTEDRVERLTGQIAELLASWNLAPVVEAVQAMRGVAFIVAVTVVAEVGDFHRFDNPRQLMAYLGLTPSEHSSGNTVRRGGITKAGSALARRALIEGAWSYRMQARVSRKLHDRIEGLPKAVRDIAWKGQLRMCQRYRHLLASGKAKVVVTTAIAREMVGFIWAIARAMMPLPNSQDLAQV

SEQ ID NO: 253247 - protein, 345 aa, unidentified
MEYYAGIDVSLESASLCVVDATGRIVREAKVDSEPEVLIGWFRDLGLAVTRIGLEAGPLSQWLYAGMRDVGLAVELLETRHVRNAFKAMPVKTDRKDARGIAQLMRLGWFRPVHCKSLPAQEVRALLTARKLLQTKNHDVEMSLRGVLRGFGLKVGPTTPRNFPCRIRELVAGHTTLSTVAEALLAARTTLFEQWQKLEKRLRSLAREDSSARLLMTAPGVGTIVALTFASAIDDPGRFRSSKAVGAHFGLTPKKYQSGETDVTGRISKIGDGSVRTALYEAANVILTRPVKGSTLKSWGMRLAARAGMRKAKVALARKLAVVLHRMLADGTSFLADKAAVAAAR

SEQ ID NO: 253248 - protein, 506 aa, unidentified
MTTPTTGTTRRKPAPSPASGPQAQARAHRQAYHRRKTRAKGKGEALRQQEAAQVQAMPVQHSHAAGIDIGSRSHWVCVGFTTAAGSSLIREFPAHTDGLKAIAAFLHEHQVSTVALESTGIYWIALYELLESEGFEVLLVDPSYTHQLRGRPKTDRRDCQWIYRLHSVGLLAPAFRPDEKTCQLRAYLRQRATLIRYASQHVQHMQKALEQMNLKLTEILSDITGATGRAIIRAILRGTRAPEKLARYRDKGCKASATEIAQALTGTYREEHLFELKLAYEAWQFSLKQVEKVDGQIALQLGRMKCDRALPPLTPKRHQSRKINAPRFDVRTALYYVVGLDLTEIEGISELTALTIISEIGPEVSKFPTVKKFCSWLGLCPNWKKTGGRVKSSRTRPGVNRAATAFRLAAHGLHRSQGALGAFLRRMKSRLGTPAALTATAHKLARIVYLALKHGLPYVRKSQEEYEAQMKEKQIKALKRKARQLGLELIEKPSAGSETAESPVQG

SEQ ID NO: 253249 - protein, 457 aa, unidentified
MAKKTKSKAKGSYRMLPVMHPDAAGVDIGAEEIFVAVPADRDVESVRSFDTFTRDLHQLADWLQSCRVRTVAMESTGVYWIPLYQILETRGFQVFLVNAQHIKNVPGRKSDVSDCQWIQYLHSVGLLKASFRPPDEICVIRSLWRHRESLVQMAAEHTMHMQKALSQMNLQLHHVLSEITGVSGLAILDAILAGERDPAKLASLCNWRVRSSRETVAKSLEGDYRPEHLFALRQSLVGYRFYQKLLFEVDQELERSMRDLPRAVGAPVQMPPRTKTCIYQRAGNEPAFDLKAELFRIAGVDLTDVPGISTITAHTILMEVGPDMSRFRNASAFASWLGLCPEKQVSGGKVLSTRSRKVKNRAAIALRLGAHCLYRAKNYLGEFHRKMKWRLGAPAAVTATAHKLARIVYHMLSTKDPYSESVLVQCDRQASTRAEIRLRRQAANLGFQLTPVSELDS

SEQ ID NO: 253250 - protein, 344 aa, unidentified
MKHYVGLDVSLKETAICVVDENGVVIREGKALSEPEAIVAWLNESGLPIVKIGIEIGGLARWLYSELRAAGLHAVCIDPRRLRGVTKTMPIKTDRNDARAIAQVMRVGWYTVVHIKGDVSQELRMLLNNRKTLLIKQIDIENEIRGVLRVFGLKLSGRISQATFEQQTNELTDGHPRLAAMLRPTLLARAALREQYGVLHKMVLEIVRRESTCQRLMTIPGVGALTAITFLTTIDDPDRFQRSRDVGAHLGLTPRKYASGETDRNGAISRCGDVMLSTILYQAALALLTRTKRWSALKAWGVRVAKRRGLRRAVVAVARKLAIVMHRIWADGSEFRWTREEATA

SEQ ID NO: 253251 - protein, 368 aa, unidentified
MFTETTSLGLDVHARSIVAAAIDGVTGEMIERRFPNDPLSICEFAAELSKVHGPLRVIYEAGPTGFELARTLQDAGFHVLVAAPSKLLRPAGDRVKTDRRDAQLLARLDRAGDIVEVRIPTRSEESARDLVRARDDARRDLMASRHRLGKLLLRHGYAFPGKTTWGPTHDAWMREIRRDALPAHGAGSVAAFDDGYDAVQHALARRDRLGTAILEFAEDSEFTEITHRLACLRGISTLTGFALAVEIGDWDRFTGSTIAAYLGLVPSEYSSGQSRAQGGITRTGNSHARRLLIESAWQHKPGYLPGPTIRKRWQQVPAKIAERADLGNRRLHHRWDVLTKHHKRHTVANTAIARELAGWCWSLATMEA

SEQ ID NO: 253252 - protein, 410 aa, unidentified
MKPRENDDRDQAYAAWVGFDWGDQEHVWALQWTDTGERERGRLEQTPEALDLWIGQLMSRLNGRRIGVAIEQKHGAVVWMLLKYECVEIYPVHPQAAGQFRQALYPSGSKSDPADGELLLDLLVHHRDRLRPLQQDDEPTRRLLLLVEQRRHWVEEKKAHGNRLSARLKVYFPQVLTWFDDIGAAPVLDLLARWPRLEQLQKAKRKTLEVFLLKHRRTAEEAAAWAEEVSAAVPAVQDSVLLDCYVLEVTALVALLKQMQSSVKEFDSAIAETSHRHPCWVMAPRLLAAMGSGKRYQTAHEMQCASGIAPVTVASGRTRIIQFRRACPKFLRQTFHEWAQHSMKSCRWARVYYDQLRASGKRHHVALRALAFKWQRILFRCWNDGVTYDEAKYIASLKKRSSPLGMWLPE

SEQ ID NO: 253253 - protein, 348 aa, unidentified
MMVVLGVDAHKRTHTVVAADEAGVSLGEVTVAATTAGHLRALRWAARWDERRWALEDCRHLSRRLEAELLGAGELVVRVPPKMMAGVRRSARTRGKSDPIDALAVARAAMREPGLPVARLEGPAREIRLLVDYREGLVRERTGLQNRLRWRLHELDPELDPAPGSLDRYVVLDGLIEALDAYGGVVAELACREITRIRDLTAEINQLERHIAARVGEVAPSLLEVPGCGALTAAKLVGEAADITRFHSRDAYAMWAGVAPIPVWSSNTERFRLNRGGNRQTNAALHRIAITQMRIHPGARKLITKHLSAGKTKTEALRILKRRLADVVYRTMIKDTQQLSQAAPARAA

SEQ ID NO: 253254 - protein, 382 aa, unidentified
MSAERANDCYVALELSQRTWLIGYLLPGSDKVQTTAVAGGNAEALLSALGRIESLAGTRSHSGCAVGSMRVCFEAGYDGFWLARFLIDRDIDTTILDPSSFLVSRRGRRVKTDRVDVEAMVFTLKAYLLGDRSVCRPVRLPSVAEEDAKRLSRERTQLKKERTRHVNRIRALLVLHGIRSVPGLWGGRWKEALSNIRTGDGRELGLFIFRELCRQFERLDLVHSQLKGLEKERIQACETEGAINCSAKIRVLKQLDGIGEVGATQLVAEVFHRTFKNRKHLASYLGLSPSPYSSGEVHRDQGISKAGNKKARVMLVELAWCWLKYQPQSQLTRWYRSRFSGHGSRSGKVGIVALARKLAIAFWRFIEDGVVPEGATLAVAAK

SEQ ID NO: 253255 - protein, 339 aa, unidentified
MSEQIRFDRNLATYVGIDVHPASHTAFAMNRFEEGRGSLRFENTHNGIQHFLSWLSCVDGERSNIIVGVEGRGGNGHALVGQLLDTYDNVYEVNPLYTKHRRSFGTKQEKTDERDAKLIAEVLTRKLDELPAITKQEYLPRQVVLKKSVEFYDEATLTGARFKNQLHRLQRELTLATNKQEKHILTVAMKEKQADILRFAKRQKAFVTQFALLLEGNGRNLTTFPGISTIAAARIVAHVNGVSRFHSLDGFIRYTGIAPVERSSGKTTKYKQNYGGNRQLNSVLYIVALSHLRWDPKGKAYFEKKVQEGKTKKHAIRCLMSRIACIVYAMLKSGEAYRG

SEQ ID NO: 253256 - protein, 438 aa, unidentified
MINPRREKFEKIKQSIKEAQNYLLIGIDISKDKHDACVMISSGRMLNRRLQFENSKAGYEMFIEKIKEYQQAIKPDETIIGLETTGNYMIALADYLSLKGYFVVQVSSFITKRNRDTLDLSWNKNDIKDAWNVVDCMKQGKMIYYDDDNPPYGDIRRLMTLYSRLSKERGLYRVRLQNNILCMTFPEFTKAYPVVSELVPLTILERYPLPQDIVKVQEKEFIDDIKKHADPTLKRSKIIELYRLAQESIGSTLDQESLRWETQFIVREIQRIRREQKLLLEKVQFLCKQCPQYDLLQTIPGIGPVIGAGMVAEIGDIQNYRSSRQILKLAGLDLSRIESGKFQGETHVSKRGRPLLRSLAFQAGLVAVRNDTRLRLKYLDLIERNKVKRGSKRKFIIAVSCKILRIVYAVMKSMKPYDSDFDQTKEQPNRLGSVIMAV

SEQ ID NO: 253257 - protein, 447 aa, unidentified
MPQLWAGIDAGKTEHHCIVLNADGAKLLSRRFANREGEILALMGDVASLPGGTDVAWATDLNHGGTGLLQSLLGSHKQPLHYIPGRAIHHASLTYAGEAKTDARDAVVIADQARIRHDVNLMREPDEVTVELRLLSARREDLVHDRTRAVNRLRALMAHYFPSLEAAFNYATTRGPLVLLTKYQTPAAIRRIGERRLATWLKGQECRKSAVIAAAAVQAAHEQTAVVVGEAAAARLVSRFARDLLRIRDELAELEAEIDTALKGNSSAVPLMTVPGFGMRLAADFLAATGTDLMAFETPDRLASFAGLAPVPRDSGKISGNRHRPRRYDRRLLNACFQAAFIASRTCPASRTFYERKRREGKSHKQALIALARRRINVIWAILRDQTMYNPPKDGTELTALTRSSAVPVSPLRRKDALEEAVILPAARDSEVVRSQSELGETAAFQN

SEQ ID NO: 253258 - protein, 480 aa, unidentified
MNVKTNKTKKQANVENQAVNLLSKEELCKRIEGVEKELKSYTWRELKTNGKFAKNDKLSFITDDMLIVGCDIGSETHYIRAIDIRGRELSRKAFEFGNTAEGFEAAKAWMLELAVQNRKSQIVLGLEPTGHYWFTLAAWLFTAGISVVQVNPYAVKQSKEIEDNSQLKDDRKDPKLIANLVKDGNYGMPYLPEETYADMRKLSMFRDQLTEDRIRNINRLHRELKIYFLEYMDAFGKIDGTFALEVLKVSCIPSEITELGTEGLRNIWHEAKLRGRGYSRASEIVEYAEKSVGLKDGSSVGRETVKWFAKEIMKLDEQLAWIENTLHKKCMEIPYAENILEIKGVGENILAGIVAEMGDISRFDDVKEIQKLSGMSLVACSSGKHKGQTKISHRGRKRLRYWLFQAARSAVSHAEEFKELHVYYTTRADNPLKKMQSLIVIACKILRVIYTILKTGKDYDPQKMLKDIKRPKAALAAKAA

SEQ ID NO: 253259 - protein, 370 aa, unidentified
MKKNSTRTQSPKRAAARNTGPITIGLDLGDKTSRYSVVGDHGELVSEGSVATTRKAMAQRFGGLKRCRIAMEVGTHSPWLSRMLTGLGFEVIVANARQVQLISASSRKNDRMDAHLLARLARVDPELLRPIRHRSERAQANLMTIRVRAELVEARTRLVNAARGFTKALGERLPACDTDSLGMEKLEALPPALREGLQPLLEQIEALTAQIKKLEGKLEQIARIEYPETQLLTQVHGVGTLIALTFVLTVEDRERFQKSRDVGCYLGLRPKQSESGQSQPQLRITKEGDRYLRTLLVQGAHLIVNRRGPDTDLKRWGRKLAERGGKNAKKRAIVAVARKLAVLLHRLWVCGEVYEPLRNSRPAATSNKAA

SEQ ID NO: 253260 - protein, 319 aa, unidentified
MSQTLNAAIAVIGIDIGKNSFHVVGHDERGAIVLRQKWSRGQVEVRFANMPPCLIGMEACVGAHHLSRKLNGLGHDARLMPAKYVRPYSKGQKNDFRDAEAIAEAVQRPTMKFVATKTADQLDLQALHRVRERLVSQRTGIMLSPRMVRVIEGLAGDWRRLDERIEGLSSEIETVARQDAGCERLMSVPGIGPIISSAMVAAIGTGDAFTKGRDFAAWLGLVPKQMSTGDRTILGRISKRGNRYLRVLFVQAAWVVLIKPKIWERYGLKPWIEAAKKRLHHNVLAIALANKLARIAWSVLARGRAFEACKLDEVAIQPA

SEQ ID NO: 253261 - protein, 353 aa, unidentified
MRTYYVGMDVHRASIVIVVLNGAGKVVMQSVIETGAERVRSFLKQLRGKVYVTFEEGTQANWLHEIVRPLVTEVVVCDPRHNKLLTSGNKSDRVDAQKLAELLRNGALKAVYHGDNGMRALKELVRSYDCLVSDTTRVMNRLKAIYRGRAIGCAGHDIYRQDRREQWLEKLRERGAKQRASCLYQQLAALKPLRHEAKRIMVKEARRQPAYPWLMSVPQFGSVSVAQLLAIVSTPHRFRSKRQFWTYIGLAVVTRTTADHEVVNGVLRRSQRPVSTRGLNRNHNHLLKRVFKNAANGACHGGPFKAAYELRVRQGMAPSLARLTVARQLAAITLAVWKRGEQFDSERMKQQAA

SEQ ID NO: 253262 - protein, 314 aa, unidentified
MADPCSVGIDVSKGTLDVAWSTNPTARWQTTNDDVGWTALVAHVRALQPTIIVLEATGGYEIGAASALSTADLPVAIVNPRQVRDFAKAFGLLEKTDAIDAAVLAAFGARIRPTPRPLPDDLQADLQALVTRRRQLVDMLTAERNRGPLARGAVRRNVLAHIAWLEKQLAKTDRDLRTQIEASPIWRARDHLLQSVPGIGPATSARLLASLPELGTLSHRQISKLVGLAPMPDDSGRRRGYRRIQGGRGDVRSALYMATVTAITHNPTIRAAYRRWRAAGKLPKVALVAAMHKLLIHLNAMLRYQTPWHPPATA

SEQ ID NO: 253263 - protein, 362 aa, unidentified
MEYFCGLDVAIEETAVCVVDDCGEVHLTVKVATEPEALLAVLKPFVARLRRVGHEAGSLSPWLHPELLKLGLPAICLETQHVRAAMSAQRNKTDDKDALGIAHIMRTGWFRQAHVKTESCYRMRLLLTHRRNLKRKFLDLENAIRHSLKSFGIKLGGTSRGKFDQAVRDAVADDPLSSELMDAMLSARAVLWKEYCRLHDLVVKIVARTELCRRFLAIPGVGPVTALSFMTAIDDPTRFRRSRDVAAYFGLTSRRWQSGTSIDVQGRISKAGDADVRRALYEAASGLMTRFKGKDKVKTWGQQIAKRSCHRKAVVAVARKLAVIMHAMWSDGTFYVGDATANEADAVRRAQVKDRKLLGAHR

SEQ ID NO: 253264 - protein, 358 aa, unidentified
MKERLSCILTKEKVFVGLDDSKKTWSLCVRSGGVVVHETSMPAKYEVLRNYFHKKFPECQIIVMYEAGFRGFGLHDQLVADGWDCVVTPPHTVTEEKSQRTKNDRTDCRRLAKNLENGDYHNCFVPDKGLREDRQISRTYGQVQADIVRVYNRIRRMLEFHGLDEGLPAGRWRGKSAYSCLRQHLGELEISDSLRFSFEVMFRELENLQELKEELLGQLKKLARSNRYRENVKLLMSAPGIGILTAIRLALEWGDVSRFARKEEFASFLGLIPSDHSSGDQQRRGHITKQGNQLVRRCLIESAWLAIKYDPVLLEKFRRVLGHCGSKKKAIVAVARKLALRVRRVLLSGEPYAVGVVQ

SEQ ID NO: 253265 - protein, 419 aa, unidentified
MKQDNNSQEKKSEPTTKRVKSRGPVRRDTKEVLAELVEKLKEKLDPKTAAATSAGEKHLRGELGPNLDRLTVGVDLGDQWSNYCILGLEGETLAEGQLRTTQEDIAEFFQALNAARVVFEVGTHSPWVQDVICGCGHEVLVANPRLMEGSKRRKRKNDRIDANKLARLGRVDPKSLHPIQHRSREVRQDLVVLRARDALVAARTELINATRGLVKSMGKRLPKSSSPSFAQKAEEAVPVEIREALLPLVRMAAALSDCIQGYDEKIEKLGREKYGHTALLRQVKGVGPITALAYVLTLENPKRFVKSRDVGPYLGLVPKQEDSGESQPQLGISKTGDTMLRKLLVGSAHYILGPFGPDTDLRRYGLRLCERGGKNAKKRAAVAVARKLAVLLHCLWVSGEVYEPLRQGMSATIAPAVAA

SEQ ID NO: 253266 - protein, 388 aa, unidentified
MRTSITHVSMDTHKKEHIVAVAYADTGELEVFTVRNTAKDIRKMVKKIQRQAGGEVHFCYEAGVCGFVLKRQIEALGSRCQVIAPSLIPTKPGDHIKTDRRDARKLLGQFLAGELTEVAAPSPAQEAAREITRCREAVKENLKRVRHQLLKFLTRHGYIYRDGRHWTQKHDRWLRSLQFDLTDLREVFDWYYTELQHCLQRLATLDKEVAALADRQDYREAVGALRCFRGIDTLTAVTVLTEIFEFGRFPSPEKLMAYLGLVPSQSSSGQRRRTGGITKAGNRRVRRLLVESAWHYRHRPFVSKELKCRRQDQPQWAVDLADRAMSRLHKRYWRLRDRGKAPGVVVVALARELAGFLWAVLHEQQGRAARSGAPGLQVTENHGRRVPL

SEQ ID NO: 253267 - protein, 334 aa, unidentified
MALELLAIDLGKRTFHIYGIDTDGVILSRKVSRAKLAEVVGDLEPTAIAMEACASAHYWARCWLAAGREVRLINPRFVKPFVKGSKNDAVDAEAIFEAATRPTMRFVPVKSTDQQDLQSLHRARDRLICQRTALINHTRGLLAEYGVVLPQGPWRFMAQAPTAIAGADLSDLARAIFGELMDQLDDLDRRIKRLDAMIVTLCRTNETCRRLAKLPGVGPIIATAIVGSVNDGRQFRSGREMAAWIGLVPRQYTTGGKPRLGGIGRRANHYLRRQLIHGARAIVSRSAKHDDRQSTWLKALVARRGFNRTIVALANKTARIAWVLLSRKQEYAAP

SEQ ID NO: 253268 - protein, 426 aa, unidentified
MEEPTRFIGMDVHKDTIVVAVTAAGEVGKAVLYGTFPNTAATVEKLVRRLRQAGSGPLKFCYEAGPCGYGIHRALTKMNEDCMVVAPSMIPRKSGDRQKTDKRDAASLAVLHRGGLLTAVWVPDAAHEAMRDLIRARLAAVRAVRAARQQLSAFLLRHERIYPAGRTAWTKAHRGWLADQSFAQPAQQIVLEESIEAVRLGEQRRDRVDGYLREQIPTWSLFPLVQNLSALRGLDTIASAGLAAAIGDPSRFASAPDLMAYLGLVPSEHSTGPKRRIGAITKAGDVHARCLLIEAAHSYRFPARVARHKLTAVDAVPDAVREIAWKAQTRLCQRYRHMMAKGKLKQVVVTAIARELAGFVWSIACIITDPPTKNSAVTTPSEKICRTGSTTCSSVPRRQPIKETARRAERGGQIRTASADGKRPDR

SEQ ID NO: 253269 - protein, 407 aa, unidentified
MKGKVKRMKQPCITVDVSKGKSYYQGYISLDEPISKAKPIDHNLTGFKNIIDLKKTIEDISGLSPIVVFESTGIYHKVLQNFLEDNKLKYVVMSPLAAAKIRKSSIRSTKTDARDCKSLAKAYYLGDFDIYTKESDLYRNLRENHRHYEFLIEEQKRWKVEFRRLLDVVYPNFDKLYSNMYSDIPMFILEHYHHPYELRRKRVETLAKELEKVVNHDYNYCLYEANKIKKYLETCISGCKENDIESSSLAMSIHMLREVMKLVDKCLEELLAMAKQTPYFLLHKSIVGIGDKLAVILISEIGDITRFSNADKLVAYAGLDPIVYQSGKQTGEHLKITKKGNKRLRTALYLAVQVACQKKMKTNVIKTFYNKKKQQDHPLSTKAAYIACANKLLRIIYSMCKNGCLFH

SEQ ID NO: 253270 - protein, 387 aa, unidentified
MQKPHDNSKVCRAAFVQDSTLVVVIEMALTSWLVAGMIPGVDREPLKKIAPDPEELLQLLYRWRDEAIKAGKEITRIAVAYETGRDSFWLARWLRARGIDAHVIHATSVAISREHRRAKTDRIDTAMLRRGFLGWLRGEPGHCSLAIVPTVAEEDAKRPHRERESLVQERTGTVNRMKSILIQFGVRNFNPVLRKASEKLDAVRTPEGIPLPPNAAAALRRHMERLRVIKEQIKAIELTRLQRLQRDPADKMNAMVFLLVRIIGFGVETAEQLVHEILFRDLRDRKAVARYAGLTGSPDESGSKRREKGLSRSGNGRVRTILIQLSWRLLKLQPGSELVLWYQKRTADAKGSRKPMIVAFARKLIIALWRYVNTGLLPEGFELKPAA

SEQ ID NO: 253271 - protein, 320 aa, unidentified
MLSFGGIDVSKDRLDVMVLPEEQCSSVPNDAAGWAKLVEQLRGFSISAIGIEASGGYERGAVRALLAAGMSVRQVNPFKLRQFARASGVLAKNDPLDARMIASFVAVMPTRPAQRQTPAAERLAEMLAVRRQLSAEKVAAENASRLLEDAMLQRLSRRRIARLAADIDMLDGHLVEVVGTDAPLAHRYRLLTSMTGVGTVLACTLIALLPELGGMTRKQVAALVGVAPYAFESGTLKGRRCIWGGRANVRQVLYMAAMSASNWNPGLKAFHDRLKAAGKKPKVTIVAVMRKMITTLNAMLRDDVVWADRLRGRHSVPTVR

SEQ ID NO: 253272 - protein, 350 aa, unidentified
MSITALQTATAVIGIDIGKNSFHVVGLDSRGAIVLRQKWSRGQVEARFANMPPCLVGMEACVGAHHLSRKLKALGHDARLMPAKYVRPYSKGQKNDFRDAEAIAEAVQRPTMKFVATKTTDQLDLQALHRVRERLVSQRTGIINQIRAFLLERGIAVRQGLRFLRAEMPRILATPPDVLSPRMVHAIEALAEDWRRLDQRVDHLSSEITALAQQDAGCERLMSVPGIGPIISSAMVAAIGTGEVFSKGRDFAAWLGLVPKQISTGDRTILGKISKRGNRYLRVLFVQAAWVVLIKPQSWERYGLKRWLDAAKSRLHRNVLAIALANKLARIAWGVLAHGRAFEVHKLQVA

SEQ ID NO: 253273 - protein, 358 aa, unidentified
MADKVTEATVVGGVDTHKDLHVAAVVDQNNKVLGTQYFATTRQGYRQMLAWMTSFGALKRIGVECTGTYGSGLLRYLQNAGLEVLEVTAPDRMERRKRGKNDTIDAECAAHAAFSGIRTVTPKTRNGMIESLRVLKTCRKTAISARRVALQIIHSNIISAPDELREQLRNMTRMQLIRTLGSWLPDASEYHNVTNVYRISLKSLARRYLELHDEIADLDVMIAAIVDELAPELIKRNAIGYESASQLLITAGDNPQRLRSESGFAALCGVSPVPVSSGKTNRYRLNRGGDRAANSALHIIAIGRLRTDDKTKEYVARRVAEGHTKMEAIRCLKRYISREVYTLLRNQNRQVNSISITA

SEQ ID NO: 253274 - protein, 355 aa, unidentified
MSRKVHVRFCESRGVRFPPATHQFVGIDLHRQRSVIVRQTDSGEQLAVARIVNDPASLALQLEKAGEHPEVVLEATYGWYWAADTLQAAGATVHLAHPLGVKGFRYRRVKNDVRDARDLADLLRMNRLPEAWIAPPPTRELVRYRAKLVALRSGLKAQVHSVLAKAGVLIPVSDLFGVEGRERLTQVPLGVAYAQRVISLLELIDVLDAHEGRFFDRIAAELRGHPGNRAIQELPGVGPTLGAVFVAEIGDVHRFTDPSHLCSWAGLTPKHRESDTVVRRGHITKQGSKLVRWAAVEAIQRQPAGTKISVDRKRIEARRGRNIAKVAAARKLLTLVYYGLRDGQIRALAHHKAAA

SEQ ID NO: 253275 - protein, 373 aa, unidentified
MKKRSSSQKSQKVAVKIKGAQERVTIGMDLGDKTSRYCMLGNEGEILREGQVATTKTGIVEAFGALGRARMAIEVGTHSPWVSRLLLKLGHEIIVANPRQVKLITESSRKDDRLDAQTLARLARIDPQLLRPIQHRSEKAQGALMVIRVRAALVAVRTSLVNTARGLAKAMGERLPKCDADQMGVLQAVSLPPKLRQVLVPLLKEVESLTEKIKNSDREIEQIARKEYPETALLQQVGGVGPLIALTFILTIEDKNRFQKSRDVGCYVGLRPRRSDSGQSQPQLRITKEGDPYLRTMLVQGAHYIISRRGPDTDLKRWGLHLAKYGGKRGKKRAVVAVARKLGILLHRLWVTGEVYEPLRNHNARQEQKKVAA

SEQ ID NO: 253276 - protein, 260 aa, unidentified
MNSSQLANHTVVGIDVAKASLDVASTGDNRVRHLHYTDAGLKTLARWLNSITPQLVVMEATGGLERRLASHLRHSGFEVAVVNPRQVRDFARARNQLAKTDRLDARILAAFGQIMRPRPTPEPEPARRRLQQLVVRRRQAAHTMVQESNRRDRTEDPAIAAMIEQVLDVYRRQIRRLEADIQAIIDDDACLRRQQRLLESVPGVGPATSSMLLAELPELGRLNRQQIARLVGVAPINRDSGVMRGRRTTGGGRSNVRNAL

SEQ ID NO: 253277 - protein, 339 aa, unidentified
MENFVGVDLHKKVSQLATLREPKPASQVRFPNHTVTVEKVLKKLPQGSKIALEATGSWWWFVDLAQRTGHEVVMSHPKQTKAIASARLKSDKVDALMLAKLLKADLLPTVWIPPAAQRYVRELLTHRARLVRQRTSVINELHALYAKRNIDAGMIFHRVRPPAFRAEDLSGYGPRIVEEDVALLGFLNRQVQGLDKELKAIAEKDPESKRLMTIPGVGPVNAVAGSCWIGTIERFSNSKKLSSYFGLAPRVRQSGERERHGHITKEGNRMVRSLLIQAALWHIRRGPMSSRRHYLGVCKRRGKSIARVAAANKLLGIIFQMMKEKIDYEEFLRRGGNAQ

SEQ ID NO: 253278 - protein, 348 aa, unidentified
MEKLIRIGIDTSKSVFQLHGVDSVEQPILRRKLRRGQVLSFFSDLPPAQVAMEACGASHYWARELQALGHEVVLIPPQYVKPYVQRGKSDAADAEAICEAASRPKLRKNFVPIKSTEQQAAQMLTKLRAQFIGRRTQLANSIRGYAAEFGLTAPKGLSRLRELLADIRADATVPDLAMELVEALAGELTRVDDQIATLDKKLMQLHRGNEMSRRLAGIPGIGPVGATLLSIKVTDAHSFKSGRNFAAWLGLTPKNHSTAGKNRLGVITRAGDEMLRSVLVAGATAVIGDMRRGGNRIWPWLKALIARKPPKLAAIALANKMARIAWKLMISDDRYRPLGGSAPMATST

SEQ ID NO: 253279 - protein, 378 aa, unidentified
MDKGIKVYVGLDVHKDTIAVAAAQAGERTAARLIGQIAHDVPKLLKALAKLGTPEQVHVVYEAGPTGYGLQRTLAAKGYPCQVIAPSLIPKRAGERVKTDRRDSVRLAELSRAGELRAVTIPDRAEESIRDLSRAREDAVKARTQARHQLKGMLLRHDVRFSGKTHWSKSYYRWLGELNFGDASSQIAFTEYFLAVQAADARLARLTQALGGSVQGWRLEPVVRSLQALRGIDMVSAVGLVAEIGDFGRFEHPRKLMAYLGLVPSEQSSGDRVRKGSITKAGNAHARRLLTEAAWSYRFTPRIGRQAQQRQEHLPDPIRATAWKAQLRLTQRYRKLNERGVHHNKVCVAVARELAGFVWAIAHQASHPHPLTQPPQQA

SEQ ID NO: 253280 - protein, 403 aa, unidentified
MNMNAVGIDVSKGKSMVAILRPYGEIVSSPFEIKHTSSNIQSLIERINSIEGNSRIVMEHTGRYYEPLARQLSLAGLFVTAVNPKLIKDFGNNSLRKVKSDKADAVKIARYTLDNWIDLKQYSLMDELRNQLKTMNRQFGFYMKHKTAMKNNLIGILDQTYPCVNTFFDSPAREDGSQKWVDFATTYWHVDCVRKLSLNAFVGHYQKWCKRRMYNFSKDKAEEIYGAAKELVPVLPKDDLTKLIVKQAIEQLNTASRTVEELRTLMNETASKLPEYPVVMEMKGVGPSLGPQLMAEIGDVTRFTHKGAITAFAGVDPGVNESGTYEQKSVPISKRGSSSLRKTLFQVMDCLVKTKPQDDPVYAFIDKKRAQGKPYYVYMTAGANKFLRIYYGRVKEYLMSLPE

SEQ ID NO: 253281 - protein, 429 aa, unidentified
MPYRIAGIDVHKKMLAVVVSNVEVESEFQFERRMFGSNPEQLRSLAAWLLEQEVEEVVMESTAQYWKPVWGALERYWKPIREKREGASRRSGTLHLAQALSNRGRRGRKKDFRDAERLVKRLVARELTLSFVPDVEQRLWRTVTRRKYQLTRDRARLQNQVEALLEEAHIKLSSLVSDLLGASARRMLKALAEGETNPAALAALADKQLRATPEQLCDALGACTELNPVYRRLLKMALEQLQFLEQQIGDLDQETASLLRQHQDAVERLAEVPGLGVDSATQIIAEVGPTAATFPSGKHLSSWVGACPGDEESAGVNYSHRSPQGNRHMRRLLNQAANAAVKVKGSIFEIVYRRSVPRLGHNQAIGAIAHRQCRLIWLILHQGVRYEEHGPAVTKQSRQARTARMIRQLRKLGYQVELPNSQPANSAGR

SEQ ID NO: 253282 - protein, 355 aa, unidentified
MTSAKYIGMDVHKESTSIAVRNSVGKVVMECVIETKASMILQFIDGLRGDLQVTFEEGTSAAWLYDLLKPHVTKLVVCDPRKNKSMREGNQNDKIDARRLAELLRLDHLTPVYHGEHGLRTLKELVRSYLTITKDLSRVMTRVKAIYRSWAIPCTGKQVYARCHRAEWLAKISEPGVRRRAEFYYQQLDALRVLRQEARRDLLTESKKHKAWKRLCEIPAIGPIRAAVLLGILQTPHRFRTKRPLWNYGGLAIEMHSSADHHSVHGQLQRSRKNVLVRGLNRNCNHDLKNLFKGAAAVASSKPGPFQEFYTALVAKGMRPEMARLTLARKIATIVLIVWKRGVHFDAQYLKPQTA

SEQ ID NO: 253283 - protein, 410 aa, unidentified
MDVLYERCCGLDIHKKTVVACVVTPGPRGKPQKVIRTFGTMTEDLLALGDWLAAHEVTQVAMESTGVYWKPIWNLLEERFELLLANAQHLKAVPGRKTDVKDCEWIADLLRHGLLKASFVPDRFQRELRELTRYRTGLLQARAAEINRLQKTLEGANSKLAAVASDVLGKSGRDILEMLVAGSTDATALAQLARGRLREKTAELERALTGSFGSHQCFLVARHWALIDAFDESVAQVSAEIEERMRPFEVEIARLDTIPGVARRTAEVFVAEVGTDLTRFPTAGHLAAWAGMAPGNNESAGKRKSGKTRKGNPALRTALMEGAQAAARKRNSYTAAQYHRLTARRGKKKALVAVGHSLLTAGYHMLKRGVDYQDLGINYFDERDRRAVEHRLVHRLERLGYEVSLTKVAA

SEQ ID NO: 253284 - protein, 423 aa, unidentified
MAYRIAGIDVHKKRLAVVVADVEVEDEYQFERRWYGSNPEQLQRLSEWLIEQQVEEVVMESTAQYWQPVWGALERYWRPICQKREGAGAMSGKLHLAQALSNRGRRGRKRDFPDAERLVKRLVAQELVLSFVPDPEQRLWRTITRRKLQMTRLHVRMQNQLESLLEEAHIKLSGFVTDLLGVSARRMLQTLADGETDPAALAALADKRLRATPAQLCDALGACTELNPVYRRLIKMALEELQFLEQQMGQLDQEIANLLRPHEDAVKRLAEVPGLGVDSAQQIIAEVGPTVASFSSDKQLCSWVAVCPGDNETGGVNYSHRSPKGNRQMRRILNQAANAAARTKGSIFEIVYRRQVMRMGHNQAIGVIAHRLCRLIWILLHRKVRYEERGPAVTERSKRVRTLRMIRTLRSLGYRVEPLGNPA

SEQ ID NO: 253285 - protein, 392 aa, unidentified
MSAISDRVVIGMDPHKRSATIEVMARDETIVGGGRFDTNRNGYTAMAKYAKQWPNRVWAIEGCQGIGRHIANRLLADGEQIVDVPPKLSARARVFATGQGRKTDATDAHSIALAGTRMTGLRPVVNDEQLALLRILVDRRRSLGEDHTRMISQLHQLLLELIPGGAKKSLSAAQAKTLLATVRPRDAVGKARRRVAAELISDLERIYRRSKDADKELKELVASTVTTLMDLHGIGPSGAARLLVEVGDITRFPNRAHFASWNGTAPIDASSGEQIRHRLSRAGNRQINRVLHIMATVQLRNPTEGRAYFDRKKASGKTSMEAMRALKRRLSDIVYRCMIEDATAAMAAGPGGQQGTATGSSATDSHPPVGSSEKSLPGPAETQDRTLLPAVS

SEQ ID NO: 253286 - protein, 367 aa, unidentified
MNYKLKAAPTAISKEKNSQKGPKAKRIVIGVDVHLKSYEAARKIDNDSVGVVQRLRSKEEFLLYAEKQLEQAEEVVVVYESGPLGFTLYWDLKARGIECLVCAPQSQEQKRKRRKNNSIDARTLTGNLFNYFNGNKHALQRVRVPTKAQEQARVESRQHDALVQERKRIGAMGNSLLLSQDYGSWKNWWRPKAFERLSQLVAPWVLKQLQRWVKILGELDQQIQQAKVELTQQCQGPRAKGMGAPSLAQLNAEVLDWNLYSSERKIGCLGGMVPSEWSTGEGQRLGSITKVGVPAIRRIITEMVWRMILFQPNYKAVQKWREVLAGSNRGLKKKAVVAIGRRLLVDIWRMQTGRITAQELGLIMIKG

SEQ ID NO: 253287 - protein, 354 aa, unidentified
MKRTTKYVALDVHQAMTVSSVREESGRVIARSIFPTEEQALVDFFRGMRGAIHVTFEEGTQAQWLHDLLVDRVDRVLVCDRRGEKRQGRKDDQADADELSELLRRGGLRAVYHGSPHRSTLRELTRTYQNVVEDATRVMLRLKALFRARGIKAPGKRVYHPKDREEWLAKLGDDGARFRAQALYAQLDVLRDLRPKVKAAMVAEARRDPAWAVLGSIPFLGPVRIALILAIMRTPWRFRTKRNLWAYCGLAVVTHSSSDYELVDGQVVRRRRAPMTRGLNRNYSRELKNVFKGAATAATGRPGPLLDYYEGMIARGMREELARVTLTRKLTALTLRLWKKGEHYDPTKLTKQAR

SEQ ID NO: 253288 - protein, 410 aa, unidentified
MYKICCGIDVHKTFVVACIASTNDKGITSYESHRFSTYTSGLKTLLQWLIDRNCKDVCMESTGKYWIPVYNILEKGCSIVLAHPKYVKAIRGKKTDKKDAKWIADLFKHDLVAGSFMPPSDIRQLRDLMRYRFKLTCFKSSEKNRLQNCLTVSNIQLGNVVSDTFGKSAQAILDKLLENPADTSFDLEPLVYKSLKKKLPELRDAIDGFITPEQAGKLKIIKDHYDNLESRKAELEELILALAAPYQQELTILQTAPGISSPFTAIGIISEIGTNMEAFPSAKHLCSWAGLTPTNNESAGKKKSVRVSKAGCYIKPLLVQCANAVVKSTKHPEMRNRYLRLKKRRGHKKAIITIARMLLTALYHMLKNGENYNPELYRKTDLPPAGREITIEQALMLIRNQGYKIKSATT

SEQ ID NO: 253289 - protein, 351 aa, unidentified
MMMIGVDYHPSFQQIAFFVEETGEYGEERLNHDGGEAERFYRDLQGKGIHVRVGMEATGYARWFERLLAELGFELWIGDPAEIKAKRVEKQKYDREDARLLLRLMREDRFPQTWVPSPENRDLRQLLWHRHRMVQMRTRIMNQLQALAMNEGKRWKSKLFSQPGRAAFEQLALAPWASRRRRELLELLDRLNPSIEELTTAAEQEVNKRPEALRLMTHPGVGPITALAYVLIIGTPERFARGKQVGTYVGMIPAEDSSADKQRLGHISKQGSSLLRYLLVEAAQAASRFNPHWRRRYLHLAMRRHKSIAKVAMGRRMAIRLYWMWRNGCDYSPSFEFGSYAGKLGTRHGVQ

SEQ ID NO: 253290 - protein, 379 aa, unidentified
MDHAITGTPAETILHGALELSKNSWLLALQLPDRAQPSLYSIRGGDTEGLMAKLIAARDRWAKMSGKAPSIVLCYEAGYDAFWLARFLKARGIECLVVDAASMQVNRRARRAKTDRIDVGMLLRALIAWGQGDRHVWSVVRVPSVDDEDLRRSHRERDRLVRERTAHINRIKGLLFGQGIRGINVKSKYKTLQIDKLVTGDGCPLPLRLASEITREIARLALIQEQLAALERERDQAPTPCKATEKKRVQLMSLSGIGPAIAAVMTREVYYRQFDNRRQVAGFLGLATSPHDSGDVERSQGISRAGRGQVRGTIIQAAWLWLKHQPKSAITRWFVQRTAGQSGRIRRIMIVAVARKLAIALWRFLEQGLVPQGAMLANR

SEQ ID NO: 253291 - protein, 430 aa, unidentified
MYPFNFISVGIDVGADFSWMAVLTPNHKSVVKPFKIIQNDLGSLEKAVSTIKRVEEANSMEARIFLESTGIYHIPLFYYLKNAGLKVYILNPLITNSNKNSGIRKVKSDKKDAIRIAKTAYTDNLKTSLVPSDLVLSLRSLVREYYYFVDHRTAFINKLHKELRIVFPSYIGVFSDITGKTSLAVLKTYKTPNQILNAPKQEVIHLITKISRSGLPFATKKYDALFQAATCAMSFGKHLDASMDILQMNIQMIEQYNHMIDSILTKIEDFIAKHEDELFVQQIHILDSINGIGFISAVTLMCEIGEFSAFSKPKQLFAYFGLDPAVNESGKFKGTHVKMSKRGSRLARRILYHVTLSSVGTVKGKPVNPVLKEYYEKKKQSKPNKVALGAVMHKIVNIIYAVLRDHKLFELVTVEDHCKRYKKYQLTSAA

SEQ ID NO: 253292 - protein, 355 aa, unidentified
MERYIGLDVHAASCTLAVISETGRKLRDFPVETNGQALVEAVRMIPGRKHLVFEEGLQSAWLYETLRPHVEELVVAGITESRGPKSDKRDAYGLAEKLRVGNLGKSVFKAPREFTRLRELSRMHMTLVGDVVRAQARIKSLYRSRGVRVSGENVYGVRHREAWQQQLPSSAQARATRLYTHLDFLRAQKDEAEADLLREAKKHPIVGLLETAPGIGPIRAARIVPIVVTPHRFRTKRQFWSYCGLGIVTRSSSDWLQAADGGWVKARVPQTRGLSRQHNRFLKHLFKGAATTVLTQRHKDPIYERYQRLLDGGTKPTLAKLSLARMIAATVLRMWKDEEAYDPERASLSPKTREG

SEQ ID NO: 253293 - protein, 415 aa, unidentified
MSLKIVYKICCGIDVHKTFVVACIASTNDIGVTSYESHRFSTYTSGLKTLLQWLLNRNCKDVCMESTGKYWIPVYNILENDCSIVLAHPKYVKAIRGKKTDKKDAKWIADLFKHDLVAGSFMPPADIRQLRDLMRYRFKLTCFQSSEKNRLQNCLTVSNIQLGNVVSDTFGKSAQAILDKLLENPADTSFDLEPLVYKSLKKKLPELRDAIDGYITPEQAGKLKVIKSHYENLESRKAELEELILALAAPYQQELAILQTAPGIRSDFTAIGIISEIGTNMEAFPSAKHLCSWAGLTPTNNESAGKKKSVRVSKAGCYIKPLLVQCANAVVTSKKHPEIRNRYLRLKKRRGHKKAIIAIARMLLTALYHMLKNGENYNAELYRKSYLPPANREITVEQAIIIARNQGYKIKSATA

SEQ ID NO: 253294 - protein, 409 aa, unidentified
MKLFVGLDVSSFDIKVCFLNGEGEQLEAFTVSNDLPGATKLRDRLLVITNDQTIDVFKIGLESTSVYSFHPSMFLHYDKSLQELGAQVFVMNPKQIANFKKSYADMDKTDEIDAFVIADYLRFGRNQMSVVKEEQYIALQQLTRSRYQLIHQVTREKQHFLQHLSYKFNTFSQEVDSSVFGHAMMELFSEKYSLEELAQMPLEDLATYLQEKGKNRFPDPEQVAKSIQKAVRSSYRLNKVVEDSIDVLLGTSIEVIRTLQKQIKEIDKAIERIMAGLTQTLQSIPGIGPVFAAGIIAEIGQIERFEDETRIAKYAGLYWRKHQSGRFTADDTSLSRNGNQYLRYYLVEAANSVRRHIPEYQEYYVKKFNEVPKHQHKRALVLTARKFVRLVDALLRNHQLYTPKRSVDR

SEQ ID NO: 253295 - protein, 410 aa, unidentified
MDDGMASLGRDSAQTVLCAPFVLGVAPGAIVAGFDVHRRQITFDALDTVSGECWRGQLESTSAAVERWVGRFPGRVVHVAVEACTGWLFVCRALEYCGAVAHLAEPVETSALRGRKRRAKTDRADAKWLRQLLCEGRLPESWCPPEHVRQWRSRARLRNTLLAERTSWIQRIRATLYHHGVPGAPDDLRTLAGRQFLAALELPVDAAERIRVALESIDMLEIQLSGIERDLRTLARHQTGCRALMSLYGMGELSSLLTLVELGDVTRMHASRQAVRMAGLDIGPHRSDRHAQLGKLTRQGSAPLRWALFEAAQSACRPTSPDYADYHALKNRGLSHNRASLTIARKLARRSYQAHPSTMRPTRAASSRNDRGTHARRGGPQETERPQSLHRNDRSTISSPTASTGGRGPR

SEQ ID NO: 253296 - protein, 400 aa, unidentified
MKLKELSGGIDIGSEFHHVVVIGESGKVLYDKQVLHRFSEFHEAVRELKDTERRTGGKIAFGLEGKNGYGAPFDRILGENGFSLYNIDNLKLKQFRNTFGAEWKTDRRDARMLAKLMSLKAQLNGERDKVFIPIEKTSLTNEKLKILSRHQQTLIDEKKRICNRLRKKLLEICPGILDIFGEVEAKSLLRILIRYPNFSRYKKLTEGKLLRMKRIGKVIAGKIINQLQGLEYVRELALVYATIIQSQAKRILELKEEIELLDKELDKLGEGSKEVQRLRSIPGVATKLSSRLAGEIGDIRRFKDSNKLAVYFGVGCINNDSGKRKMAKAVFKANKICKSTMIELAGCTIRSISESKRYYNKKRSEGKKHNHALRCLARQMTKVIFKLLIEDRDYYVKDES

SEQ ID NO: 253297 - protein, 349 aa, unidentified
MVVLGIDAHKRTHTVVAVDAAGRQLAVRVTQATSTAAHLDLVVWADRFGPDRRWAVEDCRHLSRRLEADLLAAGEAIVRVPPKLMAHTRDAARTYGKSDPIDALAVARAALREPGLPSARLDGPERELRLLADHREDLVAERTRMMNRLRWHLHELDPSWDPGPRTLTRNKTMTAIAARLAPMDGLVARIAADLAARITALTADINALAKQIAVLARQLAPSLLALPGAAELTAAKIAGQTAGVRRFTSKDAYARHNGTAPLPVWSANQTRHRLSRTGNRQLNCAIHLIAVTQIRCHPPAQAYLKARIAAGDTKTEALRALKRRISDAVYKALLADIPAASAETAGQAA

SEQ ID NO: 253298 - protein, 344 aa, unidentified
MHIASIGIDLGKTTFHLVALGERNKILLRRKFSRSQLLAYTANLPSSLIGMEACSGSHFLGTVLREQGHQVRLIPAQFVKPYRKTNKNDFIDAEAIAEAVTKQNMRFVQIKSQEQLDIQAMHRVRDRLVQRRTALINEIRGFLLDRGLTFAARPIHLRKNLPSVIEDAEQNLSSRFRWLLDRMWQEWKQMEVDIKEITEAIERIGNENALCRRLRQIPGFGPLVSTATVAAIGNGAAFRRGRDFSAWLGVVPRQYSTGGKQKLFGMSKRGNTYLRRMLIHGARAVLLRVKYDTGGFGQWVHRLAQRAPHNKVVVAIANKLARIAWAVLSSGHDYQHQRLQSVAA

SEQ ID NO: 253299 - protein, 339 aa, unidentified
MKYTPVGVDIAKHVIQIHFINEHTGEVVDKQLRRQDFLTFFGNREPCLIGMEACGGSQHWARELTKLGHKVRLLQARFVKAFVMGNKNDVMDARAIWMAVQQPGKEIAVKTEEQQSVLVLHRTRMQLVKFRTAQINALHGTLLEFGETIHKGRAAMEREFPEALERMKEILPPYLIMVLENQYNRLNELDSLIEDIEKQLTSVARQNETCKRLLDIPGVGPLIATAAVATMGEASAFKSGREFAAYVGLVPKQTGSGGKVRLLGISKRGDTYLRTLFIHGARAVALVAKEPGPWITELKKRRPASVAIVAMANKLARTVWAITAHDRKYDRNHVSIRPY

SEQ ID NO: 253300 - protein, 327 aa, unidentified
MTLPVLGIDIAKLKFNACLINQSGKLRHKVFANTSTGFEQLREWLAKQGIEQLHACLEATGTYGESLALFLYQAGHTMSVVNPAAVKAFAGSRLSRTKTDRVDAELIARFCFAQVPPAWSPLPKEVRELQALVRRLEALTEMRVAEENRLEAGITVEAVKASVEELIAHLSAQIKHTEKLIRAHINTHPALLEQSQLLDSIPGIAQTTAAIILSEITDITQYKSARQVAAYAGLVPRERKSGSSVRGRTRLSKIGNARLRRALYFPAVTALRCSRFFQIWAKGLQERGKCKMSVIGAAMRKLIHLAYGVLKTGKPFDPEWTREAQNA

SEQ ID NO: 253301 - protein, 307 aa, unidentified
MFVGIDVAKDRLDVHVRPAGESFIVARDGEGIEELANRLSTMAPTLVVLEATGGFETVVAAGLAVAGLPVAVVNPRQIRDFARATARLAKTDTLDAAVIAHFAEAVNPPVRLLADPQQRLLGELMARRRQLIEMIVAEGNRRRLLTARRTLKTVDRVLATLKAQLEEIDHDIDIAVRGTPAWREAEDLLISVPGIGHKIARTLLAEMPELGRLDRRQIAALTGVAPFNKDSGTLRGRRTITGGRTVVRSALYMSVLVSIRRKLPLAQTYHRLRASGKPAKVAIVACMRKLVTILNAILRDKTPWATA

SEQ ID NO: 253302 - protein, 345 aa, unidentified
MLIVGGLDIHRRQITFDYLDTVTGQVRRGQIAPADREHLRAWLARFAGQDDVAFAVEGCTGWRYVAEELAAAGIAAHLAEPADTAFLRGRKRHAKTDKTDARHLRMLLAEGRLPECWIPPGRILECRALLEVYNDLRRERTAWSQRIHAVLFHQGAPALGEGALRTGQGVAELRAVAADCLTPAGQLQVATALEVIDALEARLHVVRHQLLDAARHLTGAKVLATRLYGVGPVTALAITCWLAGAGRFSSSRQAVRFAGLDITVSSSDRKGPPGKLSRQGPPVLRWALYEAAKTHARTSAPDHRYYAAVKDRKNSKRACLSEARKILRQAHHILAELGDDALAAA

SEQ ID NO: 253303 - protein, 331 aa, unidentified
MKKKQSYIGIDLHSDNFYAYYISENEEKEGFYSLDNKGIADFLLTLKKTDKVAVEASANTVNFVQNIERHVKEITIVPPNKFSVIGKSTKKTDKNDARTLAIFLSKDLLPKSRIKEEVYLRIISIAETRYILRKTKAALINKLHSIMLQNGHKIGKSKIRGDFGKHLYIHDLPQDLLTEVKLLEKEIKHIRNSMDELERAMISLSQTTKYFEAVRNIKGIGDLSACTIIGVIGNINDFASPSRLASYFGIVPKVRISNSKQKASRITKAGNRLGRSTLVQCTWIAIKYNEELREYYDRLNKTKPSKKAVVATARKLLTEVYKAMKACETDR

SEQ ID NO: 253304 - protein, 410 aa, unidentified
MEVLHQRCAGLDVHKKTVVACVRLASEGKVVTEVKTFATTTQGLLALSDWLSENGCSHIAMEATGVYWKPVWHVLSDGEFELILTNAAHVKNLPGRKTDVSDAAWLAELLAHGLIRASFVPDGQTQELRALLRTRKQLIRERTRHIQRIHKTLEDANIKLDAQLSDVLGKSGRAILNAMVAGETDPIRLAALAHANVKSTQAELREALRGRVTSHHRFLLQLHLGQIDSLDAAIVKIDREVDDNLAPFRTAVDLVRTIPGVGALSAEVIVSEIGTDMSRFPTAGHLLSWAGLCPRNDESAGKRRSSRLRKGAQWLKTTLVECAWAAKNKKGSYLQAQFLRLRSRRGPQKAICAVAASILTAVYHMLKDGTVYQDLGSEHFNRRSKMTKTQRLVRNLEHMGYAVKIQPIAA

SEQ ID NO: 253305 - protein, 347 aa, unidentified
MTIVNTDRYTVTGGVDTNLDVHVAAALDEIGGLLGVESFEASRAGNDKLLGWLQSFGPVARVGVEGTGSYGAGLARLLRTAGVEVVEVDRPNRQARRRTGKSDPADAIEAARAALSGRAQGAGKTRDGNVEAIRVLVVAKRSARSSKIKALNQIRHLGFTASDELRERFSGISRQHLGAAAAGLRPRAGSDPVTFATKTALATLGRRVLALDGEKQRLDVLLAELVAGTAPSLLNLHGVGVDTAATLLVAAGDNPSRLRGEAAWAHLCGVAPLEASSGKVTRHRLNRGGDRQANSALWGIVITRLRSDPRTQTYMERRLKEGRSKPEIIRVLKRYVAREVYRHLPRH

SEQ ID NO: 253306 - protein, 331 aa, unidentified
MEEVKRFVGIDVAKVALDVFIGSAGGAFSVANDEVGIRELLRQIKPADFVIVEATGGLETPVASALAAAGIAVAIVNPRQVRDFARATGKLAKTDRLDAELLARFGEAIRPEARPLADEQAQALEALVTRRRQLVEMLTAEKNRRARAPKVLHRSIDEHIRWLEKRLSEFDDELGELIRHTPLWRERDELLRSVPGVGKVLSSTLLAQLPELGMLSRKQIAALAGLAPFNRDSGNMRGSRSIWGGRAQVRRVLYMATVAGVRSNPTIRTFYLRLRTNGKHAKPALTACMRKFLVILNAMLHNKTHWQTPAPTFLTSSLSPLLGAVSEHGCC

SEQ ID NO: 253307 - protein, 337 aa, unidentified
MTAYVGIDVSKKKLDVGFYSDKLGKNGQRKKKTKVFKNDRQAFSQLESWLKQQTQHKAQDIAIGIEATGIYHEALIYTLNEQGFKLFIANPGRAKKYFESLGVTHKTDKSDSLLLARFTEDKAHKGDIAWWEPESPEARHLKLLLRRLKALQKDVLRERNRLEACANTDTSPRVVKSIEDMIGVLNGEITALLKEIDDHIDGHPQLKKNRELLESIDGVGPTVSRELTSLFSVKRFSSAKEAAAYLGLIPRLQESGSHKGMTRLSKIGPSAIRALLYLPAVVASRCNPDIAYQKQRLLAQGKTKMQALGAAMRKLVQICFGVIKHQEEYRPQTSLSV

SEQ ID NO: 253308 - protein, 346 aa, unidentified
MEHYAGIDVSLELSSVCVVDAQGKIVKEAKVASEPEAVVAFFEALGFAVKRIGLEAGPLSQWLHAGLKEAGFETVLLETRHVKAALSAMTVKTDRKDARGLAQLLRMGWFQPVHAKSMASQEVRALLVGRKQLLGRLIDVELSIRGILRGFGLKVGAVTRKGFEARIRELVTGQATLERIAEAMLSARAALKAEYEKLHKAVLAIVREDAVCRRLMTVPSVGPLVAITYKSALDDPSRIAKSKAAGALFGLTPKKYQSGEKDVTGGITRTGDEMVRTALYEAANVLLSRVTRFSKLKRWGMDVAKRRGSKRAKVALARKIAVILHRMWIDGTTYLWAEAKPIAAQA

SEQ ID NO: 253309 - protein, 314 aa, unidentified
MTHPLIFVGIDVSKAQLDVALRPTGRFVVPNDDSGIAQLLEQLKVTPPTLSILEATGGIELPLTGALAAAGLPVVVVNPRQIRDFAKATGQLAKTDALDAQVLAHFADVVRPEPRLLPDAQTQELAALVTRRRQLIEMLTAEKNRLASARTVVRKPLRAHITWLERALDQADTDLADAIRQSPVWRAKEELLRSVPGIGPVLTTTLLANLPELGTLTHKQIAALVGVAPLNRDSGTLRGKRTVWSGRAQVRAALYMAAMVAARFNPVIRAFYQRLCVAGKAKKVALVACMRKLLTIINAMLKHQRPWNPTVHHA

SEQ ID NO: 253310 - protein, 387 aa, unidentified
MQTDNPATIIATTARSDVSTLFASLELSKSKWLVTVNSPGGEKFSRHAVEGGDGDSLLDLLARLRAKAERRCGLPVKVMVIQEAGLDGFWLHRLLTGSGIESHIVDPASIAVDRRHRRAKTDAIDGETLLRTLMAWTRGERRVCSMVRAPSREEEDRRRLTRERGTLLKERIQHTNRIKGLLSGQGIRDYDPLGRDGLAWLDTLRTGDGHPLPPMLKAEIHRELDRIELVRAQLKAVEHARDALLETEAAGPENPAALLVKLKGIGAEFASLLWLEALFRGFSNRRQVAAYAGLAPSPWQSGGTDREQGISKAGNRRLRHTMIELAWFWLRHQPGSALSRWFSARAGGGKGRLRRIAIVALARKLLIALWRYVTQGVVPEGAVLKAA

SEQ ID NO: 253311 - protein, 384 aa, unidentified
MTKVDDLSRSLSAFDQEITLVVVIEMSQSSWLAAGMVPGVDRHPLKKLEPNPAGLQRLLERWRVEAVKAGRKIERIALAYEAGRDGFWLARWLRARSVEAHVIHSTSVAVSRERRRAKTDRLDSAMLMRVFLGWLRGERGHCSMAAIPTLEQEDAKRPSRERENLVAERTRIVNRMKAALGRLGIRGFKPELRKAAQRLTDVRTPEGTPIPPNMLDEIRREMARLATVREQINAIEQARLRRLEQAPTEGFNPMVHLLARVIGIGVETADLLVQEVLSRGLRDRRAIARYAGLTGSPDESGSKCRERGLAKAGNARVRRSLIQLAWRFLRFQKDSALAQWYRARTEGTRKTIMIVALARKLLIALWRMVTTGEIPTGVLLREAA

SEQ ID NO: 253312 - protein, 313 aa, unidentified
MITLGLDPHPGSHTVVALDNNGASLGHLAVPNTPEGLKQLHEFGSTFSPRRLAVEGAGNHFIAAFVAELLANSESVFSIPPSLTSQYRARRGRKKSDVVDAENVARALLANAQLPPLHAVEHQRELQELTRTQRRLSEQLKASRGALKELAAGSSVREVLQPVIEILVDQLKILRQQIRLRVKDIMPALLDLQGVGPIVAGILLAEVGNPKRFASANHFASYCGAAPIERGSGQNCRMQVNPGGNRRLNWALHIVAMVRLGNDGGRSKTFLDKCRLRGKSQRSALRVLKTYIARELFSVMHHNIRANIEGLSP

SEQ ID NO: 253313 - protein, 352 aa, unidentified
MSNIKYVGMDVHKAITVIVVLNAAGQVESRTQVKTKAENLRDFFRGLSGRVEVVFEEGTQSSWLYQLLKPLVAAVTVCDPRHNKLIGDGNKSDDDDAETLARLLRMREVKAVYKGDCEQQKLKELCRAYENLVEDTTRAQNRLKAIYRGRGIDCSGTEIYRPDQRAAYLARLSDEAARFRAESLLDQIESLKELRKQAKSRFLEQVRKHTDYPILATLPGFGAVRIGLLIAIVITPDRFRTKRQFWPYIGLAVVTHSSADYKEVGGRIVKSQKVSTRGLNWNHNPQLKQVFKGAALSALRHEEIRVYYQRLLDQGTRSALARVSVARKLAAITLAVWQRKEKYDPKKITTLS

SEQ ID NO: 253314 - protein, 404 aa, unidentified
MVGLDVAKTKEYAALGDETGKEYCVINWKHPFGSRRFADSVDELKPSSVQIVMEPTGSYGDPLRYLAYQRGWEVWRMAPKRVHDSKEVMDGVPSIHDAKAAHILLWLHRQGLTERWPPRGASRRKIRTLTRRLSRLQKDWQRQLGYLESEMARYWPEILQVWELKRATLLGVLMKFGGPRKLVDNEPEVRAYMKKKGGHLLKEERIEEVMEAAHNSLGVPTLESERVSLINLAKRADQLRRDRKKFKRKINDLIEGETIRQVGEEVGLPTAAVFWDEIGPFGDYESVDGLIKAFGLNLKEQSSGKYNSPLHITKRGPSESRAALYLATWRKINSDPLFQAWHRNKLDRDGGPKKANKNVSVIALMRKYLKGLWHVARGESFDSTLLFDVDKLKSESTSTVASTI

SEQ ID NO: 253315 - protein, 325 aa, unidentified
MQASTVVTPTAGHCGTIFVAIELSQKTWLVTLHSPERDRISRHKLAGGDHGGLLALIGQVRARAAGKLGAVPAVTSCYQAGYDGFWLHRLLEADGIRNFVFDAASIAVEQRARRAKTDRIDGELLLRTLMAHLRGEPRVVRIVRVPSLAEEDARRASRERDRLITEQTAHTNRIKALLRLQGMAVGNPRRGDWLAWLQRQRDRQGQSLSPQLLAEVTREHVRLMLVRQQLAALEQAQAARTLPLPAPMAERQDRLLRIKAIGTTFGATLVNELLVASYCGLTPSPWKSGSIDREQGISKAGNHRARHKAIAKGAFAPCHRQMLGS

SEQ ID NO: 253316 - protein, 348 aa, unidentified
MSQSNQYVGLDVSLKETSICVIDDADKIVWRGRVDSTPKAIASAVKQHAPHAVRIGLESGQLSSWLFHELKEAGLPVICVDARHAKAALSLKVNKTDANDALGLAQIMRVGWYREVTVKGLDCQAVRALLVARAQIVSQITTLKNCVRGILKTFGRVLPKGLRSQFPARVRAAIDGHPVLGAIIEPTLQVLEAARAQLLVYDKAVIQRARSDDTARQLMSAPGVGTVVALAYMTGVEDPARFKRSSSVAAYFGMTPRRYQSGEVDYAGRISRCGDGMVRGLLFEAAKVLLSRSARPSALKTWGEALGKRIGAKKATMAVARKLAVILHRMWTTGTTFQWNAEAGSPAA

SEQ ID NO: 253317 - protein, 395 aa, unidentified
MRFAGIDIASQTHVVAVTTEAGEILVKPTSFAEDAPGYEKLFTLLDPPTDILVAMEATGHYGRNLFAALCARGYQVALLNPLRTRRFAQEDLRRAKNDSIDALGIARFAAQKRPAPTLSIDDTTEQLREVTHFFERLTQDLGDRVRQVHRLVDLGFPEFTRHVHNLSTHRATAILAAYPSAQAFSESCLRRLAAIRYDGSHAVGRPLACALVETAKTSVGRYHGPAYHIEMRYLCKDLDRLRHQLRDLHQEIDRRVAEHPVGTLLTTIDGLGTIAVARILAAVGDPARLRSGAALASYVGAVPGSNKSGLRWADRASLSPLGNARLRRTLFMTTLGAVRRNPWLRAYYTRLRAKGKLPKVALLAAMRKLLLAVYAVAKHRTPFVPRVPSDNDPAN

SEQ ID NO: 253318 - protein, 339 aa, unidentified
MSKVSMTGQAFCGIDVSAATLAVAVQRADRGGQEQREFANSAAGHRQLIEWLRKRGSSMRVSLEATGIYSLDVALALDRADGIEVAVLNPKTVNRFAQTLRRSKTDKADAVALAEYSQRMPFVSWQRPSPISLALRAISRHIAALTRDHTRMSNRLHAAEGSATTPRCVRQDLKRSMDGLRKRILRLRKEAVAMIHEDKQLQLKFQLLIAIPGIAETSAVQLLSELAALDPEMTVRQWVAQSGLDPAHKVSGTSVHPPSQISRHGNSHLRQALYMPALVGIRCDPHLSAFYRNLQGRQKTKLQALMAVARKLLHAIFGIFKTGTAYDGAKLFPQLIPTS

SEQ ID NO: 253319 - protein, 315 aa, unidentified
MEIVEPPAHPVHIGIDVAKASLQVDLQGKSRKLPNTPAGHQTLLGLLPGSAFVIMESTGSYHIAALEFLQAKGIPVAIVNPVRVKQFGKARGTLAKTDPVDAVLLSAFGRAFLPSPTPPRDPERVLLGELVNLRDTLGAQVTMWNNLLEHQQSAAARKLSAVQARAATKAQADVEARIAKLIQTSETMAPVARVLQQCKGVGIVTSAVLVAQMPELGQINRREAAALAGVAPCANDSGLHAGKRMIRGGRPRIKRALYLAALSAVRFHPTLSPAYKALRMKGKPAKVALIAIARKLLVILNAKLKEYYATLAPAV

SEQ ID NO: 253320 - protein, 338 aa, unidentified
MQIKKFIGIDVSKKTLDITILDSQGKQIYYERIANDSKSIKNCFVSFMKNFSLNYDESVFCMEYTGIYNLPLVKWLKKQSALIWMESGTQISKSQGLVRGKNDKVDSSRIALYAFSNRHNIKLWKAPREIIEKLSILLSLRNRFIKAKKQLSVTIEEQKLYLDKNTIKTLKKLNADPVNELMKSIQKVEKEILELIKTDERILKIYKIATSVDGVGMITAVNLITTTNEFLSITEAKKYACYSGVAPFEHSSGSSVRGKTKVSHMANKKTKTLLHLAALSAIQVKGEIKEYYKRKVEQGKNKMSVLNAVRNKIIQRVFACIKQDRFFEKNYQFNLVKP

SEQ ID NO: 253321 - protein, 417 aa, unidentified
METFSTMDVIYRCCAGLDVHKQTVECAVRRMQEGGRVEVQIRQFGTMTDDLLEMVKWLKAQGVTHVAMESTGVFWKPIYNILEGHCTVLLVNARHVKQVPGRKTDVRDCQWLAQLLQYGLLKGSFIPPRWQRDLRDLTRERTQLTDEQTRVANRIHKVLEDANIKLGSVATDILGVSGRDILERLMAGEEDVEKLAECARGKLRGKIPELRRSLRGCLSEHHRFQLRLNWNHLQRLQELIERLDERISDLCRPYRGQIQRLDDIMGIDQASAESIVAEVGVDMQVFPSAGHLSAWAGICSGNNESAGKRRSGRTPKGSRWLRRTLALAAQAAGHAKDSFLASRFRRLAARRGKKRACVAVGHSILKIVYYMLKDGRPYQDLGGSYFDRLNPQRLARYLVRRLERLGLKVTLEPATAK

SEQ ID NO: 253322 - protein, 353 aa, unidentified
MEQFIGCDAHKKFSIFASIDEKGEYGPTFRVPHAREVFRAFLKDLPAGSKIALETSGCYYWMVDEMEQAGHVPRLAHALTAKRRMEGRHKTNERDARGLAMLLRNGTLPVVWIPPAELRDQREMLRWRMCLSRMRTRVKNRIHGLLQRYNIDIAVSDLFGDGGRVKLLERVDELPPYSRLSLLDQLQMVDTVETEISECEQVLQEMLYPSAERDWLDSLPCVGKILSAVMALEIGDVRRFGGPDRLVSYAGLVPVARESADWKRKDRCPRDCNTYLKWAYVEAANLISVQRKRWPERHVVQLYERVKQSTKMHGKATLAVARHLAEASYWMLRKQEVYQEPNSKRHVLSSTHG

SEQ ID NO: 253323 - protein, 355 aa, unidentified
MNSGKYIGLDVHQATICVAVMDAKGKVVMESILETKATTILEFLAGLRGTLSVTFEEGTWAAWLYDLLKPHVANLVVCNPRKNALLKHGNKSDKIDARKLANLLRLNDLEPVYHGESGVRMLRELARSYLTIVKDVSRVMSRLKAIYRSWAIPCAGRDVYYTRHRGEWLGKIPEAGSRRRAEQLYQQLDMLQPLRQQARRELLAESRKHTITAKLRQIPSLGPIRSALAVALIQTPHRFRTKRQLWTYSGLGLETRDSGEYHYVEGQVRRRKKQVFIRGLNKDHNHDLKGLFKAAATRASVQPGPFQDFYQRSLAKGIQPTMARLTLARKIAAITLTLWKKGESFDVEKLKAQAA

SEQ ID NO: 253324 - protein, 373 aa, unidentified
MDQHSRAFVGIDTSKLRNAVAVAEEGRGGDIRYLGEIDTTEAATRKLVTKLAAKYRQLTFCYEAGPTGYGLYRLIRKLGHDCIVAAPSLIPKKPGERVKTNRRDAVGLAKVLRAGELTAVWVPDERHEAMRDLSRAREAARKDLKGKRQQVSSFMLRLGRHFPGKKTWGPAHMNWLMLQKLEHREQRIVLEELLGAVRQESERVERLEQAIRDAVPEWSLAEVVTALQAMRGIDLVSAVTVLAEIGDLSRFQNPRELMGYLGLVPSESSTGDTVNRGSITKAGNGRARRILVESAWSYRYPPRVSREKQMKVAAAPGAVREIAWKAQMRLCGRFRSLTRKGKRPTIVATAIARELAAFIWAINREVMAHATAS

SEQ ID NO: 253325 - protein, 444 aa, unidentified
MGKPQVFDDQEQGRVFERVAAVDVAKASGVVCMRLPHPAQPAGRRSQVWEVPATMRAVTELAGRLAAEGVQKVTLESTSDYWRIWFYVLEEAGLAVQLVNASQARNLPGRPKTDKLDAMWLARLTEMGLLRPSFVPPAEIRVLRGYARARTRLTQDRTRCLQRLEKLLEDALIKVSAVASKLTTRSVQDMIRAMIAGQRDPQVLAGLARTRMKAKHDALAEALAGLFTDHHAELAQLLLDQIAFLDTQIARLTMLTGEQLASIRAAWGIDADGATGPSPGAIALPAIARLDEVPGVGAELAASIISETGLDMTRFPSPGHLASWAGLCGRTIQSGARTRTGKGQGNAWLRGYLGRAAIAAARTSTFLGERYRRLARRRGAARAQVAVARSILIIIWHLLNDPTARYHDLGPGHYQARTDKSRKARNHIRQLQALGYTVTITQTA

SEQ ID NO: 253326 - protein, 420 aa, unidentified
MSPRSEQSFTAYVGIDWADTKHDICVQAAGDTRRQFGCIAHRVAAIDEWANALHRRFGGPVAVAVELAKGPIVAALQKYDFLVLFPINPATLAKYRQAFQPSGAKDDPADAELALDLLLHHPERFSALRPQSAAMRSLVSLVERRRQLVGDQNRLTNRLCDTLKQYYPQALEWFDDRGTVLFCDFLERWPTLRSVRHARTAVLETFFHAHHCRSASRISARIESIRTAAALTDDPAIIGPCRLHVLALVTQLRAVLAAIVQFDREIAAVVHTLPDYALFEDLPGAGARLAPRLLAAFGEQRERFRSAEEVQRYAGIAPVTERSGKKRWVHWRLKCPKFLRQTFVEWAAQTISRSFWAGAYYRQQRAKGSSHQAAVRALAFKWIRILYRCWQTRTPYDETTYLNALRKRGSPLLGNLDLSG

SEQ ID NO: 253327 - protein, 366 aa, unidentified
MESYVGLDVHSKRSVFVIEAEDGRVVARGDIPTTPAGFRQLRQQHELAAETPVALETGTVAFYAARELARVGLRPVVIDAHEVRVKAHRPRQKSDRRDAFELCEGLRRGHYRAIVHVPPAPIGALRETLSRRRHFVAVRVAEVNAVKRLLRAAGLGHLSKSLGTDAAWEKLLAALATEPALRTYVAQHHALWRCAQEQIVALEETLAAQPATIAKVAARLQTVPGVGPIVSLTAVAVFSDVHRFPSAKHAASYAGLVPSTDQSGDRDTHGHITKRGSAALRIMLCEAAHHAQRPNHPLHPYFARLCAQRGYKMAVVAVAHRLCRILFALLRDGADFDVAKLAVEEGVFRRTTVQRFRLKRATASRA

SEQ ID NO: 253328 - protein, 339 aa, unidentified
MKYVGIDLHKKTIMVCVVNEKLTVFARRTLYCCEPETITEFFKELGPFQAAVEATASYQWLVDLIEPLAERVVLANPNKLRVIAESIKKTDRLDAQVLAEFLARDQIPQAYQPTPRVRQHRAFVRHRKYLREQMTAVRNKIRRILSDYNADRKDLFSANCGLEYIKQVPLSEADRFVLNQLWAEYQHYDQQVEELGDRLKKFAKKAPSREAEARAVLKTIPGVGPVTTELVISELGEIGRFKNSKRVCSYAGLVPIVRQSGGKKSKDLGISKQGSALLRWALVEASWRLVRTNRKWERIFERISKRSGGKRAIVAVARKLLCVMYAMLKTVTAYNVLAK

SEQ ID NO: 253329 - protein, 370 aa, unidentified
MDEGIKFFVGLDVHKDTIAVAIAEADRAPARLIGSIAHDVGKLLKLLARYGEPGAVQVVYEAGPTGYGLQRELTRQGYQCQVIAPSLIPKRAGDRVKTDRRDSLRLAELSRAGELRAVWIPDPADEAIRDLARAREDAVNARTQVRQQLKGFLLRHEVRYAGRTSWSKAYYRWLATLNFGEAGAQTAFTDYWQAVSAADERVARLTAALVPAISGWRFEAVVLSLQALRGIDQISAIGLVAEIGDIGRFAHPRQLMAYLGLVPGEHSSGERVVRGSITKTGNAHARRLLTEAAWNYRFQPRIGSRAQRRAEDLPQAIRDVAWKAQLRLSGRFSRLRARGVHLNKVCIAVARELAGFVWAIASTRAKLPQD

SEQ ID NO: 253330 - protein, 412 aa, unidentified
MDVIVERCAGLDVHRDSVVATVRVPGKGKSRRRRAQQTRTFGTTIAQLEQLGNWLEGFAVTLVGMEATGVYWKPVFFVLERRFECWLINAEHLHNVPGRKSDVIDSRWLCELLEFGLVRPSFVPPPEIRRLRDLTRLRSTQAEERTRAIQRLEKVLQDAGIKLTSVASGTYSVSARAMLEALLGGVSDPACLAELAKGRLRAKIPRLQEALANRFDIAHHGVLVAGLLAHIDALDQAVAALDARIAAATDAELIERLSTIPGVKRHIAEVLIAECGVDMSVFGSAQRLVSWAAICPGTNQSGHRRRSGKTRRGNPWLRTALTQAARAAARSKNTYLASHYWQIRGRRGEAKAIGATRHDILIAYYHIVHERVPFRELGPDWLARRHSPEHRTRRLVKQLEALGHNVTLEAAA

SEQ ID NO: 253331 - protein, 306 aa, unidentified
MVVVGTDAHKYSHTFVATDEVGRQLGEKTVKATTAGHATAIMWAREQFGLELIWGIEDCRNMSARLERDLLAAGQQVVRVPTKLMAQTRKSARSRGKSDPIDALAVARAVLRETDLPLATHDETSRELKLLTDRRDVLVAQRTSAINRLRWLVHELDPERAPAARSLDAAKHQQALRTWLDTQPGLVAELARAELTDIIRLTGEINTLAQRISARVHQVAPALLEIPGCAELTAAKIVGEAAGVTRFKSEAAFACHAAVAPIPVWSGNTAGQMRLSRSGNRQLNAALHRIALTQIRMTDSRGQAYY

SEQ ID NO: 253332 - protein, 343 aa, unidentified
MTYVGIDLHTTNMVNVAINSNGEVIREAKLLTSTRSLEDFLGGLEVPIRAVVECTSNWYWLSDWCRANGVDLTLAHAKMVKAISYAKVKTDKVGAKTLAELLQADLIPEAYQIKRELTRGRLRMIQWREKLQSALWGQAIKYNVQITDSQCRQLDKLQTWLQSKLPPAANRQAELLIAQLSQLQGHIHRIEEEIEKQVPFEAAAERLMDVPGLEKVRAWTIMAEIGDIQVRDSLSAIVGWYQELRSGGSHRHKSGNKDGNKYLRAAFGQAAVSAYTHYKGVKKFYRKIKRRSGRPIARAVVGKELAKGVWHMLTKNQGYKGFKGQPVRAASGTCWPQPINPNA

SEQ ID NO: 253333 - protein, 350 aa, unidentified
MLTASWFVGIDWASEAHEVCVLDREGHVGERRQVKHTVPDLQAFVDALLARAPGDATTVAIGIEVPRGALVERLVERGLGVYAINPRQLDRFRDRVAPAGAKDDRRDALVIGDSLRTDPQAFRPVRLDHPLIIQLREWSRIDEDLGGELTRLTNQVRDLVYRTAPELLTRCPAADEPWFWAVLRDAPTPAAQRRLSARRLERLLRDHRIRRLTAAHVHAVLQQPAVFTAPGVVDAVAAHLEVLRPRVELIATQRRAAERQLVRVLEALETELPSAGDQREHSDVAMVRSMPGIGTRVAARMLAEASQPLVDRAYHVVRVSMGVAPVTKQSGKRRRVSMRYACHVRWRNAA

SEQ ID NO: 253334 - protein, 421 aa, unidentified
MNPLYVGIDVSSRNNVVFLMKPDGSKIKNFSVPNSRDGSQKLVKEIRSALTSFALTDVIIGLEATSVYGDNLVCFLREDGSLTPFNRKIHVLNPKQVNKFKESYNDLPKNDYVDSFVIADCLRFGRINKEVYLDDYRYKALQNLTRARFVTVQNLTREKQRFMNVLFQKYSSLAQEKVFSDTFSTTALAVYEEFDSADTLAYMDLHELTVFLQEKGKNHFPNPEEVAKAIQKAARSSYRLPKTVNDSVNQVLSISITSMKALEAQIREFDKAIAAQMELIPNTLISIKGIGPVYSAGIIAEIGDINRFPNQAKLAKYAGLAWRQHQSGDFEAQNTRLIRTGNRFLKYYLGEAAMSLVRCDAEYSRFYHLKYKEVNKYQHKRALALTARKLVRLVYRLLKDNRLYIEPKALGLGGCFAPCLQ

SEQ ID NO: 253335 - protein, 354 aa, unidentified
MKRTTKYVGLDVHQATTSIAVRDEQDRVIAQTVVPTEAKALVEYFRGLRGTVHVAFEEGTQAQWLHDLLEPVVNRVIVCDRRGDSQRGNKGDAVDAAQLSAWLRQGRLRAVYHGSRERAKLKELGRTYGNLVEDATRVKSRLKALFRARGLKTPGRSVYDPAQRDEWLAKLAEPGARFRAEVLYGELAVLQRLHPQAAAALVAEARRDPAWRVLRTIPYLGPIRVALLLATLQTPWRFRTKRHLWAYAGLAVVTRTSAEYELADGHPRRRRRAPMTRGLNRNHNPVVKNILKGAATAAASRPGPLQDWYQKMLDGGMREELARVTLARKLAAIALRLWKTGAPYDATQLSVQAR

SEQ ID NO: 253336 - protein, 369 aa, unidentified
MNKQYTLEATLVASAKELKDQKTPKAKRIAVGTDVHLRGYQAARKVDNAAIGAVANFRSEAELLLYVDKQSEQAEEVVVVYEAGPLGYGLYRKLTARGVKCLVCAPDSSQQQRKRRKNNQIDARTLTSNLFNYLNGNEAALQLVRVPTEAQEQARLASRQHDQLVEERKRLGAKGNALLLSQGFGSCKNWWRPKAFSRLEQLLPAWLFEMLQTWVDLLRALDEKIQRAKAALTKRCSGPRPKGAGANSLVQLESEVLDWDLYAKGRKVACLAGMVPSEWSTGDDQRRGSITKVGVPAIRRIITEMVWRIIQFQPQYPPVQKWQEVLRGSNRTLKKKAVVAIGRQLMVDLWRMKTGRVTAEELNLVMVGA

SEQ ID NO: 253337 - protein, 370 aa, unidentified
MSVRRILAKTIDTDLEYEAIGIDLAKNCVSAALLTTDGEVVCIDRLDYSELEKSAQALSSTTFAMEPCTEMNYLVQKLEAWGHRCLVIGGKNVQNYVENHFSGQKTDLNDAQALAFLAQDTQLRTIKAKDVEQQKYASLTTLREQYIKQYRQTIVSLKGICQAWGLNISKGISGKARLKDLIENHAAFPEELKESLVDMVTHAQTAQKALNKITKTLEELAKSDKVCQLIQTIPGLGSICSCRLRATVGDIKRFKSPKDFPAYYGLVPRSIATGHNERKGKITHRGDRTMRSLMVQAAGSLVNMATKGKLKSKQLTKWILKKQKEKMPWGKLVCAVAAKLLRVVRAVLISNKPYNSKIAGVAKCSLPKGS

SEQ ID NO: 253338 - protein, 327 aa, unidentified
MFLSLDGKQGNRSTIVHLRMGYIAMLRWIGSQTDVPRQEWLFCGEHTGLYSIGLSDFLIGKGLEIWLENPNQIKLSSGIKREKSDPADSLAIAEYAMRFEDKCRLYEGKSKIYRSLKSLFNHRSRIVEIKKQLLTAVREERRVMSRNTGCRFVYEHTMAIIDRLSKEIKATEKMMKSLLEKSAEMKENYSLATSVVGISFVNAMAIIIVTENFTRFASAREFACYSGTVPFHNDSGKIKDRCHISRIANIKIKVLLTEAAQCAMVYDAELRDYTERKLKQGKDKRLIINNIRNKLILRVFSVVRNKKPYIREKSDENGLESMNVNMN

SEQ ID NO: 253339 - protein, 345 aa, unidentified
MKIVGCDLHTRYQQIAVLDEETGELMERRLEHANGEAKEFYASLSGPVRVGIEATGHTRWFERLLSELGHELWMGDAARIRASEVRKQKTDARDAALLLDLLLSGRFPRIWRPTAEARDLRHLLWHRQRLVWMRNAIGNQLHGLAMGEGLCRKKQLFTKKGRCQLQALKLDAWASRQRQELLVMLDQLDASLKQFDQAVNEQAAANPEAARLMTHPGVGPVTSLAFVLIVGPVTRFQRSKQLVSYLGLNPCEHSSGGKQKLGAISKQGNPMLRGLLVEAGHTAARMDPELRQDYQRLRLRRGGSVAKVAIARKLAVRMYWMLRREVNYTQLVRMQGSSRATLVQQ

SEQ ID NO: 253340 - protein, 471 aa, unidentified
MSKEAPVKRQLRRRAPKPRQSPAALERLHPHAAGIDCGSAEHFVAVPPDRDPTPVQSFPTFTGDLHRLADWLQACRVTHVAMEAPGVYWIPIFEILDARGFEVILVNARHVKNLPGRKSDVSDCDWLRDLHVLGLLRGSFRPADGIVALRGYLRHRTTLIESAGALVQRMQKAWVQMNVQLPLVVSDITGVTGLRILRDIVAGQRDPQHLAQHRDVRCHASEAEIVAALRGNYRPEHVFVLQQNLELFDTYQQQLAACDGALEAHLAQLAVIPAPPGSPLPAPRRRRKPKEHEPGFDLRTPLHQLTGVDLSQIDGIGPYNALRLLSEIGTDMARWPTAKHFTSWLTLAPQNRVSGGRLLNSRTQPSANRAAAIFRMAAMTLGRTQTALGAFYRRVAFRIGKPKAITATARQLAVLVYRMLKDHLVYIDPGAEAYEAQDRTRVVRRLRQRAEHLGFGLVNLSTGEVIEGAVS

SEQ ID NO: 253341 - protein, 419 aa, unidentified
MFKILRKNCCGLDVHKTWIFACIGITDPHGITHYKQARFSSFSKGLRELVDWLALYSCKEVCMESAGKYWIPVFNILEKSCLVTLAHPKYTKPQKGNKTDRKDAKWICDLFMCDMIKPSFIPPPDIRHLRDLARYRVKLTNCLAGEKNRAQNCLTVSNLKLDDVFADVFGKSARSITEHILAHPGEHFDVTPFVDGRCKHPIEEIQAAVDGAVSMEQAVKLRECLNHIDELQNHRLRIEEEMIALSAPHAETLKLLRTLPGFDSNPLTAIAVLGEIGGDMSVFPTAKHLCSWAGCCPRNDQSGGKIKSTRISRAGTFLKPLLVQIANALIRSRKHPEFAQRYRRIKARRGHKKAIIAICRMLLTAIWNMLSKLLPYSSDGFLEPIQTNHNKTLTVSQALHLLRSKGFCIQDDAPALTSG

SEQ ID NO: 253342 - protein, 376 aa, unidentified
MENDSTLYVGLDVHKDSITVAYALGTGEVELLGKIGTTKTDIDRLCKRLQSKARHIRIVYEAGPCGYGLYRQLVQEGFDCMVCAPSLIPKKPGDRVKTDRRDAIKLVRSLRAGDLSAVYVPSLEDEAFRDLARAWVSAKDDLKRARQRLKGFLLLHGVRYAGRADWGPAHRRWLSAYAFDSVWQQLAFEEYRRTIEDRLAQCDRLEAALREAVVNWRFYPAVLGLQTMRGVQFTTAVGMLAELGDLSRFAHPRQLMAWLGVTPSEHSSGDKRRQGSITKNGNSYARKLLVEAAWSYQHPARVSPEIQRRHEGIPKPIVDRAWDAQVRLCRRYRKLVARGKQKNIAVVAVARELAGFIWDISQLAMSLAVRPEVRMA

SEQ ID NO: 253343 - protein, 373 aa, unidentified
MAGNSQKLNEGELALYSMHLSSGYIPVGVDLAARVFQICYLNEKQKIKNKALSREAFLDFLKSPPFSQSLMVGFEACGGCNYWARFIEEQGHKYKIMPPSAIKSFLGKNKTDKIDAFGIFKGTICPSVRCIRARSEENQTLMNLLATREQLIKQQTQSLNVQRAMLYELGEICGEGAKKIDAATDKLKESLEKSQSEAISNFRMIAEPIKANRDSLAAQIKQIDLYLKQYAKNNRTVQNLMTIPGIGVLSAVTLHAVLGNPDDFPNSRHFASFAGFAPTVKGSGGEIQVGKIPHTGNRQLKKILYMCAIARFAQQSRKASSETEASKLTQLIDNPKISNKKIVSSIANRLARVAWTIAKSGQPFDAKKCRLLG

SEQ ID NO: 253344 - protein, 461 aa, unidentified
MARRNPGIPTPASPSSRGPALRITHPNAAGIDIGGSSHFVAVSPDRDDEPVREFRAFTADLIALADWLRACSVDTVAMESTGVYWIPLFELLSSRGFEVLLVNARHVKNVSGRKSDVLDCQWLQQLHSYGLLRGAFRPGDGVVALRAFARQRHALLRAQARAVQHQQKALVQMNLQLTSVIADVAGATGQAIVRAIVSGERDPMRLAALRNCRIKASEEEIALALQGHWRREHLFALKQALEAFDFCGQQLAELDAQIEAQLQRLQVTDDEPAKGRKRSVARNAPKFDLRARLFSMCGVDLTAIPGVDVTTALAVVSETGADLTPFPTGKHFASWLGLAPGTKISGGKKLSGRTLPSSNRAAQALRLAAAALRTSQSALGAYYRRLCARMDKPKAVTAAAHKLARLIYAMLTRGQPYTDQGQAYYEERYRERVVANLNRRAQQLGLQLVPLAGASPQTTTA

SEQ ID NO: 253345 - protein, 339 aa, unidentified
MKVSTLGIDLAKNVFQLHGVGCNDQTVLKKKLTRDKFLPFLMQLEPCLIGMEACASSHHFARVLRQYGHEVKLIPPQYVKPYVKTNKTDAADAEAICEAVARPNMRFVQIKTAEQQAILVLHTERNILIRERTACANSMRAILAEFGIIMPRTLSQLYKKIPEILEEYDNELSPFVRCSVARQLEHLQGVEDQITLIEQELSRWAKTQPACQRVMKVPGVGLMTATYLVASVGNGQQFHSAKQFAAWLGLVPREFSSGGKQRLGRISKRGDRYFRYLLVHGARAVAAVIERHKDNMPWLYRLLNKKAYNVAVVAQANKTARILWSMLVHHTEYRTLSVV

SEQ ID NO: 253346 - protein, 374 aa, unidentified
MANHNEVFIGIDTSKLRNAVAIAEAGRNGKVSYLGEIDTSEAATKKLVASLACKYRRLTFCYEAGPTGYGLHRHIESLGHSCIVAAPSLVPKKAGDRIKTNRRDAEGLARLLRAGELTAVWVPDARHEAMRELARARDSARQDLTRKRQQVSSMLLRMGLHYPGTRTWTARHRSWLANLKLEHAEHRFVLEELLVAERQAGERIGRLEQAIRDALGNWSLRDIVPALMAMRGIDMISAVTILAEIGDLTRFANPRQLMAYLGLVPSERSTGDAVRRGPITKAGNGRARRVLVEAAWAYRHPARVGFEKQASVAAAPRPAREIAWKAQVRLCKRFRSLTRKGKKSTVAAIAIARELAAFIWAIAHEVEAASAGTS

SEQ ID NO: 253347 - protein, 429 aa, unidentified
MEEVDEVELVVQRVAALDLGKATLEACVRVPHPSKPGRRMQEIRGYATTTAALLQMAIWLRQWGIERVVMESTSDYWKGVYYLLESEGFDCWLVNAREVKNVPGRAKTDRADAVWLTKVAERGMCRPSLVHPPQIRRLRDLTRYRRALVSDRSREMQRVEKLLEDAQIKISSVLSDIHGVSGRAMMEALIAGQRDPWSLARLAKGNARKKTDRLEEALRGFFTDHHATILQMMLDNIDRIGAQIAALDARIAEAIGPFSRPAAQLADIPGVDTVAAAELIAEIGVDMARFPTAAHLVSWAKFCPQTHQSAGKSRSKARGKGNPWLAGTVGRIVFSATRTDTFLGARYRRLARRRGKPKAIVAVGNSVLTIVYHLLSDPDARFCDLGPAHYESQINKHRRARDLATQLQALTGQRIVIPDGKAIITDNAA

SEQ ID NO: 253348 - protein, 410 aa, unidentified
MEVVYERCCGLDVHKQTVVACVIVPGAGREPIKEIRTFGTMTPDLLEFADWLNACGVTHVAMESTGVYWKPVWNLLEGQFQLLLVNAQHVKQVPGRKTDVKDSEWLADLLRHGLLRASFVPDRPQRELRELTRYRTTLVRERASEINRLQKTLEGANIKLGDVATNVVGASGRQIMQALVAGETDINLLADLSRGTLRNKLPQLQRALVGRFESHQRFLLAQQLAHLESLEELIEHLDGEVEARLRPFVDALDRLDTIPGVGRRTAQILVAEIGLDMRRFPSAVHLASWAGMCPGNNESAGKRKTGKTRKGDRWLRTALIEAAHAAGRTRSSYLGAQYRRLLTRRGKKKAAVAVGHTILAIAYHLLSRQTDYIDLGVTYFDHHDEQHVKQRLVHRLEALGYTVQLNPSAA

SEQ ID NO: 253349 - protein, 355 aa, unidentified
MSSEKYIGLDVHQATISVAVMDSQGKVVMESILETKASTILEFLAGLRGSLFVTFEEGTWAAWLYDLLKPHVTEVLVCNPRKIPLLKQGNKSDKIDARKLAERLRLHDLKPVYHGETGMRMLRELARSYLTVVKDLSRVMNRLKALYRSWAIPCAGRDVYYRRHRRQWLETIPEAGTRRRAEQLYEQLDMLQHLRQQARRELLAEGRKHTITAKLRRIPALGPIRSVLAVALIQTPHRFRSKRQLWTYSGLGLETRDSGEYHYVRGQVRRRKKQATIRGLNKDYNHDLKGLFKGAATRASVQPGLFQDFYQRSLAKGIKPTMVRLTLARKIAAITLTLWKKGEDFDIDKLNSQAA

SEQ ID NO: 253350 - protein, 450 aa, unidentified
MRKLLHMIYERVAGLDVHKKTVVATRMRVTEDEGVERETRTFGTTTPELLELHDWLMEWGCTHVAMESTGDYWKPVYNLLEGDFEVLLVNAQHVKNVPGRKTDVTDSEWLAELLLHGLLKPSFIPPKPQRALRDLTRYRSKLVGERTRIVNRVQKLLEGANIKLASVVADITGVSARAMLEEIAAGQTDATWMANLARGRMRAKIPELEKALTGLVGTHHRFLLTKQLTHIDFLDELIADISAEIVRQLEAMSQSPKEGGGNGVGNAVSGTDMTSSDQEAVPLTWTEAVVLLDTIPGVNQTTAEVMLAEMGLDMSQFPTHKHLTSWAGLAPGNHQSGGKRYSGRTRKGNRSLSAIMVQAAWAAVRTKDTFLKSRYHRLAARRGKKRAIVAIARSMLVSAWHILTHRQPYKELGSDYFDQRRKEAKVGYLTRQLEKLTGGTVRVELQTAAA

SEQ ID NO: 253351 - protein, 343 aa, unidentified
MTQYVGLDVSLKETKLHVLDEAGNRVWRGRCATDPTAIAAAVRRYAPMAARIGLETGPLTTWLWTALTAEGLPMICLDARHAKKALDMKVNKTDANDAEGLAHLVRAGWYREVRVKSRRAMLAKALLGARSQLLSMSLALENQIRGILKTFGRIVPKGAGGLFEKNVRALITDDAEITAVIMPLLQARQMARGKCAALDRRIIRSVQGDATCRMLMTMPGIGPITAVAYVAALEKPDTFKRSRAVGAWLGLTPRRFQSGEVDYDGHISRRGDRQLRALLYEAAAVLLTRVRRESALRRWGLMLWKRLGFKRAATALARKMAVVLHSMWKSGTAFNPTLSAVTP

SEQ ID NO: 253352 - protein, 356 aa, unidentified
MIYTGIDYHKRYSVACTLDAQGQKLHEARIDGNVPAAFAAYFKKLGTPSEVVIEACWNWGVLYDLLEDTAGVAKVVLSHPAKNRIIADAQIKNDRIDAKALATLLRGDFVARVHVPSRDVRQRKNVVRQRLWLARIRTMIRNRIHCVIDRHPLLERPAVKDIFSNQGKAWMKRAPLPPADRTLLDDDLAIHALLQTQVDALEKIIVADNTANPLAVRLQTLPGVGKILAPVLALEIDQIARFPTADKLCAYAGLVPTTHASGGKIAHGRMLPFCNRWLKWAFIEAAWVAVGCSDYFGAFYRKQRLRGKGANDAITIVARRMAIIAWKMLAQERDYTPQAPAATPAKSISPAALTKD

SEQ ID NO: 253353 - protein, 341 aa, unidentified
MRIVGGLDIHRRQITFDYCDERSGQVRRGRIAPADRMLLRRWLEANIDRAPAAFAVEACTGWRFVVEELQRAGIEAHLAEPADTAAARGPKRRAKTDRTDARHLRELLAGGRLPESWIPPEQVLEMRARLQLFLDLREEHTAWVQRVHAILLHHGAPAIAGDLLGADNRRRLQTADQLSAAGRQAVATALRMLDALDAELVPLRRQIAAFARRQPGCKALQAQYGVGEITAVALWAELGDTRRFSSSRQAVRHTGLDITVYSSDGKRPPGHLSRQGSPLLRWALFEAAKCAARPSSPDYAYYRQVADRLGGNRAALSVARKITRRAHHTLRALGDEALAPV

SEQ ID NO: 253354 - protein, 317 aa, unidentified
MTESVKVNVGIDVSKDFLDVHVGNVALRRVPNRSSGLSVLKRILSRYSVSLVLCESTGGYENLAVTYFQSLGYDVCVINPRQARDFARSMGRLAKTDRIDAQILCRLADVIDVSPERTRFVKPLTDERRQRLVSMVRRRRQLCDLMISERNRRAKTDSYGSESINTVLDFLTAEIARIDRDISAHVGACFSDISSLLQSFTGIGPVTASTLLGELPELGKLNRRQITALVGVAPFNRDSGYMRGRRRISGGRSGVRNVLFMAVLSAVRFNPVLKAFFARLVAAGKPKKVALVACMRRMVCILNAMLRDGSRFEVAPG

SEQ ID NO: 253355 - protein, 430 aa, unidentified
MQIIGCDLHARQQTLAILDTATGEVVHKTLTHEGNSVREFYSTLSGPVRVGIEATGSMKWFLQLMEELGIDCQVGHPATIRAAEPRRQKHDQRDAELLLKLLVENRFPSIWQPSRELLDLRGLLLHRHQWVRLRTRIQNALQAIALANGLRRGSSLWSASGQRAIASLPLATHTAQRRSELQAMYARFEAEIEQLNQRVLEQAGQRPTAGLLMTHPGVGPITALATDVFLGDAKRFRDGKALASYIGIIPREHSSGGRQRLGGLSKQGNPLLRFLWCEAAAHAVRRDPELRRFYRRKLVQKGVGKALVAAARKLGIRLWIMLRDQIDYHEFCRRGQRQQRNGDACAGMPGERYGAKSHRLIDEATRLPAGSSHNSSWSIVTEEMFGGQHRMDEAETARASWGDTSEKQYGHSDAIRVSRDRCVRAQKKHE

SEQ ID NO: 253356 - protein, 404 aa, unidentified
MGQVYVGIDWADDHHDIYITDDAAIELDSFSIPHSSEGMEKLMNRVERCCTSREAVLVAIESHHGLLIYALLEAGYLVYPINPKSMDRYRDRYRMSSSKSDTKDAMVLANILRTDLHLYKPLPRETAADARLRQLTRAHKSLVQQKVKLLNQLTSQLKSYYPVSLRLFSRLDHKITMAFLERFPSPEKADAASMEDLRRFFREQSYSHQWKVDSIYESLQQAGLRAPEEIEEIHQTIVLSLVTVLRSLVSEIEKLASKISHEFKANPAHEVFSSLPAGELTAARINGELGSDGTRYPAREYVQTAAGTAPVTRRSGKTVVVFFRWQCNKHLRAALQDLARGSVKRCPWARQYFAGQMRLGHKPSRAYRALANRWATIIWKMLQTGQCFDQSRLGKHLPKVPAIN

SEQ ID NO: 253357 - protein, 339 aa, unidentified
MQVTTVGLDLAKTIFHVHGVTEGGEVAFNRPLRRAQVLGFFERLSPCLIGIEACASSHHWARELSKLGHIVRLMPPMYVKPYVKRGKSDAVDAEAICEAVTRPTMRFVGIKSEDQQTLLSLHRARDFVVRQRTQLINMLRSLAAEFGIAIARGVARAIDFAKGIIDGKQSGLPELAQDVLRVLSRQLLDLHNRLGWYEITMRIQARLSRQAQLLQTIPGVGPVTASAVAATIGSGRQFRSGREFAAWLGLTPRNHSSGGKERLGKITKMGDRYLRQLIVVGMTSRVRQVANHPERADPWLTKLLQRKPVRLATVAMANKTARIMWAVLTRNEPYKPLTA

SEQ ID NO: 253358 - protein, 428 aa, unidentified
MAVSVHTDPSNEHTDHALPYQWFVGIDWGSQTHQVCVLDRERHRVGERSVEHEGIALAECAAWLTTLAAGEVHRVAVAIEIPRGAIVELLVERGFHVFAINPKQLDRFRDRHTVAGAKDDRRDAFVLADSLRTDRPSFRQVHVEEPHLLMLRELSRTEEALLTECRRATNQLREQLHRFYAPLLQLCPAADEPWLWDLLELAPMPAHAAGLTEAQVAGVLKTHRIRRVSAGDVLKVVQAPALPVAPGTAEAASAHCALLLPCIRVLAAQLQTCARQVESLLTALGTVEAPTAPPSDVAIIRSLPGVGRKITAWLFAEAAQPLAERDYQILRTQGGVAPVTKQSGKRRQVVMRRGCNPRLRNALYHMAHCVAQRDAYFASVYAALKIKGQSHGRAIRSIGDRLLRMLVAMLRNHTLYDPSWRQPVRMER

SEQ ID NO: 253359 - protein, 351 aa, unidentified
MNINHYIGFDVHKKSISYCVKAPDGKIVEEGRLRATHRVLREWAQQRTEPWHGAMEATLFSGWIYDTLKPFAGELEIGNPAMMKAIGAAKKKNDRLDARKIADLVRCNLLPSCYVPPAEMRELRRLLRYRNRVVDHAVQTKNKMSGLLMEVGAEYSKQRLHGKRYFTELMGELEEVPESVKDMLRFSRNTLEMFEATQRQIPDRLQKEPLLKKRVKLLQSIPGVGEVTSLTWALEVCDPRRFASIANAVSYCGLTSALDASADKQKRGPISKQRNPHLQTVLIEAAKLAPRWNLPLAELHEREVKTGHRNRATLEVARKLVAYLLAVDKTGKPFEIRNQPVGNAGEETKVA

SEQ ID NO: 253360 - protein, 323 aa, unidentified
MPSLSPTTNIGIDVSKETLDIALHETSTHWVVKHEFSEFPALVKSLLALNPSRIIIEASGGIENLLASYLATAGLPVIVVNPRQVRDFARATGQLAKTDRIDALVLARFGATLQPEVRQLKSAETQELEALVARRSQIVNMLTAERSRLLQARQQRRQSIVTDLKAHISWLEKRLDKCETDLSQLLRSSPIWRAADKRLQSVPGVGPVTSLVLIAELPELGHLADKQIVALCGLAPHARDSGKWHGKRTTRGGRARVRTALYMAALVATRFNPVIKIFYRRLLSAGKEKKLALTACMRKLLIILNSMVRNQTSWQPPRLLPGP

SEQ ID NO: 253361 - protein, 319 aa, unidentified
MSDTATPTAGIDTSKNTLDMAIHGQSNITHVPNTAAGWKILAATLATTGVMRVGIEATGGYERGVMGYLRGKGVVVTLLQPMQVKAFGSLHLKRAKTDRIDAVLIAACTNILGEQNRMTPDARFESLGDHLTFIEQIEEDIARFKTRLEHIHDKRLRRSVDASIRRERMRRLVEIKRLIAIIREHGDLSRRFELALSVPSVGERTALALLVRMPELGQVTREQAASLAGLAPFVHQSGKWQGQTHIGGGRSRLRRSLFAAAFPGAHHWNKPLVSLHTRLRARGASHTSAIVACARKLLIQVNAVVARGTPWEDRPVIVA

SEQ ID NO: 253362 - protein, 343 aa, unidentified
MQTITTIGLDIAKSVFQVHGVDADGQVVVRRQLKRRYVLAFFQKLPPCLVGIEACASAHHWARELQALGHTAKLMPPAYVKPYVKRHKNDAADAEAICEAVTRANMRFVATKTPEQQSCLTLHRARHLLMRQQTSVINAIRSHLAEFGIVAPVGRNGVEQLLGVVADSNDKRLPEVARACVAALGAQLRVLKVQILEFDRMIMAWHRSSEASKRLDQVPGVGPVLATALVASIADPKTFRSGRDFSAWIGLVPKQNSSGGKERLGNITKRGDRYLRSLFTTGALAVIRYAKIHGTRHRPWLTALLARRPTKVAAIALANKLARMAWAIMTKGERYKEPAALAA

SEQ ID NO: 253363 - protein, 347 aa, unidentified
MNFYNSTHQHYCGIDLHARSLYVCIINQQGETRLHKEIPANPDALIELISPYLDDLVLGVECMHCWYWVADFCDDHEIEFILGHALYMKAIHGGKTKNDRVDSFKIAALMRGGNFPLAYVYPRNMRATRDLLRRRTNLVRHGADLKAHVANTTSQYNLPPNKVNLKNVGAREQLNTTFHDPVVQRNINLDMAVLECYHRELSQVEWFLEKQAKKHQPAYFYLLKTIPGIGRILALTILYEIGDIQRFESVQKFASYARLIKCKAESAGKTYGTQGNKIGNAHLKWAFSEAAVLYLRGNSGAQQLLQRFQKRMSKAKALSALAHKLGRAVYFMLKNEKIFDEKRFLTS

SEQ ID NO: 253364 - protein, 360 aa, unidentified
MAQVRSWAGLDVHAAKVIAATIDGESGELRFQRLSGSTREVTAFCAGLPGPTRVAYEAGPTGFGLARELEEAGVGCVIAAPGKIARAPQDRVKTDRRDAERLVRLLIAGELHPVRVPTVPEEALRDLVRAREDLRGDLMRARHRVGKLLLRHDQRFEGNNWTQAHRGWLAKVRLVDPVAQMVLEDGIGMIDALLVRRDALERQMTALVPSSPWATEIARLRAMRGIDTLSALGLCAEICDFHRFRRPGQLMSYLGLVPSENTTGDRRRLGSITKSGSQHARRLLVEAAWHYRRPPRLGRELTRRQEDQPTHVRQISWQAQRRLHRTWRRLDGERGKRRTIVAVAVARELAGFCWAITTAD

SEQ ID NO: 253365 - protein, 404 aa, unidentified
MEGTAAGIDWASELHALCVVDAEGKRLAEGLFSHDEAGLRSLVARMQELGVERCAIERPDGLLVDRLTDAGLTVLPVHPNALKATRPRYEAAGGKSDGFDAFVLAELARTDSHRLRELRPDSDETRALRALTRAREDLVGARVRLANELRAQLDAFWPGAARVFATVDSAIALAFLERYPSPADARGLGERRLEGFLSRHRYSGRRPAGELLARLRSAPEGRAGALETEARRGAVLGLVAALRPIVDQIAELASQIAGAVRAHPDGRVFLPLFKDPKSTITAARLVAEIGDDRSRYPTSEALAADAGMSPVARESGKRKVAAFRWACDKRLRDAVSCLADSTRHHHPWAREVYARARSRGLDHPHAIRILGRAWLRVLWRCWQDRVPYDPALHGNLRRLRPTGG

SEQ ID NO: 253366 - protein, 346 aa, unidentified
MKHYAGLDVSLKETSICIVNEAGSICREMKVPSHPEDLVRALQDPTWRLVRIGLEAGPLSQWLFSGLAQAGLPVVCIETRHTKAFLKAQVNKTDRNDARGIAQMMRVNLFRPVHIKTLTSQHRRALLTARKLLQEKAVAIENDIRGLLRNFGLKVGMTGAVGFDVRIRELVDGRPELADITASLLAARQMLREELSRLHRKVLEITREDGVCRRLMTIPGVGPVVALAFTSTIDVPARFRKSKAVGPVLGLTPVLKESGESKRVGQVSLCGDGMMRGLLYEAAQVLLTRVKKWSWLKAWAMNVAKRRGVRKAIVALARRLAVLMHRIWSDGTEFRWTKDPLVQPSL

SEQ ID NO: 253367 - protein, 355 aa, unidentified
MNQEKYIGMDVHQATISVAVMDGRGKLIMECIVETKAATILEFIQGLHGSLSVTFEEGTSAAWLHDLLKPHVAQLIVCDPRKNALLKDGSKSDRIDAHKLAELLRLNKLNPVYHGEHGVRTLKELGRSYLTITQDLTRVMSRIKALYRSWAIPCSGTTVYAPRHRAEWLAKIVEPGVRLRAQRLYQQLDLLQPVRQQARHDLLVESHKHAAVKLLRQVPAIGPIRAALLGALLQTPHRFRTKRQLWAYSGFALETHDSGEYRMVRGKLRRNRERLTVLGLNDNHNHDLKNLFKGAAISASTRPGPLYDFYVALLEKGMRPTMARLTLARKIATITLTMWKKGVDFDANQLNRQAA

SEQ ID NO: 253368 - protein, 380 aa, unidentified
MGEMEDDMRSVALDLGSRIAFCEVSNGTVVARATVPQFESLQRWLGPKTPKARVAIESCREAWWAEKKLREWGHEPLVIDTTRSRKLGIGQHGRKTDRIDAEVLARAVEARLIPRAHVLSEHRQQLRFQMGVRRALVETRAQFTTTVRGLARAHGVRLPSASPYGFAAAVRDVELDEALRELVSPLLDVIAQLDMLIAKADATLEALAEKEPVTAVLKTAPGVATVVAAAFISVIDEAKRFRRAHEVESYLGLVPSEDTSGKRRLGAITKRGNSYTRTLLIQAAWAILRSKGDDPLARWGRAIALKRTKRVAAVAVARRLVGVLWAMWRDGTVYEAPKLGRAMAQGAEQQAQSALLRATALRRAARKPFYSSSARLRAGR

SEQ ID NO: 253369 - protein, 436 aa, unidentified
MRGCRCSMIMGFTKPIEHFNLQRKKVITMNTLYVGIDVSSKSNVVYLMLPNGDKHSNFSVANSHEGSTLLVKKIYSALTSHSLDTVLIGLEATSVYGDNLVYFLREDATLAPFNRKIHVLNPKQVKKFHDTYNDLPKNDYVDSFVIADCLRFGRINKEVYMGEYRYKALQNLTRARFFAVQNLVKEKQRFMNVLFKKYSTMTQEKVFSDAFSTTALAVYDEFESAEALANMDLHELTDFIIEKGKNRFPDPDAVAKAIQKAARSSYRLPKTVNDSVNQVLSISITSMKALESQIKKFDKAIKALMELLPNVLISIPGIGPVYSAGIMAEIGDINRFDNQASLAKYAGLAWKQHQSGGFEAEVTRLIPSGNRFLKYYLCEAAFSLVRCDKEYSDFYHLKYKEVNRCQHKRALALTARKFVRLVFRLLKDNRLYCPAK

SEQ ID NO: 253370 - protein, 442 aa, unidentified
MEILYRCVGGVDVHKKQVTVTARTPGPLGGARQETTRTFRTFYGELLAMARWLVAERGVSHVAMESTGPYWWPVWSALREVGGPGLVVEVVNAAHVKAVPGRKTDVKDSQWLAQLMEVGLLRGSFLPPEQVRQLRDLTRYQTKLTEERSREKQRLLKVLEAAGIKLDNVASDTFGVSGRSMLEALVAGERDPAVLAGLARGVLRGKTDDLRLALAGRFSAHHGQLVALHLARIDHLDQMLAQVKQTIGRLGPDPAQGLAAPFATQIGLLVTIPGIGERAATAVISEIGVDMARFPTAKHLAAWAGLAPGNNESAGRRRSGRRRKGNAQVCSILVEAAFAASRTRSRIGARYHRLHRRFGGRANPGAARKAAFAVAHTLIKIIWSVLAGGEPYTDLGDDYYTRRVDPQTRTRSLIAQLEALSGKKVVFCEHGDDPGGGQPRAA

SEQ ID NO: 253371 - protein, 336 aa, unidentified
MQVTTIGLDLGKRLFQVHGVDAAGTVMLRRQLKRRQVEPFFAKLPRCLIGIEACGTAYHWARRLGELGHEVRLIPPAYAKAYVRRNKTDPADAAAICEAVSRPSMRFVPIKSEAEQAIAAVHRVRDRLIGQRTMLLNALRGHLAEFGVVVSRGPAHVKELIEMLAEPGSVPEILRSVLLGLASVLARLERQIVLVDKQLMRWHRDNALSRRLATTPGLGPIISTAMAARVLQPQRFRRGRDFSAWLGLVPKQSSSGGQIRLGAISKQGDGYLRRLLINGAQAVLGSKRAKTDPWLKRLLDTKPRLVAAVALANKMARIIWAVMVRQTGFREAVATV

SEQ ID NO: 253372 - protein, 339 aa, unidentified
MALYTGFDLHSTNSYVGIIDEDGGRVWKKKLSNDPNLISAILKPFKKDIEGIVVESTYNWYWLVDLLMEEGYRVHLANPSKIQQYSGLKHGDDEYDSFWLAEMLRLKILPEGFIYPREQRPLRDVLRKRGHLVRLRTSLIVSLQNILARNTGTKMKTNHIKVLKEDRVTPLLVSDDDLSLAGSVSKDAIDSLTKQIKAIEVALEKKINLQRPYDLLLSLPGVGRVLGLTIMLETGPINRFADVGNYVSYCRKVPAGRFSNDKKKGTNNRKNGNKYLSWAFAEAGELARRFDPEARAYYDRKRKKTNAPIAHSALSNKLARAAYYVMRDGVPFMPKKAFG

SEQ ID NO: 253373 - protein, 409 aa, unidentified
MSKGCIRSSFLLFFLINKIFFMIKYSLGIDISMKMFHVCLSVIDNQQQIKVKACRKFTNNVAGFKELCDWIKKHYKQQDIPLHIIMEATGVYYEQCAMYLYKKGFTVIVVLPNKAKKYLQATGLKSKNDKIDAKGLAQMGAEKKLNPWQPMDDFYYILRSLTRHHESLQNIKTNINNQLHADNAGMYANKQVGKQLKNLIETIDKQIAEIEKSIEDHIASDSAVQQKVDGIIKIKGVGLMTVATLLAETNGFLLFENIPQIVSYSGYDVVEDQSGKHIGKTKISKKGNSHIRRILHMPAFNVVRYKVSPFLQLFNRTLQKHNIKMKSYVAVQKKILIIIYSLWKRDHAFNEEYYKGTTTRDEELVQPSRLSFTEAVQVAQKNSPETNQGYTRCTTVEVSSFAPSRLLQK

SEQ ID NO: 253374 - protein, 344 aa, unidentified
MLIIGCDFHSGFQQIAIFDNLTGEFQERKLLHPGEAAEFYRSQSGPVRVGMEAGAPCQWFRRLLSECGHELWVGDAARIRAAEPRKQKTDRRDAELILKLMLEERFPRIWMPSEEERDVRQLLMDRHHRMRRRTQVKNQLQALALNQGLQKGRKLWSAAGLDQLQQLPMMEHAARRRDELLHTVVELDAQIAELDVLVRRQAEGREDARRLMTHPGVGPQTALGMVLTLGEVGRFENAGKVASYLGLISGEYSSGNKQRLGHISKQGSSLMRFLLVEAGQTAVRGDEQLRRAYARLAAKRSRAVAKVMVARRLAVRLYWMLRNEWTYAELARHAGEPGSFCGER

SEQ ID NO: 253375 - protein, 457 aa, unidentified
MKYAGIDIGKEKHWVAIVEDTGEVVVKSRSFTSDHEGHEALVELLQRHGVVRVALEATGHYWKNLFIRLVGEVEVALVDPSRTHHFAAQEGRRAKTDAVDALGIARFCAVHKPEASGLPDAVIETLRELVRLRDRLVQDKGDRLRQLHRALDLTFPEFPKIVSIDSLLAWTLLDAFPTATAFAKAKQNEVAGLVFDGRQRVGKRRAVALRRAAKKTVGAYQTEVWAMQVRMYVEDLVLFDKRIRALDERIERSLDDHDVGRLITTIQGVGTQTAAHILSAAGDPRDYDSAKTFAAYAGITPRTNHSGKRAPRRAPICRKGSAELRKKLWMPTLTAMTINPWMTAFAERLKSRGKPHKVIRVACMRKLMTAVYSVAKSGEPFVPRVPIFLERSRHEVPVSQGAAASFVAGGSSPGGLRSRCRTARLPHRPSGSDAAREPSTVRASSRRSRRQRQRPRR

SEQ ID NO: 253376 - protein, 366 aa, unidentified
MAACGIVASAVADGRPIDPRAFEPVGERGSSSALPSKPEQSPGPRASPLKQGWDPMDAIYVGIDVSKDRLDVHVRPAMQVFNVPRTEKGIAALTARLLELQPKLVALEATGGFEKLVIASLAGVGLPVVVVNPARVRNFSKSLGKRAKTDAIDAAVIAHFVEATKPHIRDLPSKDTLKLANLITRRRQVVDMITADSQREHRADEDGKASIARTIAWLRLELARIDSDINDQVKGSEMWLADEELLVSVPGVGNTTARTLMSHLPELGKIDGRKLAALVGIAPFTQQSGAWRGKSAIAGGRTAVRSALFVVAMTATRFNQVFKEAYNALLARGKPKKVALIAIARRLLVTLNAIMRDRKPWQLKEA

SEQ ID NO: 253377 - protein, 347 aa, unidentified
MNQVTTIGLDIAKSIFQVHGVDAAGQSVLRQRLSRSRVLEFFGKLPRCLVGLEACASSHYWARELIKLGHEVKLMPAQYVKPYVKRGKNDAADAEAICEAVTRPTMRFVGVKTIEQQSIMMLHRVRRILMRQRTQLSNALRSHLAEFGIVSPIGREGLDRLLKIVADTDDGRVPAEARVSLEMLAAQLEGVKAKILENDRRIIASARATEVGRRLLEVPGVGPVLASAFVASVANPAIFKSGRDLAAWIGLVPRQNSSGGKERLGGITKAGNGYLRQMLVVGAMAVIRYAQRNSTRRPWLVQLTGRRPTKVAAIALANKTARTVWALMTSGERYRDPKVIQAVSATA

SEQ ID NO: 253378 - protein, 388 aa, unidentified
MAQVNDLSRSLASFEQSGTLVVVLEMSQSSWLAAGVVPGVERRPLKKISPDPAALLRLLERWRDQAVRAGQTVTRAVLAFEAGRDGFWLARWLRARGVETYVVHSTSVAVSREHRRAKTDRLDTEMLIRVFLGWLRGEPRHCKMVAIPTLEEEDAKRPSRERESLVGERTRIINRMKAALIRLGIRGFKPELLKAPERLEAMRTPEGVQIPPNMLDELRRDMARLAWVREQINAIEQARLGRLEQAPARGPDAMVRLLTRVVGVGVETADMLVQEVLSRNLRDRRAVARYAGVTGSPDESGAKRRERGLAKAGNARVRRGLIQLAWRFLRFQKESTLTQWYYARTEGAAGKRKTTMIVALARKLLIALWRMVTTGEIPAGIALRTVAA

SEQ ID NO: 253379 - protein, 410 aa, unidentified
MSIPTISSTTRFFGVDLHKHFIYIAAVNSFQEIILKPLKKSLEEWPAWARDHLLPTDVLAVESTTNTWDFYDGIVSLVASVQIANAGKLPWITKSRVKTDKHDSIKLAKLCAAGLIPQVWIPPVHIREARCLLAHRRRLVGIQTMTRNRLQSLLHRHMLELPAGEPFSNKNLPWWDTIPVSPVEKILLRHYLDILDHLKPLIGQLDAQIASLSDSPEWRDLMTFALQIPGFGVTLGMTILSAIGDISRFESPKNLVGYSGLGASVHASGETFRQGRITKSGRRDLRTALIEAAWAAVNFDPYWKGEFDRLSQRLVKGKAIVAIARRLLVVLWHVLSKRQSYRHTADEKIAVKMMLWSEKVRKHNRQAAATRLFVRRRLMTLGVGKNLSRFTYSKKSRVLVSEEEASASMA

SEQ ID NO: 253380 - protein, 317 aa, unidentified
MEMTGRIVGIDVSKDRLDVAILPEDSTLVARRDGKGLAELCEQLRVLEPMLVAIEATGGFESVAAAALASAGLPVVVVNPAQVRHFAKAIGQRAKTDPIDAAVIARFAQATKPQVRALPDEATRLLADLVARRRQIVDMMAAERQRRGRTTRRRLLRSIDRLLTALQKELSEIDAEIDASVRGSPMWRESEDLLASVPGVGPVTARTLIAEMPELGTLGRRQIAALAGLAPFVRQSGQWKGKSMVAGGRKSVRTALFMAALVAGRHNPVLKAFRRRLIAAGKPKIVAVIAVARKLLTILNAILRHRRPWNATLVEAS

SEQ ID NO: 253381 - protein, 412 aa, unidentified
MKDLLEISCGLDVHKEKIVACILTGPLGKPTHSEIREFTTLIPDMIALRDWIVSQNCHHVAMESTGIYWMPIYEILEDAFSGDITLLVVNARHMKNVPGKKTDMRDSEWISTLLRAGLLNGSFIPEKRIREFRDLNRYRKSVIHDITSQKNRIEKFLQSSGFRLSSFISDIFGASGRNIILHLMEHGQIDKAALDSCLKTKTRNRIDEILMSVNGTLSEHQKTFLKILMTHYDSLKEHLTEVETSLEEDMAPFTLQVEQLNSIYGISTTASCAIIAEIGIDMKPFKTAEHICSWAGLCPGNNESAGKRKSTSVTKGNPYIKSMLCEIAWVIAGKRNTYLSAWYWRIKQKKGAKKAIVALARKLLVIIYTMLKQGTLFDESCFETRRKNCEQKQLSRYIRELEKHGYHVEAQS

SEQ ID NO: 253382 - protein, 323 aa, unidentified
MTVYLGIDIASKKFDVAELCDGNYRCKAFENTSAGFLALYKWLGQSTMPDIHACLEATGDYGTSLATFLYENKIKVSVVNPARIKGFGASELSRTKTDKADSKLIARFCKAAAPDGWKPTPAPVRKLQALVRRISALNGMLRMECNRRENADANIQASLDRIISLLKTEIEVVRQEIKDHVKSDDELKKQDALIQSVPGIGAVSSNLILSFMSGKGFRKAKEVTAYLGLNPRHHQSGSSVRGKTRMSKMGDARLRSALYMPALVALRYNPDIKAFGQRLLLAGKPRMLVVGAVMRKLIHIVFGVLKSGTAYSSRIAVHSVVTS

SEQ ID NO: 253383 - protein, 355 aa, unidentified
MESTKYVGLDVHQEAITIAVMNSAGKLIMESIIETKTNTILQFFQGLRGDVHVTFEEGTWAAWLYDLLKPHVTKVVACNPRKNALLKEGNKSDRIDAKKLAELLRIGALLGVYHGENGVRTLKELSRSYLTISKDLGRVMNRVKALYRSWAIPCAGTQVYAPRHRSEWLGKITEVGVRRRAEHYYQQLDALQTLRREVRKDLLLESRKHNATKLLRQVPCIGPIRAAQLVALMQTPHRFRTKRQLWTYSGLGLETRDSAQYRYVEGQLQRSKKPQQLRGLNSNHNHDLKNIFKGAATMATVSAGPFHDFYEGLLTKGMQPTMARLTLARKIAAITLIVWKKGARFDPEHLKQQAA

SEQ ID NO: 253384 - protein, 345 aa, unidentified
MPIVGGLDIHRKQITFDYLDTGTGQVQRGQISPADREYLRAWLARFAGREDVAFAVEGCTGWRYVVEELAAAGITAHLAEPADTAFARGRKRHAKTDKTDCRHLRMLLAEGRLPECWIPPGRILEARALLELYHDLRAEHTAWAQRIHAVLFHQGAPALGEGTLRTESGLAALRAAAAAYLSPAGQLQVATALEMTEALEARLHELRHQLLDAARHLAGAKVLAARLYGVGPVTALAITCWLAGAGRFSSSRQAVRFAGLDVTVYSSDRKGPPGRLSRQGPPVLRWAVYEAGKTHARASAPDYRYYAQVKDRCNGKRAALSEARKILRQAHHILAELGDDALAAA

SEQ ID NO: 253385 - protein, 373 aa, unidentified
MSFFVGLDWAATTHAVCVITETGTVRWRGTVPHSAAGLAELIQRLRRLGPPPTLPVALERPSGLVVDTLLEAGFPVIPIHPNVVKATRPRYSAAGGKSDPGDAYLLADLLRTDGHRFRPLQPLTDETRALRALVRGRDDLVIQRVALANQLRALLERFWPGAAAIFADVDSPIALAFLTRYPTPPSAERLGERRLAQFLRRHAYCGRRAPAELLARLRTAPCGRTGDAETEASGELVHAFVAVLTPLIAQIQQLSAAIAAALDQHPDGPLLQSLPRSGQVNAAQLLAELGDDRARFPTPEQLAAEGGVAPVTRASGKHYGGAFRWACNKRLRQALTTFANNSRHASAWAADVYARAQARGCDHAHAIRILARA

SEQ ID NO: 253386 - protein, 388 aa, unidentified
MQVAVDQPQARTAIRTDLGAIFVSLELSRSTWLTTSLSPGGGEKMSKHSVRVGDVAALLARLAQLREKARARTRQSFPIIVIQEAGLDGFWIDRVLQKEEIESHIVDPASIATSRRRRRAKTDKLDGESLVRALLAYKRGEPRVCAMVRVPKPEEEDRRRVCRERKTLTAERVGHVNRVKGLLFSQGIAGYEPMRRNRRERLEELQTGDGRPLPEHLKAQVRRELDRLELLLEQIKAVEAERDVMLAEEHAVAPAPAAMLLDIKGIGPEFAAILWSEGLFRHFNNRRQVAAYAGLAPTPWQSGSVDREQGVSKSGNPRLRTTLIQLAWLWVRHQPRSALTLWFEERVRHNGGRLRKTTIVALARKLLVALWKYVTAGVVIDGAAMKAS

SEQ ID NO: 253387 - protein, 360 aa, unidentified
MSNSIVHDDPSVKVIVGVDTHKHEHVAVAINGLGARLATARVAANQAGYAELLAWARQLGTIEAFGIEGTGSYGVGLASFVRRQGCRVVEVNHCDRRKRRNNGKDDTRDAETAARSVLAGIATAIPKTADGAAEMVRQIKVARDTAVKARSAAIITLKTLIVNAPDALRETLEPLTDRQLIDRCAALRPGDIIDPTASVKHALRALATRWRTLSNEIATHDDVLDTITKAAAPTLHDAFGIGTDSVAEMMIVAGDNPTRIRSEAAFAKLCGACPVPASSGVTNRHRLFRGGHRQANAALYRIVIVRMRWHQPTIDYVRRRTAEGLSKKDIIRCLKRFVAREVYHALIDDYWVGAASAEAA

SEQ ID NO: 253388 - protein, 370 aa, unidentified
MLSRRVANDEPDLLELLTDVLALGETVAWGIDLADGGAALAIAVLVNHAQPVHYISGRAIHRASESYRGEGKTDARDAAVIADQVRIRRDLHPLRVGDDTVTDLKILTGRRADLVADRTRTINRLRAQLSGIFPGLERALDLTNTGPLVLLTGYQTPAALRRVGKKRLETWLRNRKVLRADRLAETALDAAARQHTSLPGEKLTAQMVHTLAAEVLALSQQVTEVDKAIEARFRDHRDFAVITSMPGMDIILGAEFLAATGGDMTAFGTADRLAGFGGVAPVPRDSGKISGNLRRPRRYNRRLQRVFYISALFSIRHCDDSRRFYERKRAEGKRHIQAVLALARRRVNVLWALLRDGRAYEPLPPTPLAA

SEQ ID NO: 253389 - protein, 384 aa, unidentified
MPDVSSNAPGVVRMRAALDVHKRTIMCASQPDDPRAGELRLQEIPNTERALRALIRRLGGAEGLVVCYEAGPCGYEPYRLLSEMGVACDIVAPALVPVAPGARVKTDRRDAKRLLVLHRAGALKFVHPPTPAQEGLRDLVRCREDLVCARRAARHRVAKQLLRHGHIFREGKKSWTKIHQAWLRRQRLADPLAQSALEHMLAHLDALDAQIAVLDHQLDKIAQREPWSDPVRWLSCFRGITTLTALALLAELGDFRRFGTARELMGFLGLTPSEYSSGEQRHRGHITLAGNTHARRLLIEAAWHYQHAPRVSQRIAAVQPHVPPDVAARAHSAQVRLHHRHRSLTGRGKRSTVTNVAVARELAGFIWAAMTRQPLRDPEVNAAA

SEQ ID NO: 253390 - protein, 494 aa, unidentified
MKAKACKAKGKHSNWSKRGVKIAAKRGTEGMEIVNPHAGGIDCGAQEHYVAVPPQSVEPGEPFVRCFSAFTHGLDALVEWLKACGVTTVAIESTGVYWIALCQKLEAAGIEVFLVNARHVRHVPGRKTDVKDCQWLQRLHSFGLLSASFRPENTICRLRSLQRHRLNLVSTAGAEIQHMQKALQQMNLHLHHVVSDISGVSGLRIIDAILAGQRDANQLAKLRDHRVYKSTLAQMEAALVGDYRPEHLFVLGQSLQAYRFYQARTQECDAEIEGLLQQLAERFQSSSALGAGLSQPEVPTDAPSQNPPSTKRKVKRKPQANEPKIDLAGYLRRICGVDLTQVIGLNVLSVLLIVSEIGVDMSKWRSAKAFCSWLGLCPRNKISGRKVLDTRTCKVINRVATTLRLAAQAVGRTNTALGIFYRRKKAHLGPAKATTATARKLACLVYHLLKYKEQYREPDPATYQLKVQKTILAKIQKQAAALGYKLLPNALVPA

SEQ ID NO: 253391 - protein, 338 aa, unidentified
MRDFFVGVDVSKAELVCRVLDEKGQERGKGSFANGAAGFRKLKKFLLGLDIDGRFHVGMEATGVYHRNLALFLYKSGERLVPGVFNPASVKAFGQSRMSRTKTDGQDALILARYTLELFRDGALRPWEPERPEVAQLQQLVSRREQLVSMKVSEQNRLHALEEDGESLPFLVESVRDEILHLEDRIREIEKMITRHMEGHPNLKADKDLLVSIPGIGQITAAAWLGHLGDLSRFEKPSQIVAHIGIAPRERQSGSSVRGKPQICRTGLKELRCALYLPVMAAATRLNPVLKSFYERLVTSGKRKKAALIACMNKLVHIIWAIMKSRRPFDPNYALERN

SEQ ID NO: 253392 - protein, 357 aa, unidentified
MQTNKHSSLDFTGQTIFIGLDVHLKNWAVTLHSEEFELKTFSQPASAAVLVNYLQDNYPGANYKAVYEAGFCGFTVQRSLASKGIECEIIHPADVPTTDKEKRQKTDRIDSRKLAKLCKNQDMDGIYIPSIEQQEERNLLRTRQKLVCDQTRVKNRIKSYLRFQGVEFEEFEGRQWTQKYLKTLRDTSFSTNAGTIAFRAYLDELEYLQQQVKKLDLQIKELSQTDRYKENVALLTSVPSIGLISAMVFLTEIIDINRFIKFDDLCSFFGLIPDCHSSGETEKVGHITKRGNQQLKTILIECAWVAIRKDPALLQCYKELLTRMNGNKAIIRIARRLLRRIRHVLMNKEPYQTGLLN

SEQ ID NO: 253393 - protein, 386 aa, unidentified
MIIIGVDPHKSTHTANAVDAATNRSAGSLRIDASFVGYRQLQRWAAQFGERQWAVENARGLGRHLAQWLAARGEHVVDVPSTATARVRELSRGGRRKNDVIDAAAAAAVAALQGDASTVVTEDASAVLALLDERRVNVITQRTRLVNQLHAVLRDLLPGGARRDLTATAAAQLLARVRPAGPVEAARKQLARDLVAEIRDADQRLNTLTSQIGAVVADTGSRLTGVDGVGPVVAGRPLGRVRGASRFPSAAAFASYCGVAPVEVASADRARHQLPRGGDRQLNLALHIVALTQVRMRGSAGRAYYDTKIAAGKTHNEAMRCLKRRLADHLWRLMIADDRRAGTGPGGHSGATRSSSAAGSTPNASTSDKPLPGPVHDDSTSTRPAA

SEQ ID NO: 253394 - protein, 358 aa, unidentified
MKSIGMDVHSKQTAFQVVDEEGRIVDRGKVDTMAEALQAVVRRHGLNGVRVALEASTPAFWIRDALVSAGAEVQVTNPYKLRLIAESRQKTDENDAAILAELLRCGGLPRAVYVPPPAIRQLREQLSLRRQLIRIRTQVINGAKASMRRRGERYTARTFHTAISWKDQDKALSVVGPLQGLWRQVEEERLRIEKKLNKEWQNDSVIQRLQTIPGVGPIVAYTLVAALGEIDRFKSAEQVSSYAGMIPTERSSGEKVVRGSITHQGRSELCGAMVQAAWAVLRTKRPEAEGLQKRFYKLMFKRGSQIAIVAMARKLLTIAYQVWKSGTVFDGNRVGKQTKPMARGKDRARVACGADATA

SEQ ID NO: 253395 - protein, 354 aa, unidentified
MDTTPAVAKSVSTPQAFVGLDVSKDTLDVCLLIESKRHEKQFANDGAGHRQLLRWSHSLAKESSCHFCMEATGPYSQSVALLLVEQEQLVSVINPARIRFFGLAQNQGNKTDKADARLIADYCRMQCPPPWRVAAPEVRLLQEMVRRLHALSDLAAQEKNRMQAPGQCKTVLASSKRVVTALEKELLRLKKEVRSHVKAHEDLFRDSKLLQSIPGIGEITSWDILAEMPDVQEFDSAQSVAAYAGLAPREQRSGSSVRKQTQLSKRGNSRLRKAFYFPAVSAMTWNPLVKAHYERLREKGKPKMVALAACMRKLLMICYGVLKRQKPFDPKWLSHASSQSSSELAVSSNLLPVR

SEQ ID NO: 253396 - protein, 412 aa, unidentified
MSNPLLVGIDVHRKTNTVCLMDRQGREIGPRFTVDNNRPGTEAFIQQVAQQVVAGNFDAIQIAAEATGWYWWHFFRTLDQDPFLNQWPLELYPFNPRLTANFKKTYVDLDHRDPIDAFVAADRLRLGRDLPAPFHYEERYFPLRLLTRYRYHVVHNLAREKAHCLAILYLKASEYTRLEPFANLFGAASRAVLQEFASIEEIAAIPFDKLVEFIDCQGKRRFPDPTENARKLKRMARDSYPLPEALQQPINLLLGLSLHHITFLEGQGKRLDTAIAERLELIPHTLDTIPGFGPVFSGGIISEIGGVERFDYDQAKVAKFAGFKWRKHQSAEFEADESRLTRTGNRYLRYYFCEAANAVRMRDVEYAAYYERKYHEVRQHQHKRAIVLTARKLVRLVVRLLTTNQPYRPRRR

SEQ ID NO: 253397 - protein, 314 aa, unidentified
MGKSTPLFVGLDVHKDSIAVAHAKGGRADPPVFVGAIGTRQADLDSLIRRLQGKASTLRFAYEAGPCGYGLHRYLTGKGLACEVVAPSLIPKKPGDKVKTDRRDAVELARLLRSGDCRARDAARVTMKDAKLRLKAFLLRLGRHYVGRADWTAAHKRSLAKVVCPTPAQQIVFQELLRAVDEQVDRLQRLEAELKELAPHWRLFPVVQGLQALRGVQWLVAITVVAELGDLTRFDNPRQLAAFVGLIPSEYSSGRTRRQGGITQSGQRARPPRADRSGLGLPVSREGLRPHSAADRHAAEAAARHRVEGAGPPL

SEQ ID NO: 253398 - protein, 413 aa, unidentified
MVKREKIELVKRQRIFVGIDIAGSKHRARFIDNMGEEQIKPLSFFNDREGLEKLERRVNEIPGIGDDIIFGLEPTGDYWKPVAQYLREKGYPVVLINPYHLKRTKEIIDNSQDKTDDKDSYLIADLTKQSKYFFPVIPEGVYAELREVSINWKRTSQQLARLKCHLSNFLAKYFPEYKGIFSDILGKTSLYILKHFPLPEDIERLGINKLYRVMKKVSKGSIKEGKIQLLYEKARTSIGLKGGSQTAKVLLKEVLSDIEILKKRKEKLTKMMDELLYQSGYLKNLLSIPGVGIVTGSLFLGEIGDPDNYERASQIEKMAGLNLVENSSGSMKGEKKISKRGRSTLRYVGHLVTTVAIGKSPEIKALYRYKVEECKKEKMKALTGLSAKMLRIMFAVCKNKTFYKHEEITRYFR

SEQ ID NO: 253399 - protein, 332 aa, unidentified
MHKESWHVTVRSDGEERFNGRIPGRYQSLKMVLERYRDLRIKVAYEAGPFGFWLLDRLVLDGIEAIVVPPSLIPIESGNKVKTDKRDSRKLATLLEKNMLKRVYVLTREEREHRDLLRTRRQIVDHRNNVARQIKSKLMFYGISSPFTSTTRWSVQYVEWLKTITFETTYLKEAFDLLIELYENLTRQIAKINRNVVALCRDKKYRQKIKLLCTAPGIGKLTAIELLVELQDITRFKSAEEIASYIGLTPAEYSTGERTRQGRITRCGNKRVRTYLVESTWVLITKDPYLRAKYLRLKNLRGGKRAVIAIARKFLIRLRRVLLDNVPYRMAA

SEQ ID NO: 253400 - protein, 401 aa, unidentified
MMSGAEKVLPESTPVGVRLRLRRLPLILIQASSAARCGGMVARPKLHPHKEETWMNFYTRQHKHYCGIDLHARAMYVCILDQSGTKLVHKNLPTTPEAFLRVIAPYRDDLAVAVECIFTWYWLADLCAKEGIAFVLGHALYMKAIHGGKAQNDKIDAHKIAVLLRGGMLPQAYVYPAEMRATRDLLRRRCHLVRKRAELLAHIQNTNSQYNLPEIGKKLAYKANREGVEEHFPEPSVRKTIEVDVSLIDHYDQLLGEVELYITRTAKAHDAQTFARLQSVPGVGKILALVLLYEIQDIARFPRVQDFVSYCRLVKCAKESNNKRLGTSGKKIGNVHLRWAFAEAAVLFLRQNQPGKEYFAKLERKHGKAKALTVLGHKLARAVYYMLTREQPFDLQRFVAA

SEQ ID NO: 253401 - protein, 449 aa, unidentified
MREPQEIEDEEHEQTWERVAAIDVAKASGMVCTRVAHPSRPGRRLTKVWEVPATTGAISELAGQLAGLGIQKVTVESTSDYWRPFVYLLQAGGLSVQLVNAREVKNVPGRPKTDRLDAVWLAKLTERGMLRPSFVPPAEIRRLRDYTRLRADLTQERARHYQRLEKLLEDALIKVSSVASKLDGLSVRDMLEALIAGERDPAVLAGLARGKLKAKHGALVEALAGRFDDHHAELARMLLDQIDALGGQIGTLTARIEELLAAIPAAHGVDADGTTGPGAGSGPDAVVLPAVARLDEVSGIGPGTAQVIIAEIGLDMGIFPTPGHLVSWAKLSPRTLQSGATRRAGKTGKGNPYLKGVLGEAAAAAAKTDTFLGERYRRLVKRRGKLKALVAIARSILVIVWHLLADPTARYHDLGAGYYASRIDKDKKARNHIRQLQALGFAVTLTPAA

SEQ ID NO: 253402 - protein, 378 aa, unidentified
MTAEAVDDVVDGARSSASKCHRVVAPKRTTLRGAVQMEISTIGLDIAKNVFQVHGIDAAEKVVVRKQVRRGQVLAFFEALPSCLIGMEACATAHYWARELTRLGHRVRLMPAKDVKAYVKRNKNDAADAEAICEAVRRPTMRFVQIKSVEQQGRLMLHRARDLLMRQRTQVINALRAHLAELGIVAAQGREGIKELLKIIANEEDARLPVDAQASLIVLAAELQAMQTMIGSIDKRIMAQHRSSEASRRLESIPGIGVTGAAAITATVPDPKVFRSGRDFAAWIGLVPRQDSTGGKQKLGPISKRGDRYLRRILVVGACAVLRYARQQPQKYPWLTQLLARKPFKVVAVALANKMARIAWALLAKGGTYRAPALAAAV

SEQ ID NO: 253403 - protein, 367 aa, unidentified
MKDCSTVVGLDVHKNSIQIVTAETDGAMEVRHFGRIGGTMDGLDKAVRKLASKGSTLRFVYEAGPCGYEIYRHLTGKGFSCKVVAPSKTPKKSGDRIKNDRRDAETLARLERAGELTGIYVPREEDEAMRDLTRAREDAVRALRIARQQLAAFLLRYGKRYVGKASWTPCHLRWLSDVSLPHPAQQIVLQEYILAVTGCTERTTRLMEQITKLLPEWRLFPVVKAFQALRGVAPIVAATTLAEIGDLSRFPNPRQLMAYLGLVPSEDSSGESTHRGSITKTGNGHVRRALVEAAHAYGFPARVSRHLLQRQEGLSEPVRAIAWKAQVRLCGRFRRLTARGKLRTKIVTAIARELSGFMWAIAREVKV

SEQ ID NO: 253404 - protein, 341 aa, unidentified
MWIIGVDYHPSMQQIAWVDTETGECGERRLAHCAEAEQFYRELKQRGVSVRVGMEATGHSRWFERLLAELNFELWVGDPAQIRAKQVRKQKNDRRDAAHILKLMLEDNFPHVWVPTAENRDLRQLVWHRHRLVGMRTRVMNQLQAIAMNEGVRRKRGLWSQQGRAQLESLSLPAWTSRRRQELLELLDQFDPSIDQLSEAIEQEAERWPEGQRLMTHPGVGPITALAYVLVLGSPDRFRCGKQVGSYLGLIPCEDSSAERWRMGHISKQGNALLRYLLGQAAQSVARCDELWRHQYAHLALRRNRAIAKVAMARKLAVRLFWMWRRGWDYQQLKKFGSHVG

SEQ ID NO: 253405 - protein, 403 aa, unidentified
MNQPNNEVRILPQVEKACGLDMHKDKIVCFISDKNGENQHTEEFRTFTEDLFYIRDTLLKHGVSHCLMESTGIYWVSLYGILTEAGINVTVANAQHIKQIPKRKTDRKDAKWLCTLVLHGLARHSFIPGTIQQALRELCRNRLFYKQGQSKTKNRMIKILERSNIKIRSVASSISTQTTMGIIRLLAQGCTDVNALVNCSKGTLKTKKEQMRKALQGKLTLVETQMLQMLVADVDHNQKQIDMIELRIKELTNEHYKDVAGCLFSISGIGEQSAQVILSEIGDNMDYFPSADHLTSWCGLAPGNNESAGKRKSTGVKKGNKYLRVALIAVAWAAVRMKNSYWRALFAQLKKRMKGQKAIVAIARRLLKVIYKTIKQRTTYQEKGIAHFLELQQQRYTLQRAKL

SEQ ID NO: 253406 - protein, 412 aa, unidentified
MIVVEQRCAFLDVHRDTVMACARLPDGAGGRREEMHQFATTSKALVELGGWLVERGVTLVGMEATGIYWKPVHWVLEDVIERVWVINARHMRNVPGRKTDVADAQWGAQLLEHGLVRPSFIPDRRTREERDLTRYRKVVIGDRGREVQRLHKVLEDAGIKLASFTSSVLTKSGREMIEALIAGQRDPAVMADMARGRMRAKIPELTDALAGRFNEHHAMLCATMLARVDQADATIATLTERIVELQHPHEAAVQLLIGIPGVSYRTAQVILAEIGTDMSRFPTAGHLASWAGMCPGNNESAGKHRNGHTRHGSRWLETALIEAAKAASRSKNSYLSAHYHRIRGRRGTAKATVAVGHSILVICWHLLSTGETYTDLGGDYFDKRRTSTAHQRRLVAQLEAMGHKVTLEPAAA

SEQ ID NO: 253407 - protein, 367 aa, unidentified
MNQIIRIGMDTSKSVFQLHGVNGAEQPVLRTKLRRREVLAFFAKLAPTQIGIEACGGAHYWGRALAWLGHEVKLLPPQYVKPYVRRNKNDAADAEAICEAMSRPRMRFVPVKTADQEAAQMLLGMRDRLVRYRTQLANAIRGYAAEFGVVAAKGLDKIEPLLARIAADPAVPELAKDLFAAHGREYAQLKVQLREIEAKLKAWHRHNELSRRLAEVPAVGPIGACVAAIKVTDPHAFRCGRDFAAWVGLTPKDHSTAGKTRLGVITRAGDEMLRWVLVAGSTAAIQQVRKGRGNPSPWLLDLVRRKPPKLAAVALANKTARILWKLMVSGERYNGAEDRARARRGASLNGGCAPRHSLTTITATMEA

SEQ ID NO: 253408 - protein, 341 aa, unidentified
MQVTTIGLDIAKNVFQVHGIDVAEKVIVRKQLRRSQVLEFFKTLPRCLVGMEACATAHYWARELTKRGHQVRLMPAKDVKAYVKRNKNDAADAEAICEAVRRPTMRFVQIKSAEQQGGLMLHRTRDLLMRQRTQVINALRAHMAELGIVAAQGNAGLKELLKIIAGERDARLPVDAHASLVVLAAGLHAVQTMIGTIDKRIIIEHRSNEASKRLRSIPGIGLLGASAIVATVQDPKAFRSGRDFAAWIGLVPREDSTGGKQKLGPISKQGDRYLRRILVVGAHAVLKLARQKPERYPWLTQLLARRPFKVVAVALANKMARVAWALLAKGGTYYRARAAAV

SEQ ID NO: 253409 - protein, 391 aa, unidentified
MSMYFVGIDISKYKHDCCIISAADQQIVSKFTVKNDKDGFEHLLTTLNSLSNPEDIKIGFESTAHYALNLELFLENAHHSFMEVNPVLIKEYKKSTTLRRTKTDSVDCESIARWLMTVEYKPHSKGFYHSYSLKSLTRLRDRLIRQRSFYLVKITNVLDHTFPEFKPFFNERLSKTAIYLLENYGSAEKMAHMNSASYDKLRCASRGKFSIQQFLRLKELATNTVGVNNSIFDIELNSLLTLYNSLCKEIKTLEAEITKLIEEVHPHYMSIPGIGPISAAVIYAEYGDISNFSNPGQMLAFAGIEPGINDSGTESHGGRMVKHGSSQLRYVLLNACLPLIRFDITFATYYAKKRAEGKKHRVAITHVAKKLIRVIYALERQDVDFNVQKLR

SEQ ID NO: 253410 - protein, 363 aa, unidentified
MTMTARRVGLDVHARETAAAVLDPATGEVRLRTLNGRPSTVVEWLETVPQPFEAVYEAGPTGYGLARAARARGLDVVVCAPGHIVRSSLDRVKTDKRDAIRLARLLLAGELRLVRVPEPAEEQLRDLVRAREDLRVDLMRCRARIAKFLLRRELYYPLPGNTWTKRHRNWLRGLRFDDRASELAFADALHAHDSMLARRDQLEAALEEIALGSWAGGTVARLRCLRGISTLSAAGLTAEVCDFARFDHPRLLASYLGVVPSEDSSGEQRRQGAITKAGSKHARRLLVEAAWHYRRPPRVSHELAVRQRGQHPRVIEIAWRAQRRLYQRWQSLEQQRGKRNTIVAVAVARELSAFCWEIATLEP

SEQ ID NO: 253411 - protein, 397 aa, unidentified
MDPTYAVFCGIDVGKGDHHAVGLDPAGTRLFDKALPNDEAKLRAVFDRLAEHGPVLVIVDQPNTIGALPVTVARACRHAVAYLPGLTMRRVADLYPGQAKTDARDAFIIADTARTMPHTLRRVDVGDETLAELGVLVGFDDDLAGEATRISNRIRGLLTGIHPALERVLGPKIAHPAVLEILSKCGGPVGIRKAGKRRLTTLATKHAPRMGARLAEEILTALDAQSVTVPGSNAAEIVLPKLADSLKEILQQRKSIAENVERMLEDHPLSQVLMSMPGVGIRTAARILLEVGDGSAFASAAHLAAYAGIAPVTHRSGSSIRGEHPARSGNRKLKRVLFLSAFAALHDPTSRAYYDRKRAEGKKHNAALICLARRRCDVLYAMLKNKTFYRTPTAAAA

SEQ ID NO: 253412 - protein, 352 aa, unidentified
MKRYKKGSEERKSLFVGIDLHRLRWQVTIRTEDVELFNGSIPGRWEALQRVLERYGGYAIQVVYEAGYFGFWLHDRLQESGIECIVTPPSLLPIEYGNHVKTDRRDSRKLAQLLAKGLLKRVWVPSLEERYHRQVIRRRRQLIGDRVRTQNRIKAELRLYGIELPEPVSKWSKAYVVNLSRLQFNNRWMQESFRQLLEEYEFLSQQIVEQTKLVRELAETELYQGRVKILRSHPGIGLLAAMELLLELQDVARFRRAEDLAAYVGLTPAQYSSADKIRMGRITAIGKNALRGTLVEVAWRVIGKDPGMRRTYERIKVRAGSKRAIVAIARRVLLTSRRMLLENRPYQFKIAA

SEQ ID NO: 253413 - protein, 421 aa, unidentified
MTDLIPPTVFERYVAVDLHKAYVMVGGVNARQEVVLPPRRLELDAWPRWAKANLKKTDALVVESTSNAWDFYDHVAPRVGQAVVANPRLVKLIASARVKTDKVDTLALAKLLAANLIPEVWVPPLEVREARGLLAHRRRQVRNRTMVTNRLQSVLQRHNLPAPEGEPFSAANRPWWDKLAVSPTEKLRVRQDLATLEHLAKQIAELDAEVARLSTQAPWANQVTYVMQLPGFSVLMTMTVLAAIGDVTRFESAKKLVGYAGLGASIHASGQMHRSGGITKTGRRELRWALVEAAWSAVRYHPYWKAEFERLARRMPDNKAIVAIARKLLVALWHVLTERVADQHAEPKMVATKLMRWAWALTDEQRGGLTTRQFIRYHLMRLQLGDDLTHLTYGNMPRRIASVEEVLALKPELRSPAPGGG

SEQ ID NO: 253414 - protein, 400 aa, unidentified
MLSIGIDVSKGKSTVCGMKPGGEIVYTPFEVQHTREGMSELVSLLRGSGEEVRVVLESTGSYHCPVVAALLENGIFVSVVNSLRMKRFCSQSIRKVKTDRIDAMQIALYGLAYWQELQPTRLPENTYRELQLLARQYYQMTSLLIKAKVDFNALCDQVLPGMQELMSDHAGRHKLSDFVLRYHHTTHILEMGETRFRKDYCKWAEKKGYRNCERMAALIFATAQNGIPVLPNAPSTQIVITEAIRVLHTVEASRDAILTQMQALAKTLPEYSLVREMPCIGDTLAPRLIAEIGDVRRFHSKRALIAYAGIDAPPYQSGKFCANNRHISKRGNRYLRKTGYEVMQSYVMHKPANDPIFTFIEKKRSEGKSGKLAMVAGLNKFLRVYYGKVTELYRSLPTIE

SEQ ID NO: 253415 - protein, 346 aa, unidentified
MTIVDAGRLITGGVDTHLDLNVAAAVDPVRALLGVAEFATTTAGHKELAGWLEGFGPVARVGVEGTSSYGAGLARSLRRAGIEVVEVDRPNRQSRRRTGKSDPADAVEAARAALSGRAQGAGKAKDGNVEAIRALVVAKRSARDTKIKTMNQIRHLGFTAPDELRERLAGVARKDLAATAAALRPREGGDQVAFATKTALSLLGRRVLALQAEKEHLDELLAKLVENTAPELLGLYGVGVDTAAALLVTAGDNPGRIRSEAAWAHLCGVAPIPASSGKVTRGRLDRGGDRQANAALYVIVITRMSSDKRTRAYVERRLAEGRTKPDIIRTLKRYVAREVYHHLPRA

SEQ ID NO: 253416 - protein, 426 aa, unidentified
MLNSQINKIQAITSDTLIVGVDIAKNIQWAQFINFRGIEVSKHICFENNYSGFNSIMEKIEEIKSKNNFLSVIVGMEPTGHYWKTFATFLHNNGIKVIQVNPYHTKKAKELDDNSQTKSDKKDALVIAKLIKDGRYSAIYFPEGEYADLRNLSNTGLEVSRLLNICKNRIHAYVDEYFPEFETVFKSFIKGKVALHILKRIPFPTDILELTLEDIISVIREAAKKSVGKKKAEELIRAAKVSIGVKVGLEGARIRLNNLLEEYELYHDQLEKIEKEMAQELEKTGYKDILTSIPGIGIISAASFIGEIGDPKRFSNSQQIIRLAGYNLVEDSSGKHKSKTMISKRGRKILRTILYKISLIVVCKNQEIKLLYKYLITRKENPLKKKQALIVISGKIVKIMYSLIKKEEVYDKEKVLGIYRKQQIVA

SEQ ID NO: 253417 - protein, 356 aa, unidentified
MSEGSWVGLDVHARSVVAGVIDQGSGEVRSLRVPPGNDGTVAWLKMLPTPLRVVYEAGPTGYGLARACAGAGINCVVAAPSRIRPAADRVKTDRRDAERLARLLRLGEITPVRVPEPEEEAARDLVRAREDARGDLIRARHRLSKLLLRHGMVYDATAWTRAHDTWLHRQRFQSGPLAVVFDECYGRMLDAKTRRDALDRAITELAGAPPYVDVVERLVCLRGVSTLTAFALTVELGDWNRFRPTSLGPFLGLTPSENSSGERRRQGAITKAGNSHARRLLVEAAWHQRRPPRLSVTLERRRTGKSLAVRAQADRSARRLHGRWQALEGRGKPRTIVVVAVARELAGHCWALATME

SEQ ID NO: 253418 - protein, 348 aa, unidentified
MTVYIGVDFHARQQTISYLTTEDGEIQHLVLQHEDPAVVRAFYVQFSGQRVVVGFESSGYAAWFEELLEELGCEIWIGHATYIRQFAKRRQKNDRRDADLILELLHTGDFPRIHRYSRRTREILQQLRYRQRLVKMRTMVMNMLLYMASSRGVTLRTKLQSKRGQAKLAQLPLPQPLGTQRDELLSLLQTLDQKISTIERWLEQETAPDAAVQRLQTHPGIGLLTSICVRYTLEDVGRFTTTRKVSAFAGFDPMEDQSDERRRMGGISKQGSRWLRFYLVEAGQIAMRKDADLARVYKRVSLRGGHAKAKVAVGRRLLVRAFIMLRDDITYAEFQRRGVAARSSRGTA

SEQ ID NO: 253419 - protein, 445 aa, unidentified
MRPRSAIGIDPDAKGIRCSLVGIGEDKPRMKGFLVNQEGMEGFIRWVKRAGDVIIAIEGSNGQSKPIEQALRAQGLIFYSFKPSDVAGFRKAVLGQNKNNDKDAESVARYAMAIEAQGKLNSHRRVWFPDAELQGLTRSHEQKTNQLTAEVNRLWKLLRMASPDLYLALGGSNPDIEINGNMLQNQGILALLAEKPDIVEWKTLSGMDFLEAMGGRLYNGRQKLIKELQKVAKTFRPIPSSLSLMIENSVTQILLLKKQLKRIHNMLEQITQDNKAISILRGYNGIATLTASTLIAEIVNIRRFVSNDGLACYAGLGMIDNSTGERSNMVHSSLFNHRLKDALMTAAKNFVHFNPGSHLAGYYRNLVKGGMSVTESRKRVARALVRVFFRLLHSIDEDSNTGITECDNAEQEEKRESDMASGQVRSDKNHESNISLSPLKNHDTN

SEQ ID NO: 253420 - protein, 402 aa, unidentified
MNAVGIDVSKGKSMVAIMRPFGEIVSTPFEIKHTSSDINSLVKLIKSIEGESRIVMEHTGRYYEVLAHQLSEANLFVSAINPKLIKDFDNDSLRKVKTDKADSVKIARYALDKWQNLKQYNVMDELRNQLKTMNRQFGFYMKHKTAMKNNLIGILDQTYPGVNTYFDSPARSDGSQKWVDFASTYWHVDCVRKMSINAFIDHYENWCKRKKYNFSKSKAEEIYGKAKELVPVLPKDDITKLIIKQAVDQLNSASITVESLRTLMNETASKLPEYPVVMAMKGVGTSLGPQLMAEIGDVSRFTHKGAITAFAGVDPGVNESGSYEQKSVPTSKRGSSDLRKTLFQVMDVLIKTHPQDDPVYQFLDKKRAQKKPYYVYMTAGANKFLRIYYGRVKEYLASLPES

SEQ ID NO: 253421 - protein, 357 aa, unidentified
MKKLFIGIDFSKEKLDATIILACGMNEIGSREYGRFPNNTTGYRKLCNWVKTNAWNTIAEEWLFCGEDTGSCSIGLSKWLYGKGYDIWIENAYAIKHSSGIQRVKNDKADSAIIAEYAWRQQDKVVPFEPLNESLAQLREVFLYRHKLVGQRVAMELRKEDKSQSNKSKAISFINRKSKHLIAEINKTIAECDKAIDSIIEADEELKENYAIITSIKGVARQNATCMLVYTNNFKKFGYDPRKIACYYGVAPFGKQSGTSVNTPAHTSHFANKLIKSLLGQAAHIAKIYNPEIRDYYQRLISKGKKPQVALNNVKNKLIRIIVALVRKKVPYDQNTYKYYEEREVIERKKNEKLIYC

SEQ ID NO: 253422 - protein, 347 aa, unidentified
MKHFAGLDVSLDETTVCVVDEAGGIVREARVPSEPEALVAFFRGLGLAMERIGLEACSLAAWLHEGLTAAGLPAVCLETRRAKAAMGAMPNKTDRNDARGIAQIVRTGWFRAVHVKSPACRSWRALLAARRLALNKMRDLENGVRAPLREAGLKLGRPARKELAARVRELVGADAVLSASVEPLLAIVATMAHELAQLTRRVLAIVRDEPVCRRLMGVPGVGPLTALAFRATIDRPERFRHSRDVGAHLGLTPKRYQSGETDVQGGISRCGDELARTALYEAAHSLLVRSRRWSSLRAWGMQVARRRGMARARVAVARKLACVLHRMWADDAEFRWGKQETASAVPG

SEQ ID NO: 253423 - protein, 370 aa, unidentified
MKKNSTVAQSSKRTAARQEGPITIGMDLGDKTSRYCVLGRNGERLSEGSVATTRKAMTQKFAGMRRCRVAMEVGTHSPWLSRWLTGLGFEVIVANARQVQLISANSRKNDRMDAHLLARLARVDPQLLRPIRHRSERAQTDLMTIRVRATLVEARTSLVNAARGFAKAQGDRLPACDTDSMGVERMESLPEGMRDRLRPLLEQVESLTEKIHELDANIEQIAGTQYPETELLRQVSGVGTLIALTFVLTVEDRDRFQKSRDVGCYVGLRPKQSESGQSQPQLRISKEGDMYLRKLLVQGAHCILSRRGPDTDLKRWGLKLAERGGKNAKKRAIVAVARKLAVLLHRLWVGGEVYEPLRNSQTARSSNQAA

SEQ ID NO: 253424 - protein, 462 aa, unidentified
MRKTKRPAILENLAIVHPNAAGLDIGAREIWACVPAGRDVETVKRFNTFTPDLQALADWLVACEIDTVAMESTGVYWIAVFEILAARGRKVYLVNSWHLKHVPGRKSDYLDCQWIQKLHALGLLNGSFRPDAEMVALRGYLRHRAQLLEHRAPHVLHMQKALQQMNLQLHHVLSDITGETGLKILRAIVAGERNPVKLAQFRNPACKSSEETIAQALTGSWQAEHLFTLRQSLELYDFYTQLVTACDAEIEKQFAAMKPRWDGPEEPPDLPRVKPGSKSKNQPRLNVRREIMRLTGVDLVAVEGISASLAQTILSEIGTDMTKWKTEKHFASWLGLAPHNDISGGKVLRSRTLKTRNRAGQAFRQAAASVIRSGSAFGAFYRRKRGQLGPMQALVATAHKIARTVYYMLKNRVQYHDIGAEAFEHKQKEREIVYLKKKAAKLGFDLLPHDSTAAIARAVAMI

SEQ ID NO: 253425 - protein, 426 aa, unidentified
MNSNNSRLKFFRQLKEEVRGSKEHLLVGIDVAKDKHNAFFGTATGKTLLRRLIFENNKNGFELLRSRAEELQIEFNLKKAVYGLEPTSNYHKPLGEYLIKSNDNIVMVSGVAVSKNRELLDGRWDKHDAKDSANVADLISQGKCLYYDFPSLELRDLRNLLSLKRRLKKQDHSTRIRIRNHLIAQYFPELDKYYNVGSEGLKIVKWCLDPAVISNLEYNDFVKLITPGNMNVSQERRLQAIWKAAEISIGCKAGVVLDFEAKLMIEDLEHIKKAITAVEEQIKNICLKFEEYNYLLSIPGFGPDISSKVLGAIGDPFRYNKAKQVIKMSGFDLCASRSGTKSDVMIPVISKRGKASLRFALYQAAFIASTQNKYFRAYYINKLRGREKEKGIKTKMRVKLAVKMLTIAWTLMKKREAFDPSYLRLE

SEQ ID NO: 253426 - protein, 322 aa, unidentified
MSQPNPLCVGIDVSKATLDIAASSDVAQFTVSNDSDGFNAIITGLRRHSVALVLMEATGGLEVAMACSLQAKGFEVAVVNPRQARDFARAMGYLAKTDRIDARVLTQMAEVINRHPERKRFIRALPDAERQALAAMVVRRRQLIAMLVAERNRLHPSHPQNKKSINTIIKALEDELVRLEKEMDSHIRNHFKEIAERLSSIKGVGTMTVSAMLAEIPELGTLSRREISALIGVAPVNRDSGTMRGRRTIFGGRAGVRSALYMAALVATRFNPVIKTFYVRLLAAGKAKKVALVACMRKLLTILNAMLRKNEEWDESYHHVAP

SEQ ID NO: 253427 - protein, 358 aa, unidentified
MAGKVTETVVVGGVDTHKDLHVAAVVDQNNKVLGTQFFSTIRQGYRQILACMTSFGALKRIGVECTGTYGSGLLRYLQNAGLEVLEVTAPDRMERRKRGKSDTIDAECAAHAAFSGIRTVTPKTRNGMIESLRVLKTCRKIAISARRVALQIIHSNIISAPDELRERLRNMTRMQRIRTLGSWRPDASEYRNVTNVYRISLKSLARRYLELHDEIADLDVMIAAIVDELPPELIKRNAIGYESASQLLITAGDNPQRLRSESGFAALCGVSPVPVSSGKTNRYRLNRGGDRAENSALHIIAIGRLRTDDKTKEYVARRVAEGHTKMEAIRCLKRYISREVYTLLRNQNRQINSIPITA

SEQ ID NO: 253428 - protein, 320 aa, unidentified
MSDNIVVGIDIAKHKFNVAVWAGENHYKMKHFPNDLKGFDAFINWLKPTSNYHFCMEATGIYGDPLALYLSDKGLLISVVNPVQIHAFDQAELLRNKTNKIDAKLIARYCASQHPPAWQPTPLCERQLLALVRHRNKLNEMLLTEENRLSVVVEVVCDSHAKIITLLKQELKDTELKIKKHIDDSPSLKKNKGSLESIPGIGERLGATLLAYIGDGSRFHHSGQVVAYAVLNPKLHESGQLKGRAHLSKQGSAELRKALYMPALAAISCNKVVKKQWEQLTARHKGGKVSVCAVMRKLLRLAYGVMKSGTLFNAEIPLAV

SEQ ID NO: 253429 - protein, 408 aa, unidentified
MIFVGDDWAEDHHDICVLDEAGKLLAKRKVPEGIEGVTQLHALVAAHSPEPAEVVVGIETDRGLFVQALVASGYRVYAINPLAASRYRERHTTSGAKSDPGDAKVLAEAVRTDRHNHRQIAGDSELAEAVKVLARAHQNLVWSRQRQLNNLRSTLREYYPAALEAFGDDLGSRDAMAVLGRAPTPALAKALSAAKIASAMRAAGRRRYLDSRAQEIREHLRGAHLEAPATLAEAYGAAVKATVGVLTEMNAQLAALEGELQSCFEKHPDAGIIVSLPGLGFVLGARVLAEFGDDRTRFADAKGRKCYAGTAPITRASGKSKVVLARFAGNRRLADACYRWAFASLTASPEARAFYDAHRAAQGPKAKNAHAKAMRALANRWVGILHGCLKHHTPYDAAKAWHREEAAA

SEQ ID NO: 253430 - protein, 339 aa, unidentified
MKVTTFGLDIAKRFFQLHWVDMETGEVHRRQLKREQMAEFFATCAPGLVAMEACGSAHYWARKLASLGHEVRLVAAQFVRPFVKTNKTDAADARAIWEAAQRPEMKFVAVKTEEQQSVLTLHRLREQLVKFRTMQTNQLRGLLYEFGVCLPPGRAKGMPAAIEALGQLEDTLPAMVIDALRQQMVRIQALNDDIADIEKKLTLWKKQERLAANLMEIPGVGILSATAAVATMGDAGAFKNGREFAAFLGLVPRQSGTGGKVRMLGISKRGNQYLRTLLVHGARARINFQKQRDPWIERLLARRPFNTVVVALANKMARTIWAMMAHDRAYQKNYVTSIA

SEQ ID NO: 253431 - protein, 336 aa, unidentified
MDLAVLGIDVGKFEFHCALSAKDQVHTNHFPNTAAGFERLHRWLSNRHVSRVHACMESTGGWSEELATDLHEHGHVVSIVNALAIKSFGQSELSRTKTDKADAALIARYCVTMHPAPWEPPSPLQQRLKRLARRRVALDEMRVQESNRLGAPGSGDVRASIEATLSFLDRQIDEIDSQIRSLIDDDPTLRGKRELLTSIPGIGERLAVTILGELPNISEFRSAKALAAFTGLCPREFRSGKSVSASWLSKAGNAHLRRMLYMPAVAAIRCNPILKDFAVRLRSSGKHGKQIVAAVMRRLLVLAYGVLKSKRPFDLEHRVWATSRPSQPVISPALNP

SEQ ID NO: 253432 - protein, 397 aa, unidentified
MYIVGIDIAKRKHEAAVIDGEGTVIIKPFSFTNNCSGYNRLLAMLAKAKLPLDEVSFAMEATGHYWLALFTRLQKEGFRVQVINPVQTNSIRSFYIRQAKTDPRDALLIAEVIRFGHFSESTLHPENIYELRELCRGRHAIVSMQADVKRKVVALLDQVFPEYETAFTNMFGDTSMAILQTCPTPKELSEMPLEELCHLIEVSSHKRFRMAKAQELQALARNSFGFAMAGDVFSTMIRLYAKHLDFLKQQVQEMDRKIAEIMDTLDTPITTITGIGPTLGAYILSEIGDISRFSSAAKLAAYAGIDPTMRQSGEYNGVRNRMSKRGSPYLRHAIWLATSSAVLHDPALKLYFQKKRDEGKPYMASVGHACRKMVSIIYAVMRDNKAYTPCIPNEISA

SEQ ID NO: 253433 - protein, 412 aa, unidentified
MEVLHPHCAGLDVHKASVVACVRHMMGGAVKREVRSFQTTTKGLIALSQWLSAEDCTHIVMEATGVYWKPVWHILSDGEFALVLANAAHVKNVPGRKTDVNDATWLAELLAHGLVRGSFVPDEPTQEMRNLLRTRKQLVRERSRHIQRLQKTLEDANIKLDSVISDILGRSGRRMIEALIAGETDPNALAALAHRRIKASPAELEAALRGRVTRHHRFLLGLHLQQIDAIDAAIDQIDPEVDALVEPFHAAVQLLTTIPGIDALSACVILAEIGRDMSRFPTAGHLISWAGLCPKNDESAGKRRSTRMRKGAPWLKTTLVQCASAAARKKASYLQAQFHRLRARRGAKKAIGAVAASILTAAYHMLKNGTLYEDLGPAHFDKRAQAKQVHRLIDRLRNLGFAVQITPMEAAA

SEQ ID NO: 253434 - protein, 363 aa, unidentified
MEQFIGCDAHKKYSVFVAVNERGEASPAIRVGHDREQYRQFLERLPAGSQIALEAGGHYYWMVDEMEAAGHRPRLVHPLEAKKRMGKTGKKTDKVDANGLGILLRNGTLPEVWIPPSELRDQRESLRLRMFLVQQRTRLKNRIQGALTRYNIQIAEVSDMFGVEGRLRLGKRLAELPEHTRQSVELELVTLDFLEVQLADIEKRLEALMKVTAEADLLKTLPYVGRILSMVMTLEIGKVERFASAAHLASYAGLVPRVHASGGHTRLGQICGDVNHYLKWAFIEAGNLVVIHQKRLAGQHVVRLYQRVKRKKNHQKAVVAVARHLAEAAYWILKKQEVYRDPQPKPKAPAQAQAAHALSSTHG

SEQ ID NO: 253435 - protein, 366 aa, unidentified
MQETLTQIKTADKLFIGMDLHKNTSTLCVKNEAGAEILSQKILTDKNAMKKFIGDVKEKSTELSLVMEPVSQWYYYADLIENLGVDVHLAHPMRVKAIAAARIKTDKIDAGVLADLLRTNLLPEAYFSSVDVRGWKEQCRFRASLLNLRTQVKNKIHAILFKHALRHTFSNLFGKGGRAWMGSLKLKEPFKTNLEKYLLLIDQFTELVLQAEQMIQSTVTHNPQANLLISIPGISFCSALTIMAEIGDINRFNSAKKLQGYAGLVPSTYASGEKQVHGRITKQGSKWLRWIMIEAAYHQERCKKIPGFGSYYLSLKKRRGTKTAAVATARKLLAVVWRLLKDNRPYEVNAPHCWKSGTLAPKLSSI

SEQ ID NO: 253436 - protein, 356 aa, unidentified
MIVVGVDCHKQSHTAVSVSSPIGELGGELTVPARPAGHRELLDWARAKDPERVFALEDCRHVSGSLERLLIRHGERVLRVPPKLMASQRKGARSFGKSDPIDALAVARAALREPDLPVATLAGEEREVALLLDHHDDLVGERTRAQNRLRWHLHDIDPELEVPPRRLSREVWLRRTARNLARREQTTQVRICRDLLRRLRALLRETRALERELHALIAGHAPELLELPGCGTLTAARLVAEVAGIERFRSDAQLAMIAGVAPLDASSGRQQRHRLNRKGNRQLNRALHQIAITQVRVHEPARIYVERRRAQGKTYREALRCLKRHLVRVVFKLLKAMALSNPRPSVSTSISTIDLT

SEQ ID NO: 253437 - protein, 416 aa, unidentified
MGHVVIGMDPHKRSATIEVCDRRETVLSTGRFGTDRAGYRALLAAGRRWPDRVWAVEGCQGVGRHLAQRLVADGEPVVDVPAKLSARVRVFSTGQGRKTDATDAHSVAVAALRTSGLRVVQVDDASVALRLLVDRRDELGAARTDTVNRLHRLLVELIEGGAKKFLSATQARALLASVRPRDLVGSTRRRLAAELIVELAGIDKRIKAANKQLRELVEATGSTLLDLNGIGPSGAARLLGDIGDVSRFPTRGHFASWNGTAPIDASSGEQLRHRLSRAGNRRINRVLHIMAIVQLRNDTEGRAYYRRKVATGKTGMEAIRALKRRLSDVVYRRLVTDQQRLRKALEAAGPGGQAGAATDSSAAGFNPNAGASEKSLPGTAGLDLTLAPDALPDHSSGHSRRPVTAMTRTRSKARSA

SEQ ID NO: 253438 - protein, 338 aa, unidentified
MDKIMTIGLDLAKNVFHVVGCNEHGKIVRKRMLKRSQVLAYFANLPVSLVGMEACASAHYWARELDVLGHEVRLIPPQYVKPYVRGNKNDYNDALAIAEAVVRPEMRFVGAKTPEQQDIQALHRLRERCLGDRTALCNQLRGLLAEYGLVFPKGVATLRRRLPELLEDGENGLSDLFRQLLAQGYQQLQELDGHIDFYTQELVYQSQQDDTCQRLQTIPGFGPIVASVFHSVVGHGEAYRRGRDVSASIGLVPRQHSSGGKEVLLGISKRGDRYLRSLLIHGARSVVIQAKAKDDRLSRWINRLVSARGFNKAVVALANKMTRIGWVILAKKTTYQAA

SEQ ID NO: 253439 - protein, 343 aa, unidentified
MLNKNIIAIDLAKTTLQVCHISKDGELLSNKAMSRQRTSEFLIKSEPSIVAMEGCCGCHYWGRMAEEYGHDVRIINPKKVKCYLEGHKTDNNDALAIANAALQIGLKYSKPKSIERQSLQSLENSRRFLTRSKANLGLHIRGVLLGYGIVHPKGEKGLSRAVLETIENNILPVPLLKMIGLLWEQYRELKQEISKIDVELDGLIINIEECKRLTKLEGVGTSSAVSLYIALGSGEQFQNGRQASAFVGLTPKQHSSGGKAKMVGIDKNGGVKDLRSLLYLGAMSYISRLSRSKPKTRKDEWILATLQRVGYKKTCIALANKTVRTAWAILKHNTKYQPEFLTA

SEQ ID NO: 253440 - protein, 341 aa, unidentified
MCDYIGLDVSQKETTISVRREGQRVWRGKCPSDPQAIAMVLQRRAPDARRVVFETGPLSVWFYHALSAEGLPAICIDARHAKAALDMAPNKTDANDADGLAHLAEIGFYREVRVKGYDSMLVRTLVAARRRLVRVSTELSNQIRGMMKTFGLIVPGAKGGRFEAEVRRLLGGYTGLEQVLLPLLEAWLAVRARAAELGSQLLRTARHSDACRQLMSIPGIGAITATSFTTAIEDPENFRKSRSVGAWLGLTTRRYQSGEVDYDGHISRRGDAHLRGLLYEAATVVLTRTSADSALRTWGLKLRERIGFKRAAVAVARKLAVIMHAMLKSGQSFQREPEATA

SEQ ID NO: 253441 - protein, 344 aa, unidentified
MATYYIGADVHSNNTELAVEQRGKIVSRYSVPTTIPAISTVLNLLQGKKIFAMEEGPMAGWLYRNLKETVNEFIVSEPRRNKLITSEGDKDDKIDAGKLAALLRGNFLKAVHHTDDSHRANLKHWINLYHDRVCDAVRYINKIRACCRMHGVKIPRKVVRNMVHRNQWLSELDNRVLQAQLQMLWIGYDATKEQVGLTRKQFSSYAHKYPIIKNWCKLPGVGTIRATTIFAYLDTPWRFKKRSKLHKYCGVGLVRSTSGKDKKGRPKPPHLHLPWAVNGHLKNAVIGAATSAIEQGNNVFKDYYERMLSNGMIPSNAKHSVARKMVSTMSAMWKTDSRFDEKLL

SEQ ID NO: 253442 - protein, 362 aa, unidentified
MNYVGVDVHKRYSVLCALDERGRKLREARVEGNAAIGFAQFFAGLDGPSKAVVEACWNWGLIHDELEELEEVEEVVLAHPYKTRLIADAQIKTDRLDAHALGTLLRGNLVARAHVPRRETRMRKNLLRQRLYWARLRTMLRNRIHTLLDRQRELELPQCSDIFGVRGLGFLRRLDLPEPDATLLREQLALHDLIAQQIKAQEKRIAAELRSEATHQHLLSVPGIGPTLAAVIGCEVDSIERFASAEKLCAYAGVVPTTHSSGGKTRHGQLLPFCNKWLRWALVEASWVAIGCSPYFGALYKQHRARGKKANTAVLIVARRMCRIIWQLLYEKRDFEKRPLGPNFYFPGCSALALTVKSASGP

SEQ ID NO: 253443 - protein, 414 aa, unidentified
MFAVGVDVSNGRSMIAVLGARRKVVMKPFEVPHTADGFASLVEKLRGLNGEARIVMEHTGRYYESFAMSMYRAGFFVSAVNPLVIKDYREGVDVRKVKTDKADALKIAQFALDKWEILPQYTPMDTIRYDLKTLHRQFQLSSKTLTALNNNLIALLEQSYPGANRYFDSPVRPDGSQKRIDFVDTFWHVDCVASLSRSAFAERYRKWCRRHGYNFSEQKALELHADARQKFPLVPKSDTCRLLVKEAVAQLRTVSRTVEAYRAEMNRLASQLPEYETVMAMTGVGKSMGPQLIAEIGDLRRFAHQKSLVGFAGTDPIKDDSGDRVSESKPSSKRGSPYLRKTLFVVMTILLQLQPQDNPVYQFLDKKRSEGKKYYVYMTAGMTKFLRIYYGRVRDCLKAKGLWEQPMLEPGSSD

SEQ ID NO: 253444 - protein, 333 aa, unidentified
MNPPEFKPVRALGIDIAKATFQVALMAYDSPGTYREKSFENTPKGHASLLKWLGPDLASLHACMEATGPYGDALACLLDGQVGRLSVENPRRIKGYAACRNQRSKSDPADARLIAHYCASQRPPAWQRPSAAEFKIRALSRRLDSLKIQLNAENNRLELAGDPFIKRDIKAHLRFLQTHIDKVEAELLATIKGEATLHRSHQLLCSIKGVGELSAAIILAELPDLSCLRDGRQLAAYAGVTPRHKQSGTSGSSYTPMSKAGSSRLRKALFFPAMSAMTHNKLCRTFADRLKEKGKKSIVVIGAVMTKLLHLVFGILRSGMPFNPDHLANSRIA

SEQ ID NO: 253445 - protein, 375 aa, unidentified
MIKHSEVFVSFDTSKLRNAIAIAEGDRAGEVRFLGEIENTPAATTKLVRKLEAKYERITFCYEAGPTGYELQRHIHGLGHQCIVAAPSLIPKKPGDRVKTNRRDAVSLVKPLRAGELTGVWVPDPRHEAMRDLTRAREAAVIDLRAKRQRVSALLLRQGRSYPADKKTWTKVHMNWLASQRFEQPELGVVFEEMMFAIHQAQERIERLEQALRTAVPEWSLAEVVTAFMAFRGIDLVSATCLLAELGDLTRFPTAPEVMGYVGLGCSEGSTGDRIKRGGITKSGNRRARRTLVECAWSYQHPPRVGIAKQAKVAAAPAKVREIAWKAQCRLNRRYRVLLRRGKLKTVAITAVARELAGFLWAAARELSSPERVAK

SEQ ID NO: 253446 - protein, 347 aa, unidentified
MRFYNTQHPFYCGIDLHARAMYVCILNQAGETLLHRNIQTTPEAFLKVIAPYRPDIVVAVECMFTWYWLADLCADEEIPFVLGHALYMKAIHGGKAKNDKIDSQKIAVLLRGGMLPQAYVYPAEMRATRDLLRRRMHLAHKRGELLAHVQNTNSQYNLPAIGKNITYKANRDGVAERFADPAVQKSIEVDLALISYYDELLRDVELTIVKTAKQHDANTLYLLQTVPGIGKILSLVLLYEIQHIDRFPRVQEFASYCRLVKCAKESNGKRSGTSGAKIGNAHLKWAFSEAAVLFLRDNPAGQKFLARLEKKHAKGKALTILAHKLARAVYYMLKRKVAFDMKRFLND

SEQ ID NO: 253447 - protein, 405 aa, unidentified
MWYAGIDWADQHHDAVVIDEVGKRVGTTHVAHSAEGLDTLVTFLKGLGDVADHPDHLACIVETNRGLLITALLDAGLPVYPVNPKTVDRHRKPAGAKTDAIDAYLLARTGRSDLADLRRLTPDSPLIAELKVLTRDQDTLIQSQTRLVNQLTACLKAYYPVAVDLFGKLQQPTTLAFLQAFPTLEQARAASVEQITTVLKGAGHPTAEAKARQMGDRLRQPQLAADPIVTRTKARLMLTLVGQLRVLLPEIAAYDEEITRLFRLHSDSRAFASLPRAGTRLAPRLLAEWGDDRGRYTDAASVQALAGTSPVPFQSGNFAKAHRRYACNKPLRNALQQFAWQSTQKEAWALAYYQRKRRDGKSHSMAVRALANQWVRLIYALWAKHETYDPATFLAAQQAHAPRAA

SEQ ID NO: 253448 - protein, 404 aa, unidentified
MIIVGLDWSRYKHDFVIMDMQGKIVERGAVAHNANALEELAAGIDRHVSCATQVHVGLELNDGALLAWLVVKGYTVFGIQPKSAQRARDIYRPSGSKDDRIDAFVLAEFVRINQGRLRPWRPPSEITLQLREMLRWREELVQQRTAAYQRLRALLAEWSPQLAELCNNLDCIWQLDLLSQFPTQASLCQAHGNRIGSFIRKHRMHSKKSQQIEDTRRSVPMPVPAGRAVVVEKQTSFLLEQIRMLSTEIDHIEQGLRQLTAQHPDVNIFESLPVRGIVTIASLMAIFGDDHEKALSPDVLAAVCGVAPVTIASGKTKKVRQRRACDHTFRQALVHFAFNTAFKDGCWAAQFYQRKRSEGATHYTALRCLAKRWLKIIHRLWKDRITYDEALHQANQRRNQSHAA

SEQ ID NO: 253449 - protein, 314 aa, unidentified
MQVLHARCAGLDVHKKSVCACVLCSESDGKKRREVRSFGTMMASLLELSDWLRRNGITHVAMEATGVYWRPVWAVLEGQFELLLVNPHPIKVIPGRKTDAKDCQWIADLLQHGLIRGRFDPPTEIQDLRDLTRYWAELTQAQNRVANRIHKLLEQCNIKLSSVASNVLGTSGRQMIEALIASEDDPARLAELAQKRLRAKIPELQWALCGKVRDHHRYLLRECMDEWKALSERIARIEREIDRHMSPFEAAAELWQNIPGVDRVTACSLVAELGVNLAQFPSAEQLSSWAGLGPGNNESAGKRFSGTTRGNKWL

SEQ ID NO: 253450 - protein, 355 aa, unidentified
MGVKYVGVDVHGQTCVFHVLDDKGTDVLGGAVVPTRKEPLLEFVKHLGGTVHLALEEGTQAQWFRALVRPFVEEVVVCNARKNTRGRTLRNKTDRKDARSLARLLYQGELSPVYHGDEDLEEFRNLVKTYQVLLADTTRAKNRIKAVYRARGIPTDGNGAYGRSTRQQYLEKATSSAVRSRLEAFHVQMDIGTALVQQARSNMLLEARKYCAYRTLMTVPGIGRIGAAVLVATIGTPRRFPTKQAFWAYCGLAVIHRESGEHVIGPDGIRRRSGPTRTYGLNRNRNGSLKGVFKVAAIAARKDPEVEEYYQGLLARGLRPEVARVQLARKLATVALTIWKKGCRYEKGRLKQQNA

SEQ ID NO: 253451 - protein, 331 aa, unidentified
MILKQSLDMAKVKQFVGIDISKLTFDVGMPLDKEGKYRHSKHDNNAPGFLDFKKCLPSDSVCVMEASGPYYMPLANYLYGQGLEVRVVNPLAVKHFSRMRMTRAKTDKKDASLIAEYAKSENPPIWKPKAEHLIELQQLQTVIEGFVTRRAQLSNQREAFTAAGTLKGSALNIIAKEIKHIESVIKKMELEMETITKKHHSEMFAQLKSIPGIGKRTAMLLIVITDGFTRFETSKQLVGYIGLCPRIYDSGTSVRGKQKICKMGMSRIRALLYVCAMQAKRYNAACAETFTRLKDRGKNGKLAIVAVANKLVRQAFAIATAGKYYEVKLVA

SEQ ID NO: 253452 - protein, 351 aa, unidentified
MPRTSNVHAVTTIGMDMGKNTLHMIGLDSRGAIVLREKVSRGRITSRLANLPPCLIGIEAGLATHYVARELAALGHDVKQVPPTYAKPFRQGHKNDFRDAHSVAEAVQRPTTRFVPAKTDEQLDLQALHRVRSRLVSERTAVINQIRGFLLERGIIVRQGLRFLRQALPDILAKRTDVLSPRMVRIVADLASDWRQLDERIEPVTDEIETLAKSDDGCRRVMTVPGIGPIISSAMVAAIGNGAAFARGRDFSAWIGLVPKQMSTGDRTILGRITKRGNGYLRTLFVQAARVILLRPASWPKHSFGVWLARAAQRLHRNVLAAALANKLARIAWTVLAQERSYEARIMKAAA

SEQ ID NO: 253453 - protein, 388 aa, unidentified
MSCRSESGPVGQRDSDHSRATLYVSLELSPSKWLVTSLVSGTDKLSKHLVPGGDCGALLQLLAALKAKAEKQSGTAVVVATIQEAGLDGFSLHRLLEANGVESWIVDPSSVAAPRRARRAKSDAIDGETLLRTLLAYRRGEPRVCSMVHPTSPHDEDRRRLTRERRTLMRERIEHTNRIKGLLMSQGISGYDPLRKNRLDRLDELTTRDGHRLPPRLRAEIGREIDRLELLARQLKQVEAERDALISQLADVADSPAAQLMRLKGIGVETATLLWLEGLFRTFANRRQLAAYAGLAPTPWLSGRIRREQGISKSGNPRLRTGMIELAWLWLRNQPGSALSRWFADRVREEGGRKRRITIVALARKLLVALWKYVNRGEVPEGAALKSV

SEQ ID NO: 253454 - protein, 298 aa, unidentified
MREIIRIGVDTSKYIFQLHGVDGAEQPVLRKRLSRKQMLEFFAKLPPTVIGMEACGAAHYWARELGKLGHQVKLMAPQHVKPYVKRNKNDGRDAEGLCEAMSRPTMRFVPAKTAEQQAALMLTGMREQMVARRTQLGNMIRGYAAEFGITAAKGLDKIELLLAQLAQDENVPPPARDLFALQASQYAQLQTELKAIEARLKAWHRANADSRRLAEIPGIGPVGAPELIMKTPDPAAFTSARHYAAWIGLTPKDHSTAGKTRLGKITRAGDERLCSILVAGATAVIRQAMSGRGGGARQ

SEQ ID NO: 253455 - protein, 469 aa, unidentified
MAKGSGGSGMTRGDRRRNTRRERLRGLLPRDGAVVGIDLAEDKQALAVIDHDVRVVARKTVRVKAFRLGEALDWAVAEARAKGFERVAVACEPTGPRWMQVQRLCAERGLALVCVQPLVSHIAREQQDYTTHKTDESDCVMIARLAVELHCYIPEELDETWAYLRHLARRRAQLVTAATASVQRIGDFLSVAWPAVAGACAGPFESVTWLAALQVVTARCGGDPGRLAGMGEQAFTAAVRDAAAGWGGKKAWSTISARVFAALTDTEGVVAWSRRGLFRRVADELGDLQRTRAQLRAAEADMVSVLAELGLSRLGDIPGLSPVGAAAILAETGDPRRYDGSSSLVKHAGLSPAGNASGAFSGQAHISRRGRPALRLAVWRAVWPLLKYNPVMAAKFQAMTRAADAAAAGAGAQPGTAAQAAARARRAKARVACAASLLRWIYCMVVHGTSWDPAVAGSRHTPQDQAEAA

SEQ ID NO: 253456 - protein, 360 aa, unidentified
MNSPVYIGLDASLDETSICVVDHDGKIVFETKAESHPEALHCALKGYVERAQRIGIEASSIGVWLARELLFRKLPVIVVEARHMRTSLSAMRNKTDKNDARGIAQMMRMGWFRAVHVKGVENQRFRTMLANRKLLKRKLVDLENHIRGSLRVHGLKVGAIGRHEFEARGRELLDGADFAFEGMIDSLLAVRSAVIEGYERLHTMLLKAVAADPVCRRFITVRGVGPVAALTFKVAIDDPHRFTRSRNVGAHFGLTPRTPSDRQLDRLHWARIAKQGDMTAHESLCEAAAMLLRSRRGSTLKAWGLKIAKKRSMLCAITAVARKLAAILHRMWLDGSVFDPGAGAVVTPAMRATLKALRTA

SEQ ID NO: 253457 - protein, 352 aa, unidentified
MSIIAFDSHKRYTFARVENDNGEHPQEFRIEHRRGNIAGFLSSQQPGSPVAVETIGNWYWIIDEIEQAGMEPRLVHARKAKMMFGCINKTDKLDAKGLNILQRAGTLPTVWIPPAQVRDKRELPRTRMVFAKGRTRLKNRIHSVLDKYGLQDAFEDISDIFGNKGRQVLGCVLVQLPPHTCYMAELLLEQLDQTEQKIQAIEARMKKLFKETKRHMLLQTMPGIGFILAVVILQEVGDIGRFGSAERFASYCGVTPRVHASGGKIRYGRLRPDTNHYLKWAFSEAGNSVAVNRNRFPDRHVSQLYNRIRGRKGHAKAVGAVARHLAEATYWVLTKAEVYRDRGVLEVSPTGA

SEQ ID NO: 253458 - protein, 349 aa, unidentified
MTIVEDRPVITGGVDTHADLHVAAALDPLGGLLGVQEFPATATGYAQLLDWLGGFGPIALVGVEGTGSYGAGLARHLAVAGICVVEVDRADRQDRHRQGKSDPLDAVSAARAAQSGRASGAPKGRDGAVEAIRALMVAKRSARAERTQAINQARALIVTGPDELRARFAGHTPAQLVEAIAALRPRPGDVPGYATRVALRELGRRAQFLDAQLERLDELIGPLVTARAPGLLRLHGVGSDTAALLLIAAGDHPERLRSESSWAHLCGAAPIPASSGKVSRHRLNRGGDRQANHALWRIVITRLGSRPGHPATRAYVERRTKEGLPEKEIIRCLKRYVAREVYHQLRGGA

SEQ ID NO: 253459 - protein, 371 aa, unidentified
MIGFSRRGRDRPSPPWVLEDRSVASVVAPIPIQEPEQLPGPLEPAYARPGLEDKTLSASSVFVGIDVSKSRLDVAIHPGGEQFSTGNDEAGLARLVERLAGQAIACIVLEATGGLELPAVGALIQAGLPVVAVNPRQVRHFAKAMGRLAKTDQIDARVLAHFAEAAKPQIRPVPDEATLALSDLLARRRQIMEMLTAERNRLIRSKGSVREHIASHIRFLEEEADRLDHELAHLLKESPVWQEKDDLLKSVPGVGPVLSTTLLAELPELGSLDRKKIASLAGLAPFNCDSGLLKGKRMIYGGRAPVRTALYMATLVATRHNPVIRECYGRLIGAGKAPKVALVACMRKLLVILNAMVREGIPWKEQACSLT

SEQ ID NO: 253460 - protein, 402 aa, unidentified
MQTNEIHVGIDIGSRVHRAAIEGPDGQILDEFDIQHTEPGFADFFARIETQERRLGVPVRVAMEGFNGHARPLDALILAHHYPLLNVNNLKLARFKEIFPGPAKSDPIDARKILELFRLETHLPLAKEVLQPVGVAPLENQQLKRLTRRRRQFVNEKTRVVNRLQSDLQAVSPGLVTITGDVDNLWFLHFLTARDDLTQLARMQRRSLMKIRGVGRIYVEAIQTWQRQATFSSDVDWVGEMIIEDAARILALMNRIGQLDTRIETLSQTSEIARRIRSIPGFGVTSCAELAGEVGFVGRFASEASLALYVGMAVLDNRSGNYKGSRTARQVNTRAKAAMMTAVARHVNHCDESRRYYEKKRAEGKAHNQAIRSMGRHMVRVIWSMLKYQRDYEVRDVNNISA

SEQ ID NO: 253461 - protein, 312 aa, unidentified
MSYIGIDVSKKLLEGAAHQQAHCFRCPNKPSAFPELLAELIALRPALIVLEATGGLEIPVANFLQRAGLPVVVINPRQVRDFAKATGQLAKTDRLDARVLAHFAAAIKPPVRPFKSKESQQLDALTGRRTQLVEMLAAEKNRRAATTNDSMRADLDEHIEWLEERIAALDDQLQEQIKCSTTWQRKDELLQSVPGIGPVTSFSCLAQLPELGQLTRQQISKLVGVAPLNCDSGDVRGTRHIYGGRAHLRSLFYMAALSAIRHNQAIKEFYQRLIAKHKPFKVAIVACMRKLLSIINAMLHDDLLWIDKAKTV

SEQ ID NO: 253462 - protein, 398 aa, unidentified
MYLNIGIDVAKNIHEACLVNDSGEQIGKFMKLRNSRKSMDKFREHIKSVSEELKAKPRIGLEATGIYWYSLYSEISRDYEVSICNPAQIRGFASVNIRGSKTDKIDAKTIANMLRFGDAPKTDYQNRQRLELREYARFYVKLSKKKANLKKRFRRNLHLVFPGYDQVFKNVFTKTSKEILAQSPTPDDILEMGEAKLLELMKKASNNYIDHGKARELIEKAEDTIPSEILKESALFELQILLDIIENIEKHILALESKMLAIWGEVKSNHYIQTITGISEIRAAIIWAEIGDIENFKHPDQIVAFAGLDPKVKKSGNKEVISGPTKRGSSTLRWALGWAVQESKNVNPVLASYFKKKITEGKHYNTARCAAAKKLVRIIWSVEKNKKSFQIPGNLQSS

SEQ ID NO: 253463 - protein, 317 aa, unidentified
MANTYVGIDVSKHQLDLAVWGAADVDLIPYDQENIEALRDRLTALAPDRIVMEATGGLEVPLATSLQAVGLPVAVVNPRQARAFGRASGQLAKTDRIDARLLARMAAKLRPPVRPLPDTDLRDLRALVVRRRQVTAIRAQEKTRLDTTPAAMRPHIQAHLDWLQTEVERLDRELQDRLQSHPCWSRQTELLRSVPGVGPVVAAVLVAELPELGHLSRRQLAALVGVAPLNRDSGQLRGQRRIWGGRASVRRILYMATVTAIRYNPAIRDFYTRLCDQGKPRKVALVAAMRKLLTVLNAVSRDQVPWQTEPLSTAIHT

SEQ ID NO: 253464 - protein, 344 aa, unidentified
MPSIVGGLDIHRKQLTFDYLDLVNGEVKCGQVSPADRAHLRAWLARFENPAGVAFAVEACTGWRYVTEELQRAGMEAHLAEPADTAAARGRKRRAKTDRADARLQRELLAQGRLPECWIPPEHVLECRALLELYHDLRAEHTAWLQRVHAVLFHQGAPVFHDLSRTDAPAELAALAREHLSPAGQQQVMLYLRMLEVTAGELDVLRRQLIAAARQLRGARVLAESIYGVGPVTALALTCWLGGAGRFTSARKAVRFAGLDITVCSSDGKRSPGHLSRQGPPVLRWAVYEAGKTHARHVAPDHGYYAAVKDRKDGKRAALSEARKIIRLACHILSELGDDALATV

SEQ ID NO: 253465 - protein, 351 aa, unidentified
MRYIGVDVGKNRCQACIMDEDGGILDEFPFANNGEGIKSLLECVSDIQCKAVVKSTGNLWLRIYEALEGHGVEVKLANPYKTKAIASARIKTDKLSARILAHLLRADLIAECYVAPREVRQVRALLRQRASLVKMRTMVKNRVHSHLDRYGLSSPWSDAFGAGGLEWLHGLELEPVDRCILDTHLRHLECLNSEIGFLDSRIAGQALESEDALLLMTMTGVDYHSATLLAYEIGDIRRFPSPKHLVSWIGLCPSLYQSGNSLVMGRMKKDSNGRARWVLVQAARTASRTDPRMRELYQRVSSRKGTGKAAVRVANKMAVIMWHMLTEGKPYMQVKEGLYRSKLKNVKRLAS

SEQ ID NO: 253466 - protein, 313 aa, unidentified
MDKIIVVGIDVSKDRLDVAVRPSGEVFVVERNAAGLEGLAARLGSLNPRLVALEATGGFETVAAAALAAAGLPVVVVNPAQVRAFAKALGQRAKTDPIDARVIAHFAAATAPEPRPLPDEATRLLADLVARRRQIIDMIGAERQREKRAPARLRKSIARLVKALEKELTSVDGDIDDAVRGSPAWREAEDLLASVPGIGPTIARTLIAELPELGRLNRKQIAALAGLAPFTRQSGQWKGRSFIGGGRVSVRTALFMGAMVGKKYNPVLKAFFERLVVAGKPKMVALIAVARKLLTILNAILRDRQPWRQPVPA

SEQ ID NO: 253467 - protein, 402 aa, unidentified
MRFFVGLDWASEAHAVCLIDGRGRVRWQTSVAHSAAGLATLVQRLRRWRQRGPLAIAIERPSGLVVDTLVQAGLDVVPIHPNVVKATRPRYSAAGGKSDPGDAFLLADLLRTDGHRFRPLQPPSDDTRALRTLVRGRDDLVAQRVALANQLRALLERVWPGAAQIFADVDSSIALAFLTRYPTAHSAARLAEKRLSHFLVQHAYCGRRAPRELLARLHAAPPSRVADAEAEAAGDLVRSLVAVLTPLVAQIQQLGAAIAAALQHHPDAPVVQSLPRGGTINAAQILAELGDERRRFSSAEHLAAEAGVAPVTHASGKHHGVAFRWACNKRLRAALTTFANNSRHASAWAATGYQRAVGRGCDHPHAIRILARAWVRILWRCWQNRTPYDLSRHGAAAALAAA

SEQ ID NO: 253468 - protein, 318 aa, unidentified
MVSFVGIDVSSRTLDIAVRPQSLTINVTNDRAGFEVLEKSLRGLKVKRVLLEATGGYEREVLSFLQSAGYKVIRVNPRRARSFAESMNIKAKTDAIDAAVLAHFAEVIPDKPTLQVSPQRALLRELLQQRDRLVQQRDDDRRRLKQAQSEVVARFLKSNLQHFRSQIRQIEHEIKLHAEGLGDERIAQLVQVKGIGLVTAGKLVTLLPELGHVEAREIASLVGVAPFNHDSGTSVGKRSISGGRFGIRCALYMSCLVAVRQNPSLKAKYQALRERGKAAKVALVACMRVFIVRLNAMLRTGTPWQDVELPQCKSAPPA

SEQ ID NO: 253469 - protein, 358 aa, unidentified
MVVVGADVHKRTHTFVAVDEVGRELGSRTFPATTAGHQDAVRWARGTFGDELRWAIEDCRHLSARLERDLLTAGLAVVRVPPKMMAEQRRIARTRGKSDPIDAAAVARAALREPGLPVACHDDTSRELKLLIDRREDLVQQRTRAINRLLWRVHELDPAWAPPARSLDLVKHQRALMDKLAGVPADGIAAVVAELARDELSDIIELTVRINALQKRISDLAAAAAPALLAMPGVGVLTAAKLVGESAGITRFKSEAAFARHAGIAPIPVWSGNTAGRVRLTRSGNRQLNAAIHRIAVTQIRMDGLGKTYYEKKKAEGMSTPEALRCLKRRLARIVFNTLKTDYNTVQHATGTCLPAAA

SEQ ID NO: 253470 - protein, 390 aa, unidentified
MQIISEGRQATAAIRSDLGAIFVSLELSRSTWVVTSLSPGGGEKMSKHTVVAGDIAGLLGRFAELGAKALARTGQRFGFVVIHEAGLDGFWLHRVLEGEGMESHVVDPASVATSRRRRRAKTDRIDGEALLRTLMAYKRGEPRVCAMVRAPTPEEEDRRRLSRERKVLTAERIAHVNRVKGLLFGQGVSSYEPLRRDRRARLEELRTGDGRPLGARVKAQIGREFDRIELLLEQIKAVEAARDALLAEPAAEPGTAPVPAMLLGLRGIGSEFAAVLWSEGLYRHFDNRRQVAAYAGLAPTPWQSGSVNRKQGVSKAGNPRLRTTMIQLAWLWIRHQPQSALTKWFEERVRHNGGRHKKTTITALARKLLVALWKYVTAGVVIEGAVMRTV

SEQ ID NO: 253471 - protein, 359 aa, unidentified
MDQLTTVGIDLAKDVFAICVLDAAGAVLQRRVLRREAFMRWAEQLSPCRVAMEACGSSHHWGRWFAARGHTARLIPAEFVKPFRPGGKNDAADAEAIAVAARQPTTRFVAIKSVDQQAILAWHSVRAGWHEERTALLNRTRGLLAEFGVVIARSADRLLGALPTLIEDPRLPDPVRAMLLEVREQLAALNLRLARCDQQIATHARSSDVARRAGELLGIGPVTSSALAATVPDAKVFRNGRQFGAWLGLTPRQHSSGGRTRLGHISLRGNVYLRTLLVQGARSTLQSALRADPTHASRLQRWIRQLHERKGYHKTLIAIANKHARMLWAMLAKDERYDADAWQRHPLHPPLPAVPASPD

SEQ ID NO: 253472 - protein, 341 aa, unidentified
MNQVSTVGLDLAKHIFQLHGADSAGAVVFRQKLRRGQLLAFLATLPPCTVALEACGSAHYWGREIAKLGHTVRLIAPAYVKPFVKRQKNDMADAEAICEAAQRPTMRFVALKSANQQAAAVVFRTRDLLVRQRTQTINALRGHLTEFGVIAAKGPFHTSKLIAALEDPASDLPQAARAILAVLVEELRSLDERVAVLDREIARHAKESADARRLMTIPGIGAVTAAALTALAPPAQTFRRGRDFAAWLGLTPVQRSSGGKERLGKTSKMGERSLRRLLIIGASAVARWAARKGVPAGSWLGRMLARKPPMLVRVALANKMARIVWALLAHGGVYRAPVAAV

SEQ ID NO: 253473 - protein, 443 aa, unidentified
MTRKNQKRFEVVHPDCAAVDVGGSEHLAAVDPAKCADPVQRFSAFTDDLHAMADWFSSMGVKVVAMEATGVYWIPLFEILDRRGFEVYLVNSRATRQITGRKSDVLDCQWILQLMTHGLLRGAFRPSDEVCSLRSLVRQRANKVRDQAKSLNRMQKALVQMNIQLAQVISNIAGVIGMSILRAIVEGERSPDVLARLRDKRVKVDEATVARSLRGNWRAEHLHALSQELAAYDFLEKQIGECDQAIADALDRLPVLQSDVTTPTKTLRSTHRSNEQQLALHQALNKVMGVDLTAIPTIGIDTALVLASELGADLSRFPTSQHFCSWLGLAPPTRISGGKPLPGKSAKVINRSAQALKQAASIARNDKSFIGASHRARLTRMDTCCAIKATAHQLARLIYAMLTKGQPYVEKGIEEFEERSRDRQLRALERKARKLGLQLVKAA

SEQ ID NO: 253474 - protein, 470 aa, unidentified
MTATPTQGLTRKQRKALARRLQATDPGLEVMHPNAAGIDVGNSTHYVAVRPDRDPNPVRRFDCFTADLHRLADWLQQCGVTTVAMQSTGVYWIPVYEILEARGLEVYLVNARYTKNLPGRKSDVQESQWLLKLHTYGLLRNSFRPTAEIRVARTYWRQRADHVRAISTCIQRMQKALTQMNIQLSNVISDLSGWTGMRIVRAILAGERDPQTLAALSHSGIHASRDTIAKSLEGTWQPDLLFVLQQEVTLYDAYQQRIAECDQALERHVKNFGDKIPDPTATGEEPSRGQLRSGPKRRRRAGSHAPQFDLGHELHRISGVDLTRIDGIDVGVAQTVISEVGLEMSRWEDEHHFASWLGLCPDNPITGGKVIRHGTRPVINRAATALRLAASTLLRSQSYLGAQYRRFRSKLGAPKAITAMAHKLAVLVYRMLRWGHEYVDKGMQYYEERHREQQIHILKKRAAKLGLLVV

SEQ ID NO: 253475 - protein, 459 aa, unidentified
MRQKSKRTKGIEQAHPFEGMSKVNPHAAGVDIGAEEIVVCVAPNETTQLVRGFGNYTVDLQAIANWLTEHKVKTVAMESTGVYWIPLFEVLEKSGFECLLISSRSLRRVAGRKSDITDAQWIQTLHNYGLLESSFRPQADLVALRTLLRHRAQLVEHRSPHVLHMQKALLQMNVQLSQAVTDVTGVTGQAIIRAILSGVRNPKMLASLREPGCKKSEEEIGRALTGTWREEHLFVLKQAVALYDFYTQQILECDEEIERMYGETRPDWDVGELQPLSARKRNSHSKNAHYDTEKIRKHLKRVSGVDISLVDGFGVSLAQTVILECGTDMSKFPTEKHFCSWLGLAPKHEISGAKVLKNSTLKTKNRAGQAFRMAAQSVKRAECAFGVLYRRLRARLGPAQATVATAHAIARVVYRMLKYKVEYDPLSVNEYQKQYEEQQIKYMKKRAAKLGYQLLPVPV

SEQ ID NO: 253476 - protein, 454 aa, unidentified
MSNKVIFNLDELFISVGIDVGADFSWMSIALPNQQFVGKPYKILHNSIDSLTTAVSKIKEAEELYSLESRIFLESTGIYHYPLFCYLRDKGFNCSVINPIITKNSTNINIRKVHNDRFDSKKAALVGLKPDLKVSLMPSDLALNCRNLCREYYDLMDNRSAYVNKLQGELRMAFPQYLGIFSKVTINTSLTLLETYTSPSAFLKADKQEIIDIIKSTARFGLTYAQNKYNAIIQAATDANQFGYIIDSNIKRIRLYISFIRKYDEEINNILESLHELVDANEDADFVKQIHLIETFKGAGFLSAVSIMGEIGDFSAFSKPKQLFAYFGLDPAVKQSGKFEGTKVQMSKRGSAIARRVIHTLTLQSISISHNGEAKNPVLREYYLKKCDSKPKLVAMGAVSHKVCNMMQQMGYRRCNLAVCDCLGCRMDRTCDWNCNLKATKLRPQPALQLTDTA

SEQ ID NO: 253477 - protein, 335 aa, unidentified
MQNESGQHESVSDRLSQPVAGIDVSKAVLEIFIDRSLAGKPPVRLAIANTEQEIQKLLVQLREHRVRLVVMEATGRYHRRLAGVLLCAGVPTKVLNPQRAREFAKSTGKLEKTDSIDASVLAHYARGVDPTPDTPSDAKQVELADLISRRRALVQQRVAETNRSHEQMPKLAARQSKKMLRLIEQQIEDLDRAIARKIESNDDWNNKSQIIDSIPGIGPDSANQLVAVLPELGKLNRQQIAKLVGVAPLARDSGPFKGQRTIGGGRADIRTMLYMLAHNAVMYCPRFEYFFKHLRANGKAHKVAMTACMRKLLVTLNQMVKTNTRWKQPVIAEAV

SEQ ID NO: 253478 - protein, 354 aa, unidentified
MIIVGCDYHPGFQQIAYVDTETGEVKEQRLEHRELAEKFYRELASQGETIRLGMEASGHARWFERLLAELNIELWIGDAAKIRAKRVRKHKTDRQDAQHILQLLGEDRFPQIWVASWENRDLRQLLWHRHRMVQARTRIMKQLQAVALNEGLRCKKKLWREQGRKQLEAYRLAPWASRRREDLLKLLDELNPTIAELTQAIDQEVEKSAEAGRLMTHPGVGPLTALAFVLIIGRAERFQCGKQIAAYLGLVPLEDSSGERRRLGHITKQGSSMLRFLLVESAQVAARSIPHWRNQYFHLAMRRGRKIAKVAMARKLAVRLFWMMRQGWDYEQVNKFGSHAGQPEHRHGVQSNTE

SEQ ID NO: 253479 - protein, 319 aa, unidentified
MTQMTKYVGLDVHQATTVAAVREENGRMIARSVLPTDAAALLEFVRGMRGAIHVTFEEGTQAQWLYNLLVPVVDRVVVCNRRGQTQQGNKGDHADAAELADLLRRGAVRAVYHDGGARAALKELARTYQNLVEDGTRVMLRLKALFRARGIRTPGQAVYRGDQRGQWLAQLTGTGVRFRAEVLYAELAVLQQLRPKVKAALRFRTKRHLWAYAGLAVVTRTSAEYEHDGRRPMRKKRAPMTRGLNRNHNRVLKDVLKGAATAAATRAGPLQDFYRAMIARGMREELARVTLARKLAALTLRLWKTGERYDPTQLTVQAG

SEQ ID NO: 253480 - protein, 391 aa, unidentified
MEKFLKQCLGIDVSKDTLDASMSRINEKLEVIHVEQRQFANNEKGFHDLIRWMDRNRLAEVPCQVVVEATGVYHEHLAYRLVKNKINLAIVLPCKIKNYSRSTNIRTVTDKISARQIAEFGLVKTLINWTPPDPVYRFLKGLCRERVRILNDKTMALNQKHASDYSVLTSQSTLKRHKDRIKYFEKQIKEIEKEILETVNKNADIKRKLEKVCSIKGVGIITAVTILAETNGFEHIRNVRQLVCYCGYDIVVKESGTSVHSKAKMSHKGNRYIRRILHFPAITAVKYNKSLSGFYHRLYERQNIKMKSYVAIQRKLLILIYTLWKKDQYYDPDYMAHSLEKTPIEQCNQMNQSLDPARNSDHAKILGQTKNAALTELVLDRSVDSIIHVQS

SEQ ID NO: 253481 - protein, 405 aa, unidentified
MVRYIGMDVHREFAQLAVVEDGLVRDEGRIGVTPEAVRQWAASLLADDQVSLEATGNSDAIANLLMPLVGRVVVSNPSKTRAIAEAKVKTDKVDARILAQLLAADFLPPVWLPDERTRCLRRQVTRRAHIVRQRTRLKNQVHAILARNLAPTPPVSDLFGTTGRHWLSRQDLPADERASVQALLRQLDFHGAGLAVVDKELALEALTDPVVARLMTIPGVDAIAAISIVAAVGDFTRFDDPDKLVAYVGLNPKVRQSGNSAPVHGRISKAGRAQVRGVLVEAAWSATHAPGPLRAFYLRIKARRGFQTAVVATARKMTVLAWHLVTKDQDYAFARPGLVTHKRRKLELAAGAPSLRGNHRQPGAAYNSKQQRDEENAAAARAERAYEVLVAHWQPRKPAGNQAGA

SEQ ID NO: 253482 - protein, 389 aa, unidentified
MVEKLVVKIAVDPHKRINAVVAVDVAGSVLARGTFAQSTTGFADLMSFARRWQRREWAIEGATGVGKNLAQRLVVKGEVVFDVPSKKSSLVRAFSATSGRKSDDVDAYSVALASLHATDLHEVRVDERAETLRLLSNRRDELVGLRTQAVCRLHRELQILIPGGASRALTAAKAKALLASVRPRDEVGKVRKSLAQDQLADLVAIDKRLKDIGTQIKQAVAASATSLTDVRGVGPVVAAIVLGEVRDVSRFPTKHHFASYNGSAPTTWGSAGDARPCVNLHGNRRLNHALHIAAIVQLRFDCDGRRYYLRKIVDGKTPKEARRCLKRRISDAIYHQLVVDAQAAERGPGGQMGATTKISAADPAPTVDSSIKPQPGPHQKSNPAAARAS

SEQ ID NO: 253483 - protein, 315 aa, unidentified
MNEAEDVIVGIDVAKAALDVAVRPRGEARHLANAAAGIGELVGWMQALSPAVIVVEATGGYEAPLVAELGIAHLPVAVVNPRQVRDFARATGRLAKTDRLDAQALAHFGQAMRPTPRPLPDEDAQALAALVERRRQVVAMRTAEENRLGATRVAPVRARIQAHLAWLEADLGEIDGDLQQQLRASPLWREQDDLLQSVPGIGPIIALTLLAELPELGRLSHGQVAALVGVAPLNRDSGTLRGRRAVWGGRQAVRTALYMGTLRATRCHPAIRLFYDRLLAAGKAKKVALVACMHKLLTILNAMRKHQTPWQAQAA

SEQ ID NO: 253484 - protein, 398 aa, unidentified
MSRIWAGIDSGKGHHHGLALDADGKALLSRRVANDEPELLKLIGDVLDLADGRQVTWAIDMTGGEPALLLALLINHGQEVLYLPGRLVNRASDGYRGEGKSDARDAYVIADQARMRRDLRPIRPGDEAAVELKLLTGRRADLVEDRTRVVNRLRGTLLSIFPALERVLDVTNTGPLRLLTGYQTPAAIRRAGVTRLTRWLANRKVRSARALAEAAVEAAERQHTAVPGEKTIAKLVHTLAGEVMALNEQISELDKLIEGRFREHELADILLSVPGIGAVLGAEFLAAVGGSLDDFDSPDALAAFAGVAPAPRDSGKISGNLHRPLTYHRRLQRVFYTSALVSVRYDPNSRKFYDRKRAEGKKHIQAVLALARRRVNVLWALIRDRRCYQVTPPVTSAA

SEQ ID NO: 253485 - protein, 377 aa, unidentified
MSRDIQYIGMDVHKEAIVIAVLNSSGKLVMESIVETKASSILQFIHGLRGELHVTWEEGTWAAWLYDLLKPHVQQVLVCDPRRNALLKEGNKSDKIDARKLADLLRTGMLRPVYHGEHGLRTLRELGRSYRTISQDLNRVMNRIKALYRGWSIPCAGTQVYAPRYREEWLHKIEHAGVRRRAELLYQQLDGLQTLRRTLRPELLAESRKHKASKLLCQIPCIGPIRAARLIALMQTPHRFRSKRQLWTYSGLGIETRDSAQYRFVRGQLQPAKKPQQIRGLNQNHNHEMKEIFKGAATRASCGVGPLRGFYLNLLAKGMKPEMARLTLARKIAAIALTGSKILSSSCRNQCRFDSVAKGSECPDHSRSAGSLGLFAY

SEQ ID NO: 253486 - protein, 359 aa, unidentified
MAIKVKRSKINFKGKMVNIGIDMHKKSWRITALVEGDIVMTVTLARPDYDSFKKLLAQFLGNYVRIVYEAGPGGFHLYDRLTDDGIECIVTPPSLIPTASGSKVKTDKKDSYKLARLLESNMLKQVWVLSPEERAHRQLARTRRQIANHRSDVMRQIKSLLLFHGIQIPFPGKQQWSGPFITWLKELDLGDEYLNKSLEALMKLFDYLSVEKKSLTHEVIKLAEEEKYASRVKLLKSVPGIGVLSAMEILVELQDIARFKTADELAAYLGLTPSQHSSGEHTRMGHITHAGNDRVRTTLVESSWILIGKDPEIKKKYDNIKYRSGGKRAIIAVARTLSARIRRMLLDQIPYKIDLKKRA

SEQ ID NO: 253487 - protein, 341 aa, unidentified
MQTTKYFIGFDISADDFSASCITSPDNLVFSTQKFLNNFDGFSSFVSLLSKHNIQPSEVIICMEATGVYSENLSYFLASKGFIVCIEAPHKIKNKTKDSPRKNDFVDALAIAEYAYRYTDKLSAWKPKDEILEQIQVLLSTREHLTVQMTANVNALKTLKYKYYQTPLANQIYEQTINKLKEHIKQIDQEIKNLIDKDDSFKSKISLAKSVPGVGLLLAANLLVLTKGFTEHTDYKHTAAYSGICPYEQTSGTSLHKPPRSMKSGPAKLRKLLYLAALSVRTHNINFKKYFLRKVAEGKNKRLVLNNIENKLLKIIFAVINSGVAYTENYKSINPTLLKTA

SEQ ID NO: 253488 - protein, 343 aa, unidentified
MQAVTTIGLDIAKSVFQVHGVDAEGNVLVRRQLKRRYVLAFFEKLPPCLVGIEACASSHHWSRQLKALGHTVRLMPPAYVKPYVKRQKNDAADAEAICEAVTRANMRFVETKTPEQQSCLMLHRTRHLFIRQQTSVINAIRAHLAEFGVVAPVGRKGVEQLLTVVTDASDQRVPEVARACLAALGAQLGRLKAQILEFDRRILAWHRSNETSRRLDEIPGIGPALATALVASVADPKAFRSGRNFSAWIGLVPKQHSSGGKDRLGSISKQGDRYLRSLFTAGALAVIRYAKIHGTQHRPWLTALLARRPTKVAAIALANKIARMAWAVMAKGERYKEPVALAA

SEQ ID NO: 253489 - protein, 342 aa, unidentified
MTYYAGIDVSLEYSSVCVVDGAGKIMREQKIASEPEALIAWFRGLGFGLERIGLEAGPMSQWLYAAMRAAGLAVELLETRHVRDAFKAMPVKSDRNDARGIAQLMRLGWFRPVHCKSMAAQEMRALLTARKLVQSKLLDVQMSLRGLLRGFGLKVGPTTPSRFGGRIRDLVEGNATLEVIAAALLVVHETLRREFAGFEKRVRSIARSDGRVRLLMSTPGVGAIVALTYVSAIDDPARFKSSKGVGAHFGLTPKKYQSGETDITGRISKIGDEGVRTALYEAGNIILTRPLKGCTALKSWAMRLAKRAGMKKAKVALARKLAVIMHRMLVDGTLFKSAAVAA

SEQ ID NO: 253490 - protein, 319 aa, unidentified
MKNISQWVGIDVSKATLDVYIRPMGKAFQVANTETEIANLVQQLQSYDLNLIVLEATGGLETELIIQLQAALLPVALINPRQGRDFAKATGKLAKTDAIDAQVLAHFGEAMKPEVLAIESEMARQLGELISRRRQLVEMSTAEKNRRDRARGKALADIEAHIDYLEQRLQELNQEIETLTQNNQQWIDKVNLLKTTPGIGQVISTTLVSDLPELGKLTAKQISRLVGVAPINHDSGQHKGKRMINGGRAYIRAILYMGAVVAMRHNPVLKTFYERLVERGKPKKLAITACVHKMLVILNAMIRDHLPWSISHDSQPISA

SEQ ID NO: 253491 - protein, 331 aa, unidentified
MVYAGIDVHRKRSQVAVLDEAGTELVNRNVDNGSEAMIDILEELEVGTPVAFEAAYGWGWLADLLERYELEPHLVHPSACKAIAAARLKNDKVDARMLAHLLRTDLLPEAWLAPKEVRDLRSLLRHRAALVRMRTALKNRIHAVLADEGLKAEGEALWSDIGHQWLVRVPLRVKHREIVDDCCGMLDALAIPIGRLEAEIHSLAKADPRVDALCQLPGVGILTAMTLVAEIGDIARFPTARKLCAWAGLTPTVRNSDTKVHHGHITKAGPAAVRWILTEASYQARRFPPFSATFEATTKRRGKRIAGVAVSRKLLARSFHVLKSLEEAPIQ

SEQ ID NO: 253492 - protein, 542 aa, unidentified
MRSSTDGDTRGFPGRRWGLCFIGGSFILREASGNREGYGGHSPKRDHGRVTARVTNDVTATPRATLKNGLISTSGGSASVPGCRVILCGSRHTALDRINPNVAGIDCGAAEHYVAVPPDRDPTPVQSFTTFTTDLLRLADWLTACGVRSVAMEATGVYWIPVYEILEARGFEVLLVNARHLKNVPGRKSDVSDCEWIRELHTVGLLRGSFRPADSIVALRGYLRHRQTLIESAGTYIQRMQKALVQMNLQLPLVVSDITGLTGLRILRDIVAGHRDPAELAAHRDPRCHASKAEIIAALTGNYRPEHLFALQQNLALFDACQAQLALCDRAIDTHVQTLTAHVPSPASPLPAPRVTKKPRDNEPRFEIRAPLYQLTGGVDLTQIDGIAPYTALKLISEIGTDMSRWPTEKHFTSWLTLAPKNKISGGRLLSSRTQPSANRAAAILRMTAMSLGRTQTALGAFYRRLAARIGKPQAITATARKVAILIYRALKGELTYRDPGADAYDVQQRTRVLRRLRQRAATLGFSLVNRETGEILEPAIS

SEQ ID NO: 253493 - protein, 344 aa, unidentified
MGVAVGVDSHKSSLAVAALDELGRVVGTKEFPNDARGHDALLRWSKAQDSDRVIGIEGAGSYGAGLARYLIDAGENVYEVPAFLTHRERKRAPSKGKSDPTDAVAVARVTARGEGLSSPRRIDIFVDLKLLSNHRDQLVRARTRLINRTHTDLVISHPGYEKKMPKLNSKKNQDGAMTLLRGDRSVRAGLIRDRIREIRRLSNKIADVERQIAGKVNESGTTLTELQGIGFVIAAKILGEVCEPGRIRSKGAFAMWTGTAPLEASSGATKRHRLNRGGNRQLNYALHMMARARLRHHADTKAYVARRRTEGKSEKETVRCLKRHLSNLVFRQLVADVRALPEAA

SEQ ID NO: 253494 - protein, 496 aa, unidentified
MRVQEPNAPGQRGGDEATATPALVTTSDRATPARHERIYVGLDIGYREHVAAASPLAVFNVGRNPDAWKRVKPIHFASDAIGLGRFQRYLDRHSPHPGDFLILLEPTGSYGLTALLYLLGKGYRVLQVDNRAVKDYREKIFGSETKTDDTDARLMARMGFLHELVGEEFSIQPVLLMNSDASALRGMVHDLAKLQKEITRRRNQLQQLAAVTFPELKTFFKGSTAAPAARALLEHFASPQHLAAAPTEHVADVLRSAHAYSHAARAAELQAMARTTSGVPTLTHHQWRQGWLIKQLELLENARQDLVDQVAHATATHPYARIIESLPVKSPIWTATLIGAIGDIGRFTTASQFKAYLGWYPQLSRSGSSTDSSELAKRGVRPARNVLGQMTVIMLSSTIRSNPFRDVYQRLTTRGMRPAAALGHVAGKLSVVLYGMLKTMTPYDERKHREQLGLLTAAEQPSSTPVEVALELVDLVDQQTDLAEEPTNTDDLRRVL

SEQ ID NO: 253495 - protein, 412 aa, unidentified
MDTVVERCAGLDVHKDTVAACVRFPGPSGERAQEVHTFGTTTTELLALRDWLVAHGVTLAGMESTGIYWRPVYYVLEDAFECWVLNTRHLRNVPGRKTDVRDAEWICQLVEHGLVRPSFVPPREIRELRNLTRYRKAQIEERTREAQRLDKVLQDAGIKLSSVATDILGASGRDMLAALVAGTRDPEILSELARGVLRKKIPQLKQALAGRFGPHHALIVGTILSHLEFLDEAIGNLSAEIEQVIAPFGLAVEMLRSIPGVQQRTAELMIAEIGVDMGRFGSSARLASWAGMCPGNNESAGKHRSGKTRKGSKWLRSALTESARAAARSKGTYLSAQYHRLKGRRGANKATVAVGHSILVAAFHILDRGEPYADLGADYFVHRHNPERHANRLVRQLRALGYDVTIEPVAAA

SEQ ID NO: 253496 - protein, 377 aa, unidentified
MRVIGMDIHRTFAEAVMIDGDRLIRLGRIKMSRDHLAAFAAKLTSEDHLVIEATGNAHAVVEAVAPFVGRVIIANPRQVHLIAKARIKTDVIDATVLARLYASGFLPEVWVPDQSTLRLRRQVTRRNQIVRQRVRLKTMIQAILHAHLVPQCPHADILGPKGRAWLLTQLLPDDESAAIERHIREYDRLTDDLRVVERELARDALGSAETKRLMTIPGIDMVVAIGLLAAIGPIDRFTSPGRLVAFLGLNPSVHQSGNSPARHGRITKQGPCHARTMLVEAAWQAVRGPGPLRAFYERVRGRRGTHVAVAVARKITVIVWHLLTRGEDYAWVRPALHAKKLRDLELRSGFPARRGQRGAGYAYNLARSRREERQRGE

SEQ ID NO: 253497 - protein, 357 aa, unidentified
MGQSNRISFKGQNIYVGIDVHLRSWSVTILSETSVLKRMSQGADPDALPRFLASHYPEVEYHSVYEAGFCGFWIHDRLTELGIHNIVVNPADVPTMGREKLRKTDAVDSKKLAVCLRARQLKGIYTPDSEALGIRSLIRLKNSITKDTTRQKNRIKSQLRYLGIEIPAEYLEPHSNWSKRFLNWLKEVDMRTPSGRHSLDILIMQFEALRKQKAEMTRKLRELSHTERFEETLKLLMSVPGIGQTTGLALISEIVDITRFANAEQLAAYVGMIPMCHSSGDHEGVGDITLRKHAILRSNIIEAAWVAIRKDEAMQLCYLNNCKRMVPSKAIVKVARKLVNRIYFVLKRRQPYVNAVA

SEQ ID NO: 253498 - protein, 427 aa, unidentified
MEEVTDEPLYRDRVCGIDIGKAQMAATIRVPSDKNPARRMQETRSFGTTRREVLALADWLRCWQVPALVMEATSDYWKGPFYRLEAEGFECVLADAKQVKNLPGRPKRDPSDSRWLAQCFERGAVTACFVAAPEFRVIREHTRYRRDLTAERTREKQRAEKLLESAAIKLSSVLTDLHGVTGRDIMNHLIAGERNPRVLAQLARARARRKITELEHALEGAEFFTPGLAALLARMLARIDQLSTSIDEITTVIETLLDPYEEQLQQAGSMPGWGRRSAQDAVAETGVDMTRFATGGHLASWAGRTPLDNQSGSRNGRAKSKKGNRYLAAITGETAVAAGKTQTREGARYRRLSRRRGKAKAQVALGNTQLKVYHKLLSSPGMRYEDLGVDYYDNRASARRQVNALEKRARELGYTLVPDLTGCPEAA

SEQ ID NO: 253499 - protein, 414 aa, unidentified
MFYQVSTKYVCGIDLHAKTLTACVMDREGKILKKKTISCQRHKLIDFLSTWENEITVGVESTYNWYWLIDSLKKNEIPCCLGHALYIKRKMSTKHKNDPVDSRGIADLLRTNQFPPAYAYPKEMRTVRDLLRRRHFFVRRRAATFTHFQNSLHQDGCIEPLRNKLQYKSTRWSLVKLTKNIDLQKILTTDLEYIAALDKLIDDLDKTILEKARCHNRKHLEALQTIPGCGVATSLTVLYETHTMQRFRTPQCFSSYSRVVRAENESAGKNLGGSSNDKIGNPYLKWAFAEIGQSMIKNYPDICLWHQNQAAIHGKAGAHARLRHKIAVAVYFILKHDKVFDIKRFLSIKKDRTENPPQKRTETSGQQSEPIFATENPSGLSKIRRAKTGFNKTIKKSISGRLSLRTTGKRKVLS

SEQ ID NO: 253500 - protein, 406 aa, unidentified
MDVVYSHVCGLDVHKKNVVACIMTPKGKEIRTFETMTDDLILLMDWIKGAGCTHVAMESTGAYWKPIYNLLELEGIETLVVNAQHIKNVPGRKTDVKDAEWIAGLLRHGLLKGSFIPKREQRELRELIRYRRSLIEERAREVSRIQKVLEGANIKLSTVVSNVLGKSGRAMIEALISGETNPDNLSELAKRKLKSKKEALKRALNGLVGNHQKLMLSAQLRHIDYLDEEIGRLDKEIKRRMLPFENDLTLLDTIPGVARRTAETIAAEIGVNMDQFPSAAHLCSWAGLCPGQNESAGKRLSGKTRKGNKKLRSTLVEAARAAARTKETYLSSQYHRIAARRGSNRAAIAVAHSILSMVYYILKRKQPYIELGPTYYEERKRNTIIKQSIRKLESLGVTVSIDSTAS

SEQ ID NO: 253501 - protein, 458 aa, unidentified
MRILGIDLAVTAKHRAILADERGRFISPLLRFRTCQADLERVYALARQGMASEEPLVVVLEATNIVWYPVAVFFHQRGATVYLVNPRMAADLARFYQRYAKSDRLSAQTLARLPVVNPDRLYPWTPLKPGYLALQRGCKELDRLTEQASAIRNRLQSTDHLGWPDLHRRVFADPFSPAARWFRDHFYDPRRVVAAGVSGLRQAWRAAEVCDGDEDWIEPLLTLAQEVLSLYGEQGGYLDYSALADEVRREQRRLADLEADARFVCLQVTRPRYRQLHPSRNLETIKGVGQDGAAVYVAFVGDPNRFANQRAFRGWSGMVPSSDQSGEQEGKGLHITRAGPDLVKKYAFLGAETARHWDPQIAAIYYDQMVNKGKHHTQAICACVTHLLDRIRVVLTEDRPYELRDVDGTPVTPQQARAIIAERYTVPEEVRRRNTRRARRERRERREERRSGSRPVRA

SEQ ID NO: 253502 - protein, 346 aa, unidentified
MLYAGLDLSRHRLDVHLMDQAGQPVQVTTAPPDADGLRGLVRQTARFDQPVMAAIESMNGARFVHDQLELGGWEVQIADAQKVKGLAPLACKTDRIDAWVLAELARRDLVPAIWLPTPAVRAERERARWRLHLVRHRVALKNRVHATLVAFGRPCRTSDLFGPGGRALPARLGLPEPWAGTTAAAVALIDDLDAQIGGCEQELRRLGADHGYVPLLMSAPGIAWVLGYRIAAELGDIGRFPSPKKLVGYTGLCPRVYQSGGRDHRRPLARNGPTYLRWALVEAAVHAAHHPAYRGHYQRTKTRLGAQRGPAVARVEVARKLTEAIWHMLTKQVPFAPARSQDPLVA

SEQ ID NO: 253503 - protein, 356 aa, unidentified
MKQVKTLSFAGQDIYCGIDVHKKAWSVCIRDDERELSSFSQPPQPAVLTDFLGRNYPHANFHAVYEAGFCGYWIQQALSHQGIDCIVTHAADVPTSDKDRRQKTDAVDCRKLAKELSEGSLKGIYIPSRQIIEDRSLVRGREQLVQDQTRYKNRILSWLHFFGIIIPEGYKKNTHFSRRFISWLEQLQLNESTKLALQVKLGGLQCIRQQLLLANRNLRKLALSDRYQKQVELLRSIPGIGITNAMIFLTELDNIARFETFDHLCSYAGLKPDIYSSSDTIIIKGITHRCNSLVRESLVESAWKAVAKDPALLMAYKQYKKRMNYNNAIIRITKKLLSRIRYVLLHQTCYVTGVVG

SEQ ID NO: 253504 - protein, 344 aa, unidentified
MEITRVGLDIAKQVFQVHGVDERGKVVARKQLARAKVLEFFVQLPPCLIGIEACASAHHWGRELSKLGHTVKLMAAQFVIPYRKRDKNDANDAEAICEAVGRPNMRFVAIKSEEQQSVLMVHRARSLVMANRTAQVNQIRGLLGEFGIVVPKGVARLRRELPGLLEDAENGLPALAREVLAGLLDQFHDFDTRVTAYDRRIRMLAEASEPARRLMQVEAIGPQTATALVASMGDPHVFKSGRSYAASLGITPRQHSSGGKERLGQITRQGDRYLRTLLVHGARAYLRVVDKKTDAKSAWARRLKERRHVNVAAVALAAKHARIAWAILAHGTEYRPAGPEVVAA

SEQ ID NO: 253505 - protein, 355 aa, unidentified
MSEKFNSEIAVIGIDIGKNSFHIVGQDRRGSIVLRQKWSRGQVEARLANLPPCLIGMEACTGAHHLSRKLQALGHDARLMPAKYVRPYSKGEKNDYRDAEAIAEAAQRPTMKFVATKSADQLDLQALHRVRERLVGQRTGIINQIRAFLLERSIAVRQGLHFLRAELPGILAKRTDVLSPLMLRVIEDLAGDWRRLDERIDALSDEIMMLARQDKGCERLMTVPGIGPIISSAMVAAIGSGDTFAKGRDFGVWLGLVPKQMSTGDRTILGSISRRGNRYLRTLFVQAAWVVLVKIKPEGWERYGLKSWIETAKQRLHRNVLAIALANKLARIAWAVLHKGRAFECVTNATASRPA

SEQ ID NO: 253506 - protein, 423 aa, unidentified
MKLTYPICCGVDVHKTFLVATIITSEYVMPHYYQKRFSTFYNGLVAFKKWLLEYDCKDVWMESTGKYWVPVWNVLEDSCHVVIANPKWVSAVKGNKDDKKNSKWIGNLFRMGLVPSSYIPSKDIRILREFTRYRSKLVSMRSSEKNRFQNAFTVCNLTLDAVVSDMLGKSATDIENYLLDTDTVDPEHCVSLLHRSLKKKASDVVEAVSGFNMTPEQKERGRIVQEHFADIDHRIAQLDEIISNLVAEYEGQISLLCTIPGIDRRTAITILSEIGTDMSQFGSSKRLCNWAGLAPASNQSAGKKKSVRISRAGVYLKPALVEAAHAAVKSTEKQPYYRIKFERLMKRRGKKRATIAIASMILTAIYAMLSTGEIFNPSDLKKFDMPEDLKRKQTLSSAKEAVKLLVSLGLVTAGSISLDALAG

SEQ ID NO: 253507 - protein, 373 aa, unidentified
MANASGKELLSRRVENDETELLKLIDEALALAEEVIWAVDQPGGSAALLLALLWERDQRVLYVPGLSVDRARDAYRGESKTDARDAHLIADHARMRSDLGELRAGEQELSELQLLLARRRDLITDQSRTIARLREALLSLFPALERALDLNSKGPLTFLTHYQTPTQLRRAGHKRIATYLRNRGVKGSNKVANKALAAAKAQSVTLPAQGVAASIVAELARDVLGLKERLKSIDEEIGQRFFARPEARILTSLPGMGPILGAEFLVAVGEITAFESADRLAAYAGLVPAARDSGKRVGNNKRMRGGNKVLKRVFYQSAFASLRSAPESRTFYERKRAEGKRHTQALIALARRRVNVVWAMLRDGTTFESRSAA

SEQ ID NO: 253508 - protein, 349 aa, unidentified
MIVIGIDPHKQTHTAVAVDRATGGVLAELTVKARTPGFERLVTWARELDQDRLFAVEDGRHVSGALERHLIARGERSVRVAPRMMGESRQADRVRGKSDPIDATAVARAALAHPDLPVATLAGPEREIGLLVAHRESLVRERTDRICKLRWLLHDIDADLAPAPRTLNRFKALDGLAEALGSLEPSVAVRICLELISRCREITVRANELEREITALINLHAPALLAIPGCASLTAAKIVAETAQISRFPTEGHFARYSGTAPVPASSGASHRHRFNRRGNRQLNAALHRIAVTQLRMHEPAKDYLAKKHAEGMSKTEAIRALKRHLSRVVFKTMTSKAHPTDRLTAAAA

SEQ ID NO: 253509 - protein, 437 aa, unidentified
MNHLRFQTNRQMLQGKIVIGIDPAKLNHQAAVVDMTGTQQGNSFAFPASAAGYHEILWRRLAKIIPAHQPGDVVFAIETSCNLWETLAFYLHSRGYTVALVSPLSTHHARPVMNLEFSHTDPKDAFLVATIAQRGAFHRYESFNPHTNAMHQLAITYDKLRQDLAHNRARIRSLLDRVFPEFLHILKPDTQTAMHLLKNSLFPDEFLHLDLCAESLRIEQISRRQLGRSTLEALQQQARRTIGVARQSHERLADRLTLDAYLALVETLQTQLDRVLDELIARANELPQFARITSLSGVGNRLGALFLAEVRDLSRYSHYKHIEKLAGLNLRLHQSGRYTGSRHLSHIGNPRLRWIIYKMTEETAKRVPEVRIKYLRRQLKRRRHVKNVVAATPQLLQLIVSMERGQHAYELRNDTLEELQQLENQYAQLKAARKSAA

SEQ ID NO: 253510 - protein, 363 aa, unidentified
MHDSITWIGMDVHKESIVVTAVGNDPERIRARFELPNTDKGVDRLVARLQEFGDVRCVYEAGPCGFELRRVLDSRGIPCDVVAPSLIPKKAGDRVKTDRRDAEKLARLHRMGELTPIHVPSTAQEALRDLVRAREDAKEDVLRRRHRLLKFLLRQGRRHEGKSWTQVHWNWIRSLKFDDANTQTVLAEYVLALEQELERVQRLNLRIEEESRHPDVAPAVARLRTLRGVDTITAMTLISELVDMNRFSNPRELMAFAGLVPSEYSSGGRQCRGRITKTGNAHVRRVLVESAWHYRHSPTGAGPTIRKRREGQPPEVLEIARKAEMRLCKKYRKMTARGKSSRIAVVAVARELAGFVWAIGKNL

SEQ ID NO: 253511 - protein, 400 aa, unidentified
MRAVFGIDVSKTSSEVAILVNGEKVHGYTILNDAFGFNRLLGDLKTVHNPEIIFEATGVYSRRLQAFLEEYSYAYTRLNPLEAKKQLDSLRVRKTDKIDAEKLAKSQLVHNRKPTYVQEEVYQHLRDLSRFYQNLTEDLVRAKNRLHKVLQITFPELENLLSTPTGEQYWNLVMAFPCKEFVLRLSQSDLCEIIRQSTSKRISEKRIAYLTDKLIKLAKQSFCAVKKTSPMLEEVRYYAQELLRLSERRQVVLNDMVALAQPLPEYDILRSIPGIAETTATSIIGELGDIRRFQSSNQINAFIGIDLRHYESGNFLAKEHITKRGNPYARKILFKCIHNIASASHTNPCHIADFYEKRKRQSTIASTKPHAIASIHRLIRTMYYLITHNKLYDYSLTQNR

SEQ ID NO: 253512 - protein, 355 aa, unidentified
MSEKFNSEIAVIGIDIGKNSFHIVGQDRRGSIVLRQKWSRGQVEARLANLPPCLIGMEACTGAHHLSRKLQALGHDARLMPAKYVRPYSKGEKNDYRDAEAIAEAAQRPTMKFVATKSADQLDLQALHRVRERLVGQRTGIINQIRAFLLERSIAVRQGLHFLRAELPGILAKRTDVLSPRMLRVIEDLARDWRRLDERIDALSDEIMTLARQDKGCERLMTVPGIGPIISSAMVAAIGSGDAFSKGRDFGAWLGLVPKQMSTGDRTILGSISRRGNRYLRTLFVQAAWVVLVKIKPEGWERYGLKSWIETAKQRLHRNVLAIALANKLARIAWAVLHKGRAFECVTNATASRPA

SEQ ID NO: 253513 - protein, 342 aa, unidentified
MEYYAGIDVSLECSSVCVVDANGKIVCEAKVASEPQALIAWFGSLGFGLQRIGLEAGPLSQWLFAAMKAASLAVELLETRHVRKAFEAMPVKSDRNDARGIAQLMRLGWFRPVHCKSMSAQETRSLLTARKLVQSKLQDVENSLRGILRGFGLKVGKTTGQKFAGRIEELVAGHPHLQTIAKALLAVRAVLRAEFAAFEKQTRRMVRSDTQARLLTSVPAVGPIVALTYASAIDDPARFKSSKQAGAHFGLTPKKYQSGETDYTGRISKIGDASVRTALYEAANVMLTKPVKGCSRLKSWAMRIKRRAGMSKAKVALARRLAVIMHRMLADGTPFNAAAAAA

SEQ ID NO: 253514 - protein, 315 aa, unidentified
MVDVPCFVGIDVATAQLDIAVRPSGERWAVPNDASGVTTLVDRVQALQPTLIVLEAPGGLERLVASALATAGLPVVVVHPRQARDVARATGQLAKTDALDARALAHCADATRPTPRPVPDVQTQALRALLGRRQQLVAMRTAEQNRLAGTSGRLQADMTAPIAWLNARLTALDDDLDTALRSSPLWRENDDLFQSAPGIGPVCARTLLLALPELGTLTRQKIATLVGVAPLTCDSGTLRGRRMIWGGRARVRTVLSMATLVATRFNPRITTFYERWLAAGKVKKVALTACMHKFLTMLHAMLKHRTPWQGQAVQG

SEQ ID NO: 253515 - protein, 394 aa, unidentified
MTFWVGFDVGKTFHWVSVLDDAGEVVLSHRVEATEQGLEAACSQIAGLSEERKVALDVLGGPATLLLALLAERGEQIFHLPGLAVNRAREAYRGGEHKSDRNDAFVIADQLRMRWRSLQEICPKDEALAEMRALVVGHRRDLIQDQTRRITRLRGLLLEICPALEATLNLNREGALQAVTKVATPASIRRLGEARLGRWLKSRGVRKWRVLAQRIVAAAKAQKCELPAAEVKAALVAEIALEVLRTRKRIAALDDRLEELLASNQQASIVRSLPGMGTVFAAEFLAEVGEISRFNSANDLAAAAGLAPVLRSSGSVSYQRRPKRGNRTLKRLLYRSAFCAISHHGASESFYQRKRTEGKTHHQAMIALARRRVNVLWAMLRDGNTYVEQSPEAA

SEQ ID NO: 253516 - protein, 346 aa, unidentified
MNSLPHLWASVGLDYHDLVIQVCVLDDQGNMLGNRSVPNNADAVYEFVDRAAEGRLIRAVAIESCCGAANLAEQLRKFQWDVQLGHAGICARMKQNPDKTDYSDAHLLADLVRVGYLPRVWLPPAAIRDLRRLGRYRQQLADRRRNVKLRIRAMLREERIIAPPEVGNPWTVAWKRWLKESAHLDEHSRWVMDEHLENLERVSAKIREVERRMETATADDPVVQQLRQTKGVGLVTAVVMRAEIGSFDRFQNGKQLARYCAVTPKNVSSGKRQADGGLIKAGNLCLRTMLIEAAHRLARYVPRWRQMKERLKAAGKPGSVAAAAVANRWIRRLYWEMQETTLQTAA

SEQ ID NO: 253517 - protein, 319 aa, unidentified
MDIGIDLGKRKSYVVMEEGGEVVKEGYTETSKEGFEEFFGGVVHANVVVEASSSTNRVAALLEGHNLTVANPMKVKVIAQSVKKTDKIDAHTLLDLYKKDYLPESWLPDRKTRGLRDLCRNRDFLVRQRTAVKNRIRYLMYTEGVEFGGFNRHTVSELKKYPMMDTLACQLASLNRQICETNRQISSEVARNPYAQVLYTVPGIGEYSALAISSEIGDISRFENAPALSAYAGLVPRIRQSGNREWKGRIIKGNAYLKTILVECVQVHIKLCPRSFITSAYRRIRMRRGHNKAKIAAARRLLELIYYMLKRNEGYRTND

SEQ ID NO: 253518 - protein, 373 aa, unidentified
MKKVRFLGLDVHADTIAVAVAEPEGEVRWLGIIPNREESVRKLVKKLGPAEQLQACYEAGPTGYVLYWQLTALGVKCEVVAPSLVPVKAGDRVKTDRRDATKLARSYRAGDLTAVWVPNQEHEALRDLVRAREAAKQDQLRARHRLSKFLLRQDRRVPSGFKVWTQRYQDWVKEHVHFEQPAQEYTLMDYVHEVEHMDDRIRRLDVAIAEAVKLAPPGMQEVIQALQALRGIAQISAVTVVAELGKISRFDRARQLMGYSGAVSSEHSSGKRMQRGQITKTGNAHLRRIAMEAAWAYRHRPAIGPRLRKRQEGLSEEVKEIAWKAQHRLHKRYRNLSAAGKEKQKVVTAIGRELLGFIWAIGVQVERNSKQVA

SEQ ID NO: 253519 - protein, 316 aa, unidentified
MEIAPIFIGIDVSKARLDVAMRPSAEKLSVSNDEAGIQALVKRLSELKPVLIVLEATGGLERSVSGTLGSAQLPVVVVNPRQVRDFAKALGQLAKTDRIDAEVLARFAEAIRPPLRPLPDKVSLELRALIARRRQLIEMMVAEKNRLSTASKAVRKRIEAHIRWLETELDRADKDLDHSIRQSPIWQEHEDLLRSAPGIGPVVSRTLLAELPELGRLNRKQIAALVGIAPLNCDSGTFRGRRGIWGGRATVRAVLYMAALVASRRNSVIRDFYKRLRDKGKAPKVALVACMRKLLIILNAMIKHKTRWSEIIPQTS

SEQ ID NO: 253520 - protein, 476 aa, unidentified
MPRVRAHPQRRGPAVTLPRELQQVNLNAAGVDIGAESHYVAVPEGRDADGQDVRAFGAFTADLAAVADWLTRCGVETVAMESTGVYWIPLFELLTERGFEVLLVDPRRLKYVPGRKTDVLDCQWIQQLHTFGLLAGAFRPTDQICVLRSYLRQRAMLVTYAAHHIQHVQKALEQMHLKLAHVVSDIAGLTGLAIIRAILAGERDPRVLAQLRDRRCKADEATLARALEGTWRPEHLFALRQAVELLDFYRGQIATCDAEIEAQLGRFEDKSGGQPLNAAARGRKAGRTALSFDARPPLQRLTGVDLTRIEGIDAATALKVVAEIGLDMTRWPTDKHFASWLGLAPGNKVSGGKRLSGRTKPSASRAAAALRLAASTLHHSRSALGAFYRRLKGRLGAPKAITATAHKLARLIYSMLRFGTEYVDRGQDYYERRYQSRVVSQLMRRAQELGYTLTKTADISPPRRFTRMMMLLGRAG

SEQ ID NO: 253521 - protein, 350 aa, unidentified
MTKIIRIGVDTSKSVFVLHGVDSAERPVLRKTLRRRQFLEFFAKLEPTKVGLEACGAAHHWARELQKLGHEVVLLPPQYVKPYVKRNKNDAADAEAICEAMSRPTMRFVPVKTAGQQAALMLVGTREALIRRRTQLTNTIRGYAAEFGLTAAKGLDKIEPLLVRIAADDSLPELAQELFAEYGQEYARLQRQLQKIEAKQLAWHKGHEASRRIAEVPAVGPIGASLTVMKVPDPKAFRCGRDFAAWIGLTPKDHSTAGKTRLGVITRAGDETLRSVLVAGATSLIQQVRKGRGHPSPWLLQLVRRKPPKLAAVALANKNARIIWKLLVSGERYNPTRISRGGGTTAKTAA

SEQ ID NO: 253522 - protein, 398 aa, unidentified
MTESSDYESVQVFIGVDVGKDTHHAVAINRSGKRLFDKALPNDENKLRSLISDLKQHGQILLVVDQPATIGALPVAVARSEGVLVGYLPGLAMRRIADLHAGEAKTDARDAAIIAEAARTLPHALRTLKLADEQISELSMLCGFDDDLAAQTTQASNRIRGLLTQIHPALERVLGPRLDHPAVLDLLQRYPSPEKLASLGEKKLAAQLCKLAPRLGKRLAADIAQALAEQTVVVPGTNAAAVVLPRLALQLITLRKQRDEVALAVEQRVLAHPLYPVLTSMPGVGVRTAARLLTEVACRAFASVAHLAAYAGLAPVTRRSGSSIRGEHPSRRGNKALKRALFLSAFAALRDPLSRAYYTRKMSQGKRHNQALIALARRRCDVLFAMMRDGTFYTPQAS

SEQ ID NO: 253523 - protein, 385 aa, unidentified
MVTGITAYKRRSQMNNTTVYVGMDVHKESFTLCAYTLEKEKGSYSRRTPADYKEVLKYLEFLRTVYGNDTIFVCGYEAGCLGYTLYHQLTDHHVDCVILAPTTMLEQRGKKRIKTDKRDAEIIGKCLAQHNYSPVHVPTASDEEVKEFLRMRDDHKLALKKVKQQILAFCLRHNYRFDGNSHWTAAHINWIKSLTPEALYKEILDEYLLTYTILSDKLERLDKRIEELAAKAEYKEAVKKLCCFIGVKTHTALSVIVEVGDFKRFASAENFASYIGLVPGEDSSGDGQTRLGITKAGNRHVRMLLTEASQCYSRGQIGYKSKALKARQDGNTPQVIAYADKANERLRRRYYKMVLSKCKKHNVAKTAIARELACFMWGMMTDNIA

SEQ ID NO: 253524 - protein, 357 aa, unidentified
MAISRLADTIDGVIGVDPHRDSLAAAITDPVGGVLAQTSVSADAAGYQQLLAFARVQVPGRRCWAVEGAGSYGAGLAGFLQVRGELVVEVGRPKRPARRGGAKSDALDAVRAARHALIEDHPLSPRRRGDRQALRVLLATRHGACRAKVSATNQLKALIVGAPEELRAELRGLASSQQIARCAALRDRPARSLEHRMTIRALRTTARRIQLLAAEAAELRTELERLVAAVAPWLLELPGVGPISAAQILVSWSHAGRLRSDAAFAALAGANPIPASSGQVIRHRLNRGGDRQLNRALHTIVLARLRDDPATRAYAARRRAEGKSARDIRRCLKRAIARQLFKLLEGHDRAVVEIIRA

SEQ ID NO: 253525 - protein, 374 aa, unidentified
MANIIEAFVAFDTSKLRNAVAIAEAGRAGEVRFLGEIENTEAAIAKLVRKLAAKYGRLTFCYEAGPTGYGLYRQIKSLGHECMVVAPSLILKKPGERVKTNRRDAVNLVKQLRGGDLTAVWVPDPRHEAMRDLTRAREVAVEDLRRKRQQVSAFLLRQGLHYPGERAWTKAHRDWLASQKLEYAEHRIAFEEMLLAMRQAQERIERLEQAIRVAVPDWSLAEVVTALMALRGIDFISATAFLAEVGDLSRFRTPRELMAYLGLVPSEASTGDTVKRGPITKAGNRRARRVLVECSWSYQHPPRVGKEKQERVAAAPRAVREIAWKAQCRLSARYRALTRKGKLKTVAVTAVARELSAFIWAINRQIANPDAAAR

SEQ ID NO: 253526 - protein, 339 aa, unidentified
MTVKTVGLDLAKDVFQVHGISENGRVIFNKAIKHAKLLAFFETLPPCRVGMEACGSSHHWGRQLRKLGHDVKLMPAGYVKPYVKRGKNDAVDAEAICEAVRRPTMRFVEIKTEEQQAILSIHRTRDLTVRQRTQMANMIRSLLREFGHILPIGIEAVTAFAKRHLAGNHPDMPEIANGMLGIQCYQFIGLNERIEGYSKMIEQHALLNADARRLMRMPGIGPITASAIVATIGDGNQFRTGRDLAAWLGLTPLNKSSGGKERLGKITKQGDRYIRKLLVVGMTSRAVMAKRSPEKVDLWTAKIIADKPFRLATTAMANKAARSIWAMLTKKQEYRQPAF

SEQ ID NO: 253527 - protein, 328 aa, unidentified
MTKRTIICAGIDTGKRKLDVALEGNRERLEVENTSEGHAVLSAWLRGHRVERVGIEASGGYEQPVVAELRRKRYVVVVFQPAQVRAYAKFHLQRAKNDKIDAALIATCTAAVRKIHAAPDPRLLPFAEQLTMIDQISEDIARLKNRIESCRNTRIKKLWSEDIARLMQREKVELKALVASIRKHPDLARRLELINSVAGIGLPTAVAILVRLPEIGQITREQAVALAGLAPYDDDSGERVGVRHIDGGRKRLRRAVYTASLAAAFRWNPQLIQIYQRLRAAGKEHKQALVACARKMLIFANTVVARGTPWGDEPPVRIASTAVPLSVS

SEQ ID NO: 253528 - protein, 424 aa, unidentified
MQPASMSRESHYVAVPEDRDPKWIRCFGSFTQDLYALAKWLKQCKIDTVAMESTGVYWIQLYLILEEQGFDVFLVNARHVKNVSGRKTDVKDCQWIQQLHSYGLLNASFQPDLQGRELRTYIRHRKNLTQSYAMQIQLMQKAFEQMNIKLQNVLTDITGKTGISIIEAILQGERNAAVLAEFADPRVKASKEDIIKSLQANWRREHLFELQQAYDLYLFYREKIRECDKQIEMVLQQSSGDTTDDRPGKGAKRWKNSFDFNATFHLKNLLGVDITEIFGISEVTAMQIVAETGIDMTKWPTKKHFVSWLNLSPNNRISGGKILKPKREKRKNHAGQAFLIAATTVQRSDHWLGIFFRRIAAKHGPGIAIKATARKLALIFYQMIKNQESFDPMPIEAYNQNFKERKLKYIKSQASMLGFQLVPS

SEQ ID NO: 253529 - protein, 349 aa, unidentified
MIIIGVDFHPEFQQIASVDTETGELQERRLMHPEEAEKFYRDLAVAGQKVRVGMEASGHARWFERLVAELQFELWIGDATVIHAKRVRKQKTDRQDAQLILRLMLKDDFPKIWMPNWENRDLRQLLWHRHRMVQARTRIMNQLQAVALNEGLRCKKKLWREAGREQLEAFLLAPWASRRRRDLLELLDRLNPTITELSQAIEREVENCREAKRLMTHPGVGPLTALAFVLIIGQAERFRCGKQVASYLGLVPLEDSSGNRRRLGHITKQGSSILRFLLVEAAQVTVRSLPEWRSKYLHLMMRRGRKIAKVAMARKLAVRLYWMMRQGWDYKQVKKFGSHAGHPGHRHGV

SEQ ID NO: 253530 - protein, 349 aa, unidentified
MNSLTDLRDVVDVDTHVHTHSVAVVDAATGGVLDEITVDATAQGYAELVEFANNHAMLRAWAIEGTGGHGAGLSRHLLEMSEIVIELDRPKRAARRNGAKSDPLDAIRAAREAMARPRLGTPRSGGERQALSVLLAARRSAINASTEAQQQVFSLVIAAPEPIRGRFRGQKLAAMLNTAANLRVHASWDIETTSTVVALRTLARRAHAMLKEARELQKAIVAIIRSWRPDLLEEFGVGPIVAATVLCAWSHPGRIHSEAAFAMLAGVAPIPANSGQVTTRYRLNRYGDRQLNNALHTVVQSRIQYQPATRDYVARRTAEGKTGREIKRCLARYVARDLYRLLENTATAA

SEQ ID NO: 253531 - protein, 354 aa, unidentified
MSNKSTPIVATMGIDIGKNSFHVVGLDPRGAIVVRQKWSRGQVEARLANLPPCLIGMEACVGAHHLSRKLQSQGHDARLMPAKYVRPYSKGQKNDFRDAEAIAEAVQRPTMKFVATKTADQLDLQALHRVRERLVSQRTGIINQIRAFLLERGIAVRQGLRFLRTELPIILATRSDVVSPRMMRIIEDLAGDWRRLDERIEGLSNEIEAVAHHDPACERLMTVPGIGPIISSAMVAAIGNGAVFAKGRDFGAWLGLVPKQISTGDRTILGAISRRGNRYLRALFVQAAWVVLIRIKDWDRYGLKAWIDAHKKRLHHNVLAIALANKLARIDWAVLNKERNFECVRTCATSPRPA

SEQ ID NO: 253532 - protein, 399 aa, unidentified
MDVIALDVSNGRSYCVLYQDNICQFEGEIKHNKKGFMRIKQLVESCHSVPEIVFEATGVYSRVIERFCQNNNFRYYLMNPLEARKQTDSLRVNKTDISDAHKLAQTHYFHERKPTNNFTPQYQKMRQLSRWYESNEQEIKKARNQLHVFLVQSFPEYEKYFSSISSEFALEIIQLFPHPKRLEELSRTKIKNLILKSTRKKISSQRALIKAEEILGLSEQSYPAVSEDSIEVRLVAHWANELLQLILLKNEIKKELTNKALYFKEFYIYKSFPGVGELTAALLIAELGDLTRFDNPKQLNAYVGIDIQRYQSGNSGTYDRISKRGNTFTRKILFNTVNNMIRAQKSGPNHIVDYYYRAKEKPRTKKHKVALIGCIDRFLKSIHHLVFLGQLYDYNLSPQ

SEQ ID NO: 253533 - protein, 338 aa, unidentified
MKYSAIDLHSNNNVLVVSDETDRVLVEKRLPNELSRVLELLGPHRDELAGVVVESTYNWYWLVDGLMAAGYRVHLANTGAIKTYDGLKHSGDEADARHLAHLLRLGILPTGHICPPAERAVRDLARRRLQLVRSRTSHILSVENQLTRQTGRHIRSNEVKRLNAQAVAAMGLPDDVARGMAANVAVIQTLNDEIEKLEARLLDAVTKTAGWPLLNSVPGIGKVLAIVILLEIGSISRFADVGNFASYARCVDSVRISNGKKKGQGNTKNGNKYLSWAFVEAAHFAARFCPEAKRFYSKKFAKTNGAVATKALAHKLARACYHMLKTGQTFDVKRCFAG

SEQ ID NO: 253534 - protein, 369 aa, unidentified
MGEYSEAFVAFDVAKKKHAVAIAEGGRTGEVRFVGEVENSPAAIERTIKKLGRKYDRLHVCFEAGPTGYGLCRQVSDLGHDCMVVAPALIPKRPGERVKTNRRDAVTLARLHRAGELIGVWVPDVVHEAVRDLVRAREAAADDLRRKRQQLLSFLLRHGRIYQNGGHWTLAHRRWLARQNFEHTAQQIVFQEKIDAIEDAAQRLHRLDEQLRAVVPTWSMARVVEAYQAMRGASFLVAVIFAAEIGDVRRFDTPPQLMAFLGLVPRERSTGDTVRRSSLTLAGNRRARRALVEAAWTYRYPARVSETLRVRLEGLPKAVRDIAWKGQLRLCARYRRLSAAGKKPPVVVAAIAREMAAFLWAIGREVAPS

SEQ ID NO: 253535 - protein, 354 aa, unidentified
MKFVGIDLHKKTIVLCIVDQQKKVLQRARFLCAEPERIQKFFAELGLFQAVVEATASYEWLVALLEPLAQRIVLAHPGKLRVIAESVNKSDKLDAKVLAEFLALDLIPPAYRPTPREREHRVLVRHRVSMRRLSQLKVKIRRVLANYNADRRDLFTIAGRAYLTEVKVSAADRFVLDQFLSAFDHAQQQLREAGKRLQQFAKQAPARDQEARALLKSAPGVGEVTAEVVLSELGNWTRFRTGKQVIAYSGLAPGRRESAGKARDLGISKQGSSLLRWIMVQAAWRAVRESLKWQSVYEQISKRRGKRKAIVAVARRLLSVLFALLRTGQAYRHGIHEKPRVAVPVEAKEAEEME

SEQ ID NO: 253536 - protein, 470 aa, unidentified
MDPHHPGRAAWLREGTMKTKTKRTTPALVPGMVPQLEPNAAGVDIGATEIYVAVPPGRDERTVRRFETFTDGLIAAADWLERCGATTVAMESTGVYWIPLFQILEARGIRVCLVNARYAKHVPGRKTDVCDCQWLQYLHSVGLLRASFRPEQEICAVRSVMRHRESLVEMAAVHLQHMQKALDQMNLQLHHVLSDLSGQTGMAILDAILAGERDPRKLAKLRNSRVQADEKTIAKALTGDYRREHLFALRQSVAAYRQYQQLLRACDQEIEAMLEEFSDGGPAAPIVGEPKRERGPRGNELRFDLKGHLYRIFGVDLTQVPGISAMTAHMLLTEAGRDLSAFRSGPAFASWLGLCPDNRISGGKVLSAHTRKVKHRLSKALRLAAQSLHGSKSWLGHEFRRMRAKTGAPKAITAMAHKLARIVFHLITTKQAYDETVFAQREIEHTQRTRKRLEQQARALGMQLVEKMTA

SEQ ID NO: 253537 - protein, 342 aa, unidentified
MDCVSELYVGVDVHESKSQVAVYKSDGTLLEERRIRTKRLPRYISSLPGEKHVGLESVGFIYPIYDALVKEGCDVAVANPNNILLIARTRIKHDRVDARVLGELLRTNFFPRSHIPGEETREKRLLARERVRYGVKRANLKNSIKWLLKRRGIRVKKPFSMLGRERLRSLGIPEISYRLEELELVERFVKELDLKIKHVVSRDHNAKLLDTIPGVGAYTALFLSSALDDVDRFPDSKHACAYVGLVPSLHQSGSKSRSGHITRQGSGWLRRNLVECARWAVRKDPHMKAFYERVKGRKGKKKALVAVARKIVSYAFWMLKRNLTYVELAPWKNDWGGSPNLE

SEQ ID NO: 253538 - protein, 448 aa, unidentified
MTVATAVIGAGPHKGSHTAVAAGGDEMPLGQVRVRACDGQAGQLLDWARAWPQRAWAAGGARGMGYLLARQLVAAGEKVLDVQPELGARVRLPAAGNVNKNDPGDARSVAVAALRAPGAEVRAGDHAAVLKVRSRRHRGLGRLRTQAAGRLHAVLRAGPRRRLPAHHRGPGRGILGSLAPPDAVAAARCQPAAARAGDLRRIDDQLRDTRKRPDSAVRASGTSLAGLFGAGPVVAATVIGEVRDVARFPGRDCFAACDGTAPVEVSSGSRKVNRLSRRGSRRAGHAIRMAAVTRVSRRHGEGRTCFDKKLAEGKTPKEALRPPKRKAGDAVFTRLRADARRATARGEDPGGQTGNGSAPGAAGSHPARRLFGKATPGSPARPAAAAAEPEPAGAPGLSRQLPVPRRRRSPGSRRGRPQRSEDERPGRAARRRPHSAARKATEKTDQAP

SEQ ID NO: 253539 - protein, 428 aa, unidentified
MNITYKIDKIKKNNWLNITFDVSKDDLYMYSEMGNGTITCIEDSFTNKPEIILVKLEDMYQTALHAGYEGIHIICEPSGGYECKLMLLAAQQGHATSYVSGEASSKFRIVEGNSNDKSDQRDPKVIFKLAQYGKLLRHRILESSYEQLRHLNRMHEQEQELKTYIRNQLHHELKVLFCERDWKEAFWYGVSGRAVLKLYQGSPYKIIKAGRSRFAQRMKKAVKGIRSSTIERIWTNAAQSVKLDYNESIIELLSKRIKQLLQDFELHERRLQEIKEQMAAIYQNLLDQGEQLPPVVKGFVSIENLARIVGETGPFSDFKSAKQIKRYAGMNICIRESGQFKGLRKLSKKGRPRLRLILGQSIFHLIKKDRILGAYYHSLKERHAMNGTKAMSMVSRKLVDVLFALSKPGSVFDEKRLFVCKGQYKKAA

SEQ ID NO: 253540 - protein, 436 aa, unidentified
MKSTFRIERVNPEKELLVAVDVSKDHLSYRAEVPVEGSGRGDGRVVEQVWGRIRNRSRQTGRLFAAMRARGQEAGYEQLRVLCEPTGGYEQKVLRLARQQGLLTSYVNGESVHKAKVIDHNDTGKSDQLDPGVMLTLGRLGKVQTNRVLPPLYEQLRLLNRLYSAEDKAYVRTKCTLNYAIRRLFCDLSCKSKFYYSDAGGGLMQRYRFNPYRILRSGQKRFSNAIRRHSRSLATRTLQQLWDDAVSSNRHIMSSQEQAVWEQQVQYAWEEYLLHEKRREQLHGSMEQIYRQLLERNELVPRSRRGFISEFRIARILAETGPLSDFRNPQAIIKYAGLNLCQRQSGKWKGKIKISHKGNAQLRDALGEAAFGMVRSNRCYGPYYHRKTKQENMPGTRAMVAVARKLLLAFWTMGIKQVAFDQKRLLNSESQLRKAA

SEQ ID NO: 253541 - protein, 381 aa, unidentified
MRSNARIGDCRVQANRKWKGGEENEMAVYVGIDVHKKYCQAALMNDNGQITHEIRFDNTTKGTSNLVNLAKSVDSNIKAVVEPSANFWIRIYDKLEDEGVQVKLSNPMRTKAIAEARIKTDRIDAKTLAYLLRGDLVAESYVPTRKNRERRALIRHRASLIRMRVEIKNRIHALLDKHELTHNYTDLFGKQGLQWLKSLQLSSPDREILQSSLQVAETLTEQIQSMDIQIAKDATSEEKAKLLMTMPGVDYYAAMVLLSEIGDVHRFSSDEKLVSWVGLAPQVHQSGETNWTGHITRKGSKRARWILGQCAQSARQHDPRMREFYERIERKHGSQKAVVAVARKMLAIMYVMLIRNEPYRGENPELTERKHKRLDTLVDSA

SEQ ID NO: 253542 - protein, 343 aa, unidentified
MEAKRYIGIDLHRNCFTACLRLENGREYLKQWKLEDMAKFTSKLRPTDEVAVEVTGNTRLFHDAVAPHVERVVAVNPSQFKVITHSVKKTDPHDARNLALYLAKDLLPEVRMKDKTQAQIASLTQTRDTMVKLRTALKNKVNNLCSAHGVNLHKESLASEKGLRAVVEMHFDQLVNLELKIIVDQIRSLNKSIAELEETVGREGQKLEGHKNLTSIKGIGGLSGGILLSIIGDIADFADEGKLAAYFGIVPRVSNSNETERSGRITKRGTKLGRTTLIQCALIAQRYSPYLKTYYERMKSRRGTGKAIVALARKFLGIIYRTLKNKWVFADFPNFVLAEEATA

SEQ ID NO: 253543 - protein, 317 aa, unidentified
MRRLSEALRFVGIDVSKDRLDVHVLPEGRAFSVPHTRRGLWRLIAELGAAEPALVVLEASGGYERACADLLAESGFAVAVVNPRQVRDFAKSLGRLAKTDRIDAAVLALYGERLRPTGRHLPDAARSRLSALVARRRQLMAMHGGEARRLDQVADKDLRRDLKRHLRWLAKEIAGLEQRVAQAIADHPAWAALAARLTSVPGVGDKTAATLIAELPELGTIEHKKITALVGLAPLNRDSGKMRGKRTIWGGRRQVRAALYMAALAAGRFNPKLAAFRQRLLDKGLAPKAALIAVARRLLTILNALVRSGQSWNLNHA

SEQ ID NO: 253544 - protein, 412 aa, unidentified
MKDLLEISCGLDVHKEKIVACILTGPLGKTTRSEIREFSTLIPDMIALRNWIVSKNCHHVAMESTGIYWMPIYEILEDAFSGDITLLVVNARHMKNVPGKKTDMRDSEWISTLLRAGLLNGSFIPEKRIREFRDLNRYRKSVIRDITSQKNRIEKFLQSSGFRLSSFISDIFGASGRNIILHLIEHGQIDKTALDSCLKTKTRNRIDEILMSVNGTLSEHQKAFLRILMTHYDSLKKHLAEIETSLEEDMAPFALQVEQLNSIYGISTTASCAIIAEIGIDMEPFKTAEHICSWAGLCPGNNESAGKRKSTSVTKGNPYIKSMLCEIAWVIAGKRNTYLSAWYWRIKQKKGAKKAIVALARKLLVIIYTMLKQGTLFDESCFETRRKHCEQKQLSRYIRELEKHGYHVEAQS

SEQ ID NO: 253545 - protein, 364 aa, unidentified
MYDSTTTVTVGLDVHARSIRLAAVRADELLEERTLPYDEEAVEHALRRWPAVRCCYEAGPTGFGLQRHLVGRGIDCQVVAPGLVPQRPGDRVKTDSRDARKLARLLAGGLLAPIHVPSRELEAARDLVRAREDARLDRMRDRHRLSKFCLRHGRRMPTSSWTVVRRRWLGEQRFEFPAQQQTFDTYVHAVELVDARIEALERAVRATAEQQPWRELVARLRCLRGIDTLTALALVAEIGDFDRFQTAAELMAFVGLVPSEHSSGERRRQGSITKVGNGQVRRLLVESAWHARRRPKVGYELARRQRGQDALVVERAWRCQQRLHQRWQRMAGRGKPHQKIVVACARELAGFVWAIATEQPLRSP

SEQ ID NO: 253546 - protein, 427 aa, unidentified
MNNTQNDKIAQVTNETMVIGIDIGSEKHWARAFDNRGMELSKKAFGFSNTAEGFASFEVWYENQRRAAGMKRIMVGLEPTGHYWFNLNQFLTENGVRVVLVAPQHVKHSKELDDNTQRKDDLKDPRVIAKLVTEGRYFLPYRPSGVYADLRDGFNRRCGIVESMTRAKNRLHRWFSINFPEYLHAYGSVTAKTGLMVLKKAPLPKDIVELGVEGIDKIWRDAKVRGAGKKRAMTLVALAEQSIGEKAANEAARLELWQLLENYDHFAHQFEVIEEMLKRKIHEVPHADNLLAIPGIGYFTVMGFFAEVGSIDRFDDPKQIQKLAGLAVVENSSGKRKGLPGISKRGRDRLRLVLFQAAMSAVKNNQEFREIHLYFTTRKDNPLKKMQSLMAIAGKIIRVFYGMVRTGGTYDPERLLRDIRRPEKDAA

SEQ ID NO: 253547 - protein, 344 aa, unidentified
MDKIIRVGIDTSKNVFQLHGVNIAEKPVLRKKLRRKEMVDFFTKCPPTVIAIEACGASHHWARLLTSLGHEVKLIAPQLAKPYVKRNKNDAADAEALCEAMSRPTMRFVPVKTADQQASLMLVNMRERAVAEQTRLVNTIRGHAAEFGLIAAQGISHIPQLLERIMVDENIPALARDLFASLAQEFAQLHERVKELEAKLMTIYRGNECCRRLAKIPGVGPIGAVLLVMKAPSPELFASGRQFAAWMGLTPKDHSTAGKVRLGVITRAGDEALRKTLVVGATAVLQQVRAGRGRNASLWLDQLLKRKVPKLVAVALANKIARIAWKMMVSGEAYRQTAQPASVA

SEQ ID NO: 253548 - protein, 312 aa, unidentified
MQTITTIGLDIAKSVFQVHGVDADGRVVVRRQLKRRYVLAFFQKLPPCLVGIEACASAHHWSRELQALGHTAKLMPPAYVRPYVKRHKNDATDAEAICEAVTRANMRFVPTKTPEQQSCLTLHRTRHLLLRQQTSVINAIRSHLAEFGIVAPVGRNGVEQLLGIVADAKDTRLPAVARACVAALGAQLRMLKAQILEFDRMITAWHRSSEASRRLDQVPGVGPVLATALVASVADPKVFRSGRDFSAWIGLVPKQNSSGGKERLGNISKRGDRYLRSLFTTGALAVTRRSMAPGTGPGSRHCSRGDPLRSQR

SEQ ID NO: 253549 - protein, 422 aa, unidentified
MNNTQNKKIEQVKETTMIVGIDVGSEKHYFRAFNWRGIELTRKPIAFSNSMEGFNSFYNTIVELMQKSELEEALVGIEPTGHYWFALGQFMGEKDIKFVMVNPHHVHKTKELDDNSPSKNDRKDPRVIAGLVRDGRYFYSYMPTGVYAELRNASNRRFVLVEEQTRAKNRLQKWIAVYFPEYKGIYTHIDAKGGMLVLKKAPTPEEIVRLGVEGIIKIWKDAKLRGNGHKKAMLILAAAMRSIGLKAGLTEARMEIQDLIEDYELQTKRLERVNDLIKGLCQQVRYADKLLEIKGIGITTVAGFIAEVGDITRFDSTKELQKLAGLELVADSSGKHNGKTKISKRGRKRLRYLLFEAAISVVGKNEEFKEIHRYYTTREKNPLKKMQSLIAVACKLIRVFHAILTKGIRYDASKMLKDIKCI

SEQ ID NO: 253550 - protein, 318 aa, unidentified
MLNESFVGIDVSKDWLDVGWEPAQQTERLAHDEVAMVGLCERLVQERPCLIVLEATGGLETHLASALAAAGLPVAVVNPRQVRDYARACGRLAKTDRIDALVLAAFARAIRPQVRAPRDDETLELGALLARRRQLIDMRVQEKLRLERASPVQRDSIKEHIAWLTERIARFDTDLTHRLRSSSLWRDQEDLLKAIPGVGTITRVTLIALLPELGKLNRREIAALVGLAPFNRDSGQHRGERVIWGGRAQVRRVLYMASVAAIRSNPVIRAFYQRLRAQGKPGKVALVACMRKLLTIMNAMLKYNTPWNPNALDLEHSC

SEQ ID NO: 253551 - protein, 366 aa, unidentified
MTVIGIDAHKNWHTLVAVDKVGRRIDVLTAEARAAGHQKTMTWLEQFEEVIIAVEDCRHLTRRLEADLLDAGHKVVRVHSRLMAGMRRSGREPGKSDPIDAEAVARVALRERDLPTAELPGPAREIKLLSDHRRSLVSRRTALQSKVRWFLHEIDPDLEIPSRALRRYHLLDELIAHLDDHTGVVPEIARDILEDIRSLTRRINEIESRLSKLVRADHPFLLEVPGLGVLGAAMIIGETAGVRRFKSKDAFARFNGTAPIPVWSGNKVRVRLSRGGNRRINTALHMAAVTQLRLGGEGTAYYDKLIAAGKTRTEALRLLRRRISDRVFAAMRADAKRAPLDAMSPPPPAAPRTTIPALQAAALQQA

SEQ ID NO: 253552 - protein, 292 aa, unidentified
MPRKRILVKSIDTSISYQVIGIDLAKHLVSACLITGAGEIFGIDRLTYDDLLKSAERMSPTLFCMEPCPEVHYLAEKLQGYGHHTKVIDGAAVKEYIKTHFGGQKTDLNDAQAIAFLSLDTNLPEITPKNTSNSVLSSIQAVREQFRKEYIQSFVSLKGICQRWGLPISKGVMNKNKVEELVSESKKIPQEVKDWLLELLQSCRELQKRLNKISKYLKEYADNDEICQKIMSVPGIGPITATRLKATIGDIQRFEKPKSIVAYYGLVPKSKATGHNEKKGGITRRGDRKSVV

SEQ ID NO: 253553 - protein, 453 aa, unidentified
MEQPREVHDEEHERVWERVAAVDVAKGSGVVCTRVPDEDRAGRRRTHIWTVPARAGAVIELGDHLRSRQVQVITLESTSDYWRIWFVLLEAAGLRVQLVNARTVKNVPGRAKTDKNDAVWLAKLTERGMLRPSFVPPPEIRRLREFTRLRAVLVHDRSRYWARMEKLLERALIKISDVMSELNCVSGRAMIEALIAGERSPRVLAGLARAGLRKKTPELLEALTGRFEDHHGELARMLLDQIDALTAQIDRLTERITALLEQIPAAWGTDADGTTGPGAGAGPGAPVLPAAARLDEIAGCGTYAAQAIIAETGLDMTVFGTPGRLVSWAKRCPATRQSGQKTTRGKQDKGNPWLAGTLGEIAASAARTDTFLGERYRRIARRRGKRKALAAIARSILVIIYHLLADPEARYHDLGPGYYDTRTDRDRKIRNHVRQLQALGLDVTLHPQAEPAA

SEQ ID NO: 253554 - protein, 420 aa, unidentified
MNDSQQWQQHRAFGALDWASEKHSVVLVNQTGKVIEDFEIEHSALGWKKFREKLQPYGSIPFAIETSQGVAVEQLLEAGMLVYPLNPKSAQAYRERKAPSGVKDDRLDAWSFADALRMDGQNWKALRPEEPLIKELRLLCRDEVTLIEQRTAFVNQLRHALAEYYPAALEAFEDWTSVSAWMFLQRFATPEQLAQAGKRQWQKFLHSRRLWGSDQGPRRMEIFAHATEFTGTAPTVKAKSLLAQSLVQMLFAIEKQLAVYRQRIEALFARHPDHDLFGSLPGAGPKIAPRLLSEIGDDRQRFGGDPQNLQCLAGSAPVTKRSGKQRKYWPVHQRWACDKHLRHAIHLFSEQSLSRCAWAEIYYQHHRQKNQSHANALRRLSHRWLKVIYKMWIDRTPYNAELHHRNQLQHGSWIFQLQQS

SEQ ID NO: 253555 - protein, 412 aa, unidentified
MRIVYQGCCGRDVPKDSLTACVLLIDEEGEFRTESRRFGTMTRHLKEMAAWLASEGVQAIAMEATGVYGKPVWNILEAEKKFALLLVHAQHVKRVPGRKTDQKDSEWIGELLQHGLLRASFVPPVEIRQLRDLTRMRARIQQTLARFANRIQKVREDANRKLGSVASDVLGVSGRHMLKALMAGEQDPQKLANLAQGHLRKKIEPLQLALQGHFTDHHRLQLKLLLEFVEFGEQQLSHLDSEIQLLLSKVPGEPGLPRPAEGTVAEAEASPPHVTSPLQTAVELWDSIPGIDQLAATTLVAEMGANRDQFPSAHDLASWAGLCPGNDESAGQRRSGKTRKGSVWLRRALCQAAWSASRTKNTYWAAQYHRLIVRKGKKRTIVAVAYSMLIIAYYLLKRQGTYRIWALTISIC

SEQ ID NO: 253556 - protein, 342 aa, unidentified
MQELLYVGLDLGSSHCCQSIIDADGSLKFSRFIPTSERHLRDAFAGLGGDVRVHLEAGELSGWAGSVIGPLVSRVVVSHPRSLAWIGKDSVKDDRVDAAKLAELLRLGRVHEVYCERDSERRTFKHLVTHHEQMSREQARRKSKIKARLRTLGVIRKDAALFTSTGQAALLDEIESIEIKRMIAQSFSVLNQMLECEREAKHAMLEYSKRFPEVRLLQTAPGVGAITACRFVGYVQSPRRFSNKRKLWRYCRLGITRRESNGKRLSHPRLDGAGVGSLKDVSRKVFEAARRCKGDNSFKRVYDQSLENTKNAVHARLAAQRKVLATMRAIWLANRPYHNIGG

SEQ ID NO: 253557 - protein, 485 aa, unidentified
MQRRLVGIDLGIASAHTVRVRDEAGREVCRRRCEPTVDSLSMIESAALAGAAPGTRLEVVIEPTGPAWLPIAVFFTARGHLVFRVSSAKAADLRRFLSRHAKSNGIDADTLARLPLIDPDGLRPLELPDAAAAALDRRVRACDRLTMAASEHKVRIKDLVRQVMPCTPLTGDLGKADLAVLERYADPRALLRLGRARLTALIVKASHNHQGAARAEQWLVAAQAAVDLYGDHPAVAFTDLAAEIATEVRLLRAITTELAAHAAERETCYRWVDPMQLARSLPGLAEVGGPAMTAVIGDATRFPTAAHFKSYLGLAPRASETGDTDRKGQPMSKAGSRLARATLIRAADWARKQDPQLARIYHQQMVERGAEHLKASCVVAARLAERLWTVMRRRMPYVICDVDGTPVTPQQAKQIIAQQWTVTEEIRRRRRSTKRRAGKAPHQALTGHDQKDARSVRTRRPSPPESSATPSRTVKQPALLTTDPR

SEQ ID NO: 253558 - protein, 346 aa, unidentified
MEHYAGIDVSLELSSVCVVDAQGKIVKEAKVASEPEAVVAFFEALGFAVKRIGLEAGPLSQWLHAGLKEAGFETVLLETRHVKAALSAMTVKTDRKDARGLAQLLRMGWFQQVHAKSMASQEVRALLVGRKQLLGRLIDVELSIRGILRGFGLKVGAVTRKGFEARIRELVTGHATLERIAEAMLSARAALKAEYEKLHKAVLAIVREDAVCRRLMTVPSVGPLVAITYKSAMDDPSRIAKSKAAGALFGLTPKKYQSGEKDVTGGITRTGDEMVRTALYEAANVLLSRITRFSKLKRWGMDVAKRRGSKRAKVALARKIAVILHRMWIDGTTYRWAEAKQIAAQG

SEQ ID NO: 253559 - protein, 355 aa, unidentified
MNDTKYIGLDVHQATISAAVLDAAGKLAMEAVLETKAETILQFMQGLRGNLQVTLEEGTCAAWLHDLLKPHVAHVLVCDPRKNALIKAGNKSDRIDARKLADLLYLNKLNPVYHGETAIRALREVARSYLALTRDTTRVMNRLKALYRGWAISLRGQRVYAPRYRSEWLAKISEVGVRRRAEIYYQQLDALRSLREQSRRELLAEGRKHRAMKLLRQIPSIGPIRAVLLIALMQTPHRFRTKRQLWAYCGLALKTSTSGEYQIVQGQLKRSRKFLAVRGLNVNHNHDLKNIFKGAATRAAAVRGPFQEFHAGLLARGMKPTMARLTLARKIAAITLIVWKKGVSFDAEHLKQQAA

SEQ ID NO: 253560 - protein, 344 aa, unidentified
MTYYAGLDVSLRTVNLCVIDNQGELVAETKLASDVQDIVAYLDDLNIEIESVGLEAGTLTQYLTYGLQSANFEVVCMEARQVKGALSAMRNKTDKHDARGIAQILRSGWYSPVHVKSMQSHHIRMLLSSRKAVLSKCVDLENEIRGLFKVFGIKLPPKLGHGAFDVAVRDIIEVDETLSHALLPLLDARLVLYQTFRVLDNRTRHLANDDPVCVRLMSIPGVGFITALTFKAGVDDPTRFKRSRTVGAHFGLTPRRFQSGELDIDGHISKCGDADVRATLYTAANALLTRSARWSPLKAWGMKLAKTRGHRRAVIAVARKLAVILHRVWIDDSQFRWGTEGARS

SEQ ID NO: 253561 - protein, 344 aa, unidentified
MKVKLLGIDLAKNVFQICALNQTNKVLFNRTVRRVRFCSTIAKLEPTTIAMEACSSAHYWGRTFEAMGHNVFLVPAQHVTPFVRGGKSDARDAIAICEAAQRPGLHPVPIKSIEQQDIQLLHRLRQRQVQHSTALANQIRSLGREYGVIFPAGIKSLISRLPEVLEDGSNELSPVARYALADQHRCLIDVREAMVTFLHQIEQLAAQHPAYINLLPLPGIGPMIASAYIAAIGNGRQFKCGRRVSAWLGLVPRQYGTGGKTELKGMSKNGDRYLRALMIHGARSTISRGLKNRPELAQWVQPIIDRRGFNKAVVALANKLARISWVIVTTGEPFDVKQAFKPAA

SEQ ID NO: 253562 - protein, 418 aa, unidentified
MKQHNNSGNKSEPTSKPTKSRGPVQRDTKEMLAELVGKLKEKLDPKKVAATSAGEMRPSGELRPNLDRLTVGVDLGDQWSHYCILGLEGETLAEGQLRTTQQHIAEFFQALNAARVVFEVGTHSAWVQEVICGCGHEVLVANPRLMEGSKRRKRKNDRIDANKLARLGRIDPQSLHPMRHRSKEVRQDLVVLRARDALVAARTELINATRGLVKSMGARLPKCSSPSFAQKVEEAVPVEIRDALLPLVRMAAALSADIEEYDKKIEELGREKYAHTTLLRQVKGVGPITALAYVLTLENPERFVKSRDVGPYLGLVPKQEDSGESQPQLGISKTGDTMVRKLLVGSAQYILGPFGPDTDLRRYGLRLCERGGKNAKKRAAVAVARKLAVLLHCLWVSGEVYEPLRQGLSPTISPAVAA

SEQ ID NO: 253563 - protein, 385 aa, unidentified
MVVSVGIDVAKDKHDCFILNSEGEVLADVFTIPNNMDGFNCLLQTIRDCTTPQDIIKVGLEATGHYSYNILGFLLDNGLATYVLNPLRTNLYRKCLSLRKTKTDRVDARTIAAMLLSDIGLKPYTDTAYHNEELKSLTRYRFNKVKERAKLKSSVSRLVEKLVPTLHGASIYALLEEFPGAVQAAGAHLTRLKYLLSDASRGRYGRDMAVEIRDAARNSIGSRMPAKSLELQHTIRLIRELDAEIEEIETAIQTIMDEIHSPITTIPGIGYRMGAMILAEVGDFSRFESPDKLLAYAGLSPSTYQSGQLINCYPHMEKRGSRYLRYAIYNAAKYVCLWDPTFAAYLAKKRAEGKHYNVAISHAAKKLVRLIFALEKSRQPYNLAA

SEQ ID NO: 253564 - protein, 393 aa, unidentified
MKLVGIDIEKKHFFCIMDKDSGEVLLQPSSFSNTKDGFDSLIQKLSSYSKDSILIGMEDTGHYHFALLKYLLEKNFTVALINPKTTDYTRKIQNGITKNDKLDTLTICDVLDTPVRKKQYRITKVNSFDLYEQKQLTRHHHNLKEELNVYTNRLQKCIDIVFPEFNNLFSSKYGIIYMNVLKTFGSAENIASTDIRTIRKCFEIKGRGNRISLTAQQLKDSAKSSIGISSAAEVIKIKHLISQIELINEQLAETDKKIEEFSIQNNSPILSIPGISHFSGTSILAELGEISNYSKPSKIIKAAGVAPYHYESSQYNAQHTAITKKGSPYLRKTLYQIILPVINNNPVFKQYYDLKISQGKGHRCACGHCVRKLLRIIYHLSSTNQQFDDALLR

SEQ ID NO: 253565 - protein, 390 aa, unidentified
MFYLGIDIGKFHHAAALLTDEGKVIATVPSFSNTHAGFEQLLTLITYHLPPKEELRIGMEATGPYWIPLAWWLNTHGWPPVVLNPIKTSSLRNYGVRGSKTDNIDSVLIANALRFEGNKPQQVSPKHSEELCHLTRLRADMVKDRTRVALRVTSLLDRIFPELLCSFSKTLSPSCLALLSQAPTPTRVLALGEDRLTSLLYHASRGKLGVTRAREILNKAAVSVGVSSQALEEILPLLLEQIDLIGSQLRTLDHRISESYDQAGLYFTSIAGVGTLTAATILGEFGSVERFKQAQQMVAFAGVDPKLRDSGQHRGQVHISKRGSRYLRRALYLACQGVVRKDDYFNAIYQRHRDNGKCYKEAIVAVMNRFIHVIYAIWRDNRPYYPLTPV

SEQ ID NO: 253566 - protein, 443 aa, unidentified
MSKFKKTFELTYPNAAGIDIGASSHFVAVPADRDEQPVREFASFTEDLHAIADWLTTCGIDTVAMESTGVYWIPLFELLESRGFTVFLVNSRHVKNVPGRKSDVLDCQWLQQLMSFGLLSGAFRPQGDYAALRVVARLREMLLRYQATHIQHIQKALLLMNILLTEVLSDVMGETGQKIIRAILAGERDGETLARYRNGHVKASEEEITKALQGSWRDEHLFSLKVAVELYDFYAEQLVACDQQIEQLMKDLARYDLKPEKHKRRGGKPKNAPKFDARLLLMQMCGVDLTRIDGIDVTTAFKVLSEIGADMSKFKSAKHFASWLGLCPGTKISGGKVLSAATKRTANKAAQALKMAAVNLRNSQSALGAYYRRLCGRMDKGKAVTACAHKLARLIYAMLTKGEEYVDQGQTYYEEKYRERVIKNLTKRAEALGFQLTPTPEMA

SEQ ID NO: 253567 - protein, 348 aa, unidentified
MFLIGCDFHPSWQQVCWLDRTTGETEEKKLIHAPGEAERFYRQFPAPTLIGMESTGNCQWFVEMVTALGHEVWIGDAAKIRASDSRQQKHDRRDAQLLLRLLAEGRFPRIWTPSSEQKDLRQLLIHRYKMVRLRAQAKNGLQHLAMNQGLQKKSRLWSKKGQKLLSELPLRPWASRRREDLLSVMKMLDQQIESLDLGVIEAAEKDPNAQLLMTQPGVGPITSLAFVLTMGDVSRFQRGKQVASYLGLVPREYSSGGHQRLGSISKQGNRFLRMLLVEAAQVAVRCDPQMRQEYLHRCHEKPKGVAKVAAARKLAIRLYWMLRTQKQYPEIVSIESSSRVPLVVRHGG

SEQ ID NO: 253568 - protein, 416 aa, unidentified
MDVMFKFCAGLDVHKRIVVACVLLSSPEGLQRHIQTFPTMLAGLEALAAWLSGFGVTHVAMESTGVYWKPVYNVLSAHFDVWIVNARDLKQVPGRKTDVKDAEWIAQLMRLGLLKRSFIPDVEQRDLRDLTRYRTRLTAERAAASNRLQKVMEDANIKLAAVATDSQGVSARAMLAALINGETDPAQLAALAKGRLRAKIPALEQALSGHVREHHRFMWREVLEHIDELNTRLMLLNQRIRELTAPYESIIQRLDAIPGVDRYTAEVILAEIGPNVTPFPTAKHLASWACLCPGNDISANKRRSGKTRRGNNWLRTALVEAAWAASRSKDTYLGSQFHRLRARRGDKRAAVAVAHSILIVVYHLLAKPEAVFTELGGDYFLKRNPEQEQRRAVRKLEGLGFTVTLTPVGATAATAA

SEQ ID NO: 253569 - protein, 341 aa, unidentified
MNITHVGIDLAKHVFSVHGVDERGHCRLRRDLRRARMRPFFANLPPCIIALEACASAHYWARELSKLGHEVRLINPRFVTPYRKSDKNDRNDAEAVCEALTRPSMRFVAVKSPEQQALLTLHRARALLSTQRTALMNQMRGLLAEFGLIVAQGASALHTRLPEILEDASNELPDIARETFAELYDRWRDHEQRLADYDRRLREMAREDPLTQRLMQLPGVGAITATAVVASAGDLGVFRNGRQFAAWLGLVPRHYASAGKRRTGRITKRGDVYVRTLLVHGARAALRTAHRREDALGHWAVALKERRGPNKAAVALAAKHARIIWAMLTREVDYQPRPVSA

SEQ ID NO: 253570 - protein, 291 aa, unidentified
MKLSRLKNAKPEIKKWLKQQAAHTAIAVEATNVYHLGLVELAHGMGFQVYVVDGFQLSNYRKGVGGRVKTDPSDARLLSRFLRNEGNELRPWSPPPAVYGKLQSLLRRRAALVTARTAMTQSWANENLLRAAFETFVKSIDRLDQLIQKKLKEVLREAGLQEQVARCQAVEGIGFLTATALVMAFVRGEFKSSDSYIAFLGMDLRVSDSGQKNGRRRLTKRGCSEIRRLLHNAAMAASRSAAWKELYEKQRTAGKATTQALVILARKLARVAFALMKNQDEYVTRKGKLAC

SEQ ID NO: 253571 - protein, 427 aa, unidentified
MRLVGGYGNPAPKSSEKAVVSVLYGGIDVAKHSHEICIVDDEGEVALKMSITNSREGLDRLLSALNGLDARPDQVKLCLEATGHYWLPLYCHLTELGYSVRVINPIQSDALRNLYVRKTKTDRKDALLLADLLRLGRAPKTELASETVLKLQTLSRVRFEFVSLVGGLKQRVLGILDRIFPEYSRCFSNVFIRTSRELLRRYPDPEDLAEVDLSELSTFLARCSRGRLGIDRAEQIRSLARGTFGINLARDAFTLQLRLLMEQIEFITEQIRVIEEAIDQVMEELRPDPDPGYRHVLETIPGIGPTLAAAIIGEVGDISRFSSASSLVAYAGLDATVRASGQFEGTRNRISKRGSPVLRHALWLAAVSARRFNPEFKAYYESKLDQGKHPNVATCALARKLVHVIHSIWTNQRPFDPAYRWKSPGQE

SEQ ID NO: 253572 - protein, 429 aa, unidentified
MRQVALDVHQGFCEVAVREDGKTRSAGRVATDRGALESFAGSLCRTDEVVMEATGPAMEIARILEAHVARVVVANAQDVRAISHARVKSDRFDARTLAELLAAGMLEPVWVPDRMTSELRRRVARRASLVRQRTRAKNEIHATLARCLLGRAPVSDLFGKEGRAWLDEQELGTEESETVAGCLRQIEFLDAEVTAIDRKLSEWAVGSQDARRLMSIPGVGAGVAVTLMAAIGDISRFSSARALVAYLGLDPKVRQSGDEPPRHGRISKRGNAQARSVLVEAAWIAMRQPGPLNAFGERIRARKGAQVAAVAVARKLTCLAWQLLTKSEDYAFARPSRVRAKLRRAELDAGAPPLRTRHGGQRVSASAAERHAEEELVKRGETAYRRLIADWKATGPATKKGAGATHGRAPSRPTERQATRQAPAQTPAL

SEQ ID NO: 253573 - protein, 345 aa, unidentified
MEHYAGIDVSLESASLCVVDATGRIVREAKIASEPEVLIGWFSRLGLTMTRIGLEAGPLSQWLYAGMRDAGLAVELLETRHVRDAFKAMPVKTDRKDARGIAQLMRLGWFRSVHCKSLPAQEMRALLTVRKLLQTKNHDVEMCIRGVLRGFGLKVGPTTPRTFADRVRHLVAGHTTLSTVSEAMLAARDTLFGEWQKLEKRLRSLAREDSRVRRLMTTPGVGTIVALTYVSAIDDPGRFRSSKTVGAHFGLTPKKYQSGETDVTGRISKIGDGSVRTALYEAANVILTRPVKGSALKSWGMRLAARAGMRKAKVALARKLAVVLHRMLADGTSFLADKAAAAVTR

SEQ ID NO: 253574 - protein, 343 aa, unidentified
MQVTTIGLDIAKNVFQVHGVDAAGKTVITRQLRRGQVIGYFAKLPLCLIGMEACATAHHWARELTKIGHTVQLMPASYVKAYVKRSKHDAADAAAVCEAVTRPSMRFVPVKTIDQQAALMLHRCRDLLIRQRTQLINALRAHLAELGMIAAKGKEGVKDLAAIITDAVKATVLPEPMRQALQALVKQLAALQQQIGELERNIHAQHRASDRSRRLETIPGIGVLGATAIAATITDPSVFKSGRECAAWIGLVPRQNSTGGKERLGGISKQGDRYLRRLLVMGATAVIRHARTHPDKHPWVTKLLAKKPYKVVAVALANKMARIAWAILAKGETYRAPALAATV

SEQ ID NO: 253575 - protein, 340 aa, unidentified
MSKVSVSSRATVFAGIDVSAATLAAAVQREDREGFEQREFANSAAGHRQMLAWLLKRGSQVRVSLEATGIYSLDVALALDRAEGVEVAVLNPKTANRFAQTLRRSKTDAADAVALAEYSRRMPFVAWQRPSRIALELRAISRHVATLTDERTRLSNRLHAAEGSAATPGCVRRDLRRSMGGLNKRIARLRKEAVALVEQDAELKTKFQRLIGIPGIAETSAVHLLGELAGLDPEMTVRQWVAHSGLDPAHRISGSSVHLPSRISRHGNRHLRRALYMPALVAVRFDPHLKAFYQTLQARHKTKLQALMAVARKLLHAIFGIFKTNTPYSGRCLFPCLLPA

SEQ ID NO: 253576 - protein, 338 aa, unidentified
MVYGAIDLHMRHSQIRIIDEDGVVRRERRIVTGREQFVNGFAGFGAMRILVETGTESEWVAQALEAAGHEVMVADPNYAPMYGETTRRIKTDRRDVAALAEANRRGWYRPAHRTSAAQRDMKQILCARRLLVQQRSGVVSLLRSLLRQSGYRLGTGSCDTVPARVARLVVTGELGETLAPLCRQIAALTTEIHALDARVETRTASDAIVARLRSVPGVGVIVATTFRAFIDRHERFARAGQVSAAIGLVPREDSSAERRHRGHITKAGPGELRSLLIQAAWVCWRHGGSGTLRAWVDGIAARRGKRIAVVALARRLSRILFALWRDDTTFDLQKLAMA

SEQ ID NO: 253577 - protein, 400 aa, unidentified
MLSIGIDVSKGKSTVCGMKPGGEIVYAPFEVQHTREGMSELVSLLHNSGEEVRAVLESTGSYHCPVVAALLENGIFVSVVNSLRMKRFCSQSIRKVKTDRIDAMQIALYGLAYWQELQPTRLPEDTYRELQLLARQYYQMTSMLIKAKVDFNALCDQVLPGMQELMSDHAGRHKLSDFVLRYRHTTHILEMGETRFRKDYCKWAEKKGYRNCERMAALIFATAQNGIPVLPNAPSTQIVITEAIRVLHTVEASRDAILTQMQALAKTLPEYSLVREMPCIGDTLAPRLIAEIGDVRRFHSKRALIAYAGIDAPPYQSGKFCANNRHISKRGNRYLRKTGYEVMQSYAMHKPANDPIFTFIEKKRSEGKCGKLAMVAGLNKFLRVYYGKVTELYRSLSAIE

SEQ ID NO: 253578 - protein, 339 aa, unidentified
MKKSYCPTYLGIDVSKGSLDCCLYNGTEHKTRSFNSNKLSTVQKIISHFKISPDSCRVVLEATGVYHSAAFIGFTSQGFDVAVENPLRIRSFATMKNLLRTKTDPVDAKTIAEYGFANNPVSTKPKEAYQCKVVARLKLIGFFKKLIAQNRNHIEALNNNSFECNATSLITHVKNEINHLNVTINEIKSDIEKILTKHCPELYKQYKSIPGIGPTVAGAIICFYGDFSGFSNSKKAAAFAGLCPKVCKSGSSVDKKGSISKKGNSMLRTLFYMAALSAARCNDTCQEVYLRLRQAGKPAKVALIAVANKLLRQAMALARKGESFIENYKEISPCAAKTT

SEQ ID NO: 253579 - protein, 359 aa, unidentified
MDAQEGAVRRIIGGVDTHKDLHVAAVVDEQDRVLGTQSFASTRQGYRQMLVWMRSFGDVQRVGVESTGSYGAGLLRFLQQAGVEVLEVTTPDQQDRRRRGKNDEFDAQNAAHAAFAGIRTVTPKSRDGMIEALRVLSACRKTAVAARRVALQMIQNTIVCAPESLRDVLRRMTRMQLVRTLAAWRPDLTAYRDVEAAYRISLKSLARRYLELHDEIADLDAMIAAIVDELAPTLVARNSIGHVGAAQLLLTAGDNPQRLRSEAGFAALCGVSPVPASSGKTARHRLNRGGDRAANSALHIIAIGRLRTEARTQAYVAKRIGEGHSKLEAIRCLKRYIAREVFMLIKQRQEEINRTRIAA

SEQ ID NO: 253580 - protein, 373 aa, unidentified
MPKYSTAFGMDVHLRSTTVCALDADTGEAVTRRFPGNPWGEIAGWMDGFPEPSLAAYESGYLGFAPQRELAGLGVECVVAAVSKIPRSAADSASKNDRNDAARMARAILAHDISPAWVPSPEVEGIRDLAGAYDGAAARLATAKQRLLAFLARRGFVYGGTTPAGNPRKYWTYDFLRWLDKVRPEDDGGVRALAALRNEVEAAAEARADLLSEYRAAVDASPIAAEVAALQSIKGCAFALAAAFSAEVGDFTRFRSGRQVTAYFGLAPSQRSSGDSVRLGGISGAGNALVRKLAVEGSWCYAAARHQPKLMPRDTGVPLEIRMHGRKGSERLLRRREEMLARGMPAAKANAATAAELVRWLWALGMMCREGAE

SEQ ID NO: 253581 - protein, 396 aa, unidentified
MTVVIGVDPRKRTHTAVVIDHDEIPLATLQVRAGRTQLDELLSWSAGFDDRVWAIESANGLGYLLGQQLVGAGERVLDVPATLSARVRVLATSRSNKNDANDALSVAIAARHAPRVTEVQAADHPVVLRLLVKRHNDLGRLRNRSACRLHALLCELAAGGISKEITPNKAQRLLDTLCPQTPVERTRHQLAADHITDLRHLDTQLRESRRRVEAAVAASGTSLMDIFGIGPIVAAMIIGHTRDVARFATRDRYAAYCGTAPISFDSGGGRSIHRLSLRGNRQLNHAMHIIAVTQIRHRHSPGRAFYDRKLEQGKTPKEALRALKRRITDVVFAQLRADAEQRGPGGQTGATDESSAADLTPQEPALRKNHSRTATNATTPRRRAPRATRRGTRTRS

SEQ ID NO: 253582 - protein, 389 aa, unidentified
MIYVGIDVAKDKHDCCILGSEADKLFPVFTIPNNKAGFDELYEKMFSVTDDKTKIKVGLEATGHYSLNLLGSLIDKGLPTCVINPLHTNLYRKGLSLRKTKTDKVDARSIAMMLMTNKTLKPYSDISYHNEELKSLTRYRFDKVQERAKLKSSVARLVNILFPELEKLVPSLHMASVYSLLSKLPGASYITECHLTHLKNLLETASKGHYGRDMAITLRNTARDSIGSVIPAKSMELKHTIHLIKVMTEEIDEIEDSIKSIMDTCNSPIMTIPGISYRMGAMILAEIGDFTRFNYADQILAFAGLSPSTYQSGQLDSSYSHMEKRGSRYLRYALFNAAKFVCKGDENFGAYLSKKIGEGKHYNVAIGHATKKLVRTIYRMELTGEAYRR

SEQ ID NO: 253583 - protein, 381 aa, unidentified
MTEMIVGLDPHKASNTIAVLDRDETLLVRCRFDNTAEGVVEMLAAVAGFPTRVWAVEGANGIGRSVAQRLVAAGETVIDVPAKLATRVRVYSTGHGNKTDGADAVAIARAALHSKHLRMVRRDDANVALKLLSDRRHELVASRTQSVCRLHRLIRELVPGGTPRALTAERAEALVNGLNVSDAAGLMRVELALDHIEDIKRFDRRLDQIMLQIQAAVKDSDTTLTRIYGVGTLNAGLILGEVGDVSRFPTRNHFASYTGTAPIAVSSGDINRHRLSRSGNRQLNHAIHVAAITQIRFDTPGRAYYQRKLSEGKSTREALRCLKRRISDAIYRQLQLDRETDQQQDQTWPRWPSSRGDYPSYRSPETLRRDGQPKKPRTSPV

SEQ ID NO: 253584 - protein, 399 aa, unidentified
MGTRHQLIWVGIDAGKGHHWAAAIDGDGERLLSRKVINDEGEVLSLLADVLAMAEEVRWAVDISSRPSALLLTLLLARGQQVVYIPGKTVNRMTGAYRGEGKTDAKDARIIADLARLRRDFRPIEPSVELSSGLQLLVGYRQDLISDRVRLINRLREVLVGVCPALERAFEFRKRPGLVLLTGYQTPAAIRRMGVKRLTEWLARRKVRTPAVFAERAVEAAASQHTVLPGEDLAAKLVNELAHRVLELDERIKENEQAIAALFRTDERAEIIESMPGMGPILGAEFLALVGDMTSHKDAGHLAAHAGLAPVPRDSGRRTNNMHRPKHYNRRLRHVFYMSAHTAMTLPGPSQDYYRKKRKEGLLHTQAVLSLARRRVDVLWAMLRDKRLFTATPPLPRAA

SEQ ID NO: 253585 - protein, 343 aa, unidentified
MHYIGIDVSVKESALCILDGRGKIVREAKVPTDPEIIACFIADTGLAIERIGLESGCTAAWLFAGLQRHGLPVICIDARHAAAALQAGFRNKNDRNDARGIADLMRVNKYRPVWVKSPQAQRQGRLLTARATLQSQLVALENTIRGLLRQEGIGLTDRRTAFEAAVREVIADDRLLQAAVLPLLQTRTAVLQHRAALDRQILRIVRVDPVCRLLMTAPGVGAFVSLAFKVAVDDPRRFSRSRNVGAHFGLTPREHSSGQVSYRGRISKMGDREMRRLLYLAAARILRRDAALWCPLKVWAVRLAQRVGLSKARVALARKLAVVLHAMWSDGQVFQWRRTEASA

SEQ ID NO: 253586 - protein, 368 aa, unidentified
MKTNLRFVGLDVHKESIAVAVAESGREPARLLETIGHDEVALLKVLDRLGPKARLRVCYEAGPTGYLLARRLNEQGICCVVVAPSLIPMQSNRRIKTDRRDAVKLAHFLRSGDLVEVTVPEAQTEAMRDLERAREDAKQAERTVRHQLDKFLLRHGRRWSRGCKWTLKHWNWIKQQEFSQDALRRVCHDYITTVEQASLRVERLTEDISELVPPWALGPLVRGLQALRGVDLVTAVVLAAEIGDFKRFQTARQLMAYLGLVPSEHSSGATRRQGGITRTGNRHARWVLVEAAWNYRFGPCSSKRINARRKLVAVGVRTIAERAEQRLHRRFRKLIDRGKSNKKAVTAVARELAGFVWAIAQEEKLLAA

SEQ ID NO: 253587 - protein, 353 aa, unidentified
MEYVASDVGKRRLVCCVMNPDGSAEEEEGPYPSTLSDAARFAGYAVERYGECKAVVESAGNLWLEAYEAFEPKGVEVKPANPVKTRAVAEARVKTDRVDARALAHPLRAELIAGCYAPGREVGESRAVLSHRMNPTRELTRIKSRVHSLLDRYDLSCEYGDIFGVNGTGWLRSPGLNGRDQLLLQSLLRQVESLQEEVRVANSATARDAVGSRYAAVIMSMTGFDCYSASLLSAYVADVSRFPSPERLVSWAGLCPSVRQSGDSLHMGRMKGGNARVRWIMVQAASAAVRSDTRMRAFYERKLKRHDHNAALTHVANRMLRVLWHMLREGRLYDERRERLYRSKLKRMMGVAA

SEQ ID NO: 253588 - protein, 433 aa, unidentified
MDEVTDEPLYRDRVCGIDIGKAQMVATIRVPSDKDPARRMAETRAFGTTKKEVLALADWLRCWQVPAVVMEATGDYWKGPFYRLEAEGFDCVLADARQVKNLPGRPKRDPADSRWLAACFERGAVTSCFVATPEFRVIRLHTRYRRDLIEERTRDKQRAEKLLEGAAIKLSCVISDLHGVTGRDIMDHLIAGERNPRVLAQLARAAARRKITELEEALEGAEFFTDEHAALLKTMLERIDRVTADIGGLSEVIERLLAPYEEQLAQAESMPGWGRRAAQDAIAETGVDMSRFATGAHLVSWGSRAPLDHQSGARKGRARTKKGNRYLAGTLGETATAAGRTQTREGARYRRIARRRGKAKAQVALGNTQLKVLHKLLSNPGMRYADLGPDYYERRADQRRQIAHHVGKLGALGFEVTLARIPDPDPAGQAPAA

SEQ ID NO: 253589 - protein, 316 aa, unidentified
MDHNNVVYGVDVSKAKLVVAQDDVQTLAEVGNQPESIAAWLAGLPKGAVVAMEATGIYHRLLAHLAHAAGMRVYVLNPQTLKHYAWAIGQRGKTDNCDARMIARYVAHEQAKLRRWQPPARAADRLSQLLERRHTVVGVRQTLAQSLSGLPILKAARQSLLASLERTVGRLDILIRHEMARLPGAAALYERLKSIVGIGPVVAAQLVAVFSTLSFARAGAFIAYTGLDPRPNDSGVHRGRRSLSKHGPPLLRCQLYNAGMAAANSKVFKPVYKQLRERGLQTTEAIVILARKIARIAFALYKSGEVFEAQRHFKTA

SEQ ID NO: 253590 - protein, 347 aa, unidentified
MAFIGVDLHTNSFTVCRLESDGSEAFETFQLAQADLDRFCTGLDADDEIAVEATGNSAWFREQVLPCVGRVVVVNPRQFQVIRKSVAKTDRNDARALAFFLSKDMLPETRAKSVAESELASLTHTRDLLVKQRTRLLNKIHAVFNRHGLKLRKEGLGSKRALERLEIARFSPLEQIELTVVRDQALSLSAAIARLDREIEAAAKKLKGYEGLVSIKGIGARAAAVLLSTIGRIEDFETADRLAAYFGIVPRVSQSNQTDHRGRISKRGNKLARTTLVQSTLIAIRYSGYLNAFYRRIRDRRGAGKAIIATARKLLKIIFDTLKNRWVFEDFPNFKIANGPITAGQAS

SEQ ID NO: 253591 - protein, 341 aa, unidentified
MKKFIRTAVDLGKNYFQFHGLAGEGGAPVSRKLKRSKVLEFYAQIEPCRVGMEACGSAHHWARELIAMGHEVVLIPPAYIKPYVKRGKNDAVDAAAICEAMARPDMRFVPVKSADDQAVLMLHKSRELLIKQRTMSVNALRGHLAEFGLVVAKGIGRVDELLALAQADARLPQIAKATVTELAQHLEGLDQSIDAIDDDIARAHRKNPKSCLIDQVPGIGTLIASVVAASAPDPGVFKSGRDFAAWLGLTPRQHSSGGKEKLGAMTKQGNRYIRKMLVVGATSVLRVVGKRKGALADWINALRARKPERLAAVALANKLARICWAIMTTGESFRTETYVKA

SEQ ID NO: 253592 - protein, 356 aa, unidentified
MQTQVTKKIDFTGKNLFVGLDVHNKSWSVTIVVDGMEHRTFTQPPDPEALQKYLHRSFPGANYHSAYEAGYCGYGIHRKLNDLGIKNMVINAADIPTTQKDKLHKRDPVDSRKIARGLEKDSLRGIHVFDRDLEELRSLNRTRFYLMRDLRRSKNRIKSFLLYYDIPLPEEFDNNQWTLKFVSWLKQVKMQTEGGQEAFSHLITSYEHHRQQLLILSRIVRLRIRQHEKELYKLLNSISGIGPLTSSALITEIGDINRFPHIDHLASYVGLIPRVRESGETTHTGGITFRCNNFLRVLLVEASWQAIRQDPAMMQYYQRHLAGGKGHKVIIKVARKLLNRIRYVMKNRQPYVTGVA

SEQ ID NO: 253593 - protein, 378 aa, unidentified
MFTNPMTMINIKQKPKTRETISFLGQTIHIGLDVHKKNWSVSIYLNDIFVKTFHQESSGKVLLQHLKTNYPEGSYKACYEAGFCGFSVQRELSALGIACSVVNAADIPQTNKGMLSKTDAADSRRIGEAFAKGLLRPIYIPDSSTEGDRNLIRYRKRVQEELKAKKQAIKSSLFILGIKVPLQHDKPYWTNNFINWLKELAIADFSSKATVTNLIDDVVHLRKRLFETNKQIRNLSQSEKYKATYLLLTSTPGIGLVTAMTMITEIGNINRFDSFSKFNSYIGLCPSEYSSGEHIHKGKMTTRAHKSIRALIIEAAWVAKRNDPVLTSKYNELLKSKTAKRAIVIIARKLLSRLFAVWKTNIEYVIRSSKIELKIKRG

SEQ ID NO: 253594 - protein, 421 aa, unidentified
MTQSAPDTFAAFVGIDWADAKHDVCLQAAGSTKRECLQLEHTPEAIDAWVTTLRTRFNGHPVAVCLELNKGPLVFALRKYDFLILFPLNPLTLARYREAFTPSRAKDDPTDAELQLELLLTHRDKLQPLHPQSPAMRALEQLVEHRRRVVGDKVRITNRLTSTLKNYFPQVLQWFPDKDTPIFCDFLSRWPTLKAAQLARRSTLATFFRDHHVRSADVVAQRLHAIQVATPLTTDEGVIAPHALLVQALVNQLRVTLEAIETFDNAIAQRAQSHPDFPLFQALPGAGPVFASRLLVAFGEQRERYATAAEVQKYAGIAPVTERSGKKAWVHWRLQCPKFLRQTFVEWAAESIRHSFWARVYYQQQRDKGKAHQAAVRALAFKWIRILFRCWQDRTLYDESVYLNALNNRDSSLIHNLAQGS

SEQ ID NO: 253595 - protein, 362 aa, unidentified
MRIIGCDLHTRQQTLAMLDTETGEVVKMTLTHEGNNVQEFYSTLSRPACVGIEATGSMQWFVNLMEELGIECRVGNPAKIRAAEPRKQKHDRRDADLILTLLVENRFPAIWLPSKELQDLRALLRHRHQWVRMRTRIQNALQSIALANGLRRGPSLWSRDGQSTIASLPLAPHTAHRRSELQAMYVKFESDIEKLNQRVEEQAGQRPGARLLMTHPGVGPVTALATDVFLGDPKRFADGKTLASYVGIIPREYSSGGRQKFGGLSKQGNPLLRFLWGEAAAHAVRRDPDLQRFYRRKMVQKGLGKARMAVARKLGIRLWIMLRNEINYNEFCRRGQKQQNSGAACAGMPGTRYGATSHRPID

SEQ ID NO: 253596 - protein, 476 aa, unidentified
MGKGSGTTRGDRRRNARRERLRAMLPRDGAVIGIDLGDEKQAIAVVDHDVRVLARKTVRVKAFRLGEALEWAVAQARGKGFTAVAVACEPTGARWLQVQRLCAERGLPLVCIQPLVSHIAREQQDYTTHKSDESDCVMIARLATELHCYIPEELDEAWAQLRHLGRRRAQLITSATASVQRVRDFLSVAWPVAPEACKHPFESVTWLAAMQVVTSRCGGQPGKLAATGLAEFTALVRQAVAGWGGQRPAGPVCRAVFAALASTEGVVVSHRRGLLRRCADELGDLRRIRAQLRAVEAGMVAVLGELGLSRLADIPGLTAADAAAILAETGDPCRYDSSSSLARHAGLSPSGNASGAFEGQAHISRRGRPGLRLTVWRAIWPLLSCNSVMAAKYAAMIAAADAAAAQAAQAQSGTGSRQGSAAAAARARRAKARVACAAALLRWIYSIAGCDTGWDPDVASGAASRPHAPRCQPEAA

SEQ ID NO: 253597 - protein, 382 aa, unidentified
MSGKKQTAQVVDTPAQLYLSFELGEQEWTLGFTVGLGQEPRKRKMAARDLKALEKEIAQAKQRFGLPESAPVQSCYEAGRDGFWLHRYLLAHHIENRVVDSASIETNRRAKHAKTDRIDAGKLAMMLVRYHLGEHKLWSVVHVPSVEAEDARHLHRELLALKHDQTRHINRLKGLLAGQGVALPVGAHFLEQLDTVRLWDGGALPPGVRARLEREYTCFQAIHQHILELEGQRAELVRTAQDASVDKVRRLLRLCGIGENSAWLYVMEFFGWREFHNRREIGGLAGLVATPFDSGEQSRDQGISKAGNSPIRAMAIEIAWCWLRYQPDSELSRWYTERFGKGGKRLRKIGIVALARKLLIALWRYLEDGVIPAGAQLKPASA

SEQ ID NO: 253598 - protein, 331 aa, unidentified
MNLPILGIDVSKESLDVCLIIENQSNASVFDNNHTGHKRLISWLDQHANQVHACMEATGTYAFPVAEVLYTAHHRVSIVNPARIIAYSTSLLTRNKTDRLDAAIIADFCRTQSPPEWHPPQEELRDRQALVRLLEDLAATRQADVNRLKSGVRSPDVALVLEDHIGYLDNQIKRVEQLIRSLIDRDNDLSRKKHLLLSIPGIGEKAAHTILGELLFLDSFENARQVADYAGLNPRQRLSGKFKGHSSISKTGNAHLRKALYFPAIVAKGCNPVIQDFCARLRDNGLLPMEVIVAAMRKLLHIAFGVLKNDTPFDPLYEKRFQYPLSIPISS

SEQ ID NO: 253599 - protein, 343 aa, unidentified
MTVYCAVDFHARQQTISYCDTSDGEIHRHELHHQRDDVRGFYTQFKGEVIVGVEASGYSAWFEEMLEELQHTVWLGNPAEIRRKAPRRQKNDRRDADLILDLMLKGDFPHLHRFSAESRLVLRQLRYRHKLVKVRTIAKNSLHAISINAGLPLKRRLLTQRGIERLQALALPPVLAQQRTEWLQLVALLNQRIATVEAELAQVATGDQAVALLRSHPGIGLLTALALRYTLMPVSRFSTTRKVTAYVGFDCMEDSSAGIRRLGSISKAGSRLLRFLLNEAGQMACRQDPDLKRFYHRLAYRRDRPKAKVAVARKLLVRSFIMLRDQIDYAEFLRRGVAARSAR

SEQ ID NO: 253600 - protein, 315 aa, unidentified
MEGEVMVGIDVSKARLDVAVLPGEEIFREEHDSRGIAALIERLKKIAPALVVLEASGGLETGLVAELVAAGLPAAVVNPRQVRDFARATGQLAKTDKLDTRTLARFGDRMRPQLRKLPDQQELALKALVVRRRQLVEMMVAEQNRLDRAPKVLHRQLRRHVDWLRKQIHSLDRDLDHELRNSPVWREKQTLLRSVPGVGPVVCSTLIAGLPELGTLSRRQIAALVGVAPLNRDSGTLRGRRMVWGGRGQIRTALYMSTLVAVRFNPALKSFYLRLRAAGKPPKPALIACMRKLLTILNAILKNRKPWSPQCLNLT

SEQ ID NO: 253601 - protein, 348 aa, unidentified
MRGAVQMQVSTIGLDIAKNVFQVHGIDANEKVVVRKQLRRSQVLAFFKALPPCLIGMEACGTAHYWARELTKLGHTVRLMPAKDVKAYIKRNKNDAADAEAICEAVRRPTMGFVQVKSAEQQSQLMLHRTRDLLMRQRTQVINALRAHMAELGITAAQGTAGLKELLKIIAGDADGRLPVDAHASLVVLAAELQAMQTLIGSLEKRIMAQHRTSDESKRVATIPGIAGIGATAITATVTDPKVFRSGRDFAAWIGLVPRQDSTGGKQKLGPISKQGDRYLRRILVVGAHAVLKQAKQKPEKYPWLTQLLARKPFKVVAVALANKMARTAWALLAHGGTYRAPLLAAAA

SEQ ID NO: 253602 - protein, 371 aa, unidentified
MEESSKTLYVGLDVHKESIAVAYAPEERGTEVVSLGAIGTRQCDIDKLIRKLQSKGAPLVFVYEAGPCGYWLYRYLTRKGLSCHVVAPSLIPRKPGDRVKTDRRDAALLARLMRSGDLTSIYVPTLEDEAIRDLSRGREDAMRDLKATKHRLKAFLLRQDIRYEGRANWTAAHLRWLSEVVCPTPAQQIVFQEYVRAVTEQQERVHRLETELHEHVKTWRLFPVVEAIQALRGVELTGAVSLIAELGDLTRFDTPRQLMSYLGLTPSEYSSGERRRQGGITKAGNTHARRALVEGAWAYRYPAKVSRHLQLRLEKLPAEIQAISWKAQVRLCKRYRQLIARGKHANQVVVAIAREMAAFAWAIARTVPLTP

SEQ ID NO: 253603 - protein, 368 aa, unidentified
MLATEQRTPTEADVVLGVDTHLDVHVAVALDRLGRRLDAVSVPADARGYGELVGWAEELGAVVCVGVEGTSSYGAGLARYLRGAGIKVLEVERPKRRQRSSGRNGKSDPIDAEAAARAVLAGEAAGVPKSGDGRVEMIRALRAVRRSAVKARSQAANQLRSLRVTAPDRLRGRLRDLSTKRLVAVAARFRLDGDPEDVGTAARFAMRSVARRYRTLCEEIAGLDAQLERLVAEAAPGMLALLGVGTDHAAALLVAAGDNPERLGSEASFASLCGAAPIEASSGKVVRHRLNRGGNRDANRALHLICVVRMRYDERTRRYVARRTAEGKSKREIIRCLKRYVAREIYRVLVSDVLPPPIGSQTMVETSM

SEQ ID NO: 253604 - protein, 429 aa, unidentified
MKIIYPRVCGIDVHKKFIVAVICISESVEPVYLKKRFSTFHNDLIRFRDWLIQNDCQNVCMESTGKYYIPVYNILESHISNIVVANPKWVRAVKGEKDDDKDAKWIADLFKLGIVKSSFIPQKDFRILRELTRYKYKLVNMRSSEKNRYQNALTSGNCKLDMVFTDVFGKSASNIIDLILSDNPYTDEDILSKVHKNCKASPDMILNSINGTDLTPVQKSRIELVNNHIKQLSSNIQRLDRLIDLMIEPYEDYISFLCQIPGVSRNSAITILSEIGVDMNQFTSTRRLTSWAGLTPSSNQSAGKKKSVRISRAGVYLKPCLVEVAHAAVKDTNHPYYANKFNKISKRRGKKRAYIAIARKILVAAYHMLLTGEIWNPADLAEVETPVEQRIKYVKNNLKSDIKQLLDIGLTVEELTLMIQQNANNIATQ

SEQ ID NO: 253605 - protein, 347 aa, unidentified
MRFFTDAHQNYCGIDLHARSMYLCIQNTEGKVVLHQNMQAKPEPFLKAIGPFREDIVVGVECIFTWYWLADLCADHKIAFILGHALYMKAIHGGKAKNDRIDSRKIAALMRGGTFPMAYVYPAKMRATRDLLRRRNHLNRRRAELLGHIQNTNSQYNMEPFGSNISYKKNRTGVVEQFLDPDVQMSMQANLELIAHLDELKNKLELHITKNAKNHDPQALYRLRTVHGIGPILSLVILYEIGDINRFARVQDFASYARLVKCARESAGKRYGSSGSKIGNAHLKWAFSEAAVLFLKGNPDGMKFKKRLEKKHGKGKALSILAHKLGRAVYYILKQDQAFDMNKFLKN

SEQ ID NO: 253606 - protein, 351 aa, unidentified
MPRTSTVHAVTTIGMDMGKNTLHMIGLDKRGAIVLREKVSRGRIASRLANMPSCLIGIEAGLATHYVARELAALGHDVKQVPPTYAKPFRQGHKNDFRDAHSVAEAVQRPTTRFVPAKTDEQLDLQALHRVRSRLVSERTAVINQIRGFLLEHGIIVRQGLRFLRQALPDILAKRTDVLSPRMVRIVADLASDWRQLDERIEPVTDEIESLAKSDDGCRRVMTVPGIGPIISSAMVAAIGNGAAFERGRDFSAWIGLVPKQMSTGDRTILGRITKRGNGYLRTLFVQAARVILLRPASWPKHSFGAWLARAAQRLHRNVLAAALANKLARIAWTVLAQGRGYEARITKPAV

SEQ ID NO: 253607 - protein, 409 aa, unidentified
MLQKSLTTTIFACIGITDSNNRTEYKQARFSSFTKGLNELCDWLAKYNCKDVCMESTGKYWIPVFNILEQHNLWVTLSHPKYTKPMKGNKTDRKDAKWICDLYMCGMVKPSFIPSADIRELRDLVRYRYKLTCMITGEKNRAQNCLTVSNLKLDEVFSDVFGKSSRSITEQILQHPGEAFDVAHFVHGRCKTPIEEIQAAVDGAISKEQAVKLRQCLDHIDELNKHISEIEQEILRLSDKYETALNLIRTVPGFDKNPLTAVQVLSEIGGDMSVFPTAKHLVSWAGCCPRNDQSNQKIKSTRISRAGSYFKPILVQVANALIKSKKHPEFTTRYKRIKARRGHKKAIIAICRMILTAIWHILSDLEPYTPEGFLESRPVKEEKVLSTSQALNLLKQRGYIIKDEPLAVS

SEQ ID NO: 253608 - protein, 373 aa, unidentified
MPTNLRYVGLDVHAETIAVAVAEPGGEVRPLGIIPNRPEAVAKLVRKLGPREPLRVCYEAGPCGYVLYWQLTKLGVHCDVVAPTLVPTKPGDRVKTDRRDAAKLAHCYRAGDLTPVWVPDAAHEALRDLVRAREAAKQDQLRARHRLGKFLLRHGRRPPEDVKPWTQRHRRWLDALQFELPAHRATLADYLYEIDHAAARVARLDAALDEAVQAAPAPMRAVIAALQTLRGIRQVIAATIVSEVGSLSRFPHPRELMGYSGTVPSEHSSGSHVHRGAITKTGNAHLRRVLVEAAWAYRFSPKCAKGLRQRQRRQPEGITALAWKAQQRLCSRYRRLLARGKPTPHVITAIARELVGFVWAIGVAVEREQAMAA

SEQ ID NO: 253609 - protein, 317 aa, unidentified
MEVSLIFVGIDVCKAQLDVAIRPSGEEESFANDKVGIKALVKRLAKIGPTLIVLEATGGYERQVTRALVSADLPVVVVNPRQVRDFAKATGQLAKTDSIDAAVLAHFAEVIRPELRPLPDVVTLELRALTARRRQILEMIAAENNRLAMTSKAVRKHIDAHVHWLEQGLERVEKDLDRSIKQSPIWKENEELLRSAPGIGPVTSHTLLAELPELGTLHRKQISALVGVAPFNRDSGSLKGRRSIWGGRAPVRCALYMATLVATRRNPVIRDFYKRLKAKGKPFKVALVACMRRLLTILNSMIKHKTYWSETFSLQTT

SEQ ID NO: 253610 - protein, 467 aa, unidentified
MAKSRAKPRRRNQAAPTALPRVNPNAAGIDVGGAFHYVAVPADRDDQPVREFAAFTGELYRMAEWLKACGIETVAMESTGVYWIPVFQVLEERGFEVKLVDARQLKRVPGRKTDVSDCQWLQQLHSFGLLAGAFRPDDQVCVLRSYMRQRAMLVGYAGQHVQHMQKALVQMNLQLQYVVEDITGATGMRIIRAILSGERDPHRLAALRDERCKSSAVTIAKALQGDWRQEHLFALAQAVELVEAYQAKVAACDERIQAHLQTFTDRSDGQPLPKGPPPRADRHDLSFDATAELYRMTGMDLTAINGLQAHTVLKVLSETGLDMSKWPTSKHFGSWLGLAPNNRVSGGKVLSRRTARNANRAAAALRVAAQALHHSKSAHSKSALGAFLRRKAAQLGMPKAITATAYKLARIIYAMLTEGTEFIERGQDYYERAYQARVLKNLSRRAKELGFCLVKPDQSAAPQPAYA

SEQ ID NO: 253611 - protein, 323 aa, unidentified
MTTPTIGIDVAKAHLDVAIRGMQPKALHRQFPYTAGGQQQLVDWLAQHGVGGALVCLEATGRYSLDIAHTLHGAGYRVSIENPARTKHFAQSLLPRQKTDKVDAILLAHYASVMPCRVWTPPTLLSADLQELKRLADDLQTDRTRVRNRLEGLRDTSPARRYLEAQLRQLDEQLAQVERELKDLLDQDETLKAQCALLTSIKGVGDTTACELLAEIPDWSVFASADELVAYAGLNPSQHQSGRQRGYSNISKQGNAHVRKTLYFPALSAMQHNPHLKVFATRLKAAGKPKMAVVVAVMRKLLVLAYAILKSGCPYDPHYQMGT

SEQ ID NO: 253612 - protein, 340 aa, unidentified
MAIVAGFDVHKAQITFDALDTETGELYRGRIAAKPEAVRDWVKRFDEVEVEVAVEACTGWLFVCEALAEAGAVAHLAEPAETRARRGPKRRAKTDRADARWLRTLLAEGRLPEAWIPPAHVREWRTRTRLRKTLVDERTGWLERIQATLFHHGVSGAPAQLLSESGREFLAALELPDSACERIKVALSMIEAIEAQLATLERELRQLARRQAGCRALRAHFGIGELTAPTILCELGDAGRLSSSRKAVRFAGLDVGIHRSDRRSRVGKLTRQGSPQLRWALYESAQSACRPRSPDHAYYLALRARGLSHTRATLTIARKLARRCFHTLRELGPEALEPVS

SEQ ID NO: 253613 - protein, 411 aa, unidentified
MHYYVGIDIAKTFHVACVVNQDDKVIKKSLKFNNDESGFNELLLLLNSIDEVSTFTIGMEATGIFFENLYLYLSEKEFNVILLNPYQTNRFREMDSMKKVKNDNIDALMIAALIKSGRYSKAYVSEDMYQSIKSLYRHKNNLLEEMKKHKRQISTLLAVVFPEMEQVIKDPFNVTGLALLEKYPTAKHYHHASIERILKTFRGIKGNNFNEQKAGKLLKLARHSVYQGNGVDERSYVIKSHIRVIKLLQEELKELENEMLKLFNEQVSLDRDEEQEIMDIIDNLRTIPGVSDKTIFALISECGDLSRFKNNSHLVGYLGLYPTLEQSGNKLTYGPIAKRGAKLAKKALYQAAIAAIRHNKELNKLFRDKVSQGRAKKEAVVIVARKLAHIILAIYKNNVAYNPQRVFQASA

SEQ ID NO: 253614 - protein, 370 aa, unidentified
MLDTTTFIGLDVHARSIKAVSLDVMTGEVRCATFGYDAGAVAGWVRSVDPKARCVYESGVTGFDLQKRLSGLGVDCAVGAVSKMIKPSADRRRKNDRNDAEFLARMLSVGNVVEVWVPDDECEAARDLTRALEDARDDLSRSKQRLSKFLLRHGLVFDERTPTGRRKGNWTRAHWSWIESIRFAEGADNDVLAYYVDAVRRAAEEKARLEGLVEAEARKPRWRKRVDSLRCLKGVDTASAADLVFEAGEFSRFRNARSFAAWVGLTPSEHSSGESDRRGAITKAGNKHLRKTLVEAAWHYLTCSGRPKGLAKGQAPDRGARRHAAKGVRRLVERREALLARGVHGNKANVATARELACWVWAVGLMAEEA

SEQ ID NO: 253615 - protein, 340 aa, unidentified
MEKRYIGIDLHRNRFTCCIRLENERTYVTEWELEDLGKFAKKLRPTDEVAVEITGNTRLFFDAVAPHVSRVVVVNTNQFKVIRQSVKKTDPHDARALALYLSKNLLPEVRMKDKEHGQLASLTQTRDTLVKLRTALKNKINNILSARGLNLAKEALGSEKKLNEVLELPFDEIVRIELRVIVEQIRSLNKSIAELEKTIGEEGSKLEGHKGLSSIKGIGKITGAILLSVIGDVNDFADEGRLASYFGIVPRVSNSNETEHSGRIHKRGTKLGRTALVQSALIAANYSPYLKRFYEQVKARRGAGKAIIALARKFLGIIYRTLKNKWVFEDFPNFVLAEAS

SEQ ID NO: 253616 - protein, 409 aa, unidentified
MLKIVYPNCCGMDVHKTFVVAVIAITDDQGITQYYRRRFSTFTNQLKELRKWLNYYSCFHVCMESTGKYWIPVYNILESDHDICLAHPKYVKAIRGKKTDKKDAQWIADLYKHDLVAGSFIPPAKIRQLRDLFRYYNKLTSIQTSEKNRFQNSLTWSNIQIASVVSDVFGKSAQKIIKSVLDDPSQMPDIETLVHKSMIQKVDRLKLSIEGEFSDEQAEKIRVIKAHYDAIVLCKNDLEQLIKELAQEYQSQIKLVQSVPGFKKELTSIRLISEIGVDMTKFPTSGHLCSWAGVVPANNESAGKKHSTKISKGGRYLKPLLVQVANAVVRSEKHPEIRNKYLQLKKRRGHKKAIIAIARRLLVAMYHVLLNKEPYNPDLYHVTNYIPPEKELSIEEAIQFAKSHGFKIA

SEQ ID NO: 253617 - protein, 413 aa, unidentified
METGQKGRIQTRKENIIYVGIDLHKETHTAVMLDCWNQKLGEITFENKPSEFHKLTKKVSRFVTEEKTAVYGLENAYGYGRTLAVWLLEKGHAVKDVNTALSYAQRKSVPMYQKSDSYDAEAVALVLINMLDKLPDAVPDDAYWTLSQLVNRRDNICSHQQRLKNQLHEQLCVAYPSYKQFFGDISRRTALYFWLKYPSPEHLKGKSAEELAAELRPVSHNNCSVKRAEKILELVRMDGQTTREHQASRDVITRSIAGDLEHYREQLEIVETAIVNMLPSFNCTLMTMPGVDVTTAANMLAEIGDINRFPNANKLAKFAGICPIYFSSAGKGKDMCPKQVNRRLQAIFYFLAIQMIQVSTNGTPRNKVFREYYLKRVAEGKNKQQALICISRRLVNIVYGMLKNHTEYREPGQ

SEQ ID NO: 253618 - protein, 343 aa, unidentified
MQIRSVGIDLGKTTFHLVALGDNGKVLLKKKFTQKQLIAFTANMQTCLIGMEACSGSHFLGRALRAQGHDVKLIPAQFVKPFVKSNKNDFIDAEAIAEAVERENMRFVPIKTDDQLDLQALHRVRDRLMARRTSLINQIRAFLLERGIVFAKSPIRLREALPEVLENINENLTPRMRNLVAMLWSEWKDLELQIVEMNDEVERIASSDAACRRLRQIPGIGPLVATAIVASIGNGAAFRKGREFAAWMGLLPKQHSTGGKARLYGISKRGNSYLRKILIHGARAVVLRSKRDRIAMGAWMTSLETRAPRNVLIVATAHKLARIAWAVLSTGQDYRAVPEALTV

SEQ ID NO: 253619 - protein, 395 aa, unidentified
MTKLIVGVDISKSSFSAAGMEVEGKESFAGSYAMDREGFIEFLERITSHCPDLQEVLVGMESTGCYQINLFSFLSSQGIRAVVINPLLIANYAKLSLRKTKTDKKDAKTIAKFLIDHQEGLSQLSISEDLQDLRDLSRERESLSHLLSATKVEIKRVLQTIFPEIESLGNVTTGVMLRLLQAYPSARRVKAAKPKALAKVLKHPGGGHRPSFTTEDIMRAARSSIATDSPAKEIILQGKIATLLHLQERLDGMTLLLTDLCQKTRLEDFKILQSIRGVGPNTAASFLAEIGAVEHFPCYKKLIAFAGLDPSLHQSGKFIGKSKISKRGNRHLRRVVYLMAASVVSQNPFFKAYFFKRKKEGLAPQKVLFAVAHKLIRVIYAMLSQRTFFMESKAF

SEQ ID NO: 253620 - protein, 361 aa, unidentified
MAGTMTWVGMDVHARSTHAAAIDTMTGELVRRRFGAGVDEPVGWLQSLAGPVRACYEAGPTGFGLYRAGVAAGVGMQVIAPGKTPRGPSDRVKTDLKDAELLARLLLAGSLTRVVVPPPEVEAAREMTRCHDACRRDLMNARHRVSKMLLRHGQVYPMASTWTVAHRRWLSVQQFDEPASQLVFAELIAAVDGLSARKATIAHRLSELANDERWWPTVARLRAFRGIDTLTAFSIHLELGADWRRFERPTSLSAWLGLTPSLSQSGESSRQGAITKTGSMLARRLLVESAWHYGKSPRLGATLANRQLGQPDHILAISNHAQQRLHRVNRQMRARGKPHNVTVVACARELACFLWAAATAD

SEQ ID NO: 253621 - protein, 386 aa, unidentified
MKTVAGLDVHKDSVYLCILRENGEKIERVYGVLTPQLDSMRDFMAENKVSEVAMESTSVYWIPIWRVLVDSFELKLVNPYFIRQLPGRKSDVKDAQWIAECVMKELIRGSFIPSPLVQRLRLYDRRIFEINAELVRKYSKIDAILQRCNIRLSNYVSNTDCKSYKAVVKQISEGVTSPQELLRHVHKRIINKHGEDTILAALTGVVSDSEIDMLAQYVAESAILEDNKNKCIEKMRKICNSEFEEQMKNLQEIPGVSERSALTVLAEIGPDVNAFPSAKHLVSWCGFNPRNDESNKKIKSNKITHGNRFIRIASVQCAWAASRTKDCYFSKFYAFHTQVRKKFKLKVVVAVARKVLVCIWHILKFNVPYKDFEPQKSVTKDCTQFA

SEQ ID NO: 253622 - protein, 427 aa, unidentified
MRYRVAGIDVHKRMLAVVVADVAVETEYVFERRLIGTTPDQLRTLAAWFIECEVEEVVMESTAQYWRPVWDALERDWQSVRRLRPDAAPTAGALHLAQAQSNHGPRGRKKDFPDAERLVKRLVAHELILSFVPDVTQRLWRTVTRRKFQLTCNRVQLRNRLECLLEEMHLKVSSLVSDLLGLSARRMLRAVGSGATDPAVVAALGSPRLHATPDQLRDALGACTDLHPVYRRLLTMTLDELDGLETHIHQLDEELAQLLREHQAAVQRLAAVPGLGVDSAQQIIAEVGPTAATFATAKRLASWVGACPGHDESAGVNHSRRSPNGNRQMRRLLNQAANAAVKTKGSIFELVYRRLVVRLGHAQAIGAVAHRLCRLVWKLLHDDVAYEERGPAVTKARAQRRAAKMIRELRSLGYQVERAQAPASSPV

SEQ ID NO: 253623 - protein, 376 aa, unidentified
MQLVLVKPFGQAKGEHMNIQTDVSPTAVVGGVDTHKDLHVAAVVDRQDRVLGTRSFSTTRQGYRHMLAWMRSFGDLQRVGVESTGSYGAGLLRYLQHADVTVLEVTAPDKQDRRKRGKNDDLDAQNAAHAAFAGKRTVTPRSRDGMIEALRVLVVCRKTAVTARRIALQMIHNTIVAAPDGLRDQLRVMTRMQLVRTLAAWRPDLTAYRDVEAAYRISLKSLGRRYLELHDEIADLEAMIAAIVKDLAPNLIARNSISHVGGAQLLLTAGGNPERMRSEASFAALCGVSPVPASSGKTVRHRLNRGGDRSANSALHIIAIGRLRTDQRTKEFVARRVAQGHSKLDAIRSLKRYLAREVFTLITQRQKEINASRIAA

SEQ ID NO: 253624 - protein, 416 aa, unidentified
MKLFVGIDVSSEKLDVCFLTDDNQLSILSEISVANDIEGASFIRETILEFNDSYHFDQIVIGMESTSMYSFHPSMFFHEDEKLKKLNTLVTIENPFRVKQFSRMFDENKTDRNDALRIADFLRIQRFTTSPIKEEKYLALQRLTRTRYQLIKQLIRTKQHFLENLTYKCNTLAREMRDESTSLFSATLISLMTEDFTLDELAELPLEAFCDLLQEKGKGRFKQPEKIAKAIQRAITMSYRLGALAQESINVVLSVLVREIRALEKNIKELDKAIEQVIVVIPEYQCLTSIPGVGKVYAAGLIAEIGQIERFEDQTKLAKYAGLSWKVNQSGNYQSQNTPLTKQGNRYFRYYLVEAANSVKNYLPEYKAFYQSKYKEVPKHQHKRALVLTARKFTRLVDTLLRKHQLYTPPRSVIEK

SEQ ID NO: 253625 - protein, 418 aa, unidentified
MRNSWTPYKFTFGGTRMYNAVGIDVSKGKSTVAVLQPAGVIIRKPFNVNHTSSELDELAKYIGSLEGETRVVLECTGRYHEPVVKTLSEAGLFVSAVNPHLIKNFGNNSIRKVKSDPADAKKIARYTLDNWIELRQYSSMDNTRTQLKTLNSQFSFFMKQKVAAKANLIALLDNTYPGVNKLFNSPVRDDGSEKWVDYAYSFWHVDCVRKIGLKTFTERYQAFCKKHHYNFQPAKPAELFLASKDLIAVFPKEASYKLLIQQSIQQLNLASSHVEELRSKMNELASTLPEYATVMGMYGVGKTFGPQLIAEIGDISNFSHREALTAFAGVDPGVDQSGTHNSKSNKASKCGSNHLRKTLFQIMSTLLQTAPEDDKVYQFLVKKRAEGKPYYVYMTAGANKFLRIYYGKVKECIRNLEQ

SEQ ID NO: 253626 - protein, 323 aa, unidentified
MQGKVSFQEDAMPVVYAGVDVSKEWLDIHLHPLGESRRFSNDKTGIRQLKRLLARHRPKSIVMEATGKFHRPAHRSLWLDGFAVAVVDPLRARMFARACGYLAKTDRLDARFLALLAESLRPPADTPPSPHIEALQELVNARSAAKCDITALQNRSKTATTALLRGELNRLVRRLEQHVERLDKEIERRVGEDPQLYRKAEILTSIPGIGRVTALALMAGMDELGSCSGKQAAMLAGLAPIANDSGARTGRRSIRAGRPAPRRALYMAALSACRYNPALARFADTLKAAGKPAKVILVAVMRKLLVLANCLLSHDRLWTPNPP

SEQ ID NO: 253627 - protein, 344 aa, unidentified
MKFTRCGLDIAKQVFQVHGVNEHGTVKGRKTLARGKVLEYFAQLPACVIGIEACAGAHYWARELSKLGHTVKLMAAQFVVPYRKRGKNDANDAEAICEAAGRPNMHFVAVKTEEQQAVLMVHRARSLVVANRTALVNQIRGLLGEFGLVVRQGVARLRAQLPSILEDAENGLPTLAREVLCDLLEQFRELDQRIQRYDEKIRELARQSEPERRLMRVEAIGPQTATALIASMGDPHVFKSARNYAASLGLTPRQDSSGGTTRLGPITKQGDCYLRTLLVHGARAYLRVVDKKSDAKSAWARRVKERRHVNVAAVALAAKHARIAWAMLARGTEYRPPGPEAVAV

SEQ ID NO: 253628 - protein, 449 aa, unidentified
MTEPQEIEDEEHEQVLQRVAAIDVAKDSGKVCVRVPHESKPGRRVSRVWDVDATTRAVIELGDHLVCQGIEKVTAESTSDYWRIWFYLLEAAGLDVQLVNAREARNMPGRPKSDKLDAVWLAKLTERGMLRPSFVPPEEIRQLRDYTRLRTDLVQERTRHWARLEKLLEDALIKVSAVASKIDTLSVRDMIEALIAGERNPRVLADLARGKMKAKRAALTEALTGRFDEHHAELARMLLDQIDQLNAQIAKLTDRIGELIGAMPAARGVDADGSTGPDAGTGPDAAVVPALQRLDEIPGIGPGGAQVILAEIGLDMSRFPTAGHLVSWAKLSPRTIQSGARSRGGRTGKGNPYLKGILGEAAAAAAKTDTFLGERYRRLVKRAGKLKALVAVARSILVIIWQLLADPTARYHDLGAGYYASRIDTGRKARNHIRQLEALGFTVTLAPAA

SEQ ID NO: 253629 - protein, 343 aa, unidentified
MSIVILGVDLGKNACSVVGVDSAGAVVLRRSMRRQTLIDYVAKLPACVVAMEACCGAHHLGRLFAEHGHEIRLMSPEYVRPYVKAQKNDDRDAEGIAEAASRPTMRFVELKSQGQLDIQTLHRVRSRLVAERSSLINQLRAILLERGTIFPVGRRKLELGIDGMLADEDTTLSPRLLQLVGELRTEWRDLDARIEALNREFIELARNDAAARRLTSIPGIGVLNATALIAAVGDASSFAKARDLGAWLGLVPRQHTTGGKPRLLGISKRGNTYLRTLLIHGARAALPSLSHSETPLGRWLKAMIDRGVHRNAIVVALANKLARIAWAALRKEATFERGYPVAA

SEQ ID NO: 253630 - protein, 411 aa, unidentified
MGRQPLSCRKAGQGGEVMPELFVGIDVAKDTSSAQGVDSKGKGKFSLTFSMDSEGFMRLWKAIAEHSKELSEVSAAVESTACYHINLYSFLTAKGISTVVINPLLIANFAKLSLRKTKTDKRDAMSIAQFLLVHRESVSQLSLSQDMQDFRDIARERESVANLLTAHKVEIKRLLQSTFPELERIGNISTRVMWEFIGAFPSARLVKMAEPKAIQEILKRKGVESRLTYTAEDLIKAATESVATISPAKELILKGKVRTLQHLQERYEEMTKILTEYCKASMLEDFEIITSIDGINKRTATSFFAEIGCISNYASYKNLIAFAGIDPTVYQSGKFEGESRISKRGNRHLRRVIWIMTTCVIQHNAIFKAYYLKKRSEGQAFKKAVFATAHKLIRVIFAMLTQRTMFKEVCA

SEQ ID NO: 253631 - protein, 331 aa, unidentified
MLKCHYVGVDVGAKELVVSIDRNGSRESGGVFTNDAGGHRKLIRWATKQGATAQVVLESTGVYGLDLAFALQRAKRVEVMVANPRAITAFAKASLQRSKTDALDAETILEFSMRMPFVPWSPPEPSILELRALSRRIEAMSKTATQERNRLHANDQSEELSDFVKADIRELVELLKGRIERLRKQALLVIEQSPELANTFRHLTSIKGIADAAGIQLLAELGTLPQDMTTRQWVAHAGLDPRQHRSGTSVHKPARISKTGNAHLRRALFLPAMVASRWEPNVKAFYEKLLAKGKTKMQALTAVMRKLLHAIHGMLQHDQDFDGEKFFAVRG

SEQ ID NO: 253632 - protein, 390 aa, unidentified
MHRAAEQPQAPAAVRTDLGAIFVSLELSRSTWLITSLSPGGGEKMSKHQVRGGDIAALLARFAELKARALARTGKSFPSVVIQEAGLDGFWIHRALVGEGIESHVVDPASVATSRRRRRAKTDRIDGEALVRTLLAHKRGEPRVCAMVRVPTPEEEDRRRLCRELKSLIGERIRHVNRLKGLFFAQGIGDYEPRRPDRRERLDGLRTGDGRPLPEHLKALARRELDVIELLNAQIEEVKAARDALLAAARAAASPPAPVAMLLGLKGVGPGFAGALWSEGLFRHFDNRRQVAAYAGLAPTPWQSGRVDHEQGVSKAGNPRLRAVIVEMAWLWLRHQPDSALARWYRDRVRRDGGCMKKVAVVALARKLLVALWKYVTAGVVIEGAAMKSA

SEQ ID NO: 253633 - protein, 325 aa, unidentified
MDPDDKHGTAEKMSDNLPQTIGIDISKASLDCHVHPVGAERQFANTAKGHKALIAWARQWPVERIAYEATATYHRALEAALADWPCVKLNPERARRFAQATGTLAKTDRIDAMLLARMAATLQPPVRPARSAQQAQMAELINARDGLVRNRTACLNREKNLTIALLKRQCRQRIKQIEQHIKALDTEIATFIAADAELARRHQILTSIAGIGDLTANQLIATMPELGTLDGKQAASLAGLAPVARQSGQWKGKSFIRGGRANVRQALYMPALVAARFNPDLKAKYQQLVTAGKPAKIAITAVMRKLVITANALLKANRLWQQSPA

SEQ ID NO: 253634 - protein, 325 aa, unidentified
MQGKEASEQETRKCTAGIDVSKNWLDAHVLPASQSLRVANTRDGIRQLKRWLLQRQPELVVVEATGKWHRELCRSLTASQIAVAVSDPYRVRMFAKAQGIFAKTDRLDAKVLAMFAAMMAPSCRALAPQALEAMQELVTARTSAVAEQIALKNQFSAATGTFLKRQLARRIVQLTAHIKALEHECLKQINADEALAGRYAILTSIPSFGAVVAMTLIAFLSELGSLTNKQIGALAGLAPVADDSGEREGVRVIWGGRGQVRRTLYLAALSAVRYNNDMRAFHHRLAANGKSPKAILIAVARKLVLLANTLLAQNRTWQPKAPQNA

SEQ ID NO: 253635 - protein, 503 aa, unidentified
MTVRSVGIDLSLTGMHQAEAIDLDGNRCGHLKFRTTPEGLNSLVNLCFGDGSLPVIVLEPTGLAWLPIILFLRARCPQAVLVRAKQQKASALRRVLREHAKSDRIDALTLARLPWVDPEHLEPLAFSSPDMQRLDRLTRRRDRLAAAVASRKTRISALLLGLFPGLWECFEDPWNPRARWIYRHRLNPFRLTRTSQGQLNTIFARVTPRSSLGIIQRESTALLATAKRLGAVYKPARDAALATDLLFRTWQQEISAELDLLEAEEAQMARLEEEISALYRLLHPQDHLRTIPGVGPRIAPLLLAAIGDAGRFHSAKAFCQWTGVLPRSHQSSNTQRLGLGMGKAGPARVKRALYQAAQYARRWDPELAALYHRQMVDYGKTHKQAMGAVMSHLATRVYTVLKEQRPYQVRDFQGQPLTRTQAGQIVRECLRVPEEVRRLRRHRHRPTKKSIRQEAIHAKVGRWEDSTSHEAADTPQRGIPVPSHPKLEDNTAFQSVQEFAQVS

SEQ ID NO: 253636 - protein, 411 aa, unidentified
MYYVGIDIAKSFHVVSIINETGTMVFKKPFRVENSLDGYSKFIDKLTKISSKTSEFIIGLEATGIYGENLWEFLNSKGYNVKLLNPFQTSRYREQITMKKVKNDNIDSLIIALLLKDGKFSSGYVTDDEYQSLRTLYRNRASIQSDMKEVKKRILTQVTVTFPELENFIDIFTVSGLALLNKYPTAKHYERSSVDRILKVFRHIQGNNFNQTKALEVLNLSQVSVYSGKAKDARAIAIRSSIRLLKMYQEELSIIENEITILLSKNSTSSKEDETTEPNTLIQNLKTIPGVADKTIAAILSECGDITRFNNVTKFIGYLGLFPTENSSGNSTKTGHLSKRGSSLVKHALYMSSVSCLIHNSQLKQLYDTKRSQGKSKQEAIVVLSRKLATIIYAIFKYNTPYNPARVFAKS

SEQ ID NO: 253637 - protein, 339 aa, unidentified
MKLYAGIDLHSNNSVVSLIDEHDRAVAEKRLPNELERILLFLAAFKQALVGIVVESTFNWYWLVDGLMEAGYRVHLANPAAIQQYEGLKHTGDEHDARWLAHLLRLEILPEGYIYPREARGVRDLMRRRMQLVDCRSQQLLAMQTQIMRSRGHSMRVSELKALELEQIEALVKGERNLSSALRANLAVAQALTTQIERLEGEILGQVKLAAQFKPLLSMPGVGNILGLCIMLETGEIGRFPGVGNFASYARCVDSHRVSNGKKKGVGNAKCGNRYLAWAFVEAAHFAVRYNARIKRFYERKAAKTNSMVAIKAVAHKLARAAYHIMRTHERFEEARAFA

SEQ ID NO: 253638 - protein, 376 aa, unidentified
MREKLRFLGMDVHAETIAVAIAEPDGEVRSLGTIANREDSIRKFIRKLGTPEQLRACYEAGPTGFVLYWQLTQLGVDCAVIAPTLVPKKPGDRVKTDRRDALKLARSHRSGDLTAVWVPDEDSEALRDLVRQREAAKQDQLRARHRLTKFLLRTGQRPPLGLKAWTERYMRWLAQVRYTQPAQEVTRLDCMNEVEHMSARVKRLEEAILEVVKLAPQPMQDVIRGLQALRGVAHISTVTIASELGNISSRFQSARKLMGYCGVFPSEDSSGNRVRRGGITKAGNAHLRRIVVESAWCYRHLPRVGEKLRKRHEGVPPAIIEIAWKAQNRLHKRYMKLSMAGKDQRKIMTAVARELLGFIWAIAIKAEASCRQPIAA

SEQ ID NO: 253639 - protein, 339 aa, unidentified
MTKISTVGVDLAKGVFQVHAVDESGAVVVRKALRRSKLLAWFARLEPCLVGMEACATSHYWGRELKKLGHDVRLIPPAYAKAYVRRNKNDPADAAAICEAVGRPSMRFVAIKSELQQASASIHKVRDLLMKQRTMLTNQMRGLMAEFGIVVAKGASHVGELVAILASPEDQRIPEPLRDSLRATAEILRAIDRKLEAIDRQIVAAGRGDATYRHLITAPGYGPIISSAMSAMVVDPGAFRRASDFAASLGLVPRQDGTGGKVKLGPISKRGNGYLRRLLVNGAMAVLRSKRAKDDPWIATLLASKPRKVAAVALANKMARIGWALMTRQEDFRRLPAAA

SEQ ID NO: 253640 - protein, 323 aa, unidentified
MATLGIDISKADFHVELSVNEKLRHRRFVNRKEGFKELCVWLAKHKAESVHACLEATGRYGDELALQLYQAGHVVSVINPAQIKAFGQSELLRNKDDRPDAGLIRRFCEKQQPAAWQPPSTQLRELQALTRHLENLHDTRQQQVNRLEGVNNKAVLKSLRKLVAHLDSEIQRTEKQIQDHIDNDPDLHRQQQLLSSIKGIGKLTAAKLLAELGDISSYKSARQVAAYAGLTPRNNRSGTLRGKTRLSKTGNARVRKALFFPALVAKRYNPIVRAFCQRLTHNGKNKMEVIGAAMRKLIHIVFGVLKFGKVFDPDHELLLNSNS

SEQ ID NO: 253641 - protein, 347 aa, unidentified
MLHAGLDLSRHRLDVCLLDMQGSTVQVTTAPPDADGLRGLARQTAVHGQPVRAAIESMNGARFVHDQLELAGWQVAIADAQKVKGLAPLACKTDRIDAWVLAELSRRDLVPEIWLPTPGVRAERERARFRLHLVRHRTALKNRIHATLLAFGKPCPVSDLFGVGGRALLARLALPEPWISNVAAALALIDDLDDQIDGCERELRRLGADHPYVPLLMTAPGIAWVLGYTIAAEVGDITRFPSPKKLCGYTGLCPRVYQSGSRDQRGPLAKNGPPYLRWALIEAAIHAARHPCYRDHYQHTKQRLGRQRGARVARVEVARKLTEAIWHMLTRSQPFAPARPPTSALVA

SEQ ID NO: 253642 - protein, 360 aa, unidentified
MCQSRCCVGKEEPIVQNDTLAAVDIAKEVFEVGVSDRPGHVARRRRLARYEFLEFFAQLPPATVVMEACGSAHYWARRIEELGHVVVLLPPQYVRPYVVRNKTDRKDVDGLLEAFRNDRIKQVPIKSVTQQVLGTLHRLRSGWLADRTRAINALRGLLRELGFFIPEGRKHVLPDAWEIIQDPKSGLPDALKPSLGSLCEEIVSLSTRIEEIEAQLEALAKQIPVVARLRSVPGVGLLTATALYAFVGDALRFPSGRHMASFLGLTPREYSTGLHRRLGRISKRGDVYLRMLLIHGARSILWHAKRMKQPDRLRAWALRLERKLGHNKAAVALANKLARISWAVWKNDRNFVPMPELQTA

SEQ ID NO: 253643 - protein, 411 aa, unidentified
MEVVHPVCAGMDVHKGSVTVCLVRRDKMGKRCKELRTFSTLTNSLLEMRDWLARFRCPVIAIESTGVYWKPIFNLLEDEFEVMLVNPAHLKHVKGRKTDPEDASWLADLLEHGLLQASFIPPVEIRDLRDLTRYRRRMIEEKSAEVNRVQKILEDANIKLASVASDVMGVSGRAILAALLEGKMTAEEMAELSKGRLRDKREALQESLVGRFRPHHGLLLSKMLEHIDFLDGAIADCDKAIEELMRPFVLMIEQLDAVPGVDVRSAQDIIAEIGTDMSAFPTHKHLCSWAGICPGNNQSGGKRQSGKIRKSNKWLKAALIRCAHAAGRSKDTYLGAQFRRFVGRKGTQRAAIVVAHSILESIFFILHDGVDYKEMGPAYFDRVNKEHIVRQYKKRLEALGLVVEVRVAQAA

SEQ ID NO: 253644 - protein, 347 aa, unidentified
MRFYTKRHRYYCGVDLHASSMYICILDAEGEILVHRNLKSQAEVFLAVIAPYRVDIVVAAECVFTWYWLADLCARESIAFVLGHALYMKAIHGGKTKNDRIDAQKIAMLLRGGMLPQAYVYPSAMRSTRDLLRRRLHLVRQRAQLLTHIRNTHYQYNLSEPAGRVASNANRVGIAESFQDASVRKSMEVNLALLAYYDNVIRELETYIGRLAKEHDSESLNLLHSIPGVGKILGLTILYEVHDIHRFPRVQNFASYARLIQCAKESSGKRVGTGGRKMGNAYLKWAFSEAAVLFLRGNPSGQRLLKKLERKQGKGKALSTLAHKIGRATYYMLKRRTTFDVIRFMNA

SEQ ID NO: 253645 - protein, 345 aa, unidentified
MGEVSTIGLDIAKSVFQVHGVDCDGAIVVRKRVSRAKVLEFFAALPSCLVGIEACPSAHYWSRQLQALGHTVKLMPPSYVKAYLKRSKNDANDAAAICEAVTRPSMRFVPTKSEQQQSGLMLHSSRQLLVRQRTMLSNAIRGHMAELGLIAAKGRNGTAELLKIIAHAEDGRIPAAARFSLDVLARQYAAIAAEIGAIEKRIHAWHRSCEESRRLEEIPGIGPIVATALVAEVGDWTAFSSGRSLAAWIGLVPKQHSTGGKERLGGISKQGNSLSAMAARCRGYGCHPICTAARHEAALASPSHGSPADQGRRGCARQQNRTHGLGHDGTRGALQGAEIAAGGII

SEQ ID NO: 253646 - protein, 343 aa, unidentified
MKIIRVGVDLAKNVFQVHGVDRDERAVWKRKLKREEWIKVLLEQIEPGCEIGMEACGGAHHWARQLQAHGYSVKLIAPQFVKPYVKSNKNDANDAEAICEAMSRPHMRFVPIKTVAQQDTQAAHRIRTGLMEQRTAKVNQIRGLMAEYGLVAPLRVSYLRAAIPEWLEDAENGLTSQFRRLLNGLWSDLQSLDQRVKELDREIVQIVAADPVANRLQQLRGVGPIGATAMLASVGDASQFKNGRQMAASLGITPKQNSSGGKDKLLGISKRGDSYVRSLLIHGARSVVHASKGKDDRLSQWVTRIATTRHPNIAAVAMANKTARIAWAMIRKGTDYQPELAAA

SEQ ID NO: 253647 - protein, 405 aa, unidentified
MLCGIDWASERHAVCVLDDAGTTVSAFEIAHTADGFDQLVARLRRNGDPAGLPVAIERPDGRLVDRLLEAGHPVVPVQAGAIKAWRDAEVVSGAKSDPGDAAVIAEYLRLRRHRLRTLQPFSAETRALRAVVRTRDDLVAQRVAATNQLAACLDAFWPGAKQVFADLASPIALDFLTRYPTPESAARLGEARMRAFCTKHGYCGRRPAGTLLARLRTAPPGLVDTLEVEARRDAVLALVGVLRALNAAIKDLDRSVVAHLGEHPDGEIFTSLPRSGRISAAQVLAEWGDCRDAYDGPEAVAALAGIVPVTKASGKHHAVSFRWACNKRFRAAITLWADNSRHASPWAAKVYADAVARGCDHPHAVRVLARAWIRVIWRCWIDHTPYDPAKHGAAHKLTEMATTAA

SEQ ID NO: 253648 - protein, 346 aa, unidentified
MMIIGCDFHPSWQQVSWLDTKTGETGEQKLVHAEGQAKTFYQQLTAPALIGMEATGNSQWFIELVQELGHVILIGDAAQIRASYVRKQKTDKRDAAHMLKLLLEKRFPTLWTPDRDERDRRQLILHRHKLVEIRSRVKNELQHLSLNKGMQRQAKLWSEAGQKMLRELPLQPWAACRREDLLELLALLNQQIGKLDEAVQKAAEEHPQAKLLLTQPGVGPNTALAFVLTIGDVSRFPRGKQVASYLGLIPREESSGGRQKLGAITKQGNRLVRSLLVEAAQIAVRFDPGFRKQYLHRCHQKPKGVAKVAAARKLAVRLYWMLRTQVGYPEIVRIESSPRVPLVGAS

SEQ ID NO: 253649 - protein, 342 aa, unidentified
MDYFAGLDVSVKDTSVCIVDGTGKIVREVKVASEPDALLQVLRNPVYCFKRIGLEAGPLSQWLFSALGEANLPVICVETRHMRAVLKAQINKTDRNDARGIAQMMRVGLYRPVHVKTLRSQKLRMLLTHRKLLQSKAIAIENDLRGTLRNFGLKVGIAGRAKFEARIKELVEDVPDLEVLVEPLLVVRRVLREQIAVLHRRLLTIVRDDEVCRRLMTTPGVGPVVALTYRATVDVPARFRKSKSVGAVFGLTCSRDQSGERDRPGAISRCGDEMMRTMLYEAAQSMLHSTRWSWLKAWAMQVAKRRGMKRAIIALARRLAVIMHRIWVDGTEFRWTREAAAT

SEQ ID NO: 253650 - protein, 405 aa, unidentified
MERVIERCAGLDVHKKTVAACVRVRGTQHVRTFGTTATELLVLRDWLFAHEVTHVAMESTGVYWKPIFYVLEDAFTCVLSNAAQIAQVPGRKTDVKDCMWIAQLLEHGLIRASFVPPAPIRELRDLTRYRRALIEERTREANRLHKVLEDAGIKLASVASDVLGVSGRAILAALIEGTTDPMVLAELARGVLRKKLPALRHALMGRFREHHAFLVTQILAHLDYLDELIATVSGQVEVAIAPFADELARLDTIPGINQRTAEAVIAEIGVDMTVFPSARHLASWAGLCPGNNESAGKHRPAHARKGNRWLRSALTEAALAGAVRSKKGALAARYRRVMPHRGHKKAVVAVAHAILVTAYHLLARQVTYSDPGADYYERRHADRVRQRAVQTLERQGYRVSLEPAA

SEQ ID NO: 253651 - protein, 425 aa, unidentified
MNYKQNEKINQVKESTLVVGIDIGSTKQYARAFDWRGIELGKVFPFSNSREGFEAFKAWMQHLQDKYRKSDAIVGIEPTGHYWFDLGAYLEDEGILLVMVNPYAVKQTKELDDNSQSKNDRKDPKVIAKLVTEGRYSAPYTPDGVYADLRIMVTNRKRLIREMTQIKNRFARWFAIYFPEYTDVFGDYEAQSSMLLLKKVCTPEAIVELGAEKINQIWRDAKLRAVGMKRATTLCETAKRSIGLKKGSSAARYEMKLLLEDYEYKKAQLDAVMEEIEKLCRKIPESEQMLAIKGIGVITTAGFLAEVGDVRRFESPRQIQKLAGLSLRENSSGKHKGQTIISKRGRSNLRAVLFNAAIPLIATNPEFKSLHEYYTTRANNPLKKKQSVIAISCKLIRVFYAILANGVTYDAQKMLSDIHRQPQAA

SEQ ID NO: 253652 - protein, 331 aa, unidentified
MDEVKRFVGIDVAKAALDVFIGSAAAAFSVANDEVGIQELFRQLKPADFVILEATGGLEMPVASALAAAGIAVAIVNPRQVRDFARATGRLAKTDRLDAEVLARFGEAVRPEARPLANEQAQALEALVTRRRQLVEMLTAEKNRRARAPKILHRSIDEHIRWLEKRLAGFDDELAEMIRDTPLWRERDELLRSVPGVGKVLSSTLLAHLPELGALNRKQIAALAGLAPFNRDSGSLRGSRCIWGGRAQVRRVLYMAVVAAVRSNPVIKNFYTQLRARGKYPKSALTACMRKLLVILNAMLHNKTHWQTPALASSTSALSPFLGAVPEHGCC

SEQ ID NO: 253653 - protein, 310 aa, unidentified
MSSSVYVGIDISKHRVDVATEPATPPTHFPQTEAGIGALVTHLQPLGPALIVLEATGGFETAVVTALAAADLPVVIINPRQVRAFARATGRLAKTDAIDAAVLALLAARLQPPQRPLPDAALQDLKARVARRRQIREMITAEQQRLPQTRGRIRADIEAHIAYLKARSDEIDTDLRTLIAESPHWRATDDLLQSVPGIGPTTAAALIADLPELGRLAARPLAALVGVAPLNHDSGTRTAPRITWGGRAPVRSALYMATLTATRYNPVIKAFYQRLLAVGKPRKLALIAAMHKLLTILNAIVKTQKPWAHA

SEQ ID NO: 253654 - protein, 353 aa, unidentified
MSVQTASVDNLTVIGIDIGKDVFHIVGFDGDGQIVVRRKIKRLALVQVFEKLPRCIVGLEACLSAHFVSRTLRGLGFEPRIIPAKYTKPFNKGQKNDYNDAEAIAEAALRPNLKVVPEKSQDQLDLQALHRVRARLVSRRTATINQIRAFLIEQGITVRTGASSLRNSLMTILENRADEISPRMHDIIIGLYEDWLWLDERIEATTDEIELISKREGNCQRLMTVPGIGPIISTAMVAAIGTGEAFDRGRDFGAWLGLVPRQYSTGGKPILGRISKRGSKYLRTLFIQAAHIILMRPHNWQRFSFGPWLEQASQRMHKNKLAAALANKLARIAWSVLRHDQDFDAHQIEATAI

SEQ ID NO: 253655 - protein, 462 aa, unidentified
MPEEPTAGNLHGGVREGGDPRRAMVNLNGHEAGNGGYSQREPTARWGSSTRKSAMKKEPKAKRAKAQRPVPRDTKEVLAELVEKLQGKLAVKATSANQAAGPPRGELSPNLNRLTVGLDLGDQWSHFCILGFEGETLSEGQLQTREAEVAEFFQALPPARVVMEVGTHSAWMQEIIAGEGHEVVVANPRLMDGSKRRKRKNDRIDAKKLARLGRVDPQSLYPIRHRSREVRQDLVVLRAREALVAARTELINATRGLVKSMGTRLPKCSSESFGHKVKDAIPEKVREALLPLVQLADALSACIQSYDQKIAELGSEKYGHTKLLRQVKGVGPITALAYVLTLENPEHFAKSRDVGPYVGLVPKQEDSGESQPQLGISKTGDTMLRKLLVGSAQYILGPFGPDTDLRRYGLRLCERGGKNAKKRAAVAVARKLAVLLHRLWVSGEVYEPLGYAVSRRIVQQAA

SEQ ID NO: 253656 - protein, 357 aa, unidentified
MHERTFIGLDVHARSVQAGVLDGLTGEVKSLAVPVATKALVAWVCAQPAPAVTYEAGPTGYELARALLAAGVPCLVAAPSRIPRAPGDRVKTDRRDAVRLARLLRLEELVAVRVPGLAEEAARDLVRAREDARGDLMRARHRLSKLLLRRGLVWEERAWTQAHELWLARQRFSERPLQIAYEEALAAMLSVRDRRDALDAAIAVEAATEPWAEVVDRLACLRGVSTLTAFALTVEIGDWQRFSGRSLAAFLGLTPSESSSGASRRQGSITKTGNAHVRRLLVEAAWQQRRRPGKSLRTHLARSAQPAAVRERAVAAERRLRHRWVRFDERGKRSTVAAVAVARELVGWCWSLAVMDA

SEQ ID NO: 253657 - protein, 403 aa, unidentified
MKTMDRAAAKVGMDVHRRFSKVTARNAEGKIVGRERLEHGDRRALQERLGAWAKGIPVVLEASFGWAWLCEELERAGLEPHLASSRKVAAWRDARGIAKSNRTDADLLSELWSPTDRWWEVWLPPREVREQREWMRYRMTLVGLQTGLKNRIHAILHRHGILHDFSDLFGTQGRLMLTRLTHASQNERLGESGRATLKGYLQLLDHLRRQIAAVTRTVYRQRCETPAGKRLRSVPGIGAVLAYTILAEVGDFGRFRSAKHLSSYSLLAPRAYDSGEETDEAPKGRHVGHVGRRTLKWAWIEAARGAVRRGGRFRARFDGYTDGGKRNRNRGYILVAHDLCRTAYGISKKEMDYCDDPPERPGSSKKGASSPRQDSPCDPRSNATLRNSRPGTGQPDRGLVVVG

SEQ ID NO: 253658 - protein, 410 aa, unidentified
MEVLHPHCAGLDVHKESVVACVRHMADSKVTTVVKTFKTTTQELMGLSNWLSAEGATHIAMEATGVYWKPVWHILSDGEFELILANAAHVKNVPGRKTDVNDATWLADLMAHGLIRASFVPDEPTQQMRDLLRTRKQMVRERSSHVQRIQKTLEDANIKLDSVVTDILGLSGRRIIEALIAGQTMPQALASLAHRRIHASADELEAALRGRVTRHHRFLLKLHLDQIDALDAALARIDEEVSANVEPFRTAIEMLSTIPGISTLSAEVIVAEIGIDMSRFETAGHLISWAGLCPKNDESAGKRRSNRMKKGAPWLKTTLIQCAWAASRKKNSYLQAQYRRIRSRRGAKKAIGAVAASMLTAAYHMLKDGTLYQDLGAAHFDNRAKGKHVLRLVNRLQNLGFDVQITPIAA

SEQ ID NO: 253659 - protein, 358 aa, unidentified
MAGKVTETAVVGGVDTHKDLHVAAVVDQNNKVLGTQFFSTTRQGYRQMLAWMTSFGALKRIGVECTGTYGSGLLRYLQNAGLEVLEVTAPDRMERRKRGKSDTIDAECAAHAAFSGIRTVTPKTRNGMIESLRVLKTCRKTAIPARRVALQIIHSNIISAPDELREQLRNMTRMQLIRTQGSWRPDASEYRNVTNVYRISLKSLARRYLELHDEIADLDVMIAAIVDELAPELIKRNATGYESASQLLITAGDNPQRLRSESGFAALCGVSPVPVSSGKMNRYRLNRGGDRAANSALHIIAIGRLRTDDKTKEYVARRVAEGHTKMEAIRCLKRYISREVYTLLRNQNRQINSIPITA

SEQ ID NO: 253660 - protein, 443 aa, unidentified
MNTPHPYDLIIGLDRSDRKADLHLIDTRTGQHRSATIDIAPEALWEWLLELRQQHPQARVALCLEQPAVHLIAFLEAYEWICLYPINPLSLQKFREAFVTSRAKDDAKDALYLAELLLTHHDKLKPWAPEDSQTRAVQQTVFHRRAVVDERTGLTNRLQALLKQYFPQALVLCGEDLWRPLATRFLLKWSSLQVVQKAKPATLKQFYYLNGSRSAKLLEQRLALVAKAVPVTDETALIGSFVLRVQLICRQLQLVQQTLHQYEKQIAQTFMQHPDHSILASFPGAGPVLGPRLLTSLGSQRERFEEATNLQRYTGVAPVTKQSGGKCHVHRRYLCPKFHRQSFHEYAKESVLWSRWAAAYYLQQRTKGAHHHTAVRALAFKWQRIIWRCWQDHKPYEEKIYEAALRKSNSPLVGLLDKIQLGKSPLKTLAKKNEKSLAGSPQR

SEQ ID NO: 253661 - protein, 340 aa, unidentified
MEQIIGIDLAKRVFQVHIVSAQGEKKANKMLTREKLMAFIAQQPSSRIVMEACGSANYWSRQFKTFGHDVRQISPQYVSPFRMGNKNDKNDATAIVEADSRPGMRYVPEKSLEQQDIQCIHRVRQRLMKNRTALINQIRGLGLEYGIAIPEGAHKIMTCLPDYLEDAENELTALSRQLFHEIWLELQDCQQRIKTLDVRLEQISTQNEDTARLVNIPGIGPLGASALTIALGDSRSFNNGRHFASYLGLVPGEHSSGGKPRLLGITKRGDGYLRGLLIHGARSVVYRTVNLPDERCSALQRWLKGIIVRGGVNKAVVALANKNARVAWALVNQRTEYRNQ

SEQ ID NO: 253662 - protein, 338 aa, unidentified
MVDKVTEAAVVGGVDTHKDLHVAAVVDQNNKVLGTQYFSTTRQGYRQMLAWMTSFGTLKRIGVECTGTYGSGLLRYFQSAGLEVLEVTAPDRMERRKRGKSDTIDAECAAHAAFSGIRTVTPKTRDGMIESLRVLKTCRKTAISARRVALQIIHSNIISAPDELREQLRNMTRMQLIRTLGSWRPDASEYRNVTNVYRISLKSLARRYLELHDEIADLDVMIAAIVDELAPELIKRNAIGYESASQLLITAGDNPQRLRSESGFAALCGVSPVPVSSGKTNRYRLNRGGDRAANSALHIIAIGRLRTDAKTKEYVARRVAEGHTKMEAIRCLKRKRTA

SEQ ID NO: 253663 - protein, 437 aa, unidentified
MGKEDEETTMSARGTVQPEPEFVAFVGIDWADQKHVWSLQKADSRQREAGELEHRPEAVEAWVGELCRRFGYGPIAVAVEQVKGALVYMLRKYECLHLYPVPSTMSASMREALYPSGAKDDPRDADLLLELLLLHRDKLRRLTPDNEATRRVQNLVEERRKLVEEKTAQLNRLTGYLKVYFPQILEWFAKLDSKLVCDLLERWPSLEELQKVPSAELKKFFRHRRGRHGELTEWRMQGISQAMSAIRDRAVIEAKRTVVQVIAQLLRTLLEGIATLDRKIAEAAEAHPDFFIFQSLPGAGTALAPRLLAALGSQRDRYSSAQEVQQYSGIAPVTERSGKKKWVHFRWACSKFLRQSFHEWAGHSIAQSVWARAYYQRQRERGKEHHAAVRALAFKWIRIVFRCWQDRVAYDETRYLTALAKRGSHLTSAFAAAAVGI

SEQ ID NO: 253664 - protein, 358 aa, unidentified
MAVIEGVCRIVGGVDTHKDLHVAAIVDEQDRVIGTRSFATTRQGYRQMLAWMRSFGELQRIGIESTGSYGAGLLRFMQQAKVTVLEVTTPDKQDRRRRGKNDDLDAQNAAHAAFAGQRTVTPRSRDGMIESLRVLKACRKTAVSARRIALQMIHNTIVCAPDGLRDQLRRLTRMQLIRTLASWRPDLTAYRDLDSAYRIGLKSLGRRYLELHDEIADLDAMIAAIVDELAPNLVARNSIGHTGAAQLLLTAGDNPERLRSEASFASLCGVSPVPASSGRTVRHRLNRGGDRAANSALHIIAIGRLRTDQRTKDYVARRLAEGHSKLDAIRALKRYLAREVFTLITQRRKEINATRIAA

SEQ ID NO: 253665 - protein, 389 aa, unidentified
MKNTIVHHEGAASLEDAVGKVKLSGSIIKIGLDVHARLYVAVAQYDHLLPKPARRFAPMEFVPWVEQLLRVGHTVHVVYEACGFGFGLYRELKALGAHCYVIAPRKLDEHFTRVKTDPRDATTLCQRLSRYLDGNTRELAVIRVPTQEEEQDRHVSRQREQLLRLRQKLEAQGRSLLISQSLPSPAHWWKNQTWSRLRKLLPGWICIRLEVHRPPLLTLQKQIDALSAQLEAAAPADVPLGIGKLSTVVMTREICSWERFRNRRAISCYTGLCPGEHTSGTKRMPGSVTKHGNPHLRAALVECAWRMVRFEPNYPPVKKRLSVLAKGAHATGAQRKKAIVAVARHLAVDLWRIHTGRCCAAQLGLSSAETSSCSRGTEKEARTASTIIT

SEQ ID NO: 253666 - protein, 347 aa, unidentified
MGKSITDFSSVTTVGLDLAKHVFQVHGVDASGRVIVAKALRRKDVLAFFAQLPECLVGMEACGSAHHWARELIKLGHDARMMPPAYVKPYVRRQKNDAADAAGICEAVTRPSMRFTGVRTLENQAALMHHKAREMLVAQRTQLINALRGHLAEIGVIAAQGLKNARELARVILAEGDETIPACVRAALAPLVRQLHALDQEIACSDRTIALMARDNEMARRLMTIPGLGPVTASAMAASVQDVSAFSGPREFAAFLGLTPRQNSSGGKERLGRVSKMGNRYLRKLLVVGAHAVLYHRKPHEDALRSWAKKLMQTKPFKLVAVALANKMARIAFAIMRGRTTYSAAPV

SEQ ID NO: 253667 - protein, 359 aa, unidentified
MKYIGLDCHKQYDFATLIDSDTGEIRSKKLAHKKEEFKSFIGSRRDTKMVIESCWNWSRTYELAKDLVDEVILAHPLKIKAIASAKIKTDAIDSRTLAQLLKADLIPQAHLREADNRIKQKVIRHRAFMVAMRTRVKNKVNDLVNNRLLSPSLEESKPKNLFSKRGKGENGVAWLKSLEWPVEEDKRIFESSMRLIEQLSFEISASNQMVEEIYKKDKDAQLLSTIPGIGKTLAVLISTEIDGIDRFKSPSKLCSYAGLVPSTHSSGGKTYHGKMILEGNRWLQWALVEAVVPASYADVGIRQRLNALRKIKKANVAKVIMARWMLKLVYHVLKEGRSYVPSELCDTNRSRLSIALASS

SEQ ID NO: 253668 - protein, 317 aa, unidentified
MNFVGIDIAKDSMEVMVHESSKGWNFMNDESGLHKLIAKMKRLSPSLIVLEATGGYENTVATGLQCKGFSVAVINPRQIRDFARSIGTLAKTDILDARVIAHFAAKIQPPPRILPTEEAKRLGAILMRRRQIITLLTAEKNRLLQANPAVRERVKNHVIWLKQELSDITTELKQTVQDDPEWKEKDKIIQSVPGVGPILSVTLLADFPELGTLNRKQIAALGGVAPFNRDSGKMRGKRTIWGGRGVVRTATYMAAFAAIRCNPLLTSFFNRLVAAGKPRKVALVACMRKLLCILNAMLKNRTRWTCYSPQLVGPCYC

SEQ ID NO: 253669 - protein, 426 aa, unidentified
MNCTQNYKIDQVTEQTLVVGIDIAKRTHYACFVDDRGRVLRKSFPIFQSKEGFQQLYKAIQEAMQAFGKSEVIVAVEPTGHYWLNLAYFLEEKGIPLVMVNPAHVCRSKELDDNLPTKHDAKDALVIARLAKDGRFLVPRLLHEIEADLRVGSTLKEKLRKEQTAVKNAIVRWTDRYFPEFWTVFRDLGKTALSVLEWTPLPADMAGRTVEELLEVYRQSEGMKCPQKAKIQALINTAKDSIGVTEGTAMARFEIAALVRRYRQLEAEIAALDAELKALVQTTMEYQWLKTVDGLGDATIIDLLAEIGSFAHYRDPRQLVKLAGLTLKENSSGQRKGQKHISKRGRKRLRSVLFRAMIPLIRHNEAFRGLHEYDTTRPVNPLTGKQSIVALCRKLLNVLFAICTKKQAFDAERMKQDVLSQVQRAA

SEQ ID NO: 253670 - protein, 458 aa, unidentified
MRKKGKRTKGMEEARPFEGLSKVNQNAGGVDIGATEIVACVSGGDEIQLVKAFGNYTVDLQSIAQWFHEHKIKTVAMESTGVYWIPLFEELERQGFECLLISSRSLRKVAGQKTDVEDAQWIQTQHSYGLLRGSFRPPGDLVALRTLLRHRSQLVEHRSPQIQHMQKALLQMNIQLSQAVTDVTGMTGQKIIRSIVSGERNARVLAGFRDPGCKHSEEEIEKALTGTWREEHLYVLKQSLELYDFYTAEIEACDEEINRRFGMTRPDWVSRELPVIPDKKRNSHSKNAPKAAKEIREHLYRINGVDLSLVDGMGVSLAQTVTMEVGSNVGENFPTEKHFCSWLGLAPKHDITGGKVLSNRTLKTKNRAGQAFRLAANSVKKADCPFGMMYRRLRSRLGPAQATVATAHALAKVVYKMLKYKVDYDPLSVNEYQKQYEEQQVKYMRKRAAKFGYQLIPT

SEQ ID NO: 253671 - protein, 442 aa, unidentified
MRGVPEEIPDAQSEQILARVCAVDVAKGSGMVCVRLPGEGGRRISRVWPVPATTNAVGDLAADLVTAEVEKVTVESTSDYWRIWFYLLEAAGLDVQLVNARDVKNVPGRPKTDKLDAVWLAKLTEKGLLRPSFVPPVPIRVLRDYTRMRVDLVRDRTRYWSRLEKLLEDALIKVTSVASTVRTVSTRDMVEALIAGERDPQVLADLARGPLRSKRAALVEALTGRFDAHHGELARILLNQIDHLDAEIATLTERIAVLLDQIDPAGPPLPPGGAGTVAVLDARRRLAQIPGINTESAQLIIAEIGLDMTRFPTAAHLVSWAKLCPRTLQSGTSITAGKTGKGNPYLKGALGMAAAAAARGHGTFLSERYRRVVKRRGKGKALVAVARSILVIIWYLLADPSARFQDLGADFYDRRVNTTRKINNLVRQLEALGHTVTLHPAT

SEQ ID NO: 253672 - protein, 402 aa, unidentified
MNAVGIDVSKGKSMVAVMRPFGEVVFSPFEVSHTDKDLTNLAKKLKSLPGETRVVMEHTGYYHAPVAVALHEAGIFVSTVNAMLVHDYGNNSLRRVKTDTKDAIKLANYALDHWLSLSRYLPAGDIRLMLKTCYRQYEQFSKIRTMQKNNLIALLDVTFPDANKLFSSPPRADGSEKWVDFVAQFWHCECVCGMTVKAFTKSYEKWCRKHGYNFSEDKAFDVYTSACGHICIMPKCENTKLMIQQAVAQLQASSTALVALKKQMQDLASTLPEYPVVMQMYGVGPSLGPQLMAEIGDVRRFHSKSALVAFAGIDAPPYQSGQIDVRSRSISKRGSAKLRRTLFLVMSVFLQNSPLDEPIYQYMDKKRAEGKPYKVYMMATANKFLRRYYATVKAHLDELDYT

SEQ ID NO: 253673 - protein, 328 aa, unidentified
MQKNQEYVGVDVSKENLDMVVYSTNEIRSFGNEDASIAKAMTWLKQVNPAIIVMEATGGMEVSLYVALQETNLPAAVINPRQIRDFAKSMGILAKTDKVDAKVLARYAATIQPEARPLPDEETRQLNTLVTRRHQLLEMIIAESNRAAITRDKTMQQRIHAHIDWLKQELAGINKDISQMIKENPVWDAKDKLLQSVPGVGPVLSATLIAELSELGILNRKKIAALVGVAPLNRDSGKHRGARSIWGGRCGVRRPLYMAALNAVRFNPTIKIFYERLLANGKEKKVALTACMHKLLMTLNVMLKHNSYWSCNYPICNNTCVPNAKTVA

SEQ ID NO: 253674 - protein, 362 aa, unidentified
MIVIGADTHKHTHALAAVAGATGARVGERTVRAEDAGHLSALRWARDLDSERVWAIEDCRHVSRRLEQALVAAGERVIRVSPRLMGGSRRGEREPGKSDQIDALAVARAVLKDGIERFPAAFLDERGMEIRLLADHRDDLVAERTRAQNRLRWHLVDLCPELEAALPKRSLDRPAQLDRVARRLRRCPAGARVRVARELVARIRQLTRDADALQTELRALVRAQRPRLLQETGCGTLIAAALIGRTAGAERFATDAQFARQTGTAPIPASSGTRQRHRLHRGGDRQLNRALHIIAITRARHDPDTRAYLERKLAEGKTGPEALRCLKRHLARRFHRLLSEPPASPEPTASTIDAVIWAPCLT

SEQ ID NO: 253675 - protein, 364 aa, unidentified
MYDSTTTVAVGLDVHARSIRLAAVRADELLEERTLPYDEEAVERTLRRWPGVRCCYEAGPTGFGLYRHLSERGIDCAVVAPGLVPQRPGDRIKTDPRDARMLARLLAGGLLEPIHVPSRELEAARDLVRAREDARLDRMRDRHRLSKFCLRHGRILPTSSWTVMRRKWLGEQQFEHADEQITFDTYLHAVDLVDARIEQLERAIRETAQQGPWRELVGRLRCLRGIDTLTALALVAEIGDFNRFRSAEEFMAFVGVVPSEHSSGEKRRQGSITKVGNSHVRRLLVEAAWHARRRPTVGYELARRQRGQDAATIERAWRCQQRLYQRWQRMTGRGKPQQKIVVACARELAGFVWAIATDQPLRST

SEQ ID NO: 253676 - protein, 373 aa, unidentified
MKKVRFLGLDVHAETIAVAIAEPDGEVRSLGIIPNREESIRKLVKKLGPAEQLQACYEAGPTGYVLYWQMTALGVKCEVVAPTLVPVKAGDRVKTDRRDASKLARSYRAGDLTAVWVPNEEHEALRDLVRAREVAKQDQLRARNRLSKFLLRHGRRAPAGIKAWTQKFQQWIKEQVHFEQPAQEFTLLDYLHEVEHMADRIRRLEQAMAEAVKLAPPQMQEVIQSLQALRGIAQISAITVVAELGEISRFEGARQLMGYSGAVPSEDSSGKRIQRGPITKTGNTHLRRIAIEAAWAYRHRPAIGLALRKRQEGLSEEVKEIAWKAQHRLHKRYRTLTAAGKEKQKVITAVGRELLGFIWAIGVQVERNHKRVA

SEQ ID NO: 253677 - protein, 313 aa, unidentified
MIITLRCVGIDVSKHFLDIFDEATGASERIANATQAITRLVARWRCDALVVFEATGIYDLELREALRQAGIRFARINPARARDFARASGKLAKTDPIDARMLAAFGRAMQPATEQVATPARDALARLAKRRDQLVLMRAMEKNRRSEADDRAMAERIGRLIEFFDGEIEEIEADIRALIKAEQEISDDAQLMRSLPGIGPVACMQLIAQMPELGHVGPKQIAALAGLAPFNVDSGTYRGKRKIGGGRKRVRDALYMAALNAVRRAEPFKAFYARLRQAGKPAKLALIAVARKLLTVLNAMMRDRKPYKLASAT

SEQ ID NO: 253678 - protein, 360 aa, unidentified
MTGTMTWAAMDVHARSTYAASLDVITGELSRRRFDSGAVEPVVGWLAGLPGPVRACYEAGPTGFGLYRAAVAAGVDCQVIAPSKTPRASGDRNKSDRRDTDLLLRQLMAGALTPVAVPSASLEAARDLARAREQVRLDLMRCRHRVSKLLLRHGRVWDRTAWTKVHRQWLGAQRFEQPNTELAFIDNLAACDGLTARREALDERLSRVATDPEFWPVVRRLRAFRGIDTLSALIIVLEVADFTRFPRAVQLGSWLGLVPSREQSGESDVHGSITKTGSKYARRILVEAAWHYARPPGIGTALHGRQEGLPDHVLQIASRAQSRLYRVHKRMRQRKKPGNVIVVACARELSCFLWAAATAP

SEQ ID NO: 253679 - protein, 379 aa, unidentified
MTCKECGQVVKLTRTMNKCHSNTELSSHEETRCQFNGGTGAIKLGIDVHQDFYVVVEQAGGSNPKPPQRFPKAAFLHWAAKLKSQATEVYAVYEACGFGFSLQRKLSALSIKCYVVCPQKLDEQNRRVKTDGLDAKALCLKLDRFVQGNRDALAIVRVPSEEEEQARAIHRQREQLVKARKQLEAQGRSLMVNHGLEPVPNWWNPRTFTALPAPQWMKELLANSQPILVGLQQKIAALTVQLQSAASPEQPRGLGKMTSVVIDREIGDWNRFSNRRQIASYTGLCPGEYSSGNTRLQSCVTKHGNPRLRAALVELAWRLVRFQPNYHPLRKWRQILAKGALATGAARKKAIVAVARQLAVDLWRIKTGRLRSEELGLIN

SEQ ID NO: 253680 - protein, 333 aa, unidentified
MMQFVGIDVSAKTLAVHVQTPQGVRQQLAFDNTWEGHQKLCRRLTQSRVSTRVALEATGLYSLDVALALAQQPGVEVMVVNPRSLRDFARADLRRSKTDAVDAQVLLDYVQRMRFQTWQPPSPQSLELRAIGRRLADLSDLITQEKNRLHAARVVASLAPAVQRDIQTHLQHLEGQLKALEREACQLIRSHPHLQEDFQLLLSTPGIGTRSAIQLLGELRVLPEDMGPRQWVAYAGIDPRSYDSGSSVHKPAQMSRRGNHHLRRFLYMPALVAVRRDPHARALYDELLAKGKKPLQALVAVMRKLLHSLHGMLRHRSPFEGQKFRVLATSLAP

SEQ ID NO: 253681 - protein, 340 aa, unidentified
MKGITVGLDLAKHVFQVHGVDEDGNVIFRRRLRRSEVSAFFERLPGSLVGMEACSSAHYWAHELRTLGHEVRLMPPSYVKPYVKRGKNDAADAEAICEAVTRPTMRFVPVKSPEQQSVLMLHRTRDLLIRQRTMLANAFRAHLSEFGIIAAQGIANLAKLSAIATNNEDHRIPPLARTCLLAIIGQLADLQARIGGIDRAIHTWHRANEASRRLETIPGVGPITASAIAAAITDPTLFASGRHLAAWFGLVPRQNSSGGKERLGRISKQGDPYIRRLLVVGAHAVLRYARGKKATSNPWMVGLLARRPYKVAAVALANKMARIAWAILTRGEIYRRPVMA

SEQ ID NO: 253682 - protein, 351 aa, unidentified
MKEYIAFDSHKHYTLMEREDRQTARTVQLRVAHQPGAIRACLGNCESGTDVAVEATGNWYWIVSEIEQAGLKPQLVHPRKAKLMMGLINKTDKLDVHGLNRLQRNGTLPTVWIPPAELRDQRELTRTRLVLVAQRTRLKNRLQSTLAKYGLAVRDCSDAFGTVARSQWPELLARLPEQTQWVSQQLLKQLDVLEEQIGQCEKRLSHLLKITPQIERLKSLPGVGLILGASIAFEIGEVSRFASAEHLASYAGTTPRVHSSGDKLRFGRLRPDINRYLRWAFVEAANVVALHHERRPERHVSYLYWRLKQRKGHAKAIGAVARHLAEATFHILSRQEDYVDPALRKGRSKPV

SEQ ID NO: 253683 - protein, 340 aa, unidentified
MSRIKDIRKSVDIKHMYVGLDLHKATINATVMDENGTVLNEVKIKSEPDSLRNFSDSIPLGSYIVIESSSTWYWAYRILSERHNVTLSNPLKTKAIAESKVKTDKVDSLTLANLLRGGYIAESYIPPMELMQLREMVRYRASLVRVRSIIKNRIHAHLLMYNIKINASPFTKEFIKTLRELNDYKINGYLNVLEVLNKEIDDISNRIKEIANDNEDAKLLMSIPGISFYSALFIISEIGDINRFPDSGHLVSYAGLAPSTRSSGNKVYHGPITKQGSSYLRWILTQVTWANIRKEPNGTVGNFYSKLKKKKGSAKAIVAASAKMLRIIYWVLKEHRPYQS

SEQ ID NO: 253684 - protein, 347 aa, unidentified
MNFYHSTHRHYCGIDLHARSLYVCIIDQQGEVLLHKEIKARPEPLLALLEPFRDDLVVGVECMHCWYWISDLCEEHGINFILGHALYMKAIHGGKTKNDRIDSFKIAMLMRGGNFPLAYVYPKEMRATRDLLRRRTRIVRHGAMLKAHAVNTLGQYNLPPSKANLNNPGGRSQLTAAFSDPDVQRNIDLDLAIVDCYQHELKKLEWHLEKQAKQHDPASLNVLKTIPGVGRILALTILYEVGDIQRFESVQKFASYARLVKCKAESARKIYGTQGNKIGNAHLKWAFSEAAVLFIRNNDKAKRYVEKLQRRMNKPKALSAVAHKLGRAVYFMLKDKRVFDEQRFLKG

SEQ ID NO: 253685 - protein, 402 aa, unidentified
MNSVGIDVSKGKSMIAVMRPFGEVVVSPFEVRHTANELNELAGLLKSLDGETRVVMESTGNYHAPVAWLLHDAGLYVSVVNAMLVHDYGNNSLRRGKTDKKDAVKLANYGLDHWLTLPKYVPEEDTRLMLKTCYRQYQQYSKVRTMLKNNLISLLDTAFPDANRLFTSPPRADGSEKWVDFVAAFWHCECVCGLSKKAFTTQYQKWCRKHGYNFSEDKALDIYASACGHFGVMPKTDTTKLLVEQAVSQLRATSAALAALKQEMQSLAVSLPEYPVVMEMFGVGPTLGPQLIAEIGDVRRFHSKKALVAFAGIDAPPYQSGQVDVRSRNISKRGSASLRRTLFLVMGVLLQCAPMDEPVYQFMNKKRSEGKPYRVYMMASANKFLRIYYASVKAYLDSLEHG

SEQ ID NO: 253686 - protein, 334 aa, unidentified
MKKVKEITESIGIDVSKATLDVYIHTKQLHKQFLNNKKGFTELLKWVVKEKIKLEESIWCFEHTGWYCILLSHFMHSNKLYYCCVNPMEIKRSMGLKRSKTDKQDAQEIARYAWLRRNELESSEPMPLNLVELQRLMSLREQLVKQTTALKNLSKGFKVTVEKESSDFGLKTIKQTLKTLELQIKKVEQEMRGLIKQESNMYHNFKMSKSVKGVGDVMAIQMLLHTHNYSRFGTWREFSSYCGLVPYPYQSGTSINRKPTTHSISDQKMKSLLTMSAISAIQADKELKQYFKKRIEEGKPKMVVLNIIRNKIVSRIFATVKRGTPYVEMYKFAA

SEQ ID NO: 253687 - protein, 353 aa, unidentified
MPVYVAVDFHAREQTISWCDTADGEVHRTKLRHQHDDVRKFYEQFSGEVIVAFEASGYSAWFEQMLAELGHTVWLGNAAEIRRKAPRKQKNDRRDADLMLELMLKSDFPRVHTFSAESRTVLRQLRYRHKLVKVRTIAKNSVHAIGINAGLPLRGRLLTQTGLEQLQALPLSPVLSQQRDEWLALIRLMNKQIGAVEESLAQRAKDDEAVELLRTHPGIGLLTALALRYTLDPIARFTSTRCVVGYAGLDCVEEQSSERRRMGSISKQGSRLLRFLLNEAGQTAARKDPQLKQFYRRLRRRRDKPKAKVAVARKLLVRSFIMLRDQIDYAEFVRRGVAARVARETHSPKVTDL

SEQ ID NO: 253688 - protein, 497 aa, unidentified
MPNKSTIYSRCNPQLLQLFETAGHPAKVLCVALDYAKAQHTALICNGVGDLLRPSFAIDNTAQGATQLLREVRACAKSRKVRGEHVFFGGEDYPSYAENFLRHLRQEKFLVVRVNAWEAKQQRDNFQASSDSLDLLGIARCCLHRRGQSVRDLPQAYPNLRLATRDRDKLVRMRTAVSNRIHTYVDRLFPGFLSVGKSPLEPFSKASLDLMEDRFSPAQLRRRPRQALTEWLGRRGITQPRDTADQLKQLAQHVLEPAPEQTVLLQQTLAQLVGLYRNLEQCIARIDREVAYWLARTPGAWLTSIPGFGITLAAGWTAELGPPSQWYSVRQLCSYSGVVPKSKQTGGPDKEPIIGAVQARCNKRLKNVVLQAVEKVIQHGPEELRRTAQELEARGAHTEFALAKRLVRLAKYLAVTGTVYRPKTLMDPQTPKARLADHYQTVWEKLLPKWRDKADRRDVFAPQHPLGQWRQMVQELYALELRLPHPRAAQNSRALAP

SEQ ID NO: 253689 - protein, 318 aa, unidentified
MPQPGRIVGIDVSKRQAEACLRSPPARLAQPSTPEGRQRMIAWLRERDVALAVMEASGGYEREWAEALRQAGVAVRIVDPKRVRYFARSAGRLAKNDPIDAAMIAWFAETFTAEAAPAEDPERAAVDRLMTARAMLVRLESQIKQLGEHRQPPLVERAQRAIGKAILAQRTKLEAAIAAKIERHAGFAARAGILRSVPGLGPRFTAGAIAWLPELGGIANRAAAALVGVAPYDDDSGARRGERHIKGGRREIRELLYMATFAATRCNPVIKAHYQQLRARGKKFKLALVACMRKLIVILNTMLARGQRWTPPAATAVA

SEQ ID NO: 253690 - protein, 362 aa, unidentified
MFRPHTLYIRIRIVRKVSEPAFAMKDQDVTDVIRRKQQTAMRYIGIDVSKATFVVAYSSDKGGEIRTFNNTTTGIKQFIGALPKDSSIHCVMEATGNYSAMLLYLLNVAGIAVSMENPLKIKNFARAMLSTVKTDKIDARLIALYGEKMNPQPFKIQGEAILRLRQKRTVIRQLTKQITAMSNLRGSLACLPVPDKGATHTVDETIEFLEKRRDRLQSELTDLVEVEFSRQLALLTTIKGIGITLATALIITTGGFTYFQNAKQVSRYLGICPTYEQSGTSVNIRGHINRNGDAYTRGLLYVAAWTASRFNTKCGETYTRLRQNGKPGKLAMIAVANKLVRQAFAVVSHDKEYVDGFVSNRH

SEQ ID NO: 253691 - protein, 336 aa, unidentified
MTKYIGLDAHSSTCTFNVTDERGMEVDNTTIESNGRLLVKYVRGIEGVKKLTFEECELSAWLYEILRPEVDELIVCNPVANKDYKKIKTDKMDARRLSKLLRGGFLISVYHDGSKREQFRSLMSGYQDFIEEGVRLKNRYKSLFRKSGKKVKGEALYSEESFLKGLERTDFKFIGTQIYQLLEKMEGSRQEYVKEILRCSKGFKEIKYLKSIPGIGSIQAAKIVSQVIDPERFSSKYKYYSYCGLVRHKRISDGRGYGSEKIWGNRILKCVYKMAGHSVLKGNSGLRKYYDSLRLKGISHDNAYNAVCRKIAALSLSVWRKSKKYDDRLITGNLIK

SEQ ID NO: 253692 - protein, 343 aa, unidentified
MKLSHVGVDLAKNVFQLHGVDRSGKAVWRRRLRRHQWLSALIKATDTSCVIGMEACTSAHHWARQLQAHGCEVKLIPPQFVKPYVKSNKNDANDAEAICEAMSRPCMRFVAVKSVEQQDIQATHRIRAELKDQRNAKTNRVRGLVAEYGLVAPPTLLALRRAIPDWLEDAENGLTDYFRSLLHGLWGDLLVLDDRIKELDKQIEQLANSNQITRRLQQLRGVGPMVATALVATVGTGEQYRKGRQMAAALGLTPRPNSSGDKHRLFGISKRGDACLQTLLIHGARAVVSQARQRDDQLSRWVTDIAKRSHPNVAAVALANKTARMAWAMLRNKTDYDPGLATR

SEQ ID NO: 253693 - protein, 342 aa, unidentified
MDKRIACGMEVSAQELVIAVLGKKGQAVVLRFANTAVGHGQLLRALTRGGKRVSVCMEATGVYGLDVALRLSAQAGVELMVANPRAVRSFARAMMQRSKNDQLDAVVLREFAARMPFKAWTRPTENALALWGIARRLEALRKEHTAEKNRQHAAGVSQAIPECVRRSIARTLRYQRREIAQLRGEALRCIAAEARLQRCYQLLRSVKGIGENSAMQILAELALLPEDRDVRQWVAFAGLDPREYSSGTSVRKYTRISKVGNRHLRQALFMPALVASRHEPHLRAFYEHLLASGKKKRQALVAVARKLLHAIYGMFHADQPYDGTRVYQLPAPLPTPQAAPSS

SEQ ID NO: 253694 - protein, 344 aa, unidentified
MANLNQFCDFTKLIGIDIAKSVFQIYSCDTQTGEITNVQIKRDKVLESLANCGKCLIGMEACGSSQYWARKLQTLGHTVRLMDPKLVKPFVRHNKSDKADAEGVYHALVSGVRSVAVKTETERDIQTLLTMRALLVKQRTARINHVRGLLAEYGHVMPKSVDQFDKKVDECINSLEGDAVQLVIDMLRDTIKSIRDEHDRIKTLQREISRLANQTRNAKHFLTVPGVGDTIMAYMCVLLADPTQFSSGRQFAAYLGLVPMHTGSGGKTVTTKIPGRCDKALRALLVQGAHAVARSKYRTDWVKNILAKKPKKVAMVAIANRMARQCWAVASKGQDWRRMPVTAA

SEQ ID NO: 253695 - protein, 340 aa, unidentified
MKRYLGVDLHRNCFTVCTLKEDGQSELRKWSIHSLCDFAQEVQATDAVAVEATGNARYFCQALKERGCRLVVVNPHQFQVVSRSVKKTDAHDAKTLAEFLAKDMLPEVRMKEALPAEIASVLQTRDKLVKLRTVLKNKINNLLAGQGILIRRESLSSDKGLEQVLQAPVSDLERVELEVLVGQIRHLNDSIRRLEAAIKEQGPKLPGYESLKSIKGIGDIGASTMLSTIGDINDFASEGKLAAYFGIVPRVQNSNATERSGRITKRGSKLGRTALVQCALIAMRYSPYLAHYYARIKAARGTGKAIIALARKFLGIIYKTLKNGWVFEDFPAFVLAPATG

SEQ ID NO: 253696 - protein, 433 aa, unidentified
MTDAVLSFDVSLDRLDVALRTADPDWHWPHRAYANNWAGYRQLKAELLAELGPGSGGQLTAIAESTGPYWWPAFYHLAHDADLAAYQPQLVVLNPHHLKRFRQALPEQDKTDLLDPQLLDRYYQAVGVKHFYQFNDRYLPLRFLSRAYSRIIHTLAAEKAYLRSVLFISASDYQRLEPFSDLCGATSLQVLDEFTDIQALAEMPLADLTDHLRRWSGNSLPDPDHNAHQLHQVASQSYPLPPALAAALHPIIQGTIAHLRFLADTQKTMRTLIEQHLAQLPEANLALAQPGLGPILVAGCLSEIQDTTRFITGSKFDRQRKCTRPRTYRDGQAAVAKLAGLWWPQNDSGRFQAEERHLARERNPYLRYWLVQAAHTLQRYDPDYRAYYWRKFHQVHTHQHKRALVLTARKAVRLIFALLHKGQQTCREEGLIN

SEQ ID NO: 253697 - protein, 395 aa, unidentified
MFIVGIDIAKRSHEAIIIAEDGQVVRKAFSFRNNCTGYNLLLEQVRRLTLVKSQIVFAMESTAHYWLALYARLLKDGYAVMVLNPIQSHSLRELYIRKAKTDARDSLIIADLVRFGRCKASNVPQDKILALRELCRSRAYLVDMAADLKRKLIALLDRIFPEYESLFDSVFSKASIAVLRKYSTPQKVKNAHLGKLTDLLMESSNGHFGEWKAHQLKEAACSSFGIDDSDGVYSMLLGMFLEQILSLTAQADSLEKQISVFFQEFNNPLTSIPGVGTVLAATILSEIGDITRFSSADKLLAYAGLDPSVKQSGEFKSNQNRMSKRGSPYLRRAIWLASTVAVHRDPMFQTYYEKKISEGLHYMNVIGHVSRKMTAVIFAVLRDGQPYQPILQSAG

SEQ ID NO: 253698 - protein, 369 aa, unidentified
MYGTTVSLNPTYFIGMDLHSNNVVICVLQNAANQTGQLVKKVIKRKKIALSPELEELQLFLKPYCCAQHQATVESTYNWYNIADLFEDNGWHLKLADPTTVKNNKTKFSDDITDAEFLADQMRLGALKAADIIPKQDRAFRDLVRLRVDLVQDRARYRTILKNFFNNQRYMKISTERLDRMAEQYCNGDLTELVSIFDNENTRLKAGHYLTAMHHLSLQILQLEKQIEAQEAKNYLTCHRYLPRLYSMKGCGFILGSIIATEIVNINRFRTEKDFVSYCRLSPAVRLSNDKKKGDGNRKNGNAYLSWAMTELANLMVFHNPVIKKKYDRQFKKSQVRAKAIRSIAAKLARCIWHMLKKDIDFRIDLAFK

SEQ ID NO: 253699 - protein, 338 aa, unidentified
MELYAGIDLHCNNSVLMILDAQDRTVFAKRLPNDLAAIIAALRSCAGTLQGVAVESTYNWYWLVDGLQDSGFIVHLVNTAAVKQYDGLKHSGDFSDARHLAHLLRLGILPTGYIYPREQRAVRDLLRKRSQLVRQRSAQILSVGNLIARNLGMHASGNDIKRWQSQTIEAMALLDEQKLALTANLAVMRCLDAQVTELERTILAKAKLREDYNALKTVSGIGEVLALTIALETGDVSRFDSPGNFASYARTVDSRRESNGKKKGEGNAKCGNKHLAWAFIEAAHFAVRYDAAIKRWYQKKCATSLSVVAIKAVAHKLARACYHVMKDGKPFDVARAFG

SEQ ID NO: 253700 - protein, 412 aa, unidentified
MLKIVHPICCGIDVHKTFVVACIATTNDKSITTYQIKRFSTYTKNLQQLAQWLFQNNCKDVCMESTGKYWIPVFNILESTCNVVLAHPKYLKAIRGKKTDKKDSKWIADVFKHDLVSGSFIPPADIRQLRDLMRYRFKLTNIMTGEKNRTQNSLTVSNIQLANSFSDIFGKSATKILNHILENPNDKDFDIGTMIHKGCKTSIEEIQMSVEGKITPEQSAKIKVILQHLDVLELCRHNLETSIFALSNPYQEKLNLISSVPGIKDFSAIAVLSEIGSDMSVFQTAKHLCSWAGVAPQCNESGGKKKSSRVSRAGAYIKPLLVQCANAAVKSNKYPEIKNRYLSIKKRRGHKKAIVAIARMLLTAIWHILSKNEPYNAELYRKIDVSPLDYERQAILLLQKRGFTVTAPPVCA

SEQ ID NO: 253701 - protein, 420 aa, unidentified
MSIDPIPAPRVYGGVDWATDDHAVAVVDADGEVLDRFAVSHDAAGLRSMVKRLLKRGVTEVGIERPDGPVVDALDQAELTVFVIPPGQLKNLRSRYGSAGNKDDRFDAYVLADVVRTDRRRLRPLVRDSAATTALRRSVRARRNLVAHRIAVANQLRAHLQIVFPAAAGLFSEIDSDVSLRFLERFTTQAQAGWLSVKRLAAWLRSARYSGRTPPETLYARLTGAPHGDTGDHDPVDAAVTLAYVTTLRTVNAQIEPLAPRIAEQLELHPDGAVFTSLPRAGKVRAARLLAEIGDARGRFPTADSLACLAGVAPSTRQSGKVKAVTFRWGADKHLRDALCDFAGDSRRANPWAADLYQRARARGHDHPHAVRVLARAWVNVIWRCWQDGVPYDPTAHGALQTVLKQDQKTVTDQARQAAA

SEQ ID NO: 253702 - protein, 416 aa, unidentified
MNAAGIDVSSRKSTVAVLRPFGEVVRLPFDVAHNTEGLASLAEQLKSLDGETRVVLEHTGRYYEPVAKALHEAGLYVSAVNPLLIKEYGANSLRRVKTDKADAVKIARYALDNWTDLRDYTPMDTIRYDLKTLNRQFQLASKQRTACSNNLIALLEQSFPGIRKCFDSPVRSDGTQKWVDFAHTFWHVDCVRKQSFNAFSERYRKWCKRHGYFFKQSNAEEVYALAKNAVVLVPKSEVTKVLIQEAANQLTSISRSVETYRTEMERLASMLPEYPVVMEMYGVGKSFGPQLMAEIGDVRRFERKQALVAFAGIDPMPNQSGDKNVRSNKASKRGSPYLRKTLFNVMGIYLKCAPQDEPVFQFLDRKRSEGKPFYVYMTAASNKFLRRYYAKVRDYLATLENLPPVDMDSTGLQGSN

SEQ ID NO: 253703 - protein, 382 aa, unidentified
MTGTEPHAWGTGLMDDIIFVGLDVHKATVCIAVAEGTRGGEVRQLGAFENRPEILSKVVSRLSKGGRRLSFCYEAGPCGYGLHRLLTGYGHECVVVAPSLIPMKAGDRVKTDRRDALMLAKLHRAGELTAIWIPDAAHEAMRDLVRARATAVRVLVKARQHLQGFLLRHERIYRGARAWTLAYRRWLSTVRFEHPAQQIVLQDYIHAVQEAETRRDRLTQQIEELLPNWSMAPVVAALQSMRGVALVVAVTVVAEVGDFRRFANPRQLMAYLGLVPSEHSSGSSVRRGGITKAGNALARRVLIEGAWTYRMSARVSRKLHDRLEGLPAAVRDIAWKAQLRLCARYRRLAAMGKSKVVVTTAIAREMVGFIWAIARLAQPALV

SEQ ID NO: 253704 - protein, 369 aa, unidentified
MKQVTTIGLDLAKKVFQVHGVDAAGVVVLRRSLRRRQVLAFFAKLPSCLVGIEACATAHYWAREITKLEHQVRLIPPAYAKAYVRRNKNDPADAAAICEAVSRPSMRFVTIKTEAQQAAAGVHKVREMLVKQRTMLINTLRGLMAEFGVVVAERPRHVSELMAILADPTDRRIPTPLHEGLSALVKTLGGLERRIEIVDKQIVGWGRDNATCRHLITIPGYGPVLSSAMAAMVVAPAVFAGARHFSASLGLVPRQDGTGGKIKLGPISKRGNGYLRRLLVNGAMAVLCSKRAKEDPWLAQLLESKPRKVAACALANKMARIGWAVMMRQEDFSRRQHDQPRPTPSQPGTVLPAVKTAARAPAAVAFGQS

SEQ ID NO: 253705 - protein, 325 aa, unidentified
METRSLCCGIDVSFTSLDVCYQNNLGELFHLRVGNNNEGFTKIMEHTGTQYHFVMEATGVYYIRLAFFLHGKGCSLSVVNALSIKRFIQMHGERNKSDKKDAGWICRFAIEQQPPLWQMPEGAYFQGKQLYNTIREYQEQIKRFNNQLHSLGLLPIQSKDAIRSIERMKASLKKEVKSLEGKLQELLQAWQPEQLKNISSVKGIGKRAAAMLIIFTQGFKHTHSHRQLISFAGLSPTEYSSGSSIVGKPKICKRGGKPLRDVLYMCAMNAMKTNQACKALYERLRAKGKTGKQGLIAVCNKLLKQVFAVMKSQTLYQPNYCSPKP

SEQ ID NO: 253706 - protein, 335 aa, unidentified
MKNYLFYVGIDISKSKLDVVLLKKEAPNVTNHFIVENNLKGVKEIFKNLLKQKIDLTTVLFCFENTGVYTFPLSSCLSENNLDFWIVPALEIKRSKGISRGKNDKADAKDIALYSIRNVDKLKLSTLPETVIQQLKLLFTEREKVMKAFKIFERTKENADFMPKQVYQSVKGINNKTVKFLKGTLKSIEKEMKAIISSHSELKKQFELIKSVPGIGDKTAIYMLIVTRGFTAFDNARKLACYAGTAPFEHTSGSSIKGRTKVNHMADKKMKSILQMCALVAVKHDPQLKEYYERKKGEGKNAMLVLNNVKCKIIGRVFSVIKRQTPYINTYKFAS

SEQ ID NO: 253707 - protein, 423 aa, unidentified
MKNSTAKKRKQVPAGYLVVGVDPHKKKHAAVFMTQDFMTHSKLKFDNSREGFETVLERTRTEMLKTECRGVIFAIETGAHHWRNLAYFLDEKGIPLRLINQFTLKRRREGKDLNHRKNDYRDSEVAAQLLCTGEFNAARLSQGVYAELRAAYGSYRRLVKEKTRTVNLVKSLLDGLFPEFTQVFKNPCGQTAASVLCTCAVPQAIAGMTESEFAGAIKAACQGRVMKGKLRILHHVAMTSIGIGAGAQSVSSEIAFLIEKLRLIKQQLRQINEALTRLVHETMEGKYLLSIIGLSYVSVAGIIAELGSFSSYQNAKQLIKMAGSNPTESESGGKRHSHTPISKQGRPVLRHCAWTAVIPMLRFNPDFRDWAKKLRERPAGANPLSGREVMVAAANKLLRLAFALVKNQALYQIPESQPVEIAI

SEQ ID NO: 253708 - protein, 425 aa, unidentified
MGKTIPICCGVDVHKKFLVATILTGDYLIPQCKQKHFGTSYRNLLAFRQWLLENDCKDVCMESTGKYWVPVWNVLEGFVRVVIANPKWVSAVKGNKDDKKDSKWIGNLFRMGLVPASYIPGKDIRILREFTRYRSKLVSMRSSEKCRFQNAFTVCNLTLDAVVSDMFGKSATDIENYLLETDSVDPAHCVSLLQGSLKKKADAVVEAVEGFNMTLEQKERVRIIQGHFADIDKRIGQIDDIIRHLVAEYECQISLLCTVPGIDRRLAITILSEIGTDMSEFGSSRKLCAWAGLAPGSNQSAGKKKSVKITRAGVYLKPALVEAAHAAVKSIEKQPYFRIKYERIMKRRGKKRAIIAIARMILTSIYAMLSSGEVFNPSDLLKYDMPDELKKNMTLASAKDALKLLVSLGVVAEGSISLDSLALAG

SEQ ID NO: 253709 - protein, 448 aa, unidentified
MAAHSVSQTPAMVVPSQLERHWQQAFRQRWQAVAPAQWRCIGIDVGKYEHVAVAYDGLGQLLAPPLRFGIRASDYQTLFAWVATVTPDPAVPPLFGLEPTGHYYEQLVYELAQQYGPKQVYIVQTTDVARRRADWNQGTFKNDEVDAAIISELLRQGYGRPYHPDEGAYLSLYQLERYRWAREQASTRLKNQIVGHVDRLYPGLVISDKLLAERYRPLLRNLWADETPRRLLTLYPDPRALRSADVDTLCQRFRTAGYWMTRPYAAKILAAVQALSLPDAELGARRSTFLQRDLASLAYVEQQLAEVAGEMVDQLDLTWGYWLRPSGVEPLRLACLVATVGDMRQYHSARQLFGRSGLHSGCRDSGTRQQHGQGERMVKPGDRHLRRQLLRFTLSMLAHYPTLQTYRNRLLQRGKGKITANIAVARKLCGVLYTLASQERPFDPTRLT

SEQ ID NO: 253710 - protein, 381 aa, unidentified
MRQVCGLDVHKDSVFVCILNENGVVFQEKFGVLTPDVEQLAAKLQELDVSEVCMESTSVYWMPVWRVLEPYVAEMKLVNPYFIKQLPGKKSDVKDAEWIATCLLKDLIRGSYVPGDIIQQLRQYDRRISDLNAECVRKLGKLDAAIQRCNIRISNYLSTTDGKSYKDVVRLISEGVKEPKELIKVVHSRIVNKAGKDVILASLSGVLSDTDIDIIRQLREEIELAERHKGECQSKMDAICQQHFPEQLKNLQTIPGIKGRSATAIIAEVGSDVSSFQDAAHLVSWCGLKPRNEESAGKIKARSITHGNKYLRKTMIECAWAASKTQGCFLNKFSYYQTVVRRKNRMKVQVATARKMLVAIWYVLHGNVAYRDYTPDIAPTA

SEQ ID NO: 253711 - protein, 409 aa, unidentified
MDVLHAHCCGIDVHAKFVVACCRQIGSTGSVTKTSRTFGTMTADLQALAAWLTSEAVTHVAIESTGVLWQPVWNILEPHVTIVLVNPRDVRQVPGRKTDVTDAEWLAQLLQYGLLRSSFVPPVAIRALRDLTRGRAKLVDQTTAVTNRIHAVLHDANIKLGSVATDILGVSGRAMLQAIVEGETDPSRLADLARHRLRSKLPALRRALEGRVTDHHRFLLRRLLGQLAFLEAEIAIYDARIAEASAPFVAILARLDTIPGVDRRTAENLFAELGAEMSVFPTAAHLASWAAICPGNHETGGKPLKGTTRHGNRWARRALTEAAWGAKHTRGTYAAAQFRRLAARRGAKRAIVAVAHSLLVAAYYIIRDEVVYTDLGAAHFDRLAPTQLTRYFVKRLESLGHKVTLETAA

SEQ ID NO: 253712 - protein, 341 aa, unidentified
MNITTIGIDLAKSVFQVHGTDERGKAVLSRVLRRAQLMKFFTQMPPCLIGMEACGGAHFWARKLSELGHTVKLMAPQFVKPYVKTNKNDARDAEAICEAVGRANMRFVAIKTPEQQALLALHRARQGFVKARTAQGNQIRGLLAELGCTIPKGRGQVRSQVVDILEDAQNGLPGMSRELFAQLLEHLRHLDAQVKALEAQIKAWHQEDAASQRLEQIPGIGPLTASALVASIGNARHFKNGRQLSAWLGLVPRQHSSGGKATLLGISKRGDVYLRTLLIHGARSSLRHAKPGDWGAALTQRRNSNIAAVALANKNARIVWALLAHGRSFQANYHGAARQAA

SEQ ID NO: 253713 - protein, 367 aa, unidentified
MKKVSTAGAKQSRNLSQQKLTIGLDVGERNSWYCVINEAGQIQIEQRVRTTERGLREVFEQVARSRIALETGTHSPWISRLLSQLGHEVIVAHARNVRLIGESRKKDDRLDAETLARLARIDPQLLCPVKHRSAQAQADLMMIRARAGLVRARTALTNTARGLAKSYGERLRGCNVRNLNPEKAEGLSPELQRALEPLLSAIEAVSERICEYNERIEALAQQSYPQVALLKQIKGVGTLIPLTFLLTLEDPHRFRKSRDVGCYLGLQPGRRNSGDREAQMHISKEGDPYLRTLLVQGAQHILGPFGVDCDLRRWGLKLAERGGRNGKKRAIIATARKLAVLLHHLWVSGEVYEPLHNSSARTVAAAA

SEQ ID NO: 253714 - protein, 360 aa, unidentified
MRIIGCDLHARQQTLAMLDTQTGEVVNRTLTHEGDEVREFYSALPRPVLVGIEAIGPMQWFLDLLAQLGIECQVGDAAKIRAAEPRKQKHDRRDAALILKLLVEKRFPAIWMPSKELLDLRALLLHRHQWVRLRTQVQNALQAIALANGLRRGPGLWSYDGQAKIAFLPLPPHASLRRSALQAQYRHMDEEIEKLTVQVAEQAEQRSGAQLLMTHPGVGPVTALATDVFLGDPQRFADGKALASYTGLIPQERSSGRRRRLGRISKQGNPLLRFLWNEAGAHAARRDPDLRRFYRRKLVQKGMGKARVAVARKLGIRLWIMLRDQIDYQEFCRRGQKQSGAVCAGMPETRFGANRHRPVE

SEQ ID NO: 253715 - protein, 343 aa, unidentified
MKNTTIAIDLAKSVFEIGISDRPGHVARSYRLSRVELSSFLAAQPPATVVMEACSSSHYWGRKFQSFGHEVKLLPPLYVRPYVQRSKTDKTDVKGMLEAWRNSDIRPVPIKTESQQQLTSLHLVRSTWMAARTMRINSARGLLREFGFVFPAGASSLPGHVRALIENADEAVPIQLRDLLHELVLEIGELETRIKVVEKHLEALARQTPVVERLQTIPGVGLLTATALVGFVGDVARFPSGRHFACYLGLTPREHSSGGRRSLGRISKRGDAYLRMLLIHGGRAVLWGARSKTDPDRLRSWALDLQHRRGHNKAAIGVANKMARIAWAVMAREENYRDAPNAA

SEQ ID NO: 253716 - protein, 331 aa, unidentified
MVDDKRYVGIDVAKARLDVALGLNGERFAVANDERGISALLKRLEPTDLVIIEATGGLEVPVASTLATAGIAVAVVNPRQVRDFARATGQLAKTDALDAQVLVRFGAAVKPQVRALPDAQAQALEALVNRRRQLVEMLTAEKNRRANSPKVIHKSIDEHIHWLEKRLAGFDDELTALVRATPIWRERDELLRSVPGVGPVLATTLLAYLPELGALNRKQIAALAGLAPFNRDSGSLRGSRCIWGGRAQVRRVLYMAVVSAVRSNPVIKNFYAQLRARGKYPKSALTACMRKLLVILNAMLHNNTYWHATALTSSTSALYPLGGAVSEHGCC

SEQ ID NO: 253717 - protein, 343 aa, unidentified
MDKNMMIGVDLAKNIFQLHIATMTGALLSKKKLSRDRFREFMKSHEPALVVLEACGSAHYWAETLGEMGHDVKLIAPQYVKPFVKRQKNDSADAEAIVVAAQRPEMRFVATKTKEQRAKAVVFRSRERLVHHRTEQVNALRAVLYEHGYVIPQGIASISRVEDILGGQNCELPDLVCEECRELLEQIASNTKLINAKTDLIKQLAKETDMARRLQTIPGVGPLTAMAIDAFAPSMEHFKNGRGLSAWLGLVPRQYSSGGKERLGRVSKAGHADIRRLLIIGAMSRLNWLGRKSIPEGSWLGKMLARKPKMLVAIALANKMARTIWAMLTKGTDYRDPTISATA

SEQ ID NO: 253718 - protein, 314 aa, unidentified
MSVWVGIDVAKDSLEVHIRPSGRCLSISNCADGIGELVREMVALKPQLIVLEATGKLEKLAMCALAGAGLSVARINPRQARDFARAIGRTAKTDKIDAEVLAHYAEAVNPEPRRLSESESSELSDLLNRRRQVVDMIQSEKNRLKQMGQSVRTHIEAHIAWLEHEKNSLERELSTCIESSCIWKELDSLYQSCKGIGPVVSATLIVSLPELGSLNGKQIAALVGLAPMNRDSGMMRGKRRIIGGRRNVRSALYMATVSAIRFNPVIHAFYERLVAAGKLKKVAITAAARKLIVILNTIARTKQPWNPATEFAKV

SEQ ID NO: 253719 - protein, 338 aa, unidentified
MNKYIGIDLHSNNSVVVVTDEADRIIFQKRLANNLNEILPALAPHREETVGVVVESTYNWYWLVDGLMDAGYQVHLANPSAIKKYEGLKYSGDFADAAYLAHLLRLGLLPEGYIFPRELRATRDLARKRMQLVRCRTTQILSIENILTRETGARMSSRQIKAMTTEGIEALGLRDDVALAMESNRVICQALQQQIDILEKRLESQVKLQPGYQLLKTIPGIGQILATTIMLEAGPVSRFAEVGNFSSYCRCVDSLRESNGKKKGSGNTKNGNKYLAWAFMEAANFALMFCPEAKRFYERKKSRTNRIVALKSVAHKLARACYYILREQQPFEVKRCFV

SEQ ID NO: 253720 - protein, 410 aa, unidentified
MLKIVYPNCCGIDVHKTFVVAVIAITNNQGITEYHRKRFSTFTNGLTQLRDWLEYYSCFDVCMESTGKYWIPVFNILEEQTNVCLAHPKYVKAIRGKKTDKKDAQWIADLFKHDLVASSFIPPLKIRQLRDLFRYRMKLTQLQVGEKNRYQNCLTWSNLQIASVVSDVFGKSAQAIIIKSILDNPQDKPNIEQLVHKRMKNKVQDLEIAMEGALTPEQAEKIRVIKAHYDALAICKEDLEQMIRELGQDYQHQVKLIQTVPGFKEDLSALRIISEIGCDMTVFDSAAKLCSWAGLVPANNESAGKKFSTRISKGGKYLKPFLVQVANAVVKSDKHPELRNKYLKLKKRRGHRKAISAICRRLLVSVYQVLRKQEDYNPVLQGLTEIRNPDKTMSVQDAVRFAQQHGFNVA

SEQ ID NO: 253721 - protein, 393 aa, unidentified
MVYVGIDVAKDKHDCFIANSDGEILYDVFTIQNDMDGFEDLFFKIKTASRDLSKVKVGLEATGHYSCNILGFLHNKGLTTIVINPLYTSLSRKSVSLRKTKTDKVDARTIASMIMSDVSLKPYSDTVYHNEDLKSLSRYRFDKVSDRSKLKQSVSRLVNILFPELKKLVSSLHTKAVYELLSEFPGAHQVASANLKHLTALLSTASKGHFGREKANAIREAAKRSISSYLPAKSLELRHTIKLIRELDAEIAEIETEIKKIMDSIDSPTLSVPGISYALGSVIISEVGDFSRFDNPDKLLAFAGCSPSTYQSGQIYSTHAKMEKRGSKYLRWALLNAAKYVCKWEPTFAVYLRKKLAEGKHYNVAVSHAAKKLVRLLYHLETTGEKYIPQTLS

SEQ ID NO: 253722 - protein, 319 aa, unidentified
MAMQVSQVILGCDVSQEWLDIGVYGEDEPTHIDNEREAIDAYLEHFPAAVLGVEATNTFHELLIERALKLGLEVYVIDGYQLSHYREALRKRAKSDPDDAVLIAEFLARHRDSFRPYQPKSPKLRQLWTYLKRRAALVKFTDQLRQSMKELKDHDAQIASIGREVNKLIKRLERDMRILAKALGWRDDLARLRSIPGVGELTALALLVAYRSGHFTHRDPYVAFMGLDVRVRDSGKHKGKRKLTKMGDPEYRRLLHCASMAAVRSVFYKAHYEQLQARGLAKTEGLVIVARKLARLAFALLKNQTSFDPNRFKGACYAT

SEQ ID NO: 253723 - protein, 388 aa, unidentified
MNVGADKSEPLTAIHTDLGAIFVSLELSRSSWLITSLSPGGGEKMSKHSVPGGDFAGLMERFAQLQEKARLRTGQSFRIIVIQEAGLDGFWIHRALQNEGIESHVVDAASIATSRRRRRAKTDKIDGETLVRALLAYKRGEPRVCAMVKAPTPGEEDRRHLCRERKALTAERVRHVNRIKGLLFSQGISGYQPLRRDRRQRLEELQTGDGRAFPQHLKALVNRELDRLELLLKQIKTVEAARDALLAVGQTAKPAPAAMLLEIRGIGPEFAAILWSEGLFRHFENRRQIAAYAGLAPTPWQSGAVDREQGVSKAGNPRLRTTLIQLAWLWLRNQPRSALSVWFHERVSRNGGRLRKTTIVALARKLLVALWKYVTAGVVIEGVTMKVA

SEQ ID NO: 253724 - protein, 366 aa, unidentified
MEEKKTKALTRYVGIDLGKRTYTVAFVGKGGKVTMSNGKTYPDGRQALYKKLRPEDKVAIEAGTMGFIMAKEIQAAVGCRVYVLNPYKLAVIYSSMKKTDKEDSLKLAHILEDCREERLPEVPVPSEKEMNRRKLLASYRRAQQERTRDINLLHALFISQGITTKVRSDLSTVESRQEAVKELRGIELREAEYLLKCLELCEARIAELDKEMKGEAAGDEVIERLQSVPGVGPMVAFAFAAHIDAARFENAGQVSNCIGLVPRVYMSGDTVIYGSITKRGNSFLRALLVQGAWALTRSKDGGKLKERYEYMTEEKSKSKKKTIVAIARRLAEEMYTLMKYGTRHEPRPFTPEKNKAKEIANVALSA

SEQ ID NO: 253725 - protein, 341 aa, unidentified
MKKAEFVVGVDVGDESLSVAVTKGADGTGLVEGSVSNNLEGFEDLKGWFAKQKVTADNAVVCLEATGVYGEGLCYYLCSRGFRVAVEPPVKVRRAFAQSAHKNDTVDARQIAEYGHRFYDELSWWTPPATILEQVRVLLSAREQFTGQKIANVNALKALQRKTITTRIAIQAYEQTIARLTENIKDIDEEIKRLVKKDDSFHRLITTLTSTPGIGMLLATNLVVMTNAFTRTVNHKELASYTGISPIEHASGSSVYRRPRSRRFGPSRMRKLLYLAAMSVATHNPEFRRYYLRKVAEGKPKRLVLNNVANKLLKVVCALVRSESAYIPNYKSVQPMLLKTA

SEQ ID NO: 253726 - protein, 334 aa, unidentified
MEQITTVGIDLAKNVFSLHGVDAAGKVVLRRMVRRDRLVETVASLSPCLIGMEACSGAHEWGRRFQQHGHTVKLMAPKFVAPYRKSDKNDGNDAEAVCEAVSRPSMRFVPVKSAEQQALLTLHRVRQGFVVERTALINRLRGLMSEFGVVMPLRSVTVRRQAAAAAEGLPELARGVIADLLEQLRLLDARIEGYDEQIHAQAKLSEPARRLMQIRGIGATTALAIVATVGNAREFKNGRQFAAWIGLVPGQYSTGGRARLGHISKRGDAYLRNLLVQGARSVLQTAPMHQDRLSRWALELQARRGYYRTMVAIANKNARIAWALLAKEMPLRKD

SEQ ID NO: 253727 - protein, 417 aa, unidentified
MKVVHQICCGVDVHKSFIVATIIKTEGLMPQYTKKRFSTFNNDILRFKQWLLENNCLDVCMESTGKNWIPVYNLLEDEINVVVASPKWVKAVKGNKDDTKDSKWIGDLFRLGLVPGSFIPPKPIRVLREYTRYRYKLVSCKSSEKNRFQNSMTSCNVALDSVVSDMFGVSASKITDYLIASDDFDPEYVISLLHGRMKPKADAIIESIQGYQLSNAQKYRMSVINSHLDFVEKSIEKLDAMLDTLVDPYESHIALLCTVPGISRQSAITIISEIGVDMSVFSSSKKFCCWAGLTPGNNESAGKKKSVRITRAGVYLKPVLVQVAHAAVKAKDSPYYKNKYERISKRRGKKRAIIAIARMILTAIYNMFSTAEVWNPTDLFKVDLPCALQERQKKKAIRNAFVLLHREGLLEADTLPA

SEQ ID NO: 253728 - protein, 333 aa, unidentified
MLDEAGEVLLEQKVSTTPTAMKEIFGAMPGSRIALETGTHSPWVSRLLKELGHEPIVAHARSVRLIGESRRKDDRLDARTLARLVRIDPELLCPVKHRSAEAQADLTVIRARAALVRTRTMLVNAARGLTKSYGERLRGCNARGMNPKAAQDLSPELKGALEPLMREIESVSERICEYDQLLESMARNRYPEAERLKQIKGVGTLIALTYMLTLEDPHRFRKSRDAACYVGLQPGRRNSGQSEPQMHISKEGDPYLRSLLVQAAHHVLGPWGVDSDLRRWGMRLAEHGGKRGKKRAVIAVARKLAVLLHRLWVSGDVYVPLWPSGRATLPAVA

SEQ ID NO: 253729 - protein, 417 aa, unidentified
MVEVIVSRCAGLDVHKNTVMACVRVPGPNGGRTSTVRQFRTFTAGLRQLRDWLVAEQVGQVVMEATGVYWKPVWHVLDATPGLALMLVNAHAVKNMPGRKTDVADAVWLAELGECGLLRPSFVPPPVIAQLRDLTRYRKKLIEERARETQRIQKLLEDAGIKLDSVVSDILGVSARQMLEALIAGVRDVTALAELARTRMRPKIPQLRQALEGRFGAHHALMLRMHLEHVDQLSVSIDRLDSEVDRVIRPFSSALQRLITIPGVGRRTAEVIIAETGADMRRFRTAGHLASWAGMCPGNHESGGKRRSGRARKGNAALRAALCEAAWAASHARSGYLPAQYRHLLRTFGKKGQTRAVFAVGHSILVIAWHLMAHDRDYADLGGDHFTRATDAEARERYLVRQLEALGHKVTLEPAAA

SEQ ID NO: 253730 - protein, 335 aa, unidentified
MNYYAGIDVSLEASSVCVIDGSGKIVREGKVASEPEALIAWFGSLGLSLTRIGLEAGPLSQWLYAGLRDAGLAVELLETRHVRNAFKIMPVKTDRKDARGIAELMRLGWFRPVHCKSIEAQETRALLTARKLVQKALHEVEMSLRGILRGFGLKVGKVTPTQFEARIKQLVAGHPSLEVIAASMLAVRATLRREFNGFERRLRTLARSDTRARLLMSTPGVGTIVALTYAAAIDDPSRFKSSKTVGAHFGLTPSRNRPQRPHLQDRRRLGACRALRKRPHHPHQADQGMHESEKLGDADRQAGRPEQAKVALARKLAVIMHRMLADGTTFTTQPA

SEQ ID NO: 253731 - protein, 312 aa, unidentified
MKEKYYAGIDISKDYLDVAVLPSKEARRYPNDHEGMNKLVPWLKKLPVEIVVMEPTGGYEALAAAALSSKKVPIAIVNARQIRQYAKATGKLAKTDSIDALVMAEFAQAVKPEARQLPDQETKEIRAMVSRRRQLIEMITAEKNRLEMTSESIAVGINEHINWLKKEVEDIDKDLRNRIEESPVWYAKDNLLQSIPGVGKVLSSTILGELPELGRLNRKQIAALVGVAPYNRDSGQMRGKRTIWGGRTLIRKVLYMATLASITHNPVIKTLYNRLVEKGKVKKVAIVACMRKLLVIMNAVMKTEKPWQYTLN

SEQ ID NO: 253732 - protein, 283 aa, unidentified
MDIVGIDISKAKFDAALLLGERVRHAVFSNTEAGFGQLLAWLAKHRPDPSVPLHACMEATGNWGLELADFLHAQGIRVSIVNPARIKAYGESELARNKTDKLDAGLIARFCRAHVPPAWVPAAAHLRELRELVRRCDALKAARVQELNRQKSGFASPAVARSIATHIDWLDGQIEAVMDEARHLIAADPTLSKNLALVRSITGFGEISATILLAELPNIADFTPKALAAFVGLSPSEHSSGSSVRRPGKVSRIGTERLRSTLYMCALSAKRSNKPLAAYSGPS

SEQ ID NO: 253733 - protein, 358 aa, unidentified
MLADLVGFVVGVDTHKRRHTAALVAANGGLVDSLEVPATAAGYGQLLKWVEKQAEAPRAWAIEGTASYGAGLSSYLQERSEWVIEVDCPTRPARRKGGAKSDPIDAVRATREALSKDVFASPRQRGLREALRALQTTREGAVKTRTKALNQLHALVLTAPEALRATLRDCSATDLVRHCARLRRTSRRDVELATYVDLLRRIARRVLALEAEVDVYEQQIDQLTQTMAPELRDEQGVGPISAAQILISWSHPGRVRSEAAFASLAGAAPIEASSGEHTRHRLNRGGDRQLNRALHIVANNRMRHHQETREYVERRRLENKTEREIRRCLKRYLARRFFKLLERAISEQMFADAWEFAA

SEQ ID NO: 253734 - protein, 371 aa, unidentified
MEQYSTDPIWVGLDVHQSSITAAILEGDAHEPEVIRMRSDLNAVRRLFRRLSKTGVPRSCYEASGAGYVLQRALDRDGFHCEVIAPSLIPRKPGDRRKTDRLDAVMLAKLYRSGHLTPVTVPDEDQEAVRQLVRSRLAVQTHITRLKHRIVRVLATHGYRFTGTRSNWTQKHRTWLKGVQRELEGPLATVVGIHLEHLEYLETQQRSIDASIEQLSQSEPWRAGAEALRCFRGIKTLTAMTILTEVGDVRRFRTASGFMAYTGLIPSERSSGEVERRGPITRVGNTYLRRVLVEAAWHYRHDAGADLILRRRRQGQNPVLVGIAVKAQHRLHKKFWRIAAKKHTNKAVVAVARELAGFIWDALHNVADRQV

SEQ ID NO: 253735 - protein, 332 aa, unidentified
MLEQTSICVVDNAGAIIWRGKCRSTPESIYTVVAKHASGAVRIGLETGQLSTWLFHELKARQLPVICIDARHAKAALSLQINKTDANDAHGIAQIVRVGWYREIAVKGMDSHATRAMLVARAQLVTQKVKLMNCIRGLLKTFGIVLPPAKGRRFDAMVRERIVNNPMLTAIIEPMLVLLLTTREQLAVFDRLVRRRARADHDVRRLMTVPGVGAVIALAYATTIEDPSRFKRSSSVAAYLGLTPRRYQSGEMDRAGHISRCGDAMLRTYLYEAANVMLRRSTRPSQISLWGRALSDRIGGRKALVAVARKLATVLHSMWRNRMEFRFEQAAA

SEQ ID NO: 253736 - protein, 345 aa, unidentified
MEITTIGLDLAKNVFQVHGVDERGKTVLRKQLRREQMVEFFAKLSPCLIGMEACGSAHHWARVLQTQGHAVRVIASQFVKPYVKSNKNDAADAEAICEAVARPNMRFVPVKSVEQQAVLAVHRARQGFVKARTAQANQIRGLLAEFGLVIPRGLWHIHPRVPALLERASDTLPLAFRHLIERLLGQLKELDRQVAELEAQIQAWHRSSELSRRLEKIPGIGPLTASALVASIADARGFDNGRQLSAWLGLVPRQSSSGGKPLLLGMSKRGDVYLRTLLIHGARSAILAAQRKVGAADTWLGNLLRRRHFNVAAVALANKNARTVWALLAHDREFRPDYRPRLAAA

SEQ ID NO: 253737 - protein, 339 aa, unidentified
MGRAIGEEEEGMISLGTDVSKAKLDCLLLDGSTGKQRDKTVPNTAAGVRTLLKWLVDRGVILEELVVVMEPTGVYHELAAQALHDAGVRVHLVNPARARNFALSLGQRGKTDAADCRSLAQMGLQQQLPRWTPPPPSARMLKALMARRAALAEDLQRVRNRLEKAQVSVVPLAVSNSIKKGIAFIEQQLGTLDREIDEHIDGDDDLKRKRELLLSIDGVGPRVADEITSILGCMRFDSAEQLACYLGLTPERWESGTSVRGRARISKAGPARLRALLYMPAVVAKKHNRHVRELYERLLARGKPKMLAITAAMRKLVHLCFGVVAQNRPYDRNFGLTAS

SEQ ID NO: 253738 - protein, 323 aa, unidentified
MNKDTIYFGIDISKDVFDVTDSNDNYHQFENNYKGFKRFKKKLSQKSHCVMEATGYYHYKLTYYLIENNIKVSVENPLSVKRFIQMRLSKIKTDKSDSKLICDYAKQVDLKLWEGHSKQQQECLQIIRTLDVYTKQGTMLKNKIHGEATLGNPSLAVVRSLKRLLKQLEKEIKGLEEKLLKMVKEEYQNLLTRIKTVPGIGIKTGTTLIVLTDGFERFTSAKELCSYAGLTPIIRQSGSSVRGRSRISKVGNKKLRNLLFMCSFNACKCNKACKELYDRIVAKGKSKKLALIAVCNKLLKQVFAIAKSGLVYDQAYQSALVKK

SEQ ID NO: 253739 - protein, 366 aa, unidentified
MDKVKHYVGLDVHKDTIAIAFATAHSRNDPQFVGTTRYSVISLTKALSKLAAPSEISVCHEAGPCGYGLVRALREQGYHCEVVAPSRVARGPADRIKTDRRDALLLARLHRAGELVPVTVPEPQDEAIRDLVRAREDAVNDLRRVRQRLKSFLLRHGHAYTGSRWGPKHELFLSKIKFENSAQHIVFTEYRMAVRFATELVERLTQSLRAHAETWRWLPKVKGLMTLRSIDLISALTIVAELGDLRRFPHPREFMSYLGLVPSEHSSGNTKQRGGLTKTGNTHVRRILVEAAWNYRLPARIGESLQPRLEGQPRPIIDIAWKAQVRLCHRFRRFRARGLHQNKTCAAIARELCGFIWDIGTRLQPA

SEQ ID NO: 253740 - protein, 338 aa, unidentified
MKLYAGIDLHSNNSVIAVIDEQDRVVFQKRLPNELERILLALASFKRWLVGVVVESTYNWYWLVDGLMQAGYVVHLANPAAIVQYQGLKYSGDEHDARWLARLLRLKILREGYIYPREARAVRDLMRRRMQLVQTRSAQLACMHTQFTRSTASSPSSDALKRMLPEELETLLEEPNVASGVRANLEVVGTLNREIARLEREVIEQVRLAGQFAPLLSIPGIGRILALAIMLETGAIERFVKVGNFSSYARCVESKRLSNDKKKGEGNSKCGNKYLAWAFVEAAHFAVRYNPRIKRFYERKAAKTNKIVATKAVAHKLARAAYHVMRERVPFDETRAFA

SEQ ID NO: 253741 - protein, 323 aa, unidentified
MQGKVSFQEDAMPVVYAGVDVSKEWLDVHLHPLGESRRFSNDKTGIRQLKRLLARHQPKSIVMEATGKFHRPAHRSLWLDGFAVAVVDPLRARMFARACGYLAKTDRLDARFLALLAESLRPPADTPPSPHVEALQELVNARSAAKCDITALQNRSKTATTALLRGELNRLVRRLEQHVERLDKEIERRVGEDPQLSRRAEILTSIPGIGRVTALALMAGMGELGTCSGKQAAMLAGIAPIANDSGARTGRRSIRAGRPAPRRALYMAALSACRYNPALARFADTLKAAGKPAKVILVAVMRKLLVLANCLLSHDRLWTPNPP

SEQ ID NO: 253742 - protein, 345 aa, unidentified
MNYCGIDIGGLQSYLYLTDKDGRKKKAGYVDTTASALEENLGPYLRGGLSVAIEAGNQTAWIHDKIKSLGAKVWVVNPKKVKLIAESRQKTDKVDAKVLCELLRLKGLPRPVHMPGQETRSLRGLLAARRQLVTARVKLVNTVRGFLRQEGVRLQSKGLASLKRWHELMGKTYKAAHLPVVLEAFYPSFLQLTRSIQQLEREIRQVERNDARARRLKTIPGVGWVSALTFLSAVDTIQRFPSSRKLVGYSGLAPTVRESSERTQYGPITREGRKEIRGTWVEAAHRVVTNRSSEARPLQKWYWKVAKRRGSKTAIVALTRKLLTVAYQMLKQGKDYDPALIGRAA

SEQ ID NO: 253743 - protein, 341 aa, unidentified
METIFDRCGSIDVHKETLTACIMIGKGKRLKKDIRTYSTMTEDIENLRDWFKSERVKKVAMESTGVYWKPVYNILEEDFEVILANARHIKNVPGRKTDVKDSEWLCMLLRNGLIRGSFIPPRHIRQLRDLARHRRKLHHNISSEKNRLQKYLEDANIKLSSVATDIFGVTGRDILRQIIKGNTKANELSELARGALKNKKDELTKSCTGRVTDHHRTMIEFSLKHIEYMEGLIAEIASEIEKLSQAHNLQGAIDLLDSIPGVDRKASEDIIAEIGTEMDQFPTADHLSSWAGMCPGNNESAGKKKRQDCQRKQMDKGHINAMCIMRVQKQGDLFKGQVLQA

SEQ ID NO: 253744 - protein, 337 aa, unidentified
MRSIGVDLHSNSLTACYLNQDKSEQLRTLSLKELQTFKESLLADDEVAVEATNNVRWFVEQIRPLVSRVVIVNPSQFEVIRKSVKKTDRHDARALAQFLQKDLLPESRLKDKTAAQMESLCQTRQKLVELRTTLINKIHALHRARGIESKKSEFGSEKGLKAVLERQWDVLERVELEIIISQLRSLEENIKRLEKQITEHGQQMKGHRNLTSIKGIGDKSAAILLSIIGNVNDFADEEKLASYFGIVPRVSNSNETVHHGRITKRGSKLGRTTLVQCTLVAIKYSDYLKSYYTRMKVKKGSGKAIIATAHKFLGIIYRTLKNNWVFADFPNYVLAEG

SEQ ID NO: 253745 - protein, 386 aa, unidentified
MQVNDLSRSLVAFDQNSTLVAVVELSLKSWLVAGLVPGLTRQPLKRLPPDGEALAALLDRWRSEAVKSGRRIERVAVAFEAGRDGFWLARVLRARGIEAYVIHPTSIPVPREHRRAKTDRLDTGLLMRAFLGWLRGEAKHCSMAPIPSPAEEDAKRPNREHEKLGAERTRILNKIKAALVRLGVRGFKPNLRNAAERLEALRTPEGLPVPPNTLAELRRDLGRLKLVREQIKEIERARERRLKQAPQEGAHPMVLMLARLKSLGVETADRLVHEAFYRSLRDRRAVARYGGMTGAPDESGAKRREKGLARAGNGRVRKTMLQLAYRWIMFQKESALTQWYQRRVAGAKGDVRKTMIIALARKLLIALWRYVTEGEVPAGAVLRPAP

SEQ ID NO: 253746 - protein, 464 aa, unidentified
MDKSSRRTNKTRARSESSQRTEPLAPIHPHAAGIDLGADAHWVSVPVGRDTEPVRRFSCFTPDLLAMAEWLRQCGVSTVAMEATGVYWIPVFQVLETAGFEVKLVNPHHVKTVPGRKSDVLDCQWLQKLHSYGLLSGSFRPEDQVCVLRSYLRQRESLIQNRCAHVQRMAKALTQMNIQLHRVISDLTGVTGLAILRAIVAGERDPHKLVALKHPRVKSTDEQVVAALTGDYRAEHVFVLSQELALYDVYQAQITACEHQIQQCLASFADKQPEEHPSPTQTPEPSSAQRPQGDLRSELLRISGIDFTRIDGLAVLTVQTILSEVGLDPTRFPSVKHFASWLGLCPGNHVTGGKAKRTHTRKVVNRAATAFRLAAQSVGRTQTALGAFYRRMRARLGAPKAITATAHKIARMFYRMWTSGGNYQDPGADYYEQRYQQRLLDNLKKKAASLGFNLVEQVTPQEVS

SEQ ID NO: 253747 - protein, 379 aa, unidentified
MDHAIIGTPPETVLYGALELSKNSWLLALQFPDRAQPSLYPISGGDTEGLMARLMAARDRWAKVSGQSRSIVLCYEAGYHAFWLARFLKARGIECLVVDAASVQVNRRARRAKTDRIDVGMLLRALIAWGQGERHVWSVVRVPSVDEEDLRRSHRERDRLVRERTAHINRIKGLLFGQGIRGINVKSKYKTLQIDKLVTGDGRPLPPRLASEITREIARLSLIQEQIATLERERDHAPTPCKATEKKRVQLMSLTGIGPAIAAVMTRELYYRQFNNRRQVAGFLGLATSPHDSGDVERSQGISRAGRGQVRGTIIQAAWLWLKHQPKSAITRWFVQRTAGQSGRMRRIMIVAVARKLAIALWRFLEQGLVPQGAMLTNR

SEQ ID NO: 253748 - protein, 370 aa, unidentified
MNKVSTFIGMDVHKNSIEIAIAQQGREGEIRSYGKIDGTLSALDKVVRKLVSKGNRLHFVYEAGPCGYQIHRHLTAQGFDCMVAAPSRIPKARGDRIKNDRRDAIKLARLHRAGELTPSYVPSAEDEAMRDLTRAREDATGDLRKSKQRLLAFLLRSGHKYTGGSPWSKAHMRWLADIKMPHRSQQIVFKEYIDTVGQCSDRVQRLTEQIRQLLPHWRLYPVIQALQSLRGVSLMVATTTAAEVGDLKRFKNPAELMSYLGLVPSEHSSGNRTKRGAITKAGNTHVRRALVEAAWAYRFRARVSQVLHKRQEGLPQPIRDISWKAQVRLCARYQRLWAKNKAKQVIVTAIARELCGFMWAIAQETPLPAE

SEQ ID NO: 253749 - protein, 347 aa, unidentified
MTIVGNPDAVVGGVDTHADVHVAAVVNHLGGVLGVESFSTTSHGYRQLVSWLRSHGELVLVGVEGTGSYGVGVSRYLQREGVTVVEVDRPNRQTRHRKGKSDPVDALAAARAALSGSATGSPKSRGGNVEAIRVLMIARRSAVDTRIETINQLRHVVFTATPEIRAKFSGLSAVALVNKASTLRPREGDDPVRYTTYMTIRALGHRVQYLREESKRLNRMLRPLIRQTAPTLLEVYGVGYDTAAKLLVAAGDNPERIRTEAAWANLCGTAPIPASSGKTKRHRLNRGGNRQANSALYHVVITRMRHDQKTRDYVARRLTEGKTMGEIARILKRYVAREVFKHLPHPA

SEQ ID NO: 253750 - protein, 422 aa, unidentified
MMDKERRWLVGIDWASQEHVVSLYDDAGKKIGQRKFSHGGTGLTDMIAWLLKASGGKPGDIHVGIETPHGPIVEALLERGFNVYSINPKQLDRFRDRFTVSGAKDDSRDADVLADSLRTDMRAFRKLSIAEPIVVELREWSRIDEELKVERGRLTNRFRHQLWRYYPQMLELADDVGATWFLDLFEAVPTPEKAANVREKTIARILKNHRIRRFDAVHVLSELRKPALAVAPGTIEAATARIRGLIERIRMINNQLRDAGQQLDRLCKKLSEPVADKDEEPSPGQKTEQRDAAILDSLPGVARTILATLLAEASDTLQRRDYHALRALCGSAPVTRRSGKSRVVLRRFACNQRLRNATYNWAQNAVRWDAISRAKYDALRAKGHGHARALRSVVDRLLNVACAMLNSGTLFDPEFASKRTTG

SEQ ID NO: 253751 - protein, 363 aa, unidentified
MTSMTTTTSHVTGGVDTHGQTHHGAALDSVGRQLGDREFPTTPAGYRALLSWLQAFGHLERVGVEGTGAYGAGLTRQLRAAGVTVVEVNRPDREARRAQGKSDPLDAYSAARAALAGKATGVPKTRDGRVEAIRMLRVARSSAVKARSQATNQLKALLVTAPAELREQLRTLSNTKLIATCARLRPTGDIADTEHATKTALRRLARRHQYLSEEISAADTELRTLVTAAAPRLIALPGVGTEVAGQILITAGDNPDRLRSEAAFAHLCGVAPIPASSGQTHRHRLNRGGDRRANNALYIVVLGRLRYDSRTRAYATRRTTEGLSKPEIIRCLKRYVAREIFTILTARTAGDQPHTAHAMSTAA

SEQ ID NO: 253752 - protein, 312 aa, unidentified
MASLYLGLDVAKASVEFASEPAGLGGQFTTDPSGLAALVTQCQAQPVTLIVLEATGGYEAPVAAALASAGLPVAVVNPRQVRDFARALGRLAKTDRIDAQVLALFGARLQPAPRPLPDAATQELEAVLLRRRQLLEMLHAERQRLPRAHGREVRRNLRAHIRWLERSLVDTDATLATLIQASPLWRVQDQLLQSVPGVGPALARSLLALLPELGHLDRRQIAALVGVAPLAQDSGMQRGRRHCWGGRPALRTVLYMGALVAARWNPVLRPFYQRLRATGKPAKVALIAVARKLLTILNAMMRDQRAWQTAHA

SEQ ID NO: 253753 - protein, 389 aa, unidentified
MPSVSERPEAPTAIQTHLAASFVSLELSRSIWLITSLSPASGEKMSKHSVRAGDVAALLARFSELKRKASERTGKSFPIVVIQEAGLDGFWLHRVLQSEGVESHVVDPSSIATSRRRRRAKTDRIDGEALLRALLAYKRGEPRVCAMVKAPTPEEEDRRRLCRERKVLIAERVKHVNRVKGLLFSQGISGYEPLRRDRRQRLDELTTGDGRPLPVHLKTQIRRELDRLELLLDQIKEAEAERDVLLAAPQPAALAPAGRMLLEFKGIGAELAAVLWLEALFRHFDNRRQLASYAGLAPTPWQSGSVDHEQGVSKAGNPRLRTSLIQLAWLWLRHQPQSALTLWFKERVSGNGGHFKKSTIVALARKLLVALWKYVTAGVVIDGAVMKDA

SEQ ID NO: 253754 - protein, 396 aa, unidentified
MKTVCGLDVHKSIILMCILKANGQKIVQEFSTLTPDIESMRDVLISHEVITVGMESTGIYWIPIWRILQGYFDLKLINPYFIKQVPGRKTDVKDSEWIATVVQKEMVRGSYVPGKLIQELRQYERRYVRLCEQSTRIEQELDRQLHRCNIQITNYATKIGSISVIKVVKAIIAGETTAQQLEKHVHGRIKNKYREKIKASLQGFISDADRFIFGQNIREYELIKAQQEECLLAMSEFCEKYFKNEVALLCTIPGIQKLSAMIIIAELGVDLKAFTTAAALTGWAGLRPRNDESAKKIRSNKITKGNKYLRRALVQCAWAASRQKNCWLKTKYEQLCIRKSNKKALIAISRKLLVIIWNVLTQKEAYKEFIPKIDPVQKQKKIEYHRKKLLALEQAE

SEQ ID NO: 253755 - protein, 352 aa, unidentified
MHYVGVDLHKQTSWFYTLDSSGNRVDSINLTNNHDILKNYFKKIPKPFTLAVEATYNWYFFVDLAREYTNSVFLANSFELKAFAKKHKKTDKIDARLIATVLYKGYLPTVAIADKHTRQIRELLRYRMKLVIDRSRNISRLKALLDKLGYMSSGNFTTFKALENIEIENLPDIYKSLIKRYRELIIYLSKKVYEIEKEINKLPNEDIDVYNLLSAPGIGPFSAALIKSEIIDIRRFNSFNRLCAYSGLAPRVSASANKIYHGSLNVNRRKNLQWILLENVKHFVEADPERAKKFCEIKCRKGYNTAKVILARDFLKVIYHILKEQRPYYGQKRSVEHKIKIQSVAAAALIGV

SEQ ID NO: 253756 - protein, 440 aa, unidentified
MKAKLPIINPHAAGIDIGSEKIFVCANDDGYQSFDTFTEDLKFAAKYIKQNAVTSVAMEATGVYWMPIKDILEADGIEVVLVRAGDANQLPGRNKTDGEDCQWIRTLHQHGLLRPCFIPEETIRELRTIVRLRQDHIQMAAAHIQHMQKAFTLMNLRLHQVISQIQGASGRRIIEAILDGERDAEKLARLCDKQIICNKKEEVLKSLDGNYREEYLFMLKQAYKAWNFYNELIGECDKNIEAWLSRNTNDKPEVDHITPAKPIRHHKPEIENFHVKMLQLMDEKDASQLPGLTDYSVMRLVAEVGINLKEWKNEKSFVSWLGLAPKRYSSGKMRRRYKGKQNTAAGQIFKEAAQSILNSKHIGLGSFARRLKSRKGPQIAIKATARKLAVLYYHAATKGMDYVEKGINDYNAQVKQTELHRLRKQASKLGFSLAEVLVHQ

SEQ ID NO: 253757 - protein, 313 aa, unidentified
MELFIGIDVSKAVLDIAVAPTGDGWSVPNSAAGVQELVARLREIAPRLVVLEATGGLERRAVAALAGAALPVIAVNPRQVRDFAKATGKLAKTDAIDAAVLALFADRIRPQVRPLKDEQTQELEALIVRRRQVVDMITAEKNRLLAAPPSKLVRTAIGRVIKVLQKQLEEIDADLDNSVRGSPVWREKDDLLRSVPGVGKVLSRTLLSLLPELGTLGKKQVAALVGVAPLNRDSGTQRGHRFVWGGRAHVRAVLYMSALVAIRFNPVIRAFHARLIAAGKLPKVALVACMRKLLTILNAMVRAKTPWTQEPLT

SEQ ID NO: 253758 - protein, 368 aa, unidentified
MEKCITFVGLDVHKNTIDVALADAGRNAEVRHYGTIGGGLDDLDRLVKKLSSPNRELHFVYEAGPCGYDIFRSLTDKGLDCAVVSPAHIPKKPADRIKTDRRDAMMLARLHRAGELTYVFVPRSDDEAIRDLTRAREDAKKAQRVAQQQLSGMLLRLGFRYSKDNWTKQHFLWLADQKMPMPAQQVVFQEYINAINESTARVERLTKQIETLVPSWRMASVVKALQALRGVSLIVAATMTAEIGDLTRFEHPKNLMTYLGLVPSEHSSGEKTQRGKITKTGNGHARRVLVEAAQAYSHPARITRPLLKRQEGLGRGVRDIAWKCQVRLCARFRRLMAKGKNRNAVITATARELAAFMWAIAKHTPIAA

SEQ ID NO: 253759 - protein, 353 aa, unidentified
MTIVGGFDVHRKQLTFDYVDTETGEMRSGQIRPATRKMLRSWLAEHCSNGDGEFALEGCTGWRYVAEELTAVGAVAHLADPAEAARLRGPKKRAKSDRTDARLLRTLLWDGRLPESAIPPAHVLEVRTVGRLYCALMDERRAWQQRIHAQLFHQGCPPITALLSQTARDGLATAELSPAGRCYVEAALRRIDELTDEIGAIRTQLVDFAKRQPGCRALQARHYGVGWLCAAIIWAEIGDARRFTSSDQVVRFAGLDVTVYSSDGKRSPGHLSKQGSPALRWAAFEAAKCAPRPGSPDYAYYHQLAQRMRGKKKTSGKNPTLAVERKLLCRCYHTLRELGDAAVAPPAPPRQAA

SEQ ID NO: 253760 - protein, 323 aa, unidentified
MTAVVGVDIAKRTFDLAILQPNGKHRTKSKLSNDRAGFAVFADWLQRYAESGAWIVMEATDIYHEALAEHFHGLGYRIAVLNPAQIARYAQSQLQRSKTDKLDAKLVATYGQLHVDQLRTWQPEPLSVRKLRALTRRLEDLQSLRQMELNRLDVSSATVQNSIQAVLQRLDEQIAWTLEQIKRHIDDDPDLRGKRDLLVSIDGIADKTAALILAELGDIQRFTDARAVTAFAGLDPRLQESGVYRGHTGISRTGSSRLRTALYLPAVTALTYNPAIKAQAERLRAKGKKGKQTVCAAMRKLLGIAYGVLKSGKPFDPALAIAR

SEQ ID NO: 253761 - protein, 496 aa, unidentified
MKNSIYSSRSQILNEKFEAVKDLSKLMIVGIDYAKAEHTVIVASGNGEHLQRKPLRIFNTSKGFDFLLQKIEKLTKKYKILKNNIIIAIEDPPAYLVNFLYKLQKNGYYIVKVNPGEAKKFRNNSRASSDTIDANGIVQAVINRKGYDWEQDNAIYDALKNFSRQRENAVIEKSKLKNKIHNSINILFPHYTTFYKSFDPFSVFSVELLKKDFSIDKIKKMRLKTIENKMQKYGIPSYKEKAKQLKELAEHTLSPPPEIVFNKSKELSCFINSFLTVENNIKEYENLLARNLVQTEGFYLTSIPAIGIIRAASLLGEYGAPHKWKDADKIMSYAGLACRENQTGGANKPAVKLGLPWAANKHLKNTLLQTAHGLGLYKHPAGKIYPCFEEHRLYKKYHQIKNKGGCSGLRTCKLLVKIIIQMFKCETVYVYDDSDYKLEEKMAYYTAVDEMLNNKWRKYDLSDIPDDKKYTEKWKEKLIELKSITTIVHNAFNSKK

SEQ ID NO: 253762 - protein, 348 aa, unidentified
MKTLQTIGVDLAKNIIRVSVVSNSNKELMNKDFSRAKFACFLAKQKCSLVAFEACASAHYWARQAKSFGHQVKILPALAVAPYRQGHKTDKNDALAVAECAVRPNIKIAPMKTVEQQGMQSIQRSRAFIVQERTALSNHIRGLLMEFGIIINQGFCALHENVPLILGDGENELPDMYRPTLQLLYQRLCQLREDLNFLDDQIKGLVKQNASCKELTEIEGVGPISAVLLFATLGSGEAFKSGREFSAYLGLTPKQYSSGGKTTMVGLSKKVANKRLRAVLIQGARAYVHRIKEPKTPKDKWLLGLIARAGYGKAAVALANKNVRTAWALLTKGGEYNRFQGEQVMVPV

SEQ ID NO: 253763 - protein, 446 aa, unidentified
MSDRSGLSRGDRNRNARLARLRQLLPPGNAIVGIDLADDKQAAVVTDHDSRVLARRRVSARAWELGGLLEWAVGKAAAAGFASVTVACEPTGHRWRVLDQLAAERGLALVCVQPLLVYRAREGEDLTRDKSDPKDAVIIARLAAGLHCYEPERADAVWARLRHLGARRDQLTVAATAQVNQIRDLLECAWPAVLGAASSPFRSASWRAAVAVVLERCAGQLGRVRRLGPARFEAAVRRELPRWGAARPCLRIVRAVFAALADPAGVTAHRPGALERVHLALGDWHDTRARLADTEARMTGVLDELGLTALVTTIAGLTPAGAAAILAETGDPARFASPRSLVKHAGLCPRDNASGAFQGKTAISGRGRPRLRVAAWRAVWAALPNNPVMAARFTHLTTREDNRLARQQARTACAAALLRWIHVVVTRRVSWDPAIAAGHTLVQQAA

SEQ ID NO: 253764 - protein, 365 aa, unidentified
MSEDITYIGLDVHKRSIAVAVRQGGGLVFEEQLPNEAAAVTRWARRWQRQSEGRLKCAYEAGACGYALQRQLAKLGIACDVVAPSLVPRKPGDRIKTDRRDARKLAEYLEGGHLTAVHPPTPAQEAARDLGRAREDAKQDRMRCRHRLSKFLLRHGQGYAPGRKHWTEAHRLWLSRLSFDEAPEQIVFDDYRLAVAQLDARIEALDQQIVELAQAAPYRRAVGALRCFRGIDTRTAFGLVTELHSIEHFDRAGGLMAFVGLVPSEASSGERQRRGAITKAGNGHARKLLIESAWHARHKPAIPAALRKRREGQPPEIVAMADVAQRRLHRRYWRLVERGKPTTVAATAVARELAGFVWAALRAAA

SEQ ID NO: 253765 - protein, 431 aa, unidentified
MKNITKNRRLSEISKTTLIVAIDIGGYEHHARAFDWRGIEQQKKAFKFKNDRYGFESFLSWLERIQLMSGFTEVMVGLEPTGHYWFALFDYLLSRNLRLVITSPVSVKQTKEAATTSASKSDPEDPKAIAHVMISGNYQEIYRPQGNYAELRKAYTLRNSVMEQKKATANRIHAWASTYFPEWHKVYTSVQRIGFLTLLRRAPLPSDIVKLGVHGILHHWHECQLLGGISRNRAERLVEEAKRSVGVTEASEMARVEIQMLLQHYDLQETQLVRLDKRLEELVEQYPGGKRLMQIPGIDLQIAAGFLAEVGDISRFPGASQLQSYAGLDILRNSSGKRRGQSRISKRGRNKLRRIMFVAALCVVNHTSEFRAVHQYYKHRTKNPLKAMQSLIAVACKLLRVFHVMLTKDVDYDPNKVTCDLVVKSSEKQVA

SEQ ID NO: 253766 - protein, 341 aa, unidentified
MNEISIIGLDLAKNVFQIHGAGPNGNVVLRKKLNRGRLLAFFADLPICVVAMEACASAHYWGREIGKLGHEIRLINPAYVKPFVKRQKNDAADAEAIAEAAARPTMRFVSVKSAEKQASSMAFKVRDLLVRQRTQTINALRGHLMEYGLIVPQGIKHIPLLREKIAAQTDLPEMASVLCNGLLDQVVYLSEQIAVLEKELRARARQDEVAARLMTIPGVGPICATALEALAPAAGTFSKGRDFAAWIGLTPKQNSSGGKDRLGKVSKMGQRDLRRLLVLGATAVVRWARRYGAPAGSWLARMLSKKPPKLIAVALANKLARTAWALMARGGVYCAPAPGAA

SEQ ID NO: 253767 - protein, 419 aa, unidentified
MAQRHDKPIISVVHPICCGLDVHKASISACCLATAADGGEDMEIAEFDTFTDDLIRLRDWLIERDCPVVAMESTGVYWRPVHNVLEGYVKVVLVNARHTKHVPGRKTDLADSQWLAGLLRHGLVRGSFIPPQQVRQWREMTRLRKAYQESLADFKRLIHKLFECANIKLGVVVSDLFGATGRYIMNLLATGEAELSADDIAAGAHGQLKQKINELCRALQGFFTDHHRYQLRLLLATVTELEHHIEQISQNVKELMADHHPVLSRLQEIPGVSEVAAATILSEVGATLEEFPRCAALASWSGLCPGNNQSAGKRKSGRSPVRGHRLKTIMVEVAWSAVRKPGSYYKDKFQRLRARRGAKRAIVAIAHRLLKAVYYIIKEGRHFRDLGAEYLTHKHQTGKLGSLKKQAKLLGYELTPLAA

SEQ ID NO: 253768 - protein, 341 aa, unidentified
MKKILKEVVGVDVDQKKLVVSLGRLFEDLEQEIYAHKAFDNNATGFSALLSWVSNLADPAVETCFVMEATGVYHESFAYFLDENGKVVNIVLPNKISNYFRTLEIKTITDKSSSEAIASFGLSRKLSRWKKPDPTFKKLKQLSREREQLIVERTLVKNQLHAENAEAEPYKASLQRMERRITLLTKQEKEILQEMKLLIASNEKINAQVKLACTIPGVGILTSAIVLAETNGFEHVKNKRQLVSYAGLDVREKQSGTSVKGKPRISKRGNRYLRKAMYLPALAAIRSNEQHRDIFARLVARHGIKMKAAVAIQRKILELIYVLIKNNTVYNEHHLKLVHAA

SEQ ID NO: 253769 - protein, 359 aa, unidentified
MQTQSNKIDFNGQNIYVGFDVHLKSWTVTIMTEKLTHKTFSQAPKPEVLFNYLSKTFPGGTYHSAYEAGFCGYWIHNKLIEFGIKSMVVNPADIPTTGKEKVMKTDPRDSNKIARSLRSGDLIPIHVPSIRTLEDRGLVRTRATLVKDMTRYKNRIKSFLYYHGIEFPEAFSKSQTHWSNRFNKWLEDIEMSELSGKDSLNALVGQSKHMRASILLVTKQIMELAKTDRYKKPLELLRSIPGIGLLTAMIILTEIETINRFANIDQFCGFIGLVPSCSTSGDNEVIGDITPRGHSILRSAIIESAWIAARRDPALNKSYHDYCRRMEPNKAIIRIARKVTSRISFVLKNDQPYVYSVVR

SEQ ID NO: 253770 - protein, 328 aa, unidentified
MEQELHFIGIDVSKAKLDVDVLRPDGRHRSKKFANTPKGHNELLSWLHNHGVAPAHICMEATSTYMEDAAACLSDAGFTVSIINPALGKAFAQSEGLRSKTDAVDARMLAEFCRQKRPAVWEAPHPLERALRALVLRHQSLTDMHTQELNRRETAREVQMPSIDAHLLWLEAELKRLEKQIKDLTDDDPDMKLRRKLLDSIPGIGEKTSAVLLAYVGLKDRFGQARQFAAFAGLTPRQHESGSSINRASRMSKAGHVSLRRALYMPAMVALYKTEWGKAFRSRLENNGKGAKLIIGAMMRKLAQVAYGVLKSGRPFDATLHEKNACVA

SEQ ID NO: 253771 - protein, 370 aa, unidentified
MGKSVLYVGLDVHKMSMDVAIAEAGPRAEVRFYGQIGGDLDSLDRVIRKLRATGAQLQFAYEAGPCGYVVYRHLTAQGWPCLVAAPSLIPRRPGDRIKCDRRDALSLARLFRAGELTSVKVPDADDEAMRDLTRAREDAVSVERRAKQRTGALLLRHGRRYPGKTTWGRGHWRWLTQQVMEHPAQQIVLQEYLDAVREANTRVQRLTGQIQELLPQWRRAPFVAAYQALRGVSLIVAATMAAELGDLSRFNNPKELMAYLGLVPSEHSSGASVRRGRITKTGNGHARRVLVEAAWAYRLRARVSRPLLQRQEGLPENIRQISWQAQLRLCARYRRFLARGKHKNTIVTAIARELAAYIWAIGQAVKPLTV

SEQ ID NO: 253772 - protein, 399 aa, unidentified
MPKEVVMIFVGIDWSEMHHDVCVLDESGDVLARKRIPDTFEGVRALHELLAHYAQEPDQVFVGIEKERGLIVIAMLGANYHVFALNPLSVARYRERHVTSGSKSDPGDAKVIADVVRTDRHNHREAGSDSENANAIWNRQREKNALRNALKDYYPGALLAFGTDLDDGDAVEVLAVAPTPALGVQLSLAKITSALRRGGRERNLERTAKKIQAALREEQLRERPRVELAYGAITGAHVAMIRAYNAEIAGLEAALASDFEQHPDAKIIRSLPGLGMVLGARVLGEFGDAPNRYADAKSRRNYAGTSPVTKASGKSRIVLARYSRNAQLASAADQWAFCSLTKSLGARTYYDELRTRHKTHRQATRQLANRWIGILHACLEQRVTYEEDLAWKHRSDLAA

SEQ ID NO: 253773 - protein, 407 aa, unidentified
MDLLKTVFGIDVSSRKSNVCIMVNGQKVNDYAISNDMVGFNRLLGDLKQVTKPQIIFEATGVYSRRLQAFLDMHELRYVMMNPLEAKRKTKDDLHQNKTDKLDALYLAKLQSEHPQRLAYVQNKEYQELMANNRIYEQASHDLISNKNRLHKAVQLTFPEIEHLLANPRGKNYWSIALRFPHPDIVLETKEADIIDFLKGLSGIGKKRANDIAQSLIRLAKVACPAVKKNSAHIRGLKMAINNILSAEEECQTALQEMAKLAPKRDLEILTSIPGIGENTALRIISELGDIRRFNNPSQLNAFVGVDPQVYESGNLTAHLSISKRGTAIGRKVLYLAINQIQSAKKAGKPCHIADYYEKRKRSSETASHKKAAIASIHKLLRTIFALIKNDQLYSYDVAKHNQRLLS

SEQ ID NO: 253774 - protein, 337 aa, unidentified
MFNHYVAIDWAMSNMAIARMTEKSNEVHIIDVPSSIKELQVYLKNLRGAICLTFEETTTSQWLYTELNDYVDKIIICDGFRNKLLSDGPKTDKIDSGKLVKLLKADLLKEVYHTSNHFIELRKIVSGYEDTIKAGVRLKNQRSALFRAYNKNHKKELELDGDADSFVLQGFDENIDKYEHEKTRYLVEFKRLERKYPEIKRVSDIPGIGTKSAVKIVSRVVDAHRFRTKNHFLSYCGLIKLEKMSGGKSYGKKNPRYCRMMKSIFKMATLAVIGRDNQFGEYYKHLLEQKGYSERMARSAVSRKIAAVVYGVMKSKNKYEAHIHKKGIKDVDKTVDL

SEQ ID NO: 253775 - protein, 311 aa, unidentified
MTQDTIGIDISKDHLDAHRMSDGTSRRFANDKTGQRALMIWLGKRDTRIVYEPTGPFHRALERRLAAAGFALVKVNPRQARRFAEATGKLAKTDRMDAAMLARMGALLELEARPVRNTTLNDLKDLHMAREALVKNRTAAKNRAKTLTLALLKRQNREQLRQIDRQIEAIETEIRTLIISEPDLACRFEILVSIPGISQITAFALLIDMPELGTLGQGQAASLTGLAPVTRQSGRWTGRASIRGGRANVRQALYIPALVAMRFNPELKAKYAQLIDAGKPPKKAITAIMRKLIILANALIRDGRKWAPSLP

SEQ ID NO: 253776 - protein, 409 aa, unidentified
MSNDFQWFAGIDWGSEKHRVCLMDGEGRTIAERWVEHSGRSLAELVEWLRQQTQEAAPALAIAIETPRGAVVETLLEHGFAVFAINPRQLDRFRDRYSPAGAKDDRRDAFVLADSLRTDQHCFRAVALDEPEMIRLRELSRLEDEVGEELNRATNRLREQFHRYFPQLLQLSEAASDPWLWDLFEAAPSPVQAARLREAKIAHILRQHRIRRLDASQVMAVLKSPPLRLAPGAAEAASEHALLLLPRLRLLHRQRVDLASRVEQILNQLATPDEGQSEEHRDAAILLSLPGLGRKVAATMLSEASQAIAERDYHALRCYGGAAPITRQSGKKKVILMRRGCNERLRNALYHWARTSIVWDPKSKSIYAGMRACGQSHGRALRGMADRWLRVLFAMLRHKTLFDVQRRAA

SEQ ID NO: 253777 - protein, 422 aa, unidentified
MVRQAGQIKTTPEELRTFAESLGPNDEVALEATCNTYAIATLLERHVRRVVVSNPQKTRAIAEAKVKTDKVDAEILAELLAADYLPPVWLPDEDTHALRRQVARRAHIVRQRTRLKNQVQAILHRNLVPRCPAADLFGHKGRAWLGEQDLPPDERQAVQALLRQLDFYGDELRLVDAELGRVGLERKEVGRLMTIPGVDATVALAIVAAIGDFGRFSSPDRLVSYMGLNPRVRQPGGQPASHGRITKQGRAHARGMLVEAAWVAAKIPGPLRAFYERIRARRGMQIAVVAIARKLIVLCWHLVVKEPDYAFARPSLTAQKHRALGLRAGMAARRGQTGTAATYSLKEVRRRDREIAEQAEHAYRQLVANWRPKGPQTGQATKVGVATATGARLLRPSKGKAARQGLQPQHPALRSGVDHARG

SEQ ID NO: 253778 - protein, 289 aa, unidentified
MNKDIKIFGIDISKDTFDVMDSDGNHYQFSNNLKHFLKFLKLLDNHSHCVMEATGYYHYQLAYFLLEHNIKVSVENPLSIKRFIQMKLSKIKTDKSDAKMICLYGQQVDMKLWKGSSSNQLECLQMMSLLDIYTKQSTALKNKIQINDVLSNPSKVVLKSLKQSLKHLHKEMLSIEEKLTVLVKSEHQQTLTKLESIPGLGRKTAIMLIVMTDGFTRFENSSQLCSFSGLTPVIRQSETSVRVKARISKKGNTKLRNLLFMCSLTACKYNKVCREIYERITKARVKNLH

SEQ ID NO: 253779 - protein, 401 aa, unidentified
MKNFSYFLGIDVSKDSFDACLVNANQEVRMNEKFSMDSEGFEKLLQNLLAFERDDTLVVMESTGIYHTNLFFHLEDNEFKIAVVNPLLIHNFSKSVTLRKSKTDKIDAFRIACFALYNQSNIEVTKKSATSIRNLSRERDRLSKETAKIKTEVKNHLQILFPELVNNYNVFTKTMLTLLMRAPGAFPIKKMRPIQIERIFNKTKGNKVQISPRELVRLAKKSFGIEDKYRQTVLIMKIEMLLFIQKQKLESDKQIKEYVDKNLKQEFDIITSIAGIGQTTAEKFLIEIGDINKFKSHNQLRAFIGTDPSIKQSGSSVNINGRISKRGNSHLRRTIWQMAFAVRKFSPGFEQYYLKKREEGKKYKQAVIAVANKLIKTLYALLKNNSRFRENYRNQSKVIYS

SEQ ID NO: 253780 - protein, 386 aa, unidentified
MHDGTNLPIPKQIDIRADCATLFVSLELSRSTWVATSLAPGSKKMSKHTLAGGNGRELLDLLARLKTRAEQRIAAPVKVVTIHEVGLDGFWVHRLLDANGVESHVVDPASIAVPRRHRRAKTDAIDGETLLRTLMAWKRGEPRVCAMTVPPSPSEEDCRRVSRERATLLRERIQHTNRIRGLLFGQGITNYNPLHKNRRECLEELRTGDGRSLPTHVKAEILREIDRLELVLRQIGEVEAERDEILRPAEASSPAALLMRLKGIGAEFATVLYFEGLFRHFENRRQLAAYAGLAPSPWKSGSIDHEQGISKAGNPRLRTTMVELAWMWVRYQPDSALSGWFRQRVGSERGRTRRISIVALARKLLIALWRYVTHGEIPAGAVMKPV

SEQ ID NO: 253781 - protein, 402 aa, unidentified
MKTKNRYGSVAGVGMDVHYEFSTVTMRDAKEKVVYRERLEHRDRAGLRRRLSQWPKEVPVVMEASFGWGWLSDEMLAAGIDVHLSNCYKLERLRQARGQVHTNRKDADLLSLLPLEDSHWWEVWRAPKEVRDHRELTRYWIVLKAMDVEVRNRLHALCHRHGIFYDFNDLFGGRGRAFLAEVAKAGQFPDGQLDEGTLFHWRGQVKLLEHLREQLADLTKELRKRLTRSELARRLDGIPGYGLILVHVLMAEIGDIRRFASQRQLASYSLLAPRAYETGQADPSRRPIGRHLGKQGNHVLKWAMILGARGAVRKGGKWRKVFDRYTAGGRNNRNRGYIKVARDLVPVVDVVWRKNVEYSDTPPAPAACRKKARGGEGLSRSGTGQLSSDMVVAGQIGPQTSI

SEQ ID NO: 253782 - protein, 340 aa, unidentified
MQISTIGLDIAKNVFQVHGIDGGGRPVLRRKVRRDQVLALFGKLSPCLVGIEACATAHHWARRISALGHEVRLMPPAYVKAYVKRNKNDAADAEGICEAVTRPTMRFVPVKSADVQSMLMLHRARQLLVRQRTAQVSAIRAHLAEYGIVAPKGRAHVRDLLAVLESRRDLVPDLARQTLFLLAQTIASLSEQVRKIEIELMAWHRTNVVSRRLETIPGIGFITATALAATVGNPRAFRSGRQFAAWLGLVPRQNSSGGKERLGGISKMGDRYLRHLLVVGATAVVRYTKRKATTVSIWANRLLERKPARLVTVAVANKMARIAWAVMAREENYRPVPIAR

SEQ ID NO: 253783 - protein, 331 aa, unidentified
MINHMKTNAPAVNRKTDAAPVYVGVDVAKATLQVHRQGRQTELSNTAAPRAKLCRELKTLPSVHVVCEATGGYERDLVGALHKAKIPVSVVNPARVRAAAQALGQRAKTDRIDAAMLSDYGQRYQPQPTPPASPTQHQLVALTQWLKQLIEARAMAKIQAEHHHDPFVKKQHQALLDCYQAHIKAVEDKLQALVQKDQELQQRAETLDAIEGVGSRTALMVLAHLPELGQLNRQQVAALAGLAPWTRESGTMKGLRCIGGGRPEVRLALYMSALSAVRFNPVLRAFYQRLIAKGKFPKVALTAVMRKLLIYMNHQLKALTDQPLSPVQGKS

SEQ ID NO: 253784 - protein, 415 aa, unidentified
MAQARLPSPLDPSSFSYIVGIDIGSQNCSGCVLKPDKSAVGKPFDFANAASGFRLLHEKLGSLHVPAEQILIGMEATSRYGEALFHYLEQQGYQLCLLHPAQTHHFAKRRGLRAKTDKLDAITIGHVLLSGEARVGYVPDELISSYRELVRLHTQLSDEIARYKNEIHALLQVLFPEFSQVFADPCRPTALAVLQRYPGAAAISTVSVQELTTLLQQLAPRNYGRQTAQQLIALAQSSVSPALAQRARSKSMQIVCDQLRHTRENLAQVEAEIEQLRQQDPASQRLSGVPEFGSKTLAVLRAELGDVARFQRMDQAVASAGLDLAIRTSGKWQGQPKLSKRGSGLLRRVLYLAAVRSVHMPTSTFGAYYRRLVARGLRKGSALVAVMRKMLIVAVHLLRTGEEYEPGKVASGCGG

SEQ ID NO: 253785 - protein, 387 aa, unidentified
MSQTVAALIPAAVDYERTLVLAIEVSNKSWVLAAQVPGLPHTKAKRTINPEAEALLAAIAGYRARAAAMGRSIERVIAVYEAGWSGFWLARWLMRHGVEVYVVQPSSVPVDRRMRRAKSDGIDSELLLRILLAWLRGEPRVCSMVPVPDEADEDARRCVRERTELISERVGLTNRIGAVLATLGVNDYNPLLRNRGHRLAELRTGLGEPLPANAHAKIKRLLARLELVLTQIAELERERDAVVETEASDKASKMIQQLTALRGIGVQSATVLVREAFVRRFANGKALGSYAGLASSPYSSGGIDREQGIGKAGNRRVRTVMVELAWLWTRYQPDAAQVCWFRERVGSTGPRVRKIMVVALARKLLIALWRFVIDGVVPEGAVLKPAV

SEQ ID NO: 253786 - protein, 314 aa, unidentified
MDHETFVGIDVSKDHLDVALHYQREHWRCANDSEGLTALIARLRPLHPALVVMEATGGYETLAAITLAQADLPVVVANPRPVRDFAKSTGRLAKGDALDAAMLARYAATVHPEPRPLPDAQAQELQAMLTRRKQLVEMRVAEANRLHTAHIRVRPQVQEHLTWLNHEIEQLDEDLRDLLRHSPLWHEKDELLRSVPGVGPVLSTTLLAEMPELGHLDRKQVAALAGVAPYSNDSGRYRGERHIWGGRANVRTALYMAALSAKRHNQIIRIFYERLIAAGKPAKVALVACMRKLLTILNAMLRDHRPWQPQPTTS

SEQ ID NO: 253787 - protein, 338 aa, unidentified
MKLYGAIDLHSNNNVMVLSDEQDRVIYEKRLPNDLGLITEQLAGYRDSLEGIVIESTYNWYWLVDGLMDAGHKLHLANTAAIQQYEGLKYTDDPYDARWLAHLLRLGILPQGHIYPKQHRPVRDLLRKRGQMVRQRTMNLLSIQNLFSRNTGGSMNANRIKRLDSKEIDELIPNTDLALAIKANLAMLQCAEGQIDILEKAVLGRVKLKPEFELLKSVPGIGLVLALTIMLETGDIDRFPTVGDYASYCRCVGSKKISNGKKKGSGNTKNGNKYLAWAYVEAANFAVRYSAKIKSFYQRKKAKTNGIVAIKAVAHKLCRACYYIMKDQVAFDVRKAFA

SEQ ID NO: 253788 - protein, 317 aa, unidentified
MNFVGIDVAKDSMEVMVHESSKHWNFINDETGLHKLIAKMKRLSPCLIVLEATGGYENTVATGLQCKGFSVAVINPRQIRDFARSIGTLAKTDILDARVIAHFAAKIQPAPRILPTEEAKRLGAILMRRRQIVTMLTAEKNRLLQATPAVRERVKNHITWLKQELSDISKELKQKVQDDPEWKEKDKIIQSVPGVGPNLSATLLADFPELGNLNRKQIAALGGVAPFNRDSGKMRGKRTIWGGRAVVRTATYMAAFAAIRCNPLLTSFFNRLVAAGKPRKVALVACMRKLLCILNAMLKNRTRWTYYSSQLVGPCHS

SEQ ID NO: 253789 - protein, 333 aa, unidentified
MTKFQIFIGIDISKSFFDISYYWNGEAIYLGVYENSIEGFQSFIADLSSIVKVPSNKWFICFENTGSYSKEILYFLISQDIPCLEESPLKISRSLGLRRGKSDKIDSMDICNYVYEKREKLSATILDHPTIIKLKILLSRRDLLVKQKSALTVSLKEQNKSMDKDFYQDLLNDNKKIISHYTEHIKLIEDKIIRIMKSDVQMFKNYKLLTSVVGIGPVTAAHLISTTNNFKKITDPRKYACYCGVAPFPNQSGTKKGKTRVHNMANKKIKSLFSNCAIAAIIHDPQLSSYFRKKTKEGKEYGVVVNAIKNKLIQRAFAVIQRQSPYVKILSYA

SEQ ID NO: 253790 - protein, 358 aa, unidentified
MAKCMMIGCDLHDKSMLLKGAVDRGKPWLKTYGTSAGSRRRMIADLQRRAAQAGAARIIFAYEACGFGFLLYDELVAEGIECYVVAPSKMLRSSHSRKRKTDERDAQAILDALRAFVLAGVPLPAIWIPPLQTRDDRELVRRRLSVGEDVSAAKTRIQWLLKQHGVEGAAAQPWTVAYWGWLELLIAGRLGGGAAGSLASSVRQVQWLLEEKSRLDQQIMGLSGTSRYAPLVSSLCRHQGVGVLTAMVFLTELGDLRRFSNRREMGSFLGLVPGSHESGEDGDHKGHITHQGPARVRKVLCQAVWSRLRVEPSEQIAYGRLVARNPGHKKIAAVARMRVLAIRMWHDGLEALAAMEAA

SEQ ID NO: 253791 - protein, 355 aa, unidentified
MQKYKVSFKGQNIYVGIDVHLKTWHVTTLTETGCKYSFAQHADAKELFDRLNKKFPEAHFLSAYEAGFCGFSAHYALTEQGIENIVVHAADIPTTGKEKAMKTDAVDSEKIAWALKRNELTGIYIKNKRYMDDTNLIRLRQRFIMDLSRQKNRTKHLLYTQGVTYPERFHNCRTHWSRNFMKWLREEVELLSEQKMSLLLLCEQVENTRKAILKVTREIRRLSTTDRYKENYDLLVTVPGLGLITSMSMLTELDNDIVRFPNERSFVSMLGLIPTCHDSGEKKVSGEKINRGNKHLGPLIVEASWVAIQRDYQLGAYYSSCCQIMKPHKAIIKVARKLACRAYAVLKTKTKYELS

SEQ ID NO: 253792 - protein, 342 aa, unidentified
MGQITTIGLDIAKSVFQVHGIDATGEVVLRRRLTRARVVPFFAKLAPCLVGIEACASAHYWARELKKLGHDARLMPPSYVKPYVKRQKNDTADAEAICEAVSRPTMRFVEVKTPEQQSVMVLHRTRVMLMRQRIQLSNAIRGHLAEFGLVAPIGRMGLQTLINILFDEKDGRVPAEARYCLQMLVDQLRLANAQILENDRRIRTSARATDVGRRLMGIPGVGPVLASAFVASVPDPAMFKSGRNLAAWIGLVPRQNSSGGKERLGGITKQGNRYLRQMLVVGSLAVIRYAERHGTRRPWLVKLMARRATKVAAIALANKTARMVWAIMTSGQRYREPELCAA

SEQ ID NO: 253793 - protein, 350 aa, unidentified
MPAKIGCDAHKQFSVFVTIDGKGKTSPAVRVEHHRKEYIDFLHTLPSVSEIALEATGHWYWMVDEMEKAGHHPHLANPTEAKKRMGKTNKTDSLDAKGLAILLHNGTLPESWIPPGELRDRRELLRTRMALRDLRSSLKHRIHAAIDRYGLQATGISDLFGVKGRVYIDTVLDKLPRDTAAMIRVQLTSLDQLELHLEEIEERIAVALKPSPEVKLLRTIPGIGEILAPLLWLEIGDVERFPRAENLASYAGLVPRIIASGGRIRHGGTCRNVNHYLKWGFVEAATCAMRLKAYRGTHIERLYQRLAPGKGHGRAIVAVARHLAEASYWVLRKQQPYKSPGPRTVAIDAA

SEQ ID NO: 253794 - protein, 342 aa, unidentified
MKHYVGLDVSQKETSVCVVDDAGKAVYEGRARSEPGALAALLAKKAPHAERVGFETGAMSSWLWHELKRVGLPVVCIDARHAHAALSVRLNKSDENDARGLAELVRIGWYREVAVKSEASQQVRSRLVTRARLVSMRRDLENQVRSMLKECGLTFPRSIGGQLRRRVEDLTGEAHPLWPVLAPLLSIHAHVCRELEGLDSQIRQLARADETTRRLMTVPGIGVITALSYRHTIDDPSRFRTAATVGAYLGLTPRRRQSGETDTNGRVSRWGDRLLRTYLFEAASVLLHRTKRWCALKAWGLRLAKRVGWKKAQVAVARKLAVILHCIWVDGTVFEWGQDVTT

SEQ ID NO: 253795 - protein, 407 aa, unidentified
MDVIIERACGMDVHKDSITACILTPEGKEIQTFSTKTVFLLKLLDWIKEHNCSHVAMESTSVYWKPIVNLLESEGIEFLVVNAQHIKAVPGRKTDVNDAEWIAKLLRHGLIKASYIPNRDQRELRELVRYRRSIIQERARQQNRIQKVLEGANIKLGSVVSQIKGVSAMEMLRAIADGEDDPVKLASFARRTLKKKKEELELALRGYISPHQRMMLKTIITHIDFLTDQIEKVDNEIAERMSSYQDDVERLDSIPGVATRMAEQILAEIGTDVKNQFPSAAHMCSWAGLVPGQNESAGKRKSSKTKKGNKYLKSALQEAAHSVRGSKNYLGALYRRTAARKGTKRAAIVVSHAILRICYYLLTRKEMYVDLGEDYFDKQRAQSIVRHSLRRLESLGYTVSLTETEAS

SEQ ID NO: 253796 - protein, 337 aa, unidentified
MGRFIGVDLHKNNFMVCYLDGSHREIRTYKLSELKSFRKSLRKSDIVGVESTGNTRYFVEQIAENVQSVKIINPSQFKVISHSVKKTDRNDVETIVEFLSKDMVPEVRLKDKKTSQIASLCQTRDKLVKLRTALKNKVHNILNTYGIQIKKESLSSEKGLRSVLQMPVDEIALVELDVIVTQIRSLNESIKRLDKELANRGKDMKGHKNITSIKGIGDKSGTILLSVIGDINDFESEKKLAAYFGIVPRVSASNETVHTGRITKRGSKLGRTTLVQCTLIAIRYSPYLQTFYQRIKARKGSGKAIIATSKKLLGIIYNTLKEDWEFEDFPNFILKST

SEQ ID NO: 253797 - protein, 352 aa, unidentified
MDRYVGLDPHPTSCTFAVMGPSGKRLKSMVVETNGAALVEAVKSIPGRVHLCLEEGTQSAWLHELLSPHVAEAVVAVAPENKGAKDDLRDAWGRAEELRTGSIRTRVYKAPLHLAALRNAVRGYGFAVRDAVRAMCRLRSVFQSRGVAVNDGIYNPKGRMKCLAKLTPPHRRLAESLGRQLDQLVPLREEAEKWLLEEAKTHPIIRTLSTAPGMGPIRTAQVVAITANPHRFRTRRQYWSYCGFGIVTRSSSDWVQTKDGRWVRSQVLQTRGLTRKRHPLLKAVFKGAATTVITQLPEHPLHRDYERMLAAGIKPNLAKLTLARKIAATVLSMWKHQEVYDPQRHRSASDKT

SEQ ID NO: 253798 - protein, 407 aa, unidentified
MRIIGMDIHRVAAEVVSLLDGEIVKLGRVQMLRDKLEEFARKELTHDDHVVIEATGNAAAVAEVLSLFVDRVVIANPKQVHMIAHAKVKTDTIDATVLAKLYASGFLPEVWVPDPETLALRRQVTRRTQLVRQRSRLKNLIQSILHAHLIPPCPHGNLVGISGRKWLARQMLPADERAAIERHLSLIDQINEALTVVEADIAVHALQDPTIRRLMTLPGLDVTVAASVAAAIGDIRRFSDPQRLVAYLGLNPSVRQSGEGPAYHGRITKQGRGHARGMLVEAAWAAARSPGPLRAFYQRIAARRGKHIAAVATARKLAMIIWHMLSKDADYIWARPALLARKFRSAELRAGLPTKHARRGMAYDYNIPAKRAEERSRVEKGEAAYVDLTSRWRTRPKGKEAVEKLAL

SEQ ID NO: 253799 - protein, 409 aa, unidentified
MDVVITRCAGLDVHQATVVATVRVPDDQGGRRVVTDTFGTMTADLLALRDWLHAYGVTHVALESTGVYWKPVYYMLEDAFTLLLINMQELKRVPGRKTDVKDSEWLAQLLECGLLRPSFVPPPPIRELRDLTRYRVQQVRDRSQEVNRLCKVLEDAGLKLTTVITDVMGKSGRAMLQALVDGTTDPAVLAELARGKLRKKLPELRRALQGRFRPHHAFLIEQIFAKIDFLDEALERLTTAIDQRLVPFEPMLTALDTIPGVDRIGAISIVAETGGDMTRFLTAGHLCSWGAMCPGQNESAGKRRSGKTRKGNRYLRGTLIQAGLGAMRKNGSALQARYHRVARHRGHKKAVVAVGHQILEIAFYIMRDGVTYDELGADYFNRRHAEKAVRRHVRQLEALGFHVTIEKAA

SEQ ID NO: 253800 - protein, 376 aa, unidentified
MLYVGIDIAKNKHDVTALNVPGKTVLKPLTFSNNKAGFELLDLSLRQLNQDCLIALEDTGHYAFNLLNFLHEQGYKVYTYNPLLIKKFAKSLSLRKTKTDKKDAHGIALKLLSDPNREQFQHDNRQVDLKILARHIHRLKKKQSDWKVQYTRCLDIIFPELDKIVGKDSEYTYQLLTRYPNPQKRIEAGFDKLIEIKRLTASKIQDILSVAPRSIGTTSPAREFEIIEIIKHYKRLIDKAETCVNDLMAEFNSVITTVTGIGGRLGAVILAEIRNIHAFDNPAQLQTFAGLDSSIYQSGQIDLAGRMIKRGSPHLRWALIQAAKACARFSPAFKAYLKTKLEQGKHYNVAIIHLAKKLIRTLFYILKKSCHLTNKK

SEQ ID NO: 253801 - protein, 391 aa, unidentified
MKSSHRIDTPAAGAKDGTLYVAFELSKSKWLIGILLSGESKLSRHLVPGGDTAAVLQLISKKRVQGEKKLGRPVRVVSCYEAGFDGFWLDRWLAEQGIENRVLDPSSIELPRRARQAKTDRLDLERLMRVLIRHEGGEPRVCSVVHPPSPEQEDARRLSRERDRLIGERTAHGNRIKGLLHGQGVRDVEPRRKDFREQLARARTGDGRALPGKLVAEIVREHDRLVLIAGQLAEVEGLMKAEREAAVPDSRARQVNQLIGLKSIGAVGGETLANEVFWRDFQNRRQVGAYFGLVGTPFDSGQSSREQGISKSGNSRARTLAIELSWLWVRYQPDSALSRWFKERVGDQKGRIRRIAIVALARKLMVALWRYLTQGVVPENAIVRAAAPAGR

SEQ ID NO: 253802 - protein, 453 aa, unidentified
MAKRKSSGTKKKKNNRIWEQINENAAGIDAGAEFHFVCVPEEAATPAVRKFPTNTRGLYELADWLNECGVTTVAVEATGVYCVALLEVLDARGLEVVLAKPSSLKFVNDRRKTDMVDCQWIQLLHTFGLLRGSYRPTREIAIYRTYNRQAQTLIAQSSTETEHIKKALTQMNIRLDRAVSDVMGVTGLAIIRAIVGGERNPAVLAQLRHQSCAKSESQIEEDLTGKWQDEHLFVLNQSLVKWDCLQALLSECHAQMEKHLSSLPKKAERQTLPRPRRREHVRKSVLPFDAREIFYEILGQDLTQIDGVGTSVVSAFIAEVGTNIDAFKTEKNFCSWLKASPGSNQSGRKKGSGKNKKTTNRLWTALRIAAQTLSSSKSALGAFYRRKRAQLGPEKAINAAAHKIARMIYFTLKHNRPYVDPGPDHYLERHKNQIIKTMEKRARQLGFTLVKAA

SEQ ID NO: 253803 - protein, 409 aa, unidentified
MRVMYERCCGLDVHKARITACVRVPGPDGNRSSEVRTFGTTTSDLLRLMDWVMESGCTHVAMESTGIYWRPVFNILDEVAVVLLVNARDAKNLPGRKTDVKDCEWIAEMLEHGLLRSSFIPPEPIRDLRDLTRYRKSLIGVRADEVNRLQKVLETANIKLTSVVTDVTGTSGRSMVRALIAGERDPIRLSRLARGSLRKKHDALEAAMAGRFRDHHGFIANQILDHIEQLEEHISECGRRIEECLRPFSESQDLLKTLPGVRQRGSEGIVAEVGVDMTCFGFAGRLASWSGLCPGNNESGGKRLSGRTRAGNPWLKTLMVECAWAAIRVKDSYCSALFRRIARRRGPKRAILAVAHHLIVSVFYVLAKREPYRELGANYFDKIAGEAVKKHHIRRLEALGFHVTLSAAA

SEQ ID NO: 253804 - protein, 372 aa, unidentified
MREDSEVYVGLDPSKRKIAVALAEAGRDGEVRFLGEIDSTPETVERLVRKLVKRHRRLCFAYEAGPTGYGLQRQIVALGHDCAVVAPSLIPKRPGERVKTNRRDALTLAKLHRAGELTPVWVPDPEHEAIRELVRAREAAMEDLRAKRQHLQSFLLRQGRVYSGRSAWSRAHTRWLCELQFAHPAQYLVLAEYRQAIADAEKRLKRLSEQVAELVPSWSMAPVIAAYQAMRGVAFLTAVTLVAEIGDVRRFETPRQLMAYLGLVPSESSTGEHVRRGGITKAGNSRARRVLIEGAWTYRFPARKSRLLQERQASLPRVVCDIAWKAQLRLCGRYRKLMARGKQKAVVTTAIAREMAAFLWAIGHEVEPMRAN

SEQ ID NO: 253805 - protein, 334 aa, unidentified
MQESCKVAICATVGIDVSKDQLDVVLRREEREQPRVYANSAAGFRDLHRWLQGQDVQPQQIQVALEATGSYSDAVALFLYEHDYLVSVLNPAVLVDYRNSVNVRSKTDALDARLLARYAQERRPRLWKPLPPEMQTLRFLLARREDVQHMLQQERNRLHAGRMDDWIRTRVQPHVTQLDKEMGAIWKRIMGHLKAHPSLKSQWRRLQTMRGIGPIGAAALLAEVGEIERFDDPRALVSLAGLAVKRHDSGRSVHGTPKIDRHGRTGLRRILYLCAVSALRWDAHMQRFAARLQARGKPLKVVRVAAMRKLLHIVYGVWKHEADYDPTLAFPEVA

SEQ ID NO: 253806 - protein, 338 aa, unidentified
MLHSGIDLHKRTIAFATVTPDGQSVRDAQLPTTRAAVRGYFAPLPVPHRAVVESTSNWYWLRDLLVGAGVDLRLGHSKYIKAISYAKAKTDAVDAATLAQLLRSDLIPEAHMVSAEWREARDFLRARLQLVGQQVRCKNTLAGLLAQYNVTAVEALPPLVQLRTTMLAEQHALLGAQAKQLASALDPLLIPTPDVQRLLWIPGIGRLVAFTILLEVDGIARFPSARDFVSYCRPVPGAGNSGGKTRHKRTKDGNRYLKIAFSHAAIRAIQYFPEIRAFYRALAQRKPPIVARAVVAKELARIVYYVLAKQEAFNGTFKGKPLSRTKSPKWPRLASPDV

SEQ ID NO: 253807 - protein, 343 aa, unidentified
MSDITTVGLDTAKSVFQIHGVNAEGEVVVRRQLRRRQVLPYFRKLPPCMIGIEACSSSHHWSRELQSLGHTVRLMPPKYVKAYVKSQKNDAADAEAICEAVTRPNMRFVPTKTEEQQSILMLHRTRQLFVRQRTALTNAIRAHLAEFGIVAGIGRNGVEALLKIVADGNDSRVPEVARDCLVALGSQLQTIKAQVLSFDRRILASHRANETSRRLESIPGVGPQIASALVATITDPKAFRSGRDMAAWIGLVPKQNSSGGKEKLGSVTKAGNRYLRTMLMIGALSVIKRAKQLGYSNRPWLSALLARRPTKVAAIALANKIVRMAWAMMARGEKYREPVALAA

SEQ ID NO: 253808 - protein, 355 aa, unidentified
MDSKKYIGMDVHKESISIAVMNGAGKIVMESVIETKASMILQFIDGLRGDLQVTFEEGTSAAWLYDLLKPHVTKLLVCDPRKNASMREGNQNDKIDARRLAELLRLNHLSPVYHGEHGLRSLKELVRSYLTITKDLGRVMSRVKAIYRSWAIPCTGKQVYAPRHRAEWLGKIGETGVRRRAEFYYQQLDALRTVRQQVRRELLAESKKHQAWKRLCQIPAIGPIRSAVLLGILQTPHRFRTKRQLWTYSGFGIETQSSADHRKVDGQLQRAKKQSSIRGLNRNCNHDLKNVFKGAAIVASSKPGPFQEFYTALLTKGLRPEMARLTLARKIATIVLIVWKRGACFDAQHLKPQTA

SEQ ID NO: 253809 - protein, 405 aa, unidentified
MERVFVGHDWAETHHDVHVADADGKRLAKARLPEGVEGVSGFHELVAPFVEEPDEVVIATETDRGLFVGALVAAGYQVLAVNPMSTSRYRERFSTSGAKSDPGDAFVLAELARNDRHNHRPVAGDSEEAQAIKALARAHQSMIWTRQRQVNQLRSTLREFYPGFLGAFDDLDAGDALAVLEVAPTPALGRALSRSKIASALRRGGRQRRIEERTVEIQTALRADDLEAPAPVAEAMGASVRALGAVISELVVQIHGLEGELTARFEQHPDAKVIQSLPGLGMILGARVLGEFGDDPNRYCDAKSRKNYAGTSPITRASGKHRVVLARYAPNKHLADAAYLWAFCAITASPGAQAFCKERRCHGDTHNRALRALSNRLVGILHGCLRYGTLYDEHTAWGHRITAAA

SEQ ID NO: 253810 - protein, 343 aa, unidentified
MQAVKTLGLDIAKSVFQVHGVDADGQVVIRRQLKRRYVLAFFQKVPSCLVGMEACATSHHWSRELQALGHRVRLMPPAYVRPYVKRQKNDAADAEAICEAVTRTNMRFVETKTIEQQSCLVLHRTRHLFIRQQTSVINAIRAHLAEFGIVAPVGRKGLEQLLDVVANAREQRIPALARACVAALGAQLRALKGQILEFDRQIMLWHRSHETSKRLDEIPGVGPALATALVASIADPNAFRSGRNFSAWIGLVPRQHSSGGKDKLGSISKQGDRYLRSLFMAGALAVIRYAKIYGSKHRPWLTALLARRPTKVAAIALANKLARMVWAMMSRGERYKEPVALAA

SEQ ID NO: 253811 - protein, 262 aa, unidentified
MDNFYFIGVDVSKKKLDFCVLFEGKVLREEQVSNHQQAVARLIGELKNDLEMDNEQFLICAEHTGQYTFPLVCACKSVECKLWLENPSQIKYSSGMQRGKNDKVDAKRIAIYASRFGDKVKYYDRPSEEIERLKQLERERALYVTDLAKYKGQMYDQKDFMPAALYRKKTKRMKGLIQELQAAIDAITAEMEKIIGSTEVLARQMELLMSIDGVGKVVALNVIIETEAFSRFDNPRKFCCHAGVAPFSYTSGSSQQDRKSVV

SEQ ID NO: 253812 - protein, 310 aa, unidentified
MSTEIFVGIDVSKDSLEVGVYPSHPGCRMANSEQGVEELIRALRSFNPQLIVCEATGGYETLAVGCLAAAGLPVVVVNARQVRDFAKSIGRLAKTDAIDAGVIARFAEAVRPELRGIKDAASQQLSALVTRRRQIVEMITAETNRLSVACRRSRRDIETHVRWLHKRLDQLDDQIKRDIHSGPMWRTKDQILRSTPGVGPTTSAMLISCVPELGQLNRKQIASLIGVAPLNRDSGRLRGRRMIWGGRGQVRAVLYMSALSAIRHNPLIGQFYQRLRASGKCFKVAIVACMRKLLVILNAMVRDQATWRQC

SEQ ID NO: 253813 - protein, 401 aa, unidentified
MQDTQQRDAVDVFVGVDVGKGQHHAVALDRNGKRLYNKALPNDEAKLRALIAELKTHGRLLFVVDQPSTIGALPVAVARAEGVLVAYLPGLAMRRIADLHAGEAKTDARDAAIIAEAARSMPHTLRSLRLADEQLAELTMLCGFDDDLAAQVTQTSNRIRGLLTQIHPALERVLGPRLDHPAVLDLLERYPSPAALAATSEKTLANRLTKLAPRMGKNLAAEIVQALSEQAVIVPGTQAATIVMPRLAQQLAALRKQRDEIAAEVERLVHAHPLWPVLTSMPGVGVRTAARLLTEVAHKAFASAAHLAAYAGLAPVTRRSGSSIRGEHPSRRGNKVLKRALFLSAFAALRDPVSRAYYSRKVQQGKRHNQALIALARRRCDVLFAMLRDGTIYQPKSALNA

SEQ ID NO: 253814 - protein, 347 aa, unidentified
MRFYTKQHRYYCGIDLHARSMYLCILDPQGEILLHKNMPCTPDLFLKAIAPYREGLAVAVECIFTWYWLADLCSKENIPFVLGHGLYMKAIHGGKAKNDKIDAHKIAVLLRGGMLPMAYVYPPEMRATRDLLRRRMHLMRKRSELLAHIQNTNSQYCLPQFGKKIAYKTNRQGVAEQFSDLSVRKSIEMDLSLIDHYDKLLTEVELYITQTAKVNDVNVFYRLRSVHGIGKILALVILYEIHDIERFPTVQDFVSYARLVKCAKESAGKRYASSGKKIGNVHLKWAFSEASVLFLRGNPAGQKYVDRLTSKHGKAKALSILAHKLGRAVYYMLKREKAFDMNQFFSS

SEQ ID NO: 253815 - protein, 403 aa, unidentified
MISVGIDVSKGKSTVCAMIHPNTIIKESFEVLHTVEEMSMLADYIGSLDGEIRIVMESTGHYHLPVAQFLYQKGFFVCVENAYIIRQFSRIMLHGAKTDPLDAKKLAKYGLAYWSELKPYKFHPSCYTELSLLSKQYQTYIKLLIAAKQNVIHLMDEMLPGFKEALDTASSVQFSKVKYVDFAKEFYHVDMIKSMGKEIFRENYKQWCKEKGYRFQSEKADELFHLAEDGIPTLPTEFPSTRLCMEVATEQVSQLGYALEQILSQMQNLAKTLPEYQTIRQMGGMGEKLCVRFIADIGDVRRFHNGKALVAYAGIDAPPYQSGQYTGTKRRISKRGNSALRKTGYEVMKSLKSHPPKTDTRVYDFIIKKENEGKSKKQAKIAGLNKFLQIYYAKVMEIYKNIV

SEQ ID NO: 253816 - protein, 319 aa, unidentified
MENNAIKFKMIGVDVAKLKLDIAFDDKHIITIDNQKDSFKQLLKLIADATQVCFVMEATGGYEKPLSNFLLAQGIAVCIVNAKRVRDYAKAIGRHAKNDRIDAQVIRLYAEMAQPKQLEQRSTGAHQLEAQMKRRDQLIKQRTMEKQHLEAANDADSIRSIKKFIKAFDKEIERIEVNIKKLIETNKALQDLRKQLTQVDGIGEVTISILMAQLPELGQLSNKQISALVGVAPFCKDSGTMKGRRVVWGGRASIRSVLYMATLSAIRYNKPIRTFYQRLVANGKLKKVALVACMRKLLVILNAMVKIGFEWDPDYVKLI

SEQ ID NO: 253817 - protein, 313 aa, unidentified
MSPNNPTILYLGLDIAKLSLELHLNGRFHSLTNDPKGHAQFLKLLRPFPHAQIICEATGGYEQPVVRVLHAAGVAVSILEAGRVRYYARAQGLRAKTDPIDAAVLTAYGVAFQPTPTAPASPQQQQLADLAQRRRQLIQTVVAERNRSEHYTDKLCVRQNRQLLKLLEKQIQHCDQAILVLIANDAQLAHKAERLKAIPGVGPVVAATVLAEMPELGKLNRQTAAALAGLAPYNRDSGAQKGVRQISGGRRFVRCALYMATLSAVRHDRILKEFYLRLRHAGKKPLVAMTACMRKLIILMNRLLKNNDFHLAS

SEQ ID NO: 253818 - protein, 415 aa, unidentified
MEVLVDRAAGLDVHKDTVTACVRIPKPAGGRDQQVREFRSFTHDLRRLRLWLSEQRVTHVAMEATGVYWRPVWHILEDLPGVELLLVNAHHVKNVPGRKTDVSDAAWLAQLLERGLLRGSFVPPPVIARLRDLTRYRKKLVEARASETQRIQKLLEDAGIKLDSVVSDVLGKSAREMLDALIAGVRDPAKLAGMARTRMRPKIPELRLALEGRFSEHHALMLEMHLAHVDHLTASIGRIDDQVDEVMSPFGDEAQRLQTIPGVGKRTAEVIVAEIGVDMSRFPTAGHLASWAGMCPGNHQSAGKRRSGKARKGDQALRAALCEAAWAAARTKDTYLSAQFRHLRRRFGKKGDNKAVFAVGHSILVIAWHLLANECDYHDLGGDYFAQRNDADARKRYLIRQLEAMGQRVTVESAS

SEQ ID NO: 253819 - protein, 411 aa, unidentified
MEGNMEVVYERACGMDVHKKKIVACLITGQRQSVTKTFGTLTGELQEMVEWLKTERCQMVAMESTGSYWKPLKNVFDLEGMEAIVANAHEVKNVPGRKTDVNDAQWLAKLLRHGLVNASYIPEKDQRDFRDLTRYRNSRLEERAREINRLQKMLEGANIKLGDMISDVTSKSATDLLKLVIKNEKPTIEQIVKARNVHCKSSPEEFMAALTGFISPLQRELFSEVLLIIEEQTRQIERLDAMIEKYTKEEYAKAAAALDAIPGIGWVSAEQILAETGIDMSQFPSADHLCAWAGLSPGNNESAGKRKSGKTRKGNKTLKKTMIQCAASAINKKDSFFHAQYQRLIARKGRNKAVVAVAHSMLIAVYHVLSGKEFHDLGAEYYTKFNKEKKIESHLKQLKKLGWEQPCPVAS

SEQ ID NO: 253820 - protein, 594 aa, unidentified
MTTATALDRIGVGIDTARYGHRVSFLRPDLQPAAQPLTVTEDRAGYQALRHRLEQLRRQHPLVHFHVRIDAAGQYADNLEQFLRDLDWPMTLSVGEPKRNKDYHKAHSPKRTTDDTESRAMARFALVERPPASPEPKRPMTLLREVAGRLQGQVKQATRAANRLHNLLARTFPELAALAGDITAGWVLRLLATYPTAERIAAAHLSSLEEVPHLAGDKARAVHEAARQSVASLRGPVAEALVRNLVDQVIRCHEARRDLERLLTAAWDDLPASPHVRVSTVPGIGPATAAILVAKIVDIERFARPEGLVNYFGIFPQEESSGTDKRGQPRPTGAMPMSHKGNDLVRAYLWNAARSAIRHNPAVRALYRRLRARGRRGDVAIGHCMRKLLHLVYAVWKTDRPFDPRHYPWEPADEGATTTGAGAGATTTSARGPGDGAADEDAVGHKRDEPAGRVVTTASSTVDPMSSAVNTAPPSIPVARPRVDFAFLREQIGMEQVLAQLGLLSRLRGGGQQRRGPCPLHSHPGAADRTFSVHLGKDMFRCFHAECGAQGNALDLWGAVHRLPLYEAALHLAETFGLRRNREEEPVTGTRHPL

SEQ ID NO: 253821 - protein, 388 aa, unidentified
MIYVGIDIAKLNHFASAISSDGEIIIEPFKFTNDNDGFQLLISKLESFDKNSLIIGLESTAHYGDNLVRYLVAGNYKVCVLNPIKTSTMRKNNVRKTKTDKVDTYIICKTLMMQDSLRFVTFYDLDLMDLKALGRFRQKTIKQRTRLKIQLTSYVDEVFPELQYFFKSGLHQKSVYALLKEAPTPEAIASMHMTHLAHLLKVNSHGHFDKEMAQQLRVLAQKSVGASDSALSIQITHTIAQIELLDSQLERVEAEMTDIMKFNDSVIMTIPGIGYINGGMILGEIGDIHRFSTPNKLLAYAGLDPSVYQSGNFQAKKTRMSKRGSKVLRYALINAAHNVVKNNATFKAYYDAKMAEGRTHYNALGHCAGKLVRVIWKMLTDEVEFNLE

SEQ ID NO: 253822 - protein, 465 aa, unidentified
MARKSKNVKSKDHKRLPRSLKTIYANAAGIDLGSREHWVCGPPREDGTPNVERFGTTTPELFRLAYWLKEQGVNTVAMESTGVYWIPLFEILDSRGLEVLLVNARHISNVPGRKTDMLDCQWIQLLHACGLLRGSFRPSDDICWLRALIRERNTMVEQRSDWVRRMQKALDQMNVCVHHAVSDITGVTGMAIIRAIVEGERDPLALARLRDARCRKSEKQIAEELTGNWRPEHLFNLRQALKMYHQLCAVIEDYDAEILTYITKHQPKDAASHPAPAHSSKSKARALAKRGQEPLRQALYGFSGFDLTTIDGIGVDTASVILSELGLDFSMFPDESHFVSYLRLAPNLSISAGKKVPNKFKPTTCTRVSTALRMAALTLRHSKSALGGLYRRIAWRKGASVAIFATARKLAQLIYRLVRYGQAYLDTATEAYDARFNQRRLRFYTKALKEMGYTLQPLTENALTT

SEQ ID NO: 253823 - protein, 371 aa, unidentified
MKNVRFVGLDVHADTIAVAVAEAAGETRSVGVIPNQADAVRRLVKQLGPVERLQMCYEAGPTGYAVYWQLAALGVACEMVAPTLVPVKAGDRVKTDRRDAVKLARMYRAGELTAVWVPDRAHEALRDLVRAREAAKEDEHRARRRLSKLLLRQGRRPPVGVKTWGTKYQQWLHSVRLDHPTQEVVRLDYQHEVERAGERVARLERAIDEAIQNAPAGTRAVIAALQALRGVAQVCAATIVTEVGQLSRFTTPRQLMSYSGAVASEHSSGTRTRRGGITKTGNAHLRRVIIEAAWAYRYRPHVGPVLRKRQAGLPLEVTAIAWKAQHRWCRRYQRLSGRGKCRQQVVTAVGRELLGFIWAIGRHVETAQASR

SEQ ID NO: 253824 - protein, 347 aa, unidentified
MTQYKRIAIDTSKAVFTLHGIDETDRPILRINLKRGQLLPFFRKLPRTEVALEACGGSHHWARELSALGHTVRLIPPQYVKPYVKRGKNDRNDAAAICEAAGRPGMHAVPVKSAEQQGQALVLKVRETLVDQRTQLVNTLRGHAAEFGVIAGKGLTNIAPLLKKIAADTAIPSEAKAMMAVLGEEIERLETRVREMEVRLKHAHKANAVSQLLATMPGIGPITALTVAIDVDPAAFESGRHFAAWLGLTPKEHSTGGKQRMGGISRAGNERLRSLFVLGATSVINATARPGNHCTTAWLMNLLRRKPRKLAAVALANKMARIAWTMLSRGEPYRGVARSEKLAAAVS

SEQ ID NO: 253825 - protein, 371 aa, unidentified
MNSIVYVGMDVHKEQYILCCYSYDTDKVEYKQTIPSDYKLVLKYMEQIRSRYEGEVSFVCGYEAGCLGYSLYHQLKDHAVDCKILAPSTMAITNTHHVKTDKRDAANIARCLAFHTYSEVYVPDNDDNDVKEYIRMRDDQKLYLKKVKQQILAFVLRQGKRFEGGKTYWTIAHLKWLKTLELSDLQREALDEYLLTYEYLTEKISRFDERIEELASVERYEEKVKHMSCLLGIKTHTALSMIVEVGDFERFEKAPKFASFLGLVPSEDSSDTRVNRYSITKAGNSHLRRLLVEAAQSYTRGNVGHKSVALKQRQKGNPPEVIVYADKANERLRRRFYKMTLNKGVNRNVAATAIARELACFIWGMMTEHVS

SEQ ID NO: 253826 - protein, 400 aa, unidentified
MISVGIDVSKGKSTVCILKPYGEIVSKPFNITHTHKDLSELSSMLFRLNDEVKIVMEATGIYHLPVLTYLQEKGFFVSVINPYLMKSYRNESLRKAKTDKIDSRIIANYGIDHWFKMKEFQISGVIYEELKLLGQQYQHYMKLHLLSLAELTHLLDLTMPGIKNLLASWNETNRKDKRSDFVERFWHYDVITSMSEQEFTEKYILWAKEKKYVPSQEKAKVIYTLAQESIPTLPSETSSVKMLVTEAVRVLKEVDATLGLILSRMQEIAKTLPEYSVVREMGGVGNTLAPKLIAEIGDVRRFRNGKALVAFAGIDPPPYESGQFVGCNRKISKRGSASLRKVGYETMRSLKMRSRPEDPVYRYVVKKESEGKSKKSAKIAGLNKFLRIYYARVTELYKNI

SEQ ID NO: 253827 - protein, 332 aa, unidentified
MSNCIGIDVSKATINVHISKNNQDLVLDNNLKSFRTLFSKLKKIYKKEIENIIFIFEPTGSYSEALRKYCSQKQIKCFIINPKQFSNYAKALGVEVKNDIEDARVLSKALTLAKDGQVKVPVFNEDVEHIKELMSYYKFTKKQTTQQKNHLESLTSKDGDKFSIKELKKSIEESIKKEFKIIEQVQTLIDSTDEYRVAYENITSIKGVGQIAGIVLLHLFLKYPEANQRQITSLTGLNPIYRQSGTSIQSGYRIAKTGAVLYRGTLFMATLSAIKHDKNFKAFYDRLKLKGKHSTSAQIAVMRKIILTAHSLYKNNKKYDEDFNSQETSEME

SEQ ID NO: 253828 - protein, 378 aa, unidentified
MARPRTRNNRTYAQRPAPRPANLDRGVVGGVDTHKDVHVAAVCDPLGRVLATAEFVADETGYVALWDWLRAFGDVAAVGIEGCSAWGAGLARFLIAAGVRVIEVDRPNRQVRRRRGKSDTIDAEEAARAVISGRATTVPKAQTGAVEAIRQLRIARRGAIRSRTRALNQLAALIDTAPDALRRELRDLSPTQRVRAAARLRPGPLHSLTAATKIALVSFAKRVEYLADEIAALDEHLTALITDTAPDLLAKRGVGVDTAGALLVAAGDNPDRLRHERSFAALCGASPVQASSGKRHRHRLNRGGDREANSALWRIVIVRMTCDQRTRDYVTRRTAEGLSKPEIIRCLKRYIAREVFNALPKTLVELQEPAPTPLAEVA

SEQ ID NO: 253829 - protein, 350 aa, unidentified
MELATMNTKYVCGIDLHSTKMYVCVMDKEGNIQLHRNMPNDFKLFNRLISQYKEDLSVGVESMHSYYWLADACIEQKIPFYLGHAYYMKAIHGGKKKNDKIDSKKIADLMRSNHLPVGYVYPKEMRSTRDLLRRRTRFMKIRAEAYTHIQTIFRQNCMNIAPKDVKNKKNRRELINRINDYSIQKNIELNLDLIDFFDPKLNKIEREIRAQAKEYDRTTHNLLLTVPGVGDMMSLVILYEIGNINRFESAQKFSSYCRLVKCERESGGKKYRGGNQKIGNAYLKWAIGEIIIHAPTTSPVIKKYYEKLINKHGNKRAKSIMNHKFGVAIYYMLKNKQGFDEKRFVQTEMK

SEQ ID NO: 253830 - protein, 408 aa, unidentified
MLLAGDDWAEDHHDVEVQDQAGRRLGRARLPEGIAGVARLHELIGEHLAGEADPGQVAIGIETERGPWVAALIAAGYTVYAVSPRQVARYRERHGTSGARSDAGDAHALADMVRTDRHQLRTVAGDSEQAQAVKVVARAHQTLIWERHRHMLRLRTALREFFPAALEAYDDLTAPDVLELLSRAPDPVTAARLSRSQITAALKRAQRRRAEERAAAIQAALRTVHLAQPPAVAAAYAATVRSLTSMITAFNAEIAVMEEQVKECFGQARDAEIYLSQPGLGPVLAARVPGEFGDDEHRYATAKNRKNYAGTSPITRAPGKKKTVLARYIRNDRLADALHQQAFCALTASPGARAYYDELRRRGQGHHAALRQLSNRLVGILHGCLKTRAAYQENTAWEPYNQDQQPAA

SEQ ID NO: 253831 - protein, 346 aa, unidentified
MCSLPVNVGMDYHDSFVRVCVRDTDGSEMANGDRANDWKAIADFGDRFGRPVRAAIESCCGAADLAEELVSCAGWSVDLAHPGYVQRMKQSPDKTDCQDAQLLADLVRVGYLPRVWLAPRYIRELRHVVRYRLQLTEQRRATKLRVRALLREQRCHAPEGLNAWTKAWQQWVRQTAELSEQGRWLAEQHLEELKRLAIRIHEVEKRLEHITANDVEVQRLQQQPGIGPVTAWMIRAEIGHFDRFRTGKQLARFCGLSPRNASSGQRQADAGLIRAANPALRTVLIEAAHRLVQYDPSWQKFAQRLRARGKPGSVVAAAVANRWMRRLYHEMKTPSGELAVAVGPAR

SEQ ID NO: 253832 - protein, 391 aa, unidentified
MSIVGGVDIHRKQLTFDYVEQETGRWERGRIAPADRQHLADWLVRFEDVEDVRFAMEGCTGWRYVAEEIRAAGVVPHLAEPAETSALRGRKRRAKTDRADSKLLRELLATGRLPACYIPPSPVLEWRAMLELYHDLRSEHSGWAQRIHATCFHQGTTAPGLAGVVRGDRQLLQKIVEEQLSPVGRLQVNTALAVMQALDEHIDPLRRRLLATARHVHGARVLMHEIYGVGAMTSLALCAWLGGANRFSSSRRAVRFVGLDITVHSSDNKRSPGKLSRQGPEVLRWLLFEAAKTSARGAAPGYGYYTAVVRRPVASRAPPASPWRPRYARLLTRTRPPDDQQRRSGGRQDTGARLPPVRHPPIEVHRSVSTPRRDAGKCAFRPRTDSRLEAT

SEQ ID NO: 253833 - protein, 343 aa, unidentified
MQTITTIGLDIAKSVFQVHGIDAEGNVIIRRQLKRRYVLPFFQKLPPCLVGIEACASSHYWSRELQTLGHTVRLMPPAYVKPYVKRQKNDTADAEAICEAVTRANMRFVATKTPEQQSCLMLHRTRHLFIRQQTAVINVIRAHLAEFGIVAPVGRNGVEQLLDVVADAGDKRLPELARACVAALGVQLQTLKAQILNFDRRIMAWHRSNATSKRLDEIPGVGPALATALVASVADPKAFRSGRDFSAWIGLVPKQHSSGGKDRLGSISKQGDRYLRSLFTAGALAVIRHAKIHGTKRRPWLTALLARRPTKVAAIALANKMARMAWALMAKGERYKEPVAVAA

SEQ ID NO: 253834 - protein, 339 aa, unidentified
MDLGDRHSQFCRLDQESGAILAEKRVPTTAPSFQRCFSGLAPHLFVVESGTHTPWVSRLLRQLGHEVIVANPSKMQAIASSRRKTDERDARCLAQLARVDPELLSPVHPRSEEAQQALAVVRAREGLVRTRTKLINQVRGTVKAFGGRLPASSTSSFARRAQEALPGELRGALEPLVRVIAPLSEEIAGFDREIEAWAQKWPATQRLRQIRGVGALTSLVFVLIIGDPLRFARSRAVGAYLGLVPASRSSGQSSPQLPITKQGDRLLRRLLVQSSHYILGRHGQDSDLKRFGLKLAQHGGKNGKKRAVIAVARKLAVLLHRLWVSEADYVPLYRSFEAN

SEQ ID NO: 253835 - protein, 346 aa, unidentified
MQFYTRQHKFYCGIDLHARKMYICILDEKGEVREHRNIRTDGNVFLQMITPYRENIVVAAECIFTWYWLADLCQKEGIPFVLGHALYMKAIHGGKTKNDKIDSHKIAVLLRGGMIPMAYVYPEKMRATRDLLRRRNHLMRKRAELFAHIQNTNTQYNLSDSFGCIAKPHNRNGIVEQFEHPAVQKSMAVDLEVIRTYDTILTDLERTIIKLANHHDPVSYALVQSIHGVGRILGLVMLYEIEDIGRFPRVQDFASYSRLVKCSHESNGKKYGTNGNKIGNAHLKWAFSEAAILFLKGNDPAKRYFDRLIHKHGKAKALSILAHKLGRAVYFMLKNKEAFDQQKFLR

SEQ ID NO: 253836 - protein, 455 aa, unidentified
MAKQKHQTKKKVQVNALEQINRHAAGMDIGAEEIYVAVPPDQDPESVRSFPTFTADLVRLAEWLKTCQIETVAMEATGVYWIPLYELLEEEGFEVCLVNARHLKNVSGRKTDVLDCQWIQQLHTYGLLSPSFRPPEQIVAIRSLVRHREMLVQYRSAHIQHMQKALTLMNVRLTNVLSDITGVTGLKIIRTILEGERDSQRLAALREPGCKKSEAEIAKSLEGHYKREHLFALKQALELYDFYDQQLKSCDAELQAMYQEFDPPDHPGTPPPAPRTHKRRKNQAYFDLAPALYRLAGVDLTQIDGVDELTVQRVLSEIGTDMNKWPTVKHFTSWLHLCPNNKITGGKIIQNGVQPTKNRASAALRVAASSLKNSDSALGAFFRRMRARLGTPAAITATAHKLARIIYFMLKERKPYHDFGADFYEQQFRARVIRNLSRQAAKMGFRLEPAAQSVS

SEQ ID NO: 253837 - protein, 391 aa, unidentified
MPEDARRPAQAAIRTELRAIFVSLELSRRTWLITSLSPGGGEKMSKHSVPASEVAGLLRRFAELRRKTAARTGRDFPIIVIQEAGLDGFWIHRVLQSEGIESHVVDAASILTSRRRRRAKTDRVDGETLVRTLMAYKRGEPRVCSMARAPTPQEEDRRRVSRERRTLVGERVRHVNRIKGLLAAQGVFGYEPLRKHRRERLEELRTGDGRPLPLRLKAQIIRELDRLELLLEQLKTVEAERDTLLKPATGETASPAAMLARLKGIGPQTAAVLWSEGLFRQFDNRRQVAAYAGLAPTPWQSGSIDHEQGVSKAGNPRLRTTMVELAWLWLQNQPTSALSLWFHERVRRLGGRVRKTIIVALARKLLIALWRYTTAGVVIEGAVMKPTPATI

SEQ ID NO: 253838 - protein, 423 aa, unidentified
MNKQTTTYTAFVGIDWADKKHDFCIRSAHEDDSSKTFGVIPHNPAKIEEWVLSLQEKYGGQLAFAMELAAGPIVYALQKYDFIDIFPIAPSTLAKYREAFSPSRAKDDPTDAELALDLILRHPERFKKLRPQSTEMRSLIALVEQRRKLVQDKIRVTNRIRSTLKQYYPQTLEVFDRIDSFAFCDFIERWPTLDKVKRARKTTLITFFHDHNMRRKDLIEKRIGVIESAMPLTKDKAVIATNSLQALVHVDFLRTILRSIKKYDETIAELAPQHDDYALFASLPGAGPSLAPRLLAAFGEQRERFATAAELQQYAGISPVTERSGQKHWVHWRWHCPTFLRQTFVEWAAQTVNKSFWAGSYYRQQRDKGASHNAAVRSLAFKWIRILFACWKNKKPYNESQYLSALQRRGSPLIANLGVTENA

SEQ ID NO: 253839 - protein, 358 aa, unidentified
MDGSKERPKVTAGVDLGDKYSYLCLIETQSGEVIEEGRLRTTPETFRRRFASEQPPMRIAIEAGTHSPWASRVLEECGHEVLVANARKLRLIYANKRKTDEIDAENLARLARVDPKLLYPLKHRGEEGQAHMAIIRSREVLVSCRTQLVNHVRGAVKSFGGRLPKCPARSFHNKAAEHIPETLWPALGPILEQIGSLTERIRDYERELETISKEHYPETDLLRQVEGIGPLTALTFVLTLEDPYRFEKSRSVGAYLGLVPARGQSGDRDPQKRISKEGDEMLRRLLVSGAHYILGPFGSDSDLRRHGQKIASRGGKNANKRAAVAVARKLAVLLHSLWVSGQIYEPLRNTHRSRGQAA

SEQ ID NO: 253840 - protein, 346 aa, unidentified
MNITTIGIDLAKNVVQVHAVDPRGKTLLRKQLKRGQVSQFFVNLPPCLIGMEACASAHHWGRVLEGFGHTVRLMAPQFVKPYVKTNKNDVADAEAICEAVTRPNMRFVPIKSVEQQSVLSLHRVRQGFVKARTAQANQIRGLLGEMGLVIPKGIRFIAQRVPALLEDASNELPLAFRQLIERLTCHLTVLDAQVDAIHEEIVAWNRDCELSQKLQKIPGIGPLSATALVATIADARSFKNGRQMSAWLGLVPRQKSSGGKPTLLGISKRGDAYLRTLLIHGARAAIRAAKCRIKGHENSWLAKLLDRRHANIAAVALANKNARTAWALLAHGREFDPSYAALRTVA

SEQ ID NO: 253841 - protein, 351 aa, unidentified
MTHQSTPERIATIGIDLGKTTFHLIGMDARGRIVLRRKVSRGQLLSCLGNLPVCRIGMEACAGAHHVGRQLAALGHDVHLLPAQYIKPFLKGHKNDYRDAEAIAEAVQRPTMRPVPLKSAEQLDLQSLHRVRSRLIGQRTAVINQIRGFLLECGIPVRKGPAGLREALPAILAQRTDVLSPRMIHLIEDLAGDWRYLDGRIETLTRDIADLARQDAGCCRLMGIPGVGVITASAMVAAVGTGAAFAKGRDFAAWLGLVPKQISTGDRTILGGLSKRGNRYLRTLFVGGAQVLLQRPNQWQGHRFGRWLQAASARLHRNVLAAALANKLARIAWSVLYRESGYEVEFAIRAA

SEQ ID NO: 253842 - protein, 345 aa, unidentified
MSKHVVNGGDGNALLDLLARLKGEAERRIDVPVKIVVIQEAGLDGFWIHRLLVANEIESHVVEAASIAVPRRHRRAKTDTVDGEMLLRTLKAFKRGEPRVCSMVVPPSPHEEDQRRLSRERQTLIKERIEHSNRIKGLLAAQGIRGYRPLRRDCRDRLNDLKTGDGRALPPWLKAAIVRELDRLELVKRQIKAVEIARHELLQSATTNATVSPAKLLMDLKGVGPAFATVLWLEGLFRNFTNRRQLAAYAGLAPSPWQSGDTKREQGISKSGNPRLRTTMVELAWLWLRYQPDSALSQWFQARAQHERGRVRRILIVALARKLLIALWRYATKGEMPQGAILKTA

SEQ ID NO: 253843 - protein, 346 aa, unidentified
MCSLPVYVGLDYHDSSVRVCVEDTDGSELGNADRANDWKTIADFGDRFGRPVRAAIESCCGAADLAEELVSCAGWSVALAHPGYVQRMKQNPDKTDCQDAQLLADLERVGYLPRVWLAPRYIRELRHVVRYRLQLTEQRRATKLRLRALLREQRCHAPEGWNAWTKAWQQWVRQTAELSEQGRWLAKQHLRELARLATRIRQVEKRLERITANDVEVQRLQQQPGIGPVTAWTIRAEIGHFDRFRTGKQLSRFCGLSPRNASSGQRQADAGLIRAANPALRTVLIEAAHRLVQYDPSWQKFAQRLRARGKPGSVVAAAVGNRWMRRLYHEMKTSSGELAIAVGPAR

SEQ ID NO: 253844 - protein, 313 aa, unidentified
MKEAERVYAGVDISKSSLDAAVSRGGEVMSFKNSDEGIAGLVSYFKGFTLELVVMEATGGLEKMVAASLTEAGIAAVVINPRQARDYAKAMGLLAKTDTLDARTLARFAREIRPHVRPMPDETTLKIKAAMARRRQVMGMITAEKNRLHGTDLSVRPLIEAHIIWLSGQLKEIDRNLDSQIKNSPIWQAREKLLRSVPGVGPVLSRTLMGLLCELGEMNRKQAAALVGVAPYNRDSGTLRGKRAIQGGRTAIRSPLYMGALVATKCNPVISAYYQHLLDVGKSKKVALTACMRKLITILNAILRDNRPWQYAG

SEQ ID NO: 253845 - protein, 470 aa, unidentified
MHLLGICARVCDQPFLFPHSLQFWKVGPMHCFAPVSTACLVFVGQNRNYIHPLRKGHFMKPYVLAVDVGKGKSKIGLFGLDTATMRTTKIMKPRDFRHSFEDLDAIGKFIGDIPMDQIGIMMESTYVYQNPVVEYFRRKGFDEITVINPLKIKKTCGDIQKVKTDKIDCGRIAAYYYFSQWEKPLDVSQGQREARELSRHLDTLQREATAIRNRIRQHLSNVFPELEKIGDKKKGFFNVGFLNLIEKTPHPLSIMKKTKAGIISVMAGKGRKDPSYAEYAALIIEAAKTSLFSAPEGGIESRLILPNLVRRLRDLQEQIKDGEDMLESMTKEMPLFAVLQSFDGIGKRIASHLTAEIWSTEQYATPQKLIASAGINPARNQSSVSVDRYGKIVKAGNRYVRHWLFIAIGCIVEQNGARRGDKRIAEYYIKKHSSEGNHHYVATIACANKLLRQVFYHSRDLAKTGSLVEK

SEQ ID NO: 253846 - protein, 355 aa, unidentified
MSQEKYIGLDVHQATISAAVMDAHGKLLMECLLETRADTIVEFIQGLHGTLSLTFEEGTSATWLHALLKPHVHRLVVCDPRKNALLKDGNKSDRVDARKLAELLRTKQLKPVYHEEHGIRALRELGRSYLTLTKDVTRVMNRIKALYRSWAIPCSGTKVYASRHRAAWLDKIVEPGVRLRAEHLYQQLDSLQPVRLRARQELLRESHKHPAVKLLRQIPSIGPIRAALLVALLQTPHRFRTKRQLWAYSGFAVETHDSGEYRYVGGKLQRNHERITVRGLSDNHNKDLKNLFKSAAISASTRPGPLHDFYAALVAKGMRPTMARLTLARKMATITLTMWKKGVSFDPQQLHRQAA

SEQ ID NO: 253847 - protein, 342 aa, unidentified
MEYYAGIDVSLEYSSVCVVDGTGKIFREAKVASDPAALISWLKSLDYGLSRVGLEAGPLSQWLYAAIREAGLAVELLETRHVRKAFEAMPVKSDRNDARGIAQLMRLGWFRPVHCKSMDAQEVRAVLTARKLVQTKCQDVENSLRGILRGFGLKVGKTTDKSFAGRIRELVQGHPSLEAVGEALLSVRAVLLKEFNAFEKRVRAMVRSNAKARLLTSTPAMGPIVTLTYASAIDDPARFKSSKDAGPHFGLTPKKYQSGETDYSGRISKIGDAAVREALYQAAHVMLTKPLKGCSQLKSWAMRIAKRAGMSKAKVALARKLAVILHRMLANGTPFNPAASAA

SEQ ID NO: 253848 - protein, 334 aa, unidentified
MEKITTAGIDLAKRVFALHGVDGAGRVGLRKTVRREQLMQTVAALPPCLIGMEACSGAHEWARRFQELGHTVRLMAPVFVAPYRKSGKNDGNDAEAICEAVSRPNMRFVPVKSAEQQAILALHRVRQGWIGERTATINRIRALLTEFGVVLPNRAQHVRRDAMAAAEGLPALARRALEDLRSHLGALDERIGAYDRELEAQARASDAAQRLMQIRGIGPITAVAIVATVGNARDFESGRQFAAWLGLTPRQHSSGGKQRLGHISRRGDAYLRCLLVQGARSVLYTAMRHRDRLSRWVCTLRARRGDHKTLVAIAAKNARIAWALLAKNQTLQTV

SEQ ID NO: 253849 - protein, 430 aa, unidentified
MNINTNMKNPDNPNDYAAFIAIDWADQKHVFSLEVAGQTTKETGTLEQKPEVIGPWVAKLRERFGGRPVAIAVEQSRGALIHALLSYDFIVIYPLHPSTVAKFREAFKSSGAKSDPLDTDQILQILTKHRELLKALNPDTEETRLLARLVEDRRKAVDLRTSQVQALSAALKEYFPQALELVNGNLTSRLAGDFLIRWPTFQAFQQAKPSTIKRFYYGHNIRSPEVMEKVLGLATTAQALTTDSAIVESGSRLSQMYAQIIQTLNPVIVDYDGRIEKVFHAHPEAHLFCKLPGAGPGLAPRLLSFFGTDRSRYEAAGNVQSFTGIAPVTKSSGKSRVVYFRHACPKFDRQTFHEFARLSIAKCQWARNYVDYYTAKGKKFHTIIRALAFKWIRILFRCWKNRTPYNDMKYMETLKKRGSIFATFHLEQKG

SEQ ID NO: 253850 - protein, 402 aa, unidentified
MNAVGIDVSKGKSMVAIMRPFGEIVSTPFEIKHTASDIRSLVELINSVEGESRIVMEHTGRYYEVLAHQLSEANLFVSAINPKLIKDFDNDSLRKVKTDKADSVKIARYALDKWQNLKQYSVMDELRNQLKTMNRQFGFYMKHKTAMKNNLIGILDQTYPGVNTYFDSPARSDGSQKWVDFASTYWHVDCVRKMSINAFIDHYENWCKRKKYNFSKSKAEEIYGKAKELVPVLPKDDITKLIIKQAVDQLNSASITVESLRTLMNETASKLPEYPVVMAMKGVGTSLGPQLMAEIGDVSRFTHKGAITAFAGVDPGVNESGSYEQKSVPTSKRGSSDLRKTLFQVMDVLIKTHPQDDPVYQFLDKKRAQKKPYYVYMTAGANKFLRIYYGRVKEYLASLPES

SEQ ID NO: 253851 - protein, 461 aa, unidentified
MKKPKKPKNPKKPNKKSQLPQHLQQLNLYAAGIDIGSKSHFVAVPEGADEQPVREFECFTADLHRLVDWLISCGVTTVVMESTGAYWIPLFEILESRGLEVKLVNARHVKNVPGRKTDVSDCQWLQQLHTYGLLAGAFRPPEQVCALRAYVRHRMNQVRYCASHIQHMQKALIQMNLLLHNVVSDITGVTGMRIIKAILDGERNTAVLAGMRDRRCKNSIETIAKSLEGNYRPEHLFSLKQAVETFEFYQTQIAKCDHEIETLLASFDAQSTDNPPTHPNTNDNSTSSKAKGEASAFNLKDELIRIAGVDLTKIDGIDSTTVLKVISEIGVDMNRWKSEKNFTSWLGLSPGNKVTGGKRLSGKTKPVVNRAAAALRLAASSLYRSSCALGAYYRRMKARLGAPKAITATAHKLARLIYSMLKHGTEYTDVGQDYYEQQYKSRAIKNLKTRARQLGFELVET

SEQ ID NO: 253852 - protein, 356 aa, unidentified
MSIVAHAHPFVVGVDTHARNHVYAILDATNGALLDTQSFPTTTAGINRAIKWIARRTNADADTLWVIEGAASYGAILAGTVATHGFPVAEAPRMDAKKRRGVGKSDALDAHQIAMAVLPLPVDKLRRPRLHDGVRQGVRILVTARGSMSKDRTRSVNALNALVRGNDLGIDARQKLTGAQITEVSKWRSREEELALSIARAEAVRLAKHVLALDEQLTANENQLDELVKVSDAAPLLEETGFRAISAAKCLAAWSHEGRVRNEAAFASLAGVNPIPASSGNTVRHRLNRGGDRSLNSALHMVAVVRMTHDGETRQYVAKRRAEGRTDKEIRRCTKRYLARRIYRTLSAAAIAINAA

SEQ ID NO: 253853 - protein, 490 aa, unidentified
MAARKKSTFERLHSKRMTRQQRRQLQRQFDADSPELIAVHPDAAGIDIGSESHFVSVPPDRDQEPVREFGSWTADLHRMAKWLKDCGIKTVAIQSTGVYWIPVHDVLEKEGLEPYLVNARGTKNLPGRKSDVQECQWLRKLHTYGLLRKSFRPVEEIRQVRTIWRLRDRVVKDAGRAVQHIQKALTTMNVQLANAISDISGVTGMAIVRAILQGQRDAHELAKLRDPRIQASEEEIAHSLEGNWQPDVLFELQQVVDAYDFHHKQLAGIDDELQKYLSARPTREPVGEASVKIDTSQLPAKQRKKMNTKLKATRRQKDNRPAFDLGDELARLMGVDLRIIDGIDVMTAQTIYSELGPDLSAFPTEDAFASWLELVPRDDITGGRKVKTRKRRSNNRVTTALRNAAETLVRSDSYLGARYRHFTARLEGLKGVKAMAHYLACLVYRLLTKGPAWVDRGAAYYENKRRERELVGLHRRAAAMGMQLVPTAKA

SEQ ID NO: 253854 - protein, 453 aa, unidentified
MARKRKKESKGNSAVLPVMRPDAAGIDIGATEIYVAVAPDRDVQNMRSFPTLTQDLYVLADWLKQCGVKTVAMESTGVYWIPLFQILEGRGFEVCLVNARHVKNVPGRRTAVSDCQWLQFLHSVGLLRASYRPEQEVCAVRSLLRHRESLVQMAATHVHHMPKALDQMNLQLHHVISDITGLTGLAIVDAILAGQRDPSALAKLRNDRIKASEEVIAKSLVGDYRPEHLFTLRQSLAAYRSYQKLIEDCDKEIRQSLDEFKPPTAPAPKTDVSTDAKGKPQSNDGVLRNELKRVFGVDLTKIPGIRTGIAQTLFGEIGPDFTKFRSASAFASWMGLCPDNDISGGKVLWTGTRKVKCRAATALRMAAQSLHHSKSALGDFYRRMRAKLGAPKAITAAAHKLSRIIFHLITTRQEFDDSRFAAAQLRYEKRQEAKFRAKAQALGFQLIPIPQAG

SEQ ID NO: 253855 - protein, 351 aa, unidentified
MSHKTAATVAHTIGIDTGKNTLHLIGLDDQGAIVLREKIARGRIAARLANVPRCLIGIEAGMATHYVARELGALGHDVKQVPPAYSKPFRQGHKNDFRDAYAIAEAVQRPSTRCVPVKTDDQLDLQALHRVRSRLVGQRTAVINQIRGFLLEHGIAVRQGLRFLRQQLPDILAQRSDVLSPRMIRIMEDLSGDWRRLDERIEHITKEIEVLAGTDVNCGQLMTVPGIGPIIASATVAAIGNGAAFARGRDFAAWLGLVPKQMSTGDRTILGRITKRGNRYLRMLFVQGARAILLRPKSWVKHSFGPWLTTAARRLHRNILTIALANKLARIALSVLIQGRSYETRIVPAAA

SEQ ID NO: 253856 - protein, 345 aa, unidentified
MIIGCDFHPSWQQIAWLNTETGETGEQKLVHAAGDAKLFYQQLAAPVLIGMEATGNSQWFLELVQDLGHEIWIGDAAQIRASYVRKQKTDKRDAAHILKLVVESRFPRLWTPDREQRDLRQLVLHRHKLVEIRSRVKNELQHLSLNKGIQRKAKLWSQAGQKLLRELPLKPWAACRREDLLGLLAMLHQQIGKLDQAVQQAADEHPQAQLLMTQPGVGPNTALAFVLTIGDVSRFPRGKQVASYLGLIPREESSGGRQKLGAITKQGNRLVRSLLVEAAQIAVRFDPGMKKQYLHRCHQKPKGVAKVAAARKLAVRLYWMLRTQKPYPEIVRIESSPRVPRVGAS

SEQ ID NO: 253857 - protein, 334 aa, unidentified
MLYAGLDIHKAVFQVVVLDPDSGELCESRFEPSRARLADWAMEWQGKLAAVAIEATTGWRWVARELEQHGFEVHLVDPGRASALRGRRRQPKTDRLDACWLALLLARELLSECEAWLPPAEIQRLRDRTRLRKALAGERTGWAQRLHALLAHEGWPCARGRLLTREGSRWVAALELDAHVRGQVDVIVAVMAALEEQLELVESELRRFARADQRCQALQTIFGVGPILACDLLAEIGDVRRFQRPGQLVRASGLDPAVIESADSKRRGRLAKQGSRQLRWALVEAANHSHRRSSPDHALYSSTVRRCGRGRARLTVARKIARRSYHVLLAAEAA

SEQ ID NO: 253858 - protein, 339 aa, unidentified
MMIAVGVDTHKHQHLAVAVDALGQLLAEITITATLAGYRELLAWLAALEGEIRVGIEGAGSYGAGLCEYLQDNAITVFEVERPRRRERRTGKSDRLDALLAAKKVLGDDGLSTPRGHGKRLALQMLLVAYRSLISERSRLYNQLQALHVGAPATLRERVGPAKNGAKLAQRLTGMRTRPNASLQENTTLQVLRDLANRTRALDQQAQDYTRQIDALTRELAPALMDEPGVGPICAAKLIAFNPARFKSEAAFARANGTAPQPASSGKTVRHRLSRGGDRQINTAIYTIALSRSVHHAPSRAYIQRRIEEGKTKREAMRSLKRYLSRDLYQHFTKTPLTT

SEQ ID NO: 253859 - protein, 391 aa, unidentified
MISVGIDVSKDKHDCFIVSSEGEVLADVFMIPNTMDGFRSLLQRIWECCDSQDKIKVGLEATGHYSYNLLGFLLDNGLPTYVLNPLRTNLYRKSLSLRKTKTDRVDARTIASMLLSDAGLKPYTDTAYHNEELKSLTRYRFDKVKERAKLKGSIARLVCILFPELEKLVPSLHFASVYALLEEFPGAKQIAAAHLTRLKALLETASKGRYKRDTALEIRDAARNSIGSWMPAKSLELQHTIRLIRELDNEITEIEEQIQTIMDELNSPITTIPGLGFRMAAMIFAEVGDFTRFDSPDKLLAYAGLSPSTYQSGQLKNCYPHMEKRGSRYLRYALYNATKYVCHWDPTFAAYLAKKRAEGKHYNVALSHATKKLVRLIFAIEKSRQPYCSAT

SEQ ID NO: 253860 - protein, 329 aa, unidentified
MTAKMINTNEGYVVGIDVAKPKLDVALRLPEGKWRNKVVVNSASGFKALVEWLTKQGASSAHICMEATGIYWEGVAEYLSDAGFAVSVVNPAQIKAHAGASGVRTKTDVVDAKVIGDFCFRHAPALWQAPSPAIRTLRALVARREALVSLRTEESNRLLVAHESVRESIQKILEHLDEQIAMIEKQIKQDIDNDPTLREQRQLLESIPGLGKVTIPTLLSRYGGPLRFEKAKQAVAYAGLDIAHHESGTSVRGRPRMSKTGPSKLRRALYMPAVVCMSHTAWGKAFTKRLVEAGKPKMLILGALMRKLVEMAYAILKSGKPFNPALHGA

SEQ ID NO: 253861 - protein, 386 aa, unidentified
MRKPNDLSRSLSVLNRNSTLIAVIEMSQSSWLIAGIVPGVERQPLKKLAVDESALLKILHRWREEAEKAGHKIERIAVAFEAGRDGFWLARWLRARGIEAHVIHASSVAVSREHRRAKTDRLDTELLKRAFLGWLRGERDHCKMVAIPTTKDEDAKRPNRERESLVGEQTRIVNRMKAALIRLGIRGFNPKLKKAVERLEGLRTPEGEPMPPNTLAELKRDMERRRLVRNQIREIEKTRLERIEQAPSDGPHVMVRLLARVIGVGVETADMLVQEVLIRNLRDRRAVARYGGLTGSPDESGKKRREKGLARSGNARVRRGMIQLAWRFLMFQKDSALAQWFYARTKNAPQTRKTMIVALARKLLIALWRLVREGTIPEGIVLRPAS

SEQ ID NO: 253862 - protein, 428 aa, unidentified
MKFKQINGQNQRIERISPTQLVVGIDMAKEIHVAEATNFRGIVLAKRHLTFKNAIEGYEKLQRWMDELQQKHRLKTVIIGMEPTGHYWWNLANWLANKGLNVVMVNPATTKRNKENRDNSPSKSDPKDALVIADVVCRGYYYDYTRQANVFQRLRTVMSDREFWVTHSVRLQNRIIRWLDIRFPEYTSVFKDWTCPRSLATLKEFPSPLDLKSRSVSEVITGWREHMQRAGGSTGMEKAAQLIAQAKKSVGDTTALSEAKQDLERLLEEYERIVETLEKMEQELLALLGEIPMAKQLRSVKGLGTIFIAAILSGAGDLKQYAHGRQLLRKAGLNLAESMSGKRKGQIVLSKRGDAKLRKYMYLATITLVGTNPVFRQMHENNVQVKKMKKQQSIFKLLGKLARILIGIVQRGETFSPEKASAVFTDAA

SEQ ID NO: 253863 - protein, 349 aa, unidentified
MTIVGCDLHTRKQQVAVLHTDTGEVVEQELVHAGDAVEQFYRTLPRPVTVGIESTGYALWFHELMQRLGHTLRVGEAAKIRAMVVRKTKTDRRDAQHLLDLLKHDRFPAVWIPDPATRDLRALVTHRVRLVRIRTMVKNGLQAIALNRRLALGSTLWSQRGRAQLVALALPPHTAQRREDSLDLLAWLEVHIAGLDARIAAAADAHPGARLLLTHPGVGALTALTTVLVLGPTARFPGSKHVVSYVGLAPAVSASADTCHLGPITKQGSALLRWVLGQAAPLAARADDDLHRVYRTLIHRRGRPKARVAVARKLLVRLFIMVRDQIDYAEFRRRGCLPPPRQPVLPTRA

SEQ ID NO: 253864 - protein, 346 aa, unidentified
MKVTRVGIDLAKDVFQIHGVDSQGKTVLRRKLRRSEMMKFFKERPACLIGLEACASSHHWARQLSELGHTVKLIAPQFVKPYVKGNKNDANDAEAICEAVGRPTMRFVPIKTVEQQNIQALHRIRSELVRQRTAKVNQIRGLLGEYGIVARQGVAVLRNALPEILEDAENGLMSDFRALLAGLREDLVYLDERVMTLDQTINTLANSHSDARRLLKLRGVGPITATALIASLGDGHLFTRGREASAWIGLVPGQHSSGGKDRLLGISKRGDAYLRTLLIHGARSAIRAAKGKEDSLSRWVQNLCSRRNKNIAAVALANKTMRMAWAILKSGADYQADYRQARAQTA

SEQ ID NO: 253865 - protein, 323 aa, unidentified
MAVVVGVDIAKRSFDLAVLQSNGKYRTKGKLSNDQAGFAVFADWLQQHAEPGAWIVMEATGIYHESLAEHFHALGYRIAVLNPAQIARYAQSQLQRSKTDKLDAKLIATYGQRHEDSLRAWHPEPVSIRTLRALTRRLEDLQSLRQMELNRLEISPEKVQDSIRAVLQRLDEQIAWTLEQIKRHIDDDPDLRGKRDLLVSIDGIADKTAALILAELGDIDRFADARAVTAFAGLNPRLQESGLARGHTCISRMGSVRLRSALYLPAVVALTYNPAIKAQAERLKARGKKGKQTVCAAMRKLLTIAYGVLKSGKPFDPALAIAH

SEQ ID NO: 253866 - protein, 357 aa, unidentified
MGRMRYVGVDVHKNFCQYAMMNDAGHIVEEDRFPSNDEGMRSFVSGLVGCDDVRVVMESTGSLWTKLYDMIEEHGLEAVLSNPYKTRLIAEARTKTDKLDARILAHLLRADLIPRCYVPSKEVREVRSLVRHRAKLSKTRTEVKNRIHALLDKHRLRAPCGELFSKEGLEWLKGLKLSSVDDAVLKSDLGVLKVFDEQIGYVESEIASVALKDSNVELLITIPGIDFYSAMVLSSEIGSIGRFSADKKLVAWAGMAPSLRQSGSVLRVGRITKEGNKMVRWIMVQAALNAIRSDARLRVFYERYRSRKGHQKAIIAVAHEMLRIVWFMLKRKEPYRDENKRLSLRKHNRMSRLAMVG

SEQ ID NO: 253867 - protein, 356 aa, unidentified
MRNITRVGVDLAKNVIQVHAVDAAGKVVTNRALKREKFLAWCADLPAGCLVAMEACSGAHHWCRQLRERGFDARMIPAQFVAPYRIQGKSGKNDANDAAAVCEAASRPHMNFVPPKTLPQQGMLCVHRLREALKEERTACINRIRGLLAEFGVVLPQKPAILRQHLNEVLEDASNDIAGMARLVLQRAQEHWRELEIHIQWCDERIAAHQKDDEQVQRAAELKGVGIITASAVVATVGDFKQFKNGAQFGAWLGLTPKQNSSGGKTSLGSITKRGSNYLRNLLIQGAKSVVLVGKYNDDPISQWAQRLRERCGWQKAAVALANKNARILWAVMTGSKRYDARHVSVPPTGSMPATA

SEQ ID NO: 253868 - protein, 419 aa, unidentified
MKVEYGNVAEDAVWAGVDTHAATNWLSVVDARGSELFSGEFATDPEGYRKLCDEIRRLGSPVAAGVECTGTYGAGLVRAMAAYGIASYEVITPGRPRRGPGCDKDDAADALRAAKQALSGENLAVPKSQDGWVEEVRNMTVAREELVKQCTSLANLALATVRKGPDEIRARLERLGTAKMMGVLAGWDEAEADPICDAVMFSLAALGRVWAEARRSARLLEERIERTLKAGNPALASMYGCGPISAAMLAIAAGDNPERMGSEASFAALCGVSPIRASSGKVERHRLNRGGNRNANKALHIIAMHRMRTDPRTTEYIERRRAEGLSDREIRRCVKRYIAREAYRLIMHPYDVPIEGKGPEMRAERIASGVSQKDAAIALGVTASTLCDLELGHHQFRELALRYRQWIDDGFPSEAGIAS

SEQ ID NO: 253869 - protein, 342 aa, unidentified
MKDMMIGVDLAKAVFQVHGAHRTGEVQFRKKLTRKQFPAFMAQQEPCLIIFEACGSAHYWAREMEALGHEVKLIAPQYVRPFVKRQKNDAADAEAIVIAARQPEMRLKARKTVEQQCRAAVFRGRERLVHQRTADVNALRALLYEHGHVFPAGILHLDRMTALMEDEASDLPALIREECRDLLAQIAEKTARIIERTTKLKMLAAQSDRARRLQTMPGVGPLTAIAVEAFGPDMAEFKTGRAFAAWLGLVPKQHSSGGKERLGRMTKAGQADIRRLLIIGAMSRLNWLGQRTITEGSWLARMLARKPKMLVAIALANKMARQVWAMLMKNEDYKDPALAVAA

SEQ ID NO: 253870 - protein, 391 aa, unidentified
MNQLIKYVIGIDVSKDKLDACLISVDVQLNYKVKATHKFNNALSGFKELLQWFSKFCKEKVPAQTLMEASGVYHEKLAIWLTEREMEVFVVLPNKARKYMQALGLKTKNDKIDAQGLALMCAQHKFDKWQPVVKFYYELRLLTRHYQSTQELKTSLMNQLHALEYSGYPSKQVSKQLEKTIAFFKKQIKESKQQIAEHINSNDEVKRKVTQICKIKGVDTLTVATILAETNGFELFKNQSQLISYAGYDVIENQSGNHIGKTRISKKGNSRIRRILHMPAFSVVTHKEPIFLNLYERIYSKTKLKMKAYVAVQSKLLVIIYSLWKKDEEYNKDYHPKTTSGNDESRGLFRLSAEINDENLIKKVVLPESSTTRDELQYNESPEVLFRLVQT

SEQ ID NO: 253871 - protein, 337 aa, unidentified
MMYSGIDLHSNNSVVAIIDDADRIVAQKRLPNDITKIVGFLARWQDDLAGVVVESTYNWYWLVDGLQDAGLHVHLANTAAIKQYDGLKHSGDETDAQHLAHLLRLGILPTGTILPREHRVVRDLARKRMQLVNCRTTHVLAVENIMARQLGERMTSNQIKQLTADTIDSLPLAADVGLAIKANVAVIATLQSQIEVLEKRLQERVKPRPQYGLLTSVPGIGQTLATVIFLEAGPIDRFADVGNYASYARCVDSVHTSNRKKKGEGNVKNGNKYLAWAFVEAANFARRFCPEARRFHERKKARTNNIVATKALAHKLARASYHILKEGKPFDITRCFA

SEQ ID NO: 253872 - protein, 402 aa, unidentified
MNAVGIDVSKSKSMVAIMRPFGEIVSTPFEIKHTASDIRSLVELINSVEGESRIVMEHTGRYYEVLAHQLLEANLFVSAINPKLIKDFDNDSLRKVKSDKADAVKIARYALDKWQNLKQYNVMDELRNQLKTMNRQFGFYMKHKTAMKNNLIGILDQTYPGVNTYFDSPARSDGSQKWVDFASTYWHVDCVRKMSLNAFIDHYQNWCKRKKYNFSQSKAEEIYGKAKELVPVLPKDAITKLIIKQAVDQLNSASTTVESLRTLMNETASKLPEYPVVMAMKGVGTSLGPQLMAEIGDVSRFTHKSAITAFAGVDPGVNESGTYEQKSVPTSKRGSADLRKTLFQVMDVLIKTHPQDDPVYQFLDKKRAQGKPYYVYMTAGANKFLRIYYGRVKEYLSSLPES

SEQ ID NO: 253873 - protein, 409 aa, unidentified
METIVERPAALDIHKAQVTACVRVPGEGRAREQHVAEFSTTVRGLLTLRDWLAAHRVTQVTMEATGVYWKPVWAILEDEFECLLVNARHVKQVPGRKTDVSDAAWLCQLAEAGLLRASFVPPKPIRALRNLTRYRKTQIQERAREANRLHKALEDTGIKLDCVATDILGVSGRAMLDALINGTTDPEVLADLARGRLRAKLGALREALQGRFDHLHTVWIGAILAHIDFLDEQIAGLTETIGEQIAPFEPAVELLCTIPGVHRRTAECVIAEIGVDMSVFPSAKHLASWAGLCPGNDQSAGRRRSGKTRNGSKWLDWALEEAALAAVRTKDVYLAAQYQRLRPRRGHKKALGAVKHSIICAAWYMLTTGELYRDLGGDYYQRRDPEKTTKRLIAQLERLGHTVVLQEAA

SEQ ID NO: 253874 - protein, 309 aa, unidentified
MSMQRFVGIDVSKAELAMHVLPDGLAWTQANTPEGRACLAERLAAMGCERIVLEASGGYEQAVLQALTQAGLPAVRLPAHRPRALAQALGLKAKTDALDARLLAVAAQCIHAQPTAVLPAPLQALRELLHLRSTLVTQRDAQRRCLEHVTCKAVRDQWLQVIALLQQRIREVSRQIARAGAACSDLPKLPGLGPILRATLAARLPELGTVPARKIVALVGLAPFNRDSGRWRGQRRIQGGRADVRRVLYMATWASIRTGSPLAHTYARLTAAGKPAKVAIVACMHKYLRWLNAIARDRAPYAPPAIAAA

SEQ ID NO: 253875 - protein, 317 aa, unidentified
MTPTTPSVYIGIDVAKATLQMHLQGRQSELENTPAAHRKLGAQLHALPGAHVVCEATGGYEQRLVQALQEAQVRVSVVNPGQVRAAAQAKGQRAKSDPIDAAQLTDYGQRYQPQPTPPVSAVQRELIQLTNWLKQLIDTRARAKVQSEHLDNSYVLKKHSLLIDFYDKQINDVETQIGQLMAQDPQLKARLECLDAIAGVGFRTAVVVLAHMPELGTLSRQAAGALAGLAPYDRDIGTIRGARCIAGGRAEIRQALYMACLNSIRNNPVLAAFFKQLTARGKPGKVALTAVMRKLVVYMNSLLKALPPVPTGTATKS

SEQ ID NO: 253876 - protein, 388 aa, unidentified
MRNIGLDLGAKKISFCEVQDGKVVARRTVSSLAGLDDVLGVDAPKARVAIEACREAWHVHDELVRSGHEVKLVDTTRVKKLGIGQHGRKTDRIDAEVLARALESGHIPEAHVLSPHRRSLRTHMMVRRGLIEMRTQTVTTIRGIVRASGQRVGACTTETFVDHYRERDLPDAVRAVCEPLVQVLATLEPQLDEIDRKISQLAKHEAMTAFLMTAPGVGLMVAAMFVSVVDDAKRFTKAHQVESYLGLVPSEDSSGGKRRIGAISKHGNSYLRALLVQAAWTILKGRPASEAETPRLSDPLRTWADAVAARRGKNVAAIALARRLAGVLWAMWRDGTVYDPEVVGRASAIGKTLEAQSSHQQAVAITRATRKAKRYLRGPAATTVEVSA

SEQ ID NO: 253877 - protein, 369 aa, unidentified
MKHSIIFVGLDVHKDSITIALADGGRNGEIRSHGTISGDMASLDKAIRKFHRSGIELRFVYEAGPCGYEVYRHLTAQGFPCEVIAPSMTPKRSGDRIKTDRRDAITLARLSRAGELTPVYVPREDDEAMRDLVRGRDDAIKATRHARQRLSAFILRHGFRYSGGSPWRVAHLRWLADIKMPHPAQQITLQEYIHSVEECTERIDRLTEQVLKLLPTWRMAPVVTAFQSLRGVAPVVATVMVVEIGDLRRFENPRQLMAYLGLVPSENSSGQTTKRGGITKTGNGHARRALIEAAQAYSFPARVSRALRKRQEGLSREVKEISWKAQVRLCGRYRKLIARGKNRNRTVTAIARELAGFMWAIAKVVPMPA

SEQ ID NO: 253878 - protein, 511 aa, unidentified
MISKVIHHRGQRCGQSARISKVVKNFAGRYDEAGEQLAKAETRLVVPHPARVTRRLPTPPKAPGPSAKRTPPLEGSNIRSRPPQVPAPLRAARIMNPNWNQHSYFAALDWAKEHHDVVVVDQVGTVVADFQFAHTAEGWEEFSEKMQPFGKCPMTIETSAGLAVDQLLQRGYPLFPVNPLAAKEYRKRKAPSGTKSDRHDAWAEADALRVDGHTWRPLLPQDEATATLRLLCRDEIALIETRTALVNQLEAALTDYYPLALESFEEWAKPFAWAFVKAFPTPAALKSAGKRKQQSFLHRHKLWRPETATQRLEAWERGQQLQPSPAVINAKSLLALSLVNVLEALQRQIQEYRSRITQAFAQHPDHDIFGSLPGAKQHLAPRLLGLIGAVREVFPDADSLMCQAGVSPVGYESGKLRKAHLRFVCDHFLRHTVHLWVDETRKTSHWSQAYYQTKRDQGQDHASALRCLGKRWLKILWRMWREHTVYDESVYLKALEQHGSFVWKTLQNQLA

SEQ ID NO: 253879 - protein, 403 aa, unidentified
MNAVGIDISKGKSVVCIMQPLGKILIKPFTIHHTLTGFNRLLLTLQALEGETRIVMEHTGRYYEPLAKLLSAANFFVSVVNPKLIKDFSINSLRKVKTDKADSKKIARYTLDRWHELRQYDDMDTLRHNLKVITRQFDFQMKHKIAAKNNLIALIDQTFPNINTFFKSPVRDDGSQKWVDFVATFWHADCIRKLSLEKFTNRYKDWCKKNGYLFQADKPQEIYEAAKDSICTLDKNALTKMIVLSTIKQFNAISQTVEELRIEMNEIAKELPEYEVVMQMTGVGTTIAPQLIAEIGDVTRFETRNALTAFAGVDPGCNQSGKFESQSEKTSKRGSPHLRKALFQIMDVLIKTQPQDDAVFNFIDKKRSEGKPYYVYMTAGANKFLRIYYGRVREFLQSREISD

SEQ ID NO: 253880 - protein, 300 aa, unidentified
MQVIRIGIDLAKNAFQVHGVDANERVVFNKSLRRSQVLPFFAKLAPCLIGMEACASAHYWARELKKLGHNVRLMPAKDVKAYVKRNKNDAVDAAACCEAVQRPTVRTVPVKTPEQQAQLMQHRVRDLLIGQRTQAINALRSHLAELGIVAAQGYEGLKVLLAIVADSSDTRLPEHARASLSALVAQIASCQAEIGAIDKRLLVQHRKNADSKRLETIPGIGVVGASAIVATVPDATIFKRGRDVAAWIGIVSREDSTGAAHPHIASYSKVSGVCGLLGSRCLARYRNRRACPTDDPGAHA

SEQ ID NO: 253881 - protein, 404 aa, unidentified
MELNAIYRCVAALDVHQAKLTVCILFETDAGEVVSQLREFGGFKRDRREMAAWVSSFKPELVVMESTGIYWKSPYAALEWYGLNLAVVNAYHVKHVPGRKTDIGDAQWLAILARSGLLRGGFVPPQHFREYRLISRQLQKLTSLAAGEKNRLHKLLTDAGIRLSVVLSDLYGKSAKAMIKGLLDGETPEQLLAHADSRLKASPDELRDALDGDLSESHRFVIRELMAHIDELEARVLRFRQTLLNHLSSYQVILQNLQTLPGIDELSAAMLFVEIGDDMSAFGSPAKLASWAGVCPSQNESAGKRKSAKTRKGNPYLRRILCEAANAASRTRCGLQDRFKSLMIRRGRKRAIFALAHKLLKTVFLLIQRGDYYRDANTDYEALSVQRNAPRWIKKLVQYGYINA

SEQ ID NO: 253882 - protein, 350 aa, unidentified
MLIIGCDFHSRFQQIAMLDTQTGEIVERRLEHESGEAERFYRSLPHPVRVGLESSGHAQWFERLLAELGHELWVGDAARIRAAVVRKQKTDTRDASHILDLLMTNRFPRVWRPSPAERDVRQLLVHRQKLVWARIKVKNQLQTLAMNQGVCIRRKLWASAGRRALEGLTLGPWTSRRRKELLQMLDQLNGSVEELDRAVGKEAQKRADVGRLMTHRGVGPVTALAFVLTLGPVERFRRSKQVVSYLGLNPQEHSSGGRQRLGSISKQGNTMMRYLLVEAAQTASRFHPELRRNYQRLKSRRGSAVAKVAIARKLAVRLYWMLREKADHAQLVRMQGSPRGTLVDASPSRF

SEQ ID NO: 253883 - protein, 338 aa, unidentified
MSTIKVIGIDLGKSSFHLVAHDYSGRELFRKHLSRAKLIAFLAQTPATIIAMESCGGSHWLARKCRSFGHEVKLIPPQYVKPYVKTNKNDYIDADAIAEASTRPSMRFVGVKTETAQVISVIQRIRSSYVKERTACMSRIGAILLEFGMSFPKGHSKMKVLFQWLADNKEPIPPMLMQELIEHHEYYLQLNERIAGQDKKLKQLVEQSEDAQLLKSIPGVGDLTASQCLADISDAGNFKNGRQLAAWIGLVPHQYSTGGKTTLLGISKRGNKALRTLFIHGARSILSRPEVAVAVFGEWILELRARKPFNVAVVALANKLVRIAWSVLSTKQAFEVRV

SEQ ID NO: 253884 - protein, 331 aa, unidentified
MFPVGIDVSKNTLDLCMLYDGIKGRIKTRNIQNNRHSVENILRWLRLQHCSPEDVHVVMEATGVYHERLATELHDAGFRVSLANPHRSREFARGMGIMTKTDKVDAYMLACYAFLKKPHRWEPPAPEIRYLGALLRRRDVLLGDALREENRLEKYLSTDTPADIISSCRRMAQLLREEISNIERQIKAHIKASPALRRDYTLLTSIKSVGPQLGMHMLVVLRSHNFVSAEQAAAFLGVVPIEKRSGTSVRRRPRMSKIGPPQLRAKLYMSALCGKIYNKRMRNIYDEMCLRGKPKMVAIGALMRKLVHWCYGVLKTGTVFNDESLKQVLST

SEQ ID NO: 253885 - protein, 350 aa, unidentified
MLIIGCDFHTRYQQIAMMDQATGELVERRLEHENGEASAFYRSLPKPVRVGIEATGTLHWFERLLAELGHELWIGDSAEIRARAVRQQKTDQRDAVHLLHLLLSNRFPRIWVPSPAERDLRQLLWHRHKLVCMRTLITNQLHALAMSQGLCRKQKLFTKKGRAELGSLSLGPWASRRREELGRMLDQLDPSILELDRAVLNEAKRREDAMRLMTHPGVGPVNALAFVLTIGPVTRFHRSKQVASYLGLNPSEHSSGGKQRLGAISKQGNTMVRWLLVEAAQIAVRMDPELRQDFWRLKSRRGNAVAKVAIARKLAVRLYWMLRSGADYARLVRTQGSPGATLVNASSSLG

SEQ ID NO: 253886 - protein, 361 aa, unidentified
MNTTTPTTASTILAIDLGKYKSVACLYSGSPDTARFDSFTTDRARLAKLLQRCQPSVVVIEACLLAGWVHDLCGQLGFRCLVANTASEAWKFKHLKRKTDRDDALRLAQLHALGQLPTVALPPPATRQWRSLIAYRQTLVGRRVAVQNRIRALFVAQGLPAPRGAKAWTATGLEGLALQAKPLTDCSPDELWRGLLHLALAEYRHLVELLDDAEHRLDALAKQDQGVQLLETTPGVGPRTAEAIVAHLHQPARFASGKQVSAYVGLAPKQFQSGETDRRGRITRRGPALLRKLLVECAWVMLRYNGWARAVYVRLTHGGKARKKQAIVALARKLLVRCWAMLRDGTPWRDKTPTPAAAAST

SEQ ID NO: 253887 - protein, 428 aa, unidentified
MYLKRGWIKGVQLFCQLLYYTEDFGVIFMTHTLIVGIDIGKRTHVATIIDEAGNVVARPFSFANTTTGGTLLLDRIAVVNTDTSKVVFGLEATGHYWLALFSFLTGKGYPVSVINPYQSDAFRKVHLSTTKTDKEDSYLIADLLRFGSFQETKMADEQMVSLRNLTRFRVTMSQKITDTKRRTVTIMDQIFPEFETLFSNSFGKTAKALLEDYPTPDSFESITTRKLTNFLTKLSKGRFKKEKADEIKQKASASFGIDFALDSFTLELSLLLKQLDFLGVQITVVEKQIEQLMESVPTTLKTLPGVDTILAAAILSEIGDIHRFQTSAQLVSFAGINPTVHQSGQFTGNKNHMSKKGSPYLRLALWKASITSVRFNPVLKAYYKQKTKEGKNHMTVIGAVSRKLTGIIFAMMRDSKEFTESPSGTRLR

SEQ ID NO: 253888 - protein, 414 aa, unidentified
MKNLSKIRTINSKTLIATVDISKNKHSGYFKTIENKEIKPFEFSNTMSGFMQYWKRLQAFKEQNKLNEIVFAFEPTGSYGIPLIHYMKSKGARLIQVNPMHTKRIKEIGDNSPNKTDSKDPKVIADLVCLGHGLTANIPEGLIADLRHEILFRENLMEDINRIKNRIEGLLVQFFPEFLKIMKGFNSKTSIYLLTYYIFPIAIIESGVTRLSKEIKKVSNGRLGEARAKKLINSAKNTIGIHEGTEGMKSVINAYIKQLDLLTTQLKEKELIIENMLGKISYSHLLISMKGIGKITAAILISEVLDFKSYSTIPQIIKLAGLNLYEVSSGKHKGYRRISKRGRTLLRKALYFASLNMIRKGGIFHEEYQNHLSKGMKKIKAVIAISKKLLRTIYSMVRNNTEYIENYETFKKAA

SEQ ID NO: 253889 - protein, 360 aa, unidentified
MIHLGIDHHKKYSHVVAMNDSGAICWDGQLDSTREAFRLLKESLPADEPVQCVLEAGRNWGILYDALEELEMNPKLANPLKMRLIAETFTKTDKIDATTQAVILKAGLTPLVHVPSKEVRDQKNLLRQRVWLVKLQTMLKNRIHNILDRNHLVQPERTDVFGSHGKAWMNALDLRDPDGKLLKADLELLNALRTRIRETEKWIDEALKENSYIPILMTFPGIGKTLAALIALEINTIERFPSPAKLCSYGGLANSTYSSGGKTFHGGLVPTCNHHLRYAFIEAAWTAVRVSPYFQAFHKRLKNRKGAQDAIGAVGRKICEITWHCLKKNKNYEEKPYQFKPHRPVTVLACIGTRSQSVKS

SEQ ID NO: 253890 - protein, 341 aa, unidentified
MFNLPLFVGIDYHTTTIQVCVMDQQRKILVNQSVANDPEAVFRLVAPFGNNIHAAIEASTGTANFAEELITQYQWSVSLAHPGYVARMKQTPDKSDWTDAKLLADLTRTGYLPRVWLAPQYLRDLRELIRHRHGLVQQRTQVKLRLRAVLRNHRIVCKDSPWTIKGKKWLLDKENISSETLRFLIREHFDTIEYLDKKITAVTERMATHVADDAVVKQLLKQPGVGIITAITLRALVGQFDRFRTGKQLAHFCAVCPRNNSSAGKTTTGGLIKAGDDLLRQVLVEAAHRLIRYDTRWKSMAERLRSKGKKTCVIVAAVANRWMRWLFRQMMVTKPLDATVA

SEQ ID NO: 253891 - protein, 358 aa, unidentified
MAFKVKKNKVNFKGKMVSIGIDMHKISWRVTALVEGDTVLAITLAKPNYDVFKKVISRFEENYVRIAYEAGPGGFDLYDKLTEDGIECIVTPPSLIPTESGSKVKTDKKDSYKLARFLESGMLKEVWVLSPEERAHRQLVRTRRQIANHHSDVMRQIKSLLLFNSIDVPFKSARWSGPFMNWLLKLDLGYDSLNRSLKALVDLFNYLSAEKKRITEEILELAKEEKYAKRVELLESIPGIATLSAMEVLVEIQDIARFKTADELAAYLGLTPSQYSSGEHIRMGHITHAGNTRVRTTLVESSWILISKDPEMKRKYQRIKNKRGGKRAVVAVARNLSGRIRRMLLDDIPYKLNFQKAA

SEQ ID NO: 253892 - protein, 331 aa, unidentified
MDEVRRFVGIDVAKVALDVFIGSVGAAFSVANDEVGIRELLRQLEPADFVILEATGGLETPVASALAAAGIAVAIVNPRQVRDFARATGRLAKTDRLDAEVLARFGEAVRPEARRLADEQGQALEALVNRRRQLVEMLTAEKNRRARAPKVLHRSLDEHIRWLQRRLSGFDDELGELIRNTPLWRERDELLRSVPGVGKVLSSTLLAQLPELGMLNRKQIAALAGLAPFNRDSGSLRGSRCIWGGRAQVRRVLYMATVAGVRSNPTIRTFYLRLRANGKHAKPALVACMRKFLVILNAMLHHKTHWQTPALTSPTSPLSPLLGAVSEHGCC

SEQ ID NO: 253893 - protein, 357 aa, unidentified
MREAPTTSRNAALTLGIDVGKSNLEVSLFGAHGGANGILAKTSVSNDPGGWDRLLSWLHDPDMMPEATPEATPETTPETTPETTRVCMEASGGYEEGVARFLHAEDYEVSVVNPRRIKGYADSQLQRSKTDSADANLIARFGHREAPRRWTPPAAAASRLRELTRARQALKKEKTRTNNRLADTEDEAIRDAYEDLLDTIEEKIDALEEEIAEQVNESLDLSTRCSLLTSIPGVALQTAAIVISELKSPDRFESARQVAAYAGLVPSHYQSGSSVRGQPRMSKVGNARLRSAMYYPAMTALRCNEAVKAFGNRLKERGKDQMVIIGAAMRKLLHICYGVLKSGRPFDPSLHPGTPNT

SEQ ID NO: 253894 - protein, 412 aa, unidentified
MEGETVIAGVDTHKDVHVLCLLDGLGRKIWSGSFGADPEGYDRLAEAIGDPGSCMVVGVEGTASYGAGLTRRLVELGYNVVEVLRPKRDKVRPGEGKSDPLDAERAARKAASGRGCSVPKSQDGWVEAVRQLYVARRLAVATSTSCVACAKSMLTTAPSALRERFRGRERPKDLMPLLARGRKAGDALEESALASLRSVAAVWKEARSQVESLDERIRALLEANAPALLGVEGCGTTTAAALVVAAGDNPGRLKGEAAFSMMCGASPIPASSGKTDRHRLNRGGNRQANWALYEIAIKRMAYDERTRRYVARRTSEGKSRREAVRCLKRYIAREVYRVLMDPNPDGAAPEGPELARMRKAMRVTQKQAAAELGLSAATLGHLERGKRRSTKLERRYYELLCELERTLPQTAS

SEQ ID NO: 253895 - protein, 413 aa, unidentified
MVDETTRWFAGVDWGSEQHHACLLDAAGKVVGERVFSHGGAGLAALCDWLVSVAGDPGSVAVAIEVPHGPVVDALLDRGFAVHAINPKQLDRLRDRFSVAGAKDDRRDARVAASGLRTDPHLFRPVQAGDPAVIALREWSRLAEELQQERVRLSNRVRQQLWRYYPQLLELADDVAAEWVLALWTIAPTPAKAARLREATVAKLLKQHRIRRVDAETALGILRQPAITVAEGVTEAAVLHLHSLVARLRLANREFHQAERKLDELCTELGKPADAGEGSAVTDAAILSSLPGVGTVTLATLLTEAAGPLARRDYAALRTLSGVAPVTKRSGKTCIVVMRYAAQVRLRQAVFHWARVAVLNDPKSRSRYDALRARGHSYGRALRGVADRLLGVACVLLQRQTLFDPDHGTPAAP

SEQ ID NO: 253896 - protein, 400 aa, unidentified
MTAVWAGIDSGKRAHHCVVIDTTGRLLLSRRVANDESALLELITSVLALAGGGQVVWATDLNAGGAALLIALLTERRQPVLYIPGRIVHHAAATYRGDGKTDAKDARIIADQARMRTDLQPVRSADQISTDLRLLTSRRTDLVYDRVRAINRLRALMLEYFPALEAAFDYSKKAPLILVSGYQTPEAIRRIGVTRLAAWLKKRGCRGSANVARKAVDAANAQRTMLCTEPVAAQLVAQLAEQITAIDVEIARLDDQINERFGQHPDAPILLSMPGFGPVLGATFLANTGGDLNAFETVDRLASVAGLAPAPRDSGRISGNHHRPKRFNRRLMRTCYLAALSSLKNSPASRAFYERKRTEGKSHKQALIALARRRINTLWAMLRDRTTYLEPPRPALAPAA

SEQ ID NO: 253897 - protein, 334 aa, unidentified
MENIALIGIDLGKNSFHIHCQDHRGKAVYRKKFTRPKLIEFLATCPATTIAMEACGGSHFMARKLEELGHFPKLISPQFVRPFVKSNKNDFVDAEAICEAASRPSMRFVQSRTESQQAMRALHRVRESLVQDKVKTTNQMHAFLLEFGISVPRGAAVISRLSTLLEDSSLPLYLSQLLLKLQQHYHYLVEQIKDLESQLKRKLDEDEVGQRLLSIPCVGTLTASTISTEIGDGKQYASSRDFAAATGLVPRQYSTGGRTTLLGISKRGNKKIRTLLVQCARVFIQKLEHQSGKLADWVRELLCRKSNFVVTCALANKLARIAWALTARQQTYEA

SEQ ID NO: 253898 - protein, 351 aa, unidentified
MDYYAGIDVSLKESSVCVLDATGKVIREAKVASEPEALIAWFKELGLGMSLIGLEAGPLSQWLFAEMRKAGLAVELLETRHVRNAFKTMAVKTDRKDARGIAELVRLGWFRPVHCKSMSAQETRAMLTARKLVDTKLHNVEMSLRGILRGFGLKVGKTTPTTFAQRIKELVIGHPNLEVIAQALLAIREVLLREFRSFEKRVRTMARHNEQAKLLMTTTGVGAVISLTYLTGVDDPARFKSSKVVGAHYGMTPKKYQSGETEYDGRISKMGDESVRTALYQAAHVILTRPVKGSALKSWGLQLAKRKGMEKAKVGVARRLAVIMHRMLVDGTSFDPSLPNKAVAAKQVAAA

SEQ ID NO: 253899 - protein, 342 aa, unidentified
MHYVGLDVHAKRSSLCILDSFGKVVKRLEVKGPWPKLLERVAAEVPRPFAVCFEASCGYGYLHERLSALSERVAVAHPGKLRLIFRSKRKYDRVDAEKQAKLLYLDQVPLVHVPGLDVRAWRGLIELRRRLVGRRTAVKSQLRALLRGAGCCDAPAGKALWSKKGLKWLGAVELCEADALRRDLLLEELGEAETRVGRVTKELDRRADAHPGVALLRTVPGVGPRTAEAFVAYVDDVRRFARTKQVGCYLGLVPCQDSSAGRDRLGHITGEGPATVRMLLCEAAWQAVRRSPSMKSFFGRVTHDEPGRKKIALVAVAHKLARSMAAMLRSGEAWREQDRERD

SEQ ID NO: 253900 - protein, 415 aa, unidentified
METIYRCVAGLDVHKEFVTVAVRSLDEQGKVATEVETFGTMTSDLLALSDWMAQRGVTHVAMESTGVLWKPVWNILEGRFECLLVNARELKQVPGRKSDIRDCQWIAQLLACGLLRSSFVPEAGQRALRDLTRLRAALSEEQGRVANRIHKVLQDANIKLSSVATDILGKSGRRMLAAIIAGERNPERLAELALGRLRKKEERLRLALQGHVSDHHVFLLRELLDHLDYLDGKVARLDEQIEQAVCPFVSEATMQRLTAVPGLQRRTIENVVAEIGSDMKQFPTSAHLSSWAGVCPGNEESAGKRKRSKTTKGSRWLRRALAEAAWGASRTKGSYFKAQYHRLAPRRGRKRAIVAISHSLLEVIYYLLRSPDTEYHDLGEDHFAKQQPERLRRYLVKRLQSLGYDVTLTERPDAA

SEQ ID NO: 253901 - protein, 347 aa, unidentified
MLAGVDAGTGQVFGARQIAADDGGHRDAVRWARDLHSERVWAIEDCRGVSRRLEQALIAAGERVVRVPPKMMGQSRRGERQAGKSDEIDALAVARAVVKDGSERFPAAYLDERAMEIRLLSDHRDQLVAERTRIQNRLRWHLLELCPELEAQLPKGGLDRHVVLERIAKRLRTFRDDARARVAREQLSQIRTLTRQVNELERELHRLVEAHRPALLAEQGCGTLTAATLIGRTAGAERFPTDAHFARQAGVAPIPVSSGRVDRHRLHRGGDRQLNRALYMIAITRARIDPQTKAYLERKRAEGKTKREALRCLKRHLARKIHHLLSMPAVDPDPIALNAAISGRCLT

SEQ ID NO: 253902 - protein, 393 aa, unidentified
MDSLDRIEAPAALEEDATVFVAFELSKAKWKLGIVTPGTRKLSRYTVAGGDVAAVAARIAAARAKAARAKALHDDRPVRVVSLYEAGYDGFWLHRWLVAQGVINHVVDPASIEVNRRSRRAKTDRLDLDQLMRTLLAYCRGEPRVCSMARVPSVAEEDARRRTRERARLVKERGAHVNRIKALLHGQGIRDVQPVRASFVARLAELRTGDGHALAPALVAEIAREHARLRLIVEHILAVEAESQAVEALAQAGTPPAKVRQLTQLVSIGATSARVLVNEVFYRRFDNRRQLGGYLGLTGTPYDSGSSRREQGIGKSGNPRARTVAVELAWLWLRHQPESALSQWFRERVGARKSGVRKTAIVALARKLMVALWRFVETGLVPSGARLRAAAQG

SEQ ID NO: 253903 - protein, 414 aa, unidentified
MQSWSEITYYAGFDWATDHHDVVIVNRSGQIVAEFQIEHTAEGWQRWREQVAVLGPGLAACVETSQGFVVEQLLESGVAVYPISPASAKAYRQRKVPSGNKTDHVDAWSLADALRVDGHGWKALAKEDPLVAELRLLCRDEVALIEERTALINQLQSALREYYPAALEAFEDWTLPSAWAFVEAFPTPQALVSAGKRKWEKFLHTQQLARPQTYQKRMEIFARASEFVSGQALTRAKSRLALARARMLRVLQNQIDSYRAEIEKLFAQHPDHDLFGSLPGAGPKIAPRLLGEIGSDRSRFEDPSALQCLAGTAPVSYQSGQVHKVYLRRHCNKLLRHAVHLWANLSRQSCPWAAVYYQQLRTRGKSHACALRCLGQRWLKILWKMWQTGTPYDAELHARNQLKHGSWVLKIQNA

SEQ ID NO: 253904 - protein, 341 aa, unidentified
MQVTTVGLDLAKRIFQVHGVDAAGKVVIRRRLQRSEIAAFFADLPACLVGIEACATAHHWARLIGASGHQVRLIPPSYVKPYVRRSKTDATDAEAICEAVGRPSMRFVPVKSAHQQAALLHHRARDLLVRQRTMLINAIRGHLGEFGIIAPAGRHRVADLLNLLQGADDAEVPALAREALQSLFAELSALEIRIKVVEAVIMREHRSNAVSRRLTTIPGIGPITASAGTIADPLAFKSGRELAAWIGLVPRQHSSGGKQKMGRVSKQGDRYLRRLLTVGATAVMRRLPGKTDGLSLWVRALLDRRPFRLVSLALANKMARIAWAIMVRPETYKASAMTAAA

SEQ ID NO: 253905 - protein, 376 aa, unidentified
MEHTTFIGLDVHKASISVAVAQGARGGEIRHLGSVPNRPDHIRKLVEKLASAGAKLHFCYEAGPCGYGLHRQIVEMGHDCSVIAPSLIPVKAGDRVKTDRRDAVMLAKLHRAGELTAVWVPDAAHEAMRDLVRARATAMRVAGKARQHLQGFLLRHGRIYPGKKGWTGAYRRWLALVRFTHPAQQIVLQDYIDAVGEAEARVERLTGQIADLLPHWSLAPVVAAVQAMRGVGFIVAVTVVAEVGDFQRFDNPRQLMAYLGLTPSEHSSGATVRRGGITKAGSGLARRALIEGAWSYRMQARISVKLLARIEALPKVVRDIAWKGQLRMCQRYRHLVAAGKAKVVVVTAIAREMLGFVWAIARAVIAPPASPDATAA

SEQ ID NO: 253906 - protein, 442 aa, unidentified
MANILNLNAAGIDIGSKEHYVAVPEDRARESVRSFKSFTQDIHKLAKWLKECKIDTVAMESTGVYWYHLYTILLDYDFEVYLVNAYHVKNVPGRKSDVSDARWLQQLHSFGLLNGCFQPDNLTRSLRNYVRLRRNTIRQMGKETQRMQKALEMMNIKLNHVIRDLNGQTGTKILESILAGERDKEVLARHKDPRVKVSHEVLAKSLEGNWREEQIFNLQIAYEHYNFLKEQLKKCDARSNSILKKISGSNSKTKNLPKTRKQKNSPEFDVRKHLYECLGVDVTEIYGMKEVVALRVFSETGPNLKEKFPTEKQFLSWLNVVPDNKITGGRVISSRVRKKKNNAGQAFRDAANTLWKAQNPIGDYLRRKKAKSGSCQAIVATARKLASVYYKLVTEKVQFDPQVLEEKSQGYLENKLKYLEKMTLRIKMELANTQKLKECVIS

SEQ ID NO: 253907 - protein, 378 aa, unidentified
MEHNTTIGIDVSDKTSKICMMTKINGERRIIDEATVKTSREGFSKYLADKDHSIPVVFETGTHCRWMRDLIARDLHFKVYVANPAKLPTITQSNTKNDRNDARELARIALADPEMLHPVHLREEDYQTMIRYAKARDAAMGVRTKLTNMIRGFGKSMGFRIESCTPEKFVDLDRSEWPSELRNVVLPLVKVLKETNAVIKKYEKMIRNLARKSPFKEKVERVQEIYGVGDIIGPVFVAVIGGDLSRFRVARDIGPVLGFTPKQDQSGTIDKQLHETKAGDKLMRRLLVEGANVIMKENARDTDLKLKGYRICMRGGKITKAKAKIAVARALAVTMTALLMKPDMKYVPLSERAEREFAWLREEEARRQQAKAGKPNMA

SEQ ID NO: 253908 - protein, 315 aa, unidentified
MERLAASPSFVGIDVSKDRLDVNVRPSGRAFAVVRDGKGLDQLVIELRSLAPALIVLEATGGFEITVAAALASAGLPLAVVNPRQIRDFARATGRLAKTDVLDAQVIALFAERIRPEPRPLADADSQSLTELIARRRQVVEMIGMETNRLYQARNSRVLRMLRTTLKTLKVQLAELDRDIDDTIKRSPIWRAADDLLTSVPGVGDVTAHTLIADLPELGQLDRRRVAALVGVAPVNRDSGQRRGKRTIAGGRTDVRNALYMATLSAIRWNPVISKHYKCLVDRGRPKKVALVACMRRLLGILNAIMRTRTPWQCA

SEQ ID NO: 253909 - protein, 316 aa, unidentified
MGNESVFLGVDISKGRLDVAVLPQGESFGVENTPEGLEELVSRLKGFEPESVVMEATGGLEWPVAGALSAGGLNVAVVNPRQVRDFARATGRLAKTDKLDAFVLARFAEAVKPEARPLKDEAAQELAAVMLRRRQLVGMLTAERNRLRIMPKKVRRSIKAHITWLERRIEEVDKDLGDLIKASPMWREKEKLLKSAPGVGPTVARSLLAFLPELGLLSRRQIAALVGVAPFNRDSGQYRGLRKCWGGRASVRTPLYMAALTAIRCDPFFKAFYERLVAAGKARKLAITACMRKLITILNAMVKDNSPWSTPQTINP

SEQ ID NO: 253910 - protein, 339 aa, unidentified
MKYTPVGVDIAKHLIQVHFIDENTGEVVDKQLRGRDFLEYFSNREPCLIGMEVCGGSQHWARELTKLGHNVRLLQARFVKAFVMGNKNDVMDARAIWMAVQQPGKEIAVKTEEQQSVLVLHRTRMQLVKFRTAQINALHGTLLEFGETIHKGRAAMEREFPEALERMKERLPPYLITVLENQYKRLNELDSLIEDIEKQLASVAKQNETCKRLLDIPGVGPLIATAAVATMGEASAFKSGREFAAYVGLVPKQTGSGGKIRLLGISKRGDTYLRTLFIHGARAAALLTKEPGPWITELKKRRPASVAIVAMANKLARTVWAIAAHDRKYDRNHVSIRPY

SEQ ID NO: 253911 - protein, 385 aa, unidentified
MTDGSVREPFTMMVWTPPGPMRMIAASADTHQRNQEETEMDATTVAVDLAKTVFEVAIANAQWRVVDRRRLNRAQFTRFLVETAPTHIVMEACGMAHFWGRVAQQHGHRVTLVPPAYVRPYVRRNKTDRADAEAILEAVRSGEMPSVPVKRIEQQALVALHRVREQWMTTRTARINTLRGILREHGILLPAGAQTAVRVVPAMLEEAATQLPMHLRMVLASVHEEIRAIEARVADLERELRALAEADPVVTRLRTIPGIGLLTATALVGAVGNIHAFRRARQFASWLGLTPREHSSGQRRRLGSISKQGDVYLRCLLTHGARAVLVTAHRRAASGQSLTRLQQWAMTLRQRRGHNKATIAVANKLGRIVWAVWHHDQPCVLPEAA

SEQ ID NO: 253912 - protein, 344 aa, unidentified
MTKIIRVGVDLAKNVFHIHAVDENEKTVWQGKYNRNNWIKAIVKRTPQAATIGMEACGSAHHWARELIKLGYDVKLVAAQFVKPFVKTNKNDKVDAEAICETISRPNMRFVSVKTVEQQDLQAMHRIREELISQRTSKANQIRGLTAEYGIFAPVGIHHLKKYIPVWLEDAENSLTPLFRELLQMMYDDLTLLDESIDSITNKIRISLNNNPAAQRLMEITGVGPLVCSALLIDLGDGLAFKKGRDFAASLGLVPRQHSTGGRDRLLGISKRGNGYLRKLLVHGARAAFRHVNDKADPLSLWIKKLSLTKHANVAIIALANKIARISWALVARNAKYDVSLAAA

SEQ ID NO: 253913 - protein, 366 aa, unidentified
MKKLAHVGVDYHVKSLTVAVYRSDEKAFHDIVRLPNNDKSVKKYMKRLSEQFELHICYEASGNGYAFARKMQALGYHCDVIAPSLIPKKSGDRRKNDHRDARNLAQLYANGQLTVVHMPDQQQESVRSLIRCRLALKESAKRIKQQINSFVLSHGCHFTQSKWTDKHRAWLSALPFPTPYLHQVLQEYMNLLAYLESRLQHLDQQIEQMAQSELYAPSVKKLRVLRGIGTLTAMVLIAEITDFRRFPNPQSLMAFLGLIPGENTSDDTTKPTAITKTGNKRCRTLLVEAVHHYIKKPRISTTMQEAFAQLDARSTLIATKCMHRLHKRYWALLLRGKAKQKALVAIARELVGFIWALMQPQDCVTF

SEQ ID NO: 253914 - protein, 327 aa, unidentified
MFFIGIDVSKSKLDCCLLVDSNHKRKTKVVINSKKGIADLLVWTAKQHISNEQLHAILEGTGVYHEQIAQALYDSGARISIVNPAQIRHFAFGLAIRNKTDDMDSFVLARYGALIQPKLWTAPSQEAQILKALLKRREAIVRDLLRENNRLEKADATHTPEVIRQSITDGITFLKSQLTKINNDIDEHINKHPHFKEDLKLLTSIPSVGPQVGNQLLAIIHNHHFDSAEKLAAYLGLVPVQRQSGTSVLGRSCISKNGPSSIRAILYMAAMTAIRFNPHIKTMYLRIISQGKSKRSALCAAMRKLVHLCFGVLKTRKPYQSDYAISA

SEQ ID NO: 253915 - protein, 406 aa, unidentified
MKGSIVTVDVSKGTCHYQPFIEKGKPFRKPKVLHDTNEGFADLSSCIQKLKEKTEAETIPVVFEATGVYHRCLQKYLDDHEMPYYIMSPLLSAKYRQTNLHGNKTDDMDCTHIANAYYVDERLLPYFKQDDRFEKMRTLNRDYETELTHLRMRKVSFRSQLDIIYPRLDKCFKGSGSLYDPVPMEILKKYPHPSLLIKHRKETIIKTIEKKTDHKNGFITGVVEKMYECALHCYSGADPDSIEVLRFPKMIEELQSQMELCDDILQQLISEAKEVSYFPCIMSIVGIGENLAARLIAELGDMSRFKSRRAIAAYAGLNPKIRQSGDVDGIHLAIEKKGNRHLRCLLYLGASCNYRLKKNDQIYLFNQKKRQQSQSPLKHKAANIAAAHKLLVIIYALSKSGELYRS

SEQ ID NO: 253916 - protein, 346 aa, unidentified
MKIIGCDFHPSYQQIAVLETTTGEVQEAKLMHGDGEAERFYRELEEPALVGMESVGNSLWFEQLVERLGHQLWIGDAAQIRASYVRKQKTDKRDAGHILKLLLENRFPQIWVPSHQQRDQRQLLIHRHKLVGMRTRIKTELQHVALNQGMQKKRTLWSKGGMTDLKKLSLEGWTSRRRADLLSLLSMLETQVSELDQAVEEAAKRDPQAQLLMTQPGVGPNTALAFVTTIGDVARFQRGKQVASYLGLIPSERSSGSKRRLGAISKQGNVFLRTLLVEAAQSAVRHDEDFKKEYRHHCHHKPKGVVKVAVARKLAVRLYWMLRTQTPYPQVVHNEGSPSHFVVGES

SEQ ID NO: 253917 - protein, 338 aa, unidentified
MLFSGIDLHKRSVAIHTLDAAGTVVRTAKLPAHRRALATYFDALPGPHRAVVERTGMWYWVRDLLVPQGIDLRLGHAKYLKAISYAKVKTDAVDAATLAQLLRVNLIPEAHMISSALRETRDLLRARLVLVGRRLRCQRSLGALLEKYNVATPADLPELPRLEAALHTEQHALLKSQVRRIEHQLRDRVLPTPDAQRLVWIPGIGPLVAYTLLLEIDDIRRFPTVRHFHSYCRLVPGADDSAATRKHKRSRDGNRYLKLAFHHAAVRAAQYNPEIQAEYRRLIRRKGKAIARALIAKELSSIVYHVLTRQEAFNGRFRGLQLTRLKPRRWPRLASPPA

SEQ ID NO: 253918 - protein, 356 aa, unidentified
MNYIAFDSHKRYTLASVENSKGHLLQEKRIEHTPGALREFLLQYEKESPVAVETIGNWYWIVDEIEQAGMTPNLVNAGKAKKMLGSVNKTDKLDARGLNKLQRVGVLPTVWIPPAELRDIRDLPRTRMVFTQERTKLKNRIHANLTKYRLELIGVSDAFGVKSIDELNKRISKLPIHTRYATERLLEELKRVETEIGLFEKRIKEVFKDSAELKRIMSLPGVGYILGVVILLEIGDIHRFPGAPQLASYSGCTPRVHASGDKVRFGQLRVDVNHYLKWAFTEAANVISTHRSHWSHRHSVRLYNRIRERKNHPKAIGAVARHLAEATYWMMHKKEDYKEPKSLSEVIIGEISAVPV

SEQ ID NO: 253919 - protein, 343 aa, unidentified
MVTSSGPVTPHLWVGVDIAAATFTAAWVHGEEAVGTPRTYAQDPHGFAALRTALVTTAVPSADTLVVMEATGSYWIALAVTLHHAGYRVSVINPLQAHHFAKAQLRRAKTDALDARDLARLAAALRPPVWVPPPAVYHEVRQRLLVRDGLVTMRQQARNQLHALSQWPVVVAGAKAPLTAVIADFDVRIATLEREIAAVLAGSEWAESLGYLTSAPGIGLLTAAWLLVATVNFTLGETPEAVTAYAGLAPMLRQSGTSVRGVAQIGHGGNGRLRTAAYLATLSAVRYNPMLRAFYQRLRAAGKPVKVARCAAARKLLHLAWALVTKRQPFDPLRHLPPLAATP

SEQ ID NO: 253920 - protein, 339 aa, unidentified
MNNSVIGLDIAKNIFHLFTLLADGKTLKKKLKRSELLAFFANYPASIIGIEACGSSHHWARELTKLGHEVILLNARFVKNYVVGNKTDFNDAEAIYEAVNRPNKRVVAIKTVAQQDIQLVHNIRKELVDQRTALVNQTRGLLSERGIVINQGITHIREQLPLILEDAENGLTDLSRELFAEQYEKLKVLDAEIKAQDQRINRLCNANDLSKRFLDVPGVGPLTATIVAADIGDGGKGYKSSRDYAASLGVVPKQHSSADKQHYLGISKRGNRYIRTLLIHGARAVLKNCTQKTDKLSLWLQALVARRGFNKAAVALANKNARILWAMASNGKDYQALAA

SEQ ID NO: 253921 - protein, 412 aa, unidentified
MKIKPNKFLYVGVDLHKEKYVAVVIDCWNEKRGEITFDNRPSAFPPFVQAIKKHLKRGQTLIYGLEDTGGFGRSLALFLRENDYIVKEVNPKLSSDKRSKQTTIEKYDSWDAECVARVVRDDWHRLPDANPLDQYWAIGQMVKVRAGLVAHYTATIRRLHQQISYHYPSYRHFFSEVDGKTALAFWEKYPSPRCLHDVSEAELAEFLKRESNRFLSLSKARQIKQFIDDDGHTERAYQNQRDMIVQSLVRSLRSCKEEMRKLENELGVLLGDIGCTLDSMPGIDEVTAACFVAEIGAVERFASAEKLARFAGIAPVRFGTGGKDTRYKSKQGNRVLHELFKQLAIRQLVVAKKTKQPHNAYLLNYFEQKIAEGKSKRQAIVCLMRKLVNVVYHLLKHKTIYQMPAVPEKQAG

SEQ ID NO: 253922 - protein, 340 aa, unidentified
MAIDKPKKYSYFIGIDVSRNELDFAVQQGGIYLYHKEIGNQAASITELVNEFKNLPKFIMSRAVFCMESTGIYCNIVIAVLKKFKANIVQESPLHIRNSLGNIRGKNDKVDAMRIAAYAYRHRDELRLWVPKRKVVQQLADLSALRVRLMTTQVALKNPLLEQKDFLKKGAASETYNLCKRSLTSIALDIDSLEKHISALIAEDEHLKRLFDIVTSVTCIGLITALQMIIHTNEFKDISTAKKFACYAGVAPFKNESGGFLQRARVSHIANKRMKSLLHICAVGALRYDKDIKIYYERKIAEGKPKMSVINAVRVKLINRVFTCVHQNRLYQKDYKSVDV

SEQ ID NO: 253923 - protein, 357 aa, unidentified
MKIVGCDLHARQQTIAMVDTETGEFTTKTLSHEGNAVRAFYAALEGPVVVGIEATGAMQWFLELLEGLGIQCRVGHPAKIRAKETRKQKHDRRDAGLIWELLMEDRFPEIWMPSTEQRDLRTLLRDRHQWVKMRARLQHTLQAIALNHALRQGRALWSAAGQSALQALPLPPYTDQRRTALLRLYVQLQKRIQELDQEVEAQAGQRPQARRLLTHPGVGPVTALATEVFLGDPSRFATGNQVASYIGMIPCEHSSGKRQRLGKLTKQGNSLLRYLWTEATLHAVQKDPELKRFYRRKLIQKGMGKARIAAARKLGIRLWIMMRDQIDYAEFCRRGKLRQSGEAQAGMPDFNSGPAQQ

SEQ ID NO: 253924 - protein, 404 aa, unidentified
MTAAGTADTAGQWVFGGVDSHADTIHVAVVTDNGGHLADAEFPTTPAGYTAALAFLGAHGDVIAIGVEGTASYGTGFTCAARTDGLSVVEVNRPDRAERRRSGKSDPIDAYAAARAALSGRASSAPKDETVTGIRALHNAARSTVKARTAAMNQIGHILIGAPDTIRARYRALRGKPLVDALARLRPAGDAVHAGVLTALKSLARRVQALATEHDKLTAALDDMVTGHNRGLRAAYGVGPDTAAQLLITAGGNPDRLRTEASFAALCGAAPVPASSGKTNRHRLSRGGDRAANAALYRIALVRMASDSRTRDYVARQTAAGRTKKEIIRLLKRAIAREVFRCLTTTVTVPEIADLRPARQAKNITLTAVANHFGVWPAVISCIERGTRRDDDLANAYRDWLTTA

SEQ ID NO: 253925 - protein, 418 aa, unidentified
MKEHNNSRKKSEPTSKRSKTRGPMRRDTKEVLAELVGKLKEKLDPKKVAATSAGEDHPRGELRPNLDRLTVGVDLGDQWSHYCILGLEGETLAEGQLRTKQEDIAEFFQALNAARVVFEVGTHSPWVQEVICGCGHEVLVANPRLMEGSKRRKRKNDRIDANKLARLGRVDPQSLHPMQHRSREVRQDLVVLRARDALVAARTELINATRGLVKSMGSRLPKCSSPSFAQKVEETVPIELRDALMPLVRMAAALSDCIQGYDEKIEKLGREKYEHTALLRQVKGVGPITSLAYVLTLENPDRFVKSRDVGPYLGLVPKQEDSGESQPQLGISKAGDTMMRRLLVGSAHYILGPFGPDTDLRRYGLRLCERGGKNAKKRAAVAVARKLAVLLHCLWVSGEVYEPLRQGMSATMTPAAAA

SEQ ID NO: 253926 - protein, 313 aa, unidentified
MNHNNSTIYLGLDISKSKLDLAGPDIKHHTFANTAEGITKLIEFLKSSSPSSHLVLEPTGGYERAVIIALEKAKIAVCRVNPYQVRAFATSMGKLAKTDKIDALMLAQFGKDRRPRLMRPFDENRENLRVMYDRRQQLIDLQRRESNRLETAIPSMRKHLEKSIAFAAEQLTEIELMITKHIAENKDMQKIVDRLKSVKGVGDQTANVILTYIPELGTLSGGEAAALVGVAPYNKDSGKHSGHRSIRGGRHPARSVLYMAAVSSIRCNPILKAFYQRLRAQGKPAKVALIAVVRKLIVLLNHMLKNPDFSLAK

SEQ ID NO: 253927 - protein, 341 aa, unidentified
MKEFIRIGVDLSKGFFQVHAIEREGSPAVTRKLSRARFLGFFAGIAPSRIGMEACGSAHHWARELTRMGHEAVLMAPVTVKPYLKRGKNDANDAAAIAEAMSRPDMRFVPVKSADQQAVLMLHKTRALMVKQRTMAVNALRGHLSEFGLIAAKGIHRIKDLIALAEADARLPEAAREATTIWAAAVQGLDASLDELEAKIAKASAGSPMSRNLDEIPAFGPLIASAMVAFHPDPHVFGSGSHFSASLGLTPGQHSSGGKERLGHITKAGNRYLRTMLVVGCTSVLRVAHKYKGALAEWIVAMRARKPERLVAVALANKLARIAWAMMSTGENFRKELYFKP

SEQ ID NO: 253928 - protein, 375 aa, unidentified
MDKLIRIGVDTSKSVFQLHGVDSAEKPILRKKLRRRQLLEFFGRLDPTKVGMEACGATHHWARELKSLGHEPVLLPPQYVKPYVKRGKNDAADAEAICEAMSRPSMRVVPVKSVEQQAALMLAGTRDRLIRQRTQLSNSIRGYAAEFGLTVAKGLDKIEPLLARIATEAALPELAKDLFAEHGKEYGQLNVQIRKIETRLMAWHRDNELSRRLVEVPGIGPIGASLLAMKVTNPHAFSSGRDFAAWIGLTPKDHSTAGKTRLGVITRAGDEALRSVLVVGATALIQQVRQGRGHPSPWLVELLKRKPPKLAAVALANKMARIAWKLMISGERYSRAHQPPKIVSRKGRSAPLCGGSAQRPLLTPRTTSPEKGINA

SEQ ID NO: 253929 - protein, 410 aa, unidentified
MAREGEMDMKHVLAFDVSMGKSTMVIYNHYKKCEFEGEIYHNKSSFKALNDKICEMTKLDGQAPEIVFEASGVYSRPLEYFFQTEGYTYHRVSPLEANLQTASMRRHKTDKSDAHELAKSHFRIERSTTYQEDNYYKQMRALTRYYDELASEVTNLYSRMHAILQLSFPELEHLLSKRSALFLNIVQLYPHPEEVLACSKTVIRNRIKANTKKNISLTRAEAKALELLNAAIDSYPAISKEDIRCEQIRDYAKRITDLKEKKEQLIKQMVDLSKERIEYQVLLSFPGIGEATAVRLIGEFGDLRRFQSHKQLNAYVGIDIMRYQSGHTFYKDKINKRGNNKLRKILYFMIQTMIKLRKKTNNHIVEYYDKLKTQPQGKPHKVASIACVNKFLKVAFHLITHNITYNYEAA

SEQ ID NO: 253930 - protein, 347 aa, unidentified
MRFYTKQHKAYCGIDLHARTMYICILNHDGEILVHQNYTANPETFLKVIAPYRDGIVVAVECIFTWYWLADLCTREGIPFVLGHALYMKAIHGGKAKNDRIDAQKIAVLLRGGMLPQAYVYPAEMRATRDLLRRRIHFMRKRAELLTHIQNTNSQYNLPAIGKKIAYKANRDGVAERFPDPAVQKSIEVDLALLGHYDNLLRDRELSILITAKQHDAHTLYLLRTVPGIGEILSLVLLYEIHDIERFPRVQDFVSYCRLVKCAKESAGKRYGTSGTKIGNAYLKWAFSEAAVLFLRANPAGQKYLTRMEKKHGKGKALTVLAHKLARAVYYMLQRKTVFDLPTFLRG

SEQ ID NO: 253931 - protein, 430 aa, unidentified
MKSNTQNKKIEAITEKTLVIGIDVGSETHYARAFDYRGIEYSKKPFKFSNTEAGFVTFKEWILDLKERHEKDKVIPGMEPTGHYWFNLGKFLQDNEMKPVLVNPHHVKKSKELDDNNPTKNDRKDPKVIAGLVREGRYMIPYLPDGVYADLRTASNIRFQLQAELTRIQNRISRWFNIYFPEYKTVYGKPDAKSGMLILKAAPLPEDILTLGIDGVNQIWRDAKLRAVGKARAKTLIEAAEHSVGSKEGAVSGKMEIRMLLEDYESRNTRLQEVMVLIEELVRKIPMTEKLLEIKGVGIRTVSGFLAEVGDISRFNNPKELQKLAGLALVENSLGKHKGETTISRRGRKRLIYLLFEVAMSLVSKNQKFRELHNYYTTRRLNPLKKMQSLMAIAAKLIRVFYAILTKGVDYDPKKMVSDIKRPAVYLQAA

SEQ ID NO: 253932 - protein, 465 aa, unidentified
MRTDKKQWRNRKARKELARQLQSENPGLEVVHPHAAGIDVGNSAHYVAVRPDRDPQPVRRFECFTADLHRLANWLQSCGVQTVALQSTGVYWIPLYDILEERGFEVYLVNARHTKNLPGRKSDVQESQWLLKLHTYGLLNNSFQPLSKIRILRTYWRQRLQHVTGAATCVQRMQKALTQMNIQLANVISDLSGVTGQLIVRAIVGGERDPWKLAELSHPRIQASRGEIAKSLEGNWRQELIFVLQQEMEMYDTYQRRVAECDQELQKHLRAFADTVPPPVKEELPPKKKKKQNKNNPHFHLAEELQRITGVDLTRIDGVDVIVAQTLVSEVGLDMRRWKTEAHFASWLGLCPDNRISGDKVLSRGTRHVLNRAANALRLGASTLLKSQTYLGAQYRRLRSRLGAPKAITAMAHRLARLVYRMLKYGQHYVDKGAEYYEQRNRQQQIDFLRKKAAQLGLQVTAPHA

SEQ ID NO: 253933 - protein, 348 aa, unidentified
MKIIGCDFHTRYQQIAMLDAETGELVERRLEHASGEARAFYAALAGPVRVGIEATGSTQWFEALLAELGHELWVGDAARIRALVVRKQKTDARDAAHVLDLLLSNRFPKLWRPSPVERDLRQLVWHRQKLVWMRTAVKNQLHALAMGQGVCRKKKLFTAVGRKELEALSLGPWAGYRRQELLQLFDQLEQALAKLDAAVEQQAQSQPAAVLLMTHPGVGPITSLAYALTLGDVDRFARSRQVVSYLGLNPQECSSGGRQRLGAISKQGSAMMRSLLVEAGHTAARLDPHLGRMYQRLKFRRGAAVAKVAVARKLAVRMYWMLRRTADYAQLVRMQGSPGGTLVGKLTP

SEQ ID NO: 253934 - protein, 348 aa, unidentified
MEQISAIGLDIAKQYFQVHGADNVGNTVLRRKLRRNQVLKFFTEFPRCRVGIEACSTAHHWARAIAVLGHEVRLIPPQYVKPFIKRSKTDASDAEAIYEAMSRPTMRFVTVKSKEQQAVLMVHRARDVLVRQRTQLSNSIRSYLAEFGLVAAQSPRNVAKLLEQMDAGDIMELPAYAHDAITALRGQLSNLTKQIDALEAKIIADHRCNSLSRRLATIPGIGPITATLMAATISDPKQFSSARTFAAWIGLVPREYSSGGKQVLGSISKKGNPHLRRLLIIGAHTVLRWSRRGGKSGSQWLKQLLERRPANVVATALANKTARIAWAIMVSGETYRAVERSAEVPMPA

SEQ ID NO: 253935 - protein, 314 aa, unidentified
MEKITVGIDVSKDRLDVAVRPSGECFAVPRTGAGLDDLVARFKVLKPNLIVLEATGGFETIVVAALAGAGLPVAVANPAQIRAFAKAIGQRAKTDPIDAAVIAHFGEATGVVPRPLPDQATQQLADLVARRRQIIDMIGAERQREKRANPRIKNSIGRLVKALERELSSVNTDIDDAVRGSPAWREKEDLLASVPSVGPAISRTLIAELPELGTLNCKQIAALVGVAPFTRKSGQWRGKSFIGGGRGSVREALFMGAMVAARYNPVLKAFYERLVAAGKPKKVALVAVARKLLIILNAIVRDGTPWKGTVGAVS

SEQ ID NO: 253936 - protein, 346 aa, unidentified
MLYAGLDLSRKRLDFHLLDCEGATVEVGAAPPDVDGLRGLSERLARHGDAVRAAIESMNGARFVHDRLELAGWQVEIADAQKVKGLAPLACKTDRIDAWVLAELARRDLVPAIWLPDPLVRAERERARWRLHLVRHRSSLKQRVHAVLLTHGKPCPVSDLFGVRGRQLLARLALPEPWQGTLEASLRLIDELDREISDCERELRRLGADHRYVPLLCTVPGISWVLAYTIAAELGDINRFPTPRKLAGYTGLCPRVYQSGERDLRGPLSKQGPRYLRWALVEAATHACTAPVYHDRYQQTKARIGKQRGAKVAQVDLARRLTEAIWHMLTRNEPFAPKGATDPLAA

SEQ ID NO: 253937 - protein, 319 aa, unidentified
MTVAVAAGIDAGKSYLDIGIEPARRHFRVMNAPAGIEDAVSRLQQAGVDRVVLEAIGPFAQPAVRRLVAAGFQVALINPRRIKAFREAEGKRAKTDRLDARLIARFAIRMSDALRPLPSESQQELKALATRRRQLVEMIAMEKTRLKQTVDPWLCESHRTAIATLSAERSRIEANLDARLTADAAAQRRRAILFSIPGFGPAVSTTLITDLPELGTLDRRAIASLAGLAPHPNQSGTSIGRNQIGGGRPCVRTALYMAGLVASRCNPRFRAEYRSMRADGKPAKVALIAVARKLLVLANTLVKQDRRYDPAYSGANITH

SEQ ID NO: 253938 - protein, 434 aa, unidentified
MDDAEVLELEQRVEQVARVAAIDVAKASGMVCTRLPSEANAARRVQRTWAVAATTEEIIALGDHLVCQGVELVVMEATGVFWKPWFYLLEDRGLRVWLVNPRDVKNVPGRPKTDKLDAIWLAKLAERGMLRASFVPPEPVRRLRDLTRLRRTLVEERTRYRQRVGDVLQDACLKIADPKQGLTDLFGVSGRAILGALIAGQRDPKALVALAHPRLKSKAAYLETALTGRFTAHHAYLTGKLLDLHDRLEADIAELSARIEALITEIDPSPPPDGRQPDRVPLLDRLDEIPGVSRETAAEILGEIGFDMSCFPTPGHLASWAKLTPRTIQSGNKNTHGKTGKGNRWIKGPLGQTPTFLGARYKRIVKHAPKKKAQTAIARNILEIIWVLTADPDARYTDLGPDWHTRHTNTARKTRQAVRDLEQLGYTVTLAKAA

SEQ ID NO: 253939 - protein, 355 aa, unidentified
MESVKYLGFDVHQSTISVAVVNADGKLVMQSVIATHAATILDFIHGLRGTLHLTFEEGTHSAWLYDLLARRVARVVVCNPRQNALLKAGNKSDTGDARKLAELLRAGLLAPVYHGEGSTRTLQELVRSYAALTEDTTRVMGRVKALYRSQAIACAGKKPYGRRHRREWLSKLSEAGLHRRAERLYEELDALQGLRRAAKRELGLESRKHAAAKLLRTVPLLGAIRAALLIGRVQTPHRFRSKRQFWAYCGLALETRSSADYRFQDGQLVRAKKPVFIRGLNRNHNHDLKNLFKSAATTASALHGPFREFYEGLLAKGLQPAMARLTLARKIAAITLSVWKKGESFDAEQLKPQAA

SEQ ID NO: 253940 - protein, 348 aa, unidentified
MLTYCGVDFHSRQQKVVFCDLATGEIQRKELKHQSDEVRQFYTQLPKPVIVGLEATGSSQWFEKLLAELGHEVWIGNATEIRRRARSRQKNDWRDAELVLDLMVKNEFPRIYRLSEESLEILRRLRYRHRLVKMRTMAKNGLHAIALSAGLSMKSKLLTKSGRAKLELLDLSPALKDQRDEWLDLIDQLNHRITRLDSEVEQEGQTDPRVQLLRTHRGLGPLTALALVHTLEPVNRFSTSRKVTAFVGLEPCEESSADKVRWRGISKAGSRLLRFLLIEAAGVAIKYDDELKRFYLHLLHRRDWRKAKVAVARKLLVRAWIMLRDQIDYAEFLKRGVAVRSARTGRRP

SEQ ID NO: 253941 - protein, 340 aa, unidentified
MKNTKYFIGLDVHKEKTSYCVRDKRGNILAENQTATLYSELEPQLKPYLNTAKIGLEASTSYYTLYRTFLTNGYDISVANTIQLRQLISKNDSLDAKRLSEMLRLGTFPCSYIPDEHIQHLRSLVQVRHSLMEEKVRCNVRIQAFLDKNRVLMPPYDAFSKHWRHTLQEHLNTGAVSSELQYEYDHFLFLEKKQRHVEQEMKHYTRIHWRKEYTLIQSVTGFGPVLACYVIAHVCPIERFPSNRKLRRYAGVIPVTKQSGETTSRGHIPKGSSRKQLRWALVQAANTAGKTDTPLGRYYRKKKKQKKITAIAKIAVASSMIDILYKVLTTKQPYHAASAE

SEQ ID NO: 253942 - protein, 432 aa, unidentified
MVEINPLSTLFVGIDVSSKNNVVYAMDFNQHKAFSSSFANSQPGAEQLEKRLEQFMLAHQNLDTIVVAMEATSVYNIHIANFLSSSEVLMPYSPYVYCVNPKATANYAKSYVGASKSDPEDAEMIADFARAGRTKKLTPWRGSQFIALKRLTRQRLHLVECMTREKTYMVSNMYLKFSELQLLDGDNAPFCDVYGATSSAVLTEYYSLQDIIDAPEEDLLKFLAEKSRNRIADPSEASRLLKKAASDSYRLDKCMYEPLNISLACSFNCIETYKKQIKAIDKAIEKALNGVVPEAVTILESIPGIGPVCAAGIIAEIGDISAFRSADALAKYAGLTWRHHDSGDFRSDDTYVTKAGNIYLRYFLVEAANSVRRHVPEYGEYYAKKFAEVTKHQHKRALALTSRKFVRLVFGLLARNQLYTGEKLDAELNNRT

SEQ ID NO: 253943 - protein, 414 aa, unidentified
MDILVERCAGLDVHRDTVVATVRVPPDSSGRKRRAQYTQTFATTTAGITKLGDWLAEHRVTRAGIESTGVYWKPVYYLLEDQLEVWLINAEHLHNVPGRKTDVADSAWIAQMVEHGLVRPSFVPPPPIRALRDLTRHRRTLVEERTRVVQRLEKVMQDAGIKLTSVASALLTKSGRAMLEGLLAGQSDPEHLAELARGRLRSKIPALREALAGRFRVEHHGLLVAQMLAHIDFLEAAIAELDKSLDTAAAPFAATVKRVCTIPGVSVRTAIMLLAECGADMSVFRTAAHLASWAGICPGNNISGGKSRTGRTRHGSTALRTALTEAAHAAARTKGTYLAAHHAHIRGRRGRLKAIGATRHDLLIAYWHIVHDHVDYTDLGPDWAQRRRSTEQRTRRLIHQLEQLGHTVTIAAAT

SEQ ID NO: 253944 - protein, 426 aa, unidentified
MSTINSNLSADKAGTLYVGIDLSLKSNQVVVTDTFGKQLATFAVGNDLPGANKFKEKIIQIAKQYQIATIKIGMEATSLYWWHLYQFLVQDETLNKEYILDVFTLNPKLVKRFHKATADLDKTDPIDASVIADTVRFGKVTQSHLIDEVYEPLKRLTRFRCHLVTSLIVEKNYFLTHLFLKYSSWQKIKPFSSAFGTTAQEIISKFDPEEITNLSITELAERMIGLSRNRLADPVKTALLVKEVANSSYQLANKLKEPIDLILTNTYDNIRYFGEKIKTIDAVIEKEFSRYTNPLTSIKGIGLVFAAGITAELGTTSRFRRQSQVGKYAGLAWKKSQSGEFTAEETPRKPGNTYLRYYLVQAASSLRVHNEEYKVYYERKYQEVPKHQHKRALVLTARKLVRLCFAMLRDQRFYQPGNQKGDQPKS

SEQ ID NO: 253945 - protein, 400 aa, unidentified
MLSIGIDVSKGKSTVCGMKPGGEIVYAPFEVQHTRKGMSELVSLLRSSGEEVRAVLESTGSYHCPVVAALLENGIFVSVVNSLRMKRFCSQSIRKVKTDRIDAMQIALYGLAYWQELQPTKLPEDTYRELQLLARQYYQMTSLLIKAKVDFNAICDQVLPGMQELMNDHAGRHKLSDFVLRYRHTTHILEMGETRFRKDYCKWAEKKGYRNCERMAVLIFATAQNGIPVLPNAPSTQIVITEAIRVLHTVEASRDAILTQMQALAKTLPEYSLVREMPCIGDTLAPRLIAEIGDVRRFHSKRALIAYAGIDAPPYQSGKFCANNRHISKRGNRYLRKTGYEVMQSYVMHKPANDPIFTFIEKKRGEGKSGKLAMVAGLNKFLRVYYGKVTELYRSLPAIE

SEQ ID NO: 253946 - protein, 379 aa, unidentified
MTEIQTTPTPDTIRNDRLYIALELSNSKWKIAFGNGFKIRLKSIVARDLKQFELELQSSRKHFGMAEDIPLYCCYEAGRDGFWIHRYLCTLGIRNMVVDSSSIEVNRRYRRAKTDRLDASKLLTMLIRYINGETKLWSVLRVPEKEDEDARRLHRETARLKKERTAHTNRIKSLLALHGILMGVGKTFLQDLEKAALWNGEPLPPNIKEEMVREYHRYEFLQQQLQALEKRTKEVLKGESESSKKVLVLQNLKGIGPVSSWDLVHEFGWRPFNKAKEVGAAAGLAPTPYDSGGSQNEQGISKSGNRRVRALMIEVSWSWLKHQPNSTLSKWFVERFGHGSKRMRRVGIVALARKLLIALWKYWEKGIIPEGATLKAYYC

SEQ ID NO: 253947 - protein, 344 aa, unidentified
MKHYAGLDVSVKETSICIVDEAGRICREMKVVSHPEDLLAVLCDPAWRLERVGLEAGPLSQWLFSGLAEAGVPAICIETRHAKAFLKAQVNKSDRNDARGIAQMMRVGLFRPVHVKTLASQKRRALLAARKILQEKALAIENDIRGLLRNFGLKVGIVGVVGFEQRIHDLVEGVPELADIMEPLLAARRVLREKFAKLHRKVLLLARDNEVCQRLMTIPGVGPVVSLAFISTVDVPARFRNSKAVGPSLGLTPVLNQSGESHRVGRISLCGDEAMRALLYEAAQVMLTRVQKWSWLKAWAMNIAKRRGQKKAIVALARRLAVIMHRMWSDGTEFRWTREMAPTI

SEQ ID NO: 253948 - protein, 459 aa, unidentified
MDTNFYLGIDVSKGYADFCLLDSTKNLAGKQFQLYDIEESHQVLDQYLGKIIKEYNPKSIYAAVESTGGYENNWLNKVNSLGEKYPIMIARLNPLAVLRHRQANLKQQITDRTSSQAIAEYLFYHKDKVVYYRPEEFADLRLYLKHIALLDKHKVQLKNQLHHYLYLYFPEIVPYCRKNFPAYVLKLLENYQTSSDMAKARDGKRNKFPYFEDWKNLRERCKSSRVVVPDDLVKKMIADSAKQIYKLDCQIDEMYDLVYNRLPKERLDILTSMPGIGKKTAVILLCTIGDVSRFKTASQIISFFGLHPVIKESGDKKRKPYMSKRGNRMLRKHLYMAALVACRSNPYLKDLYRKSVDNGMNKKAAICKMMAKMMRMVYGMLTNNEHYNPKIDELYRKRYQQKILLEKSSQEGENDFSDSLLSIAPISKKNAKQRKEQKSAYTRTRSSNRLLSAPSKLPS

SEQ ID NO: 253949 - protein, 339 aa, unidentified
MKSMPVGIDIAKQVFQVHYMDQATGEIVNKPIKRAKFLEHFANRAPCVIGMEACGGAHHWARQLIRMGHEVKLMPAEFVKAFNIRNKNDAADARAIWLAVQQPSKPVAVKTEMQQAMLALHRMREQLVKFRTMQINGLRGLLTEYGEVMSRGRVKLDSEIAAALGRLAERLPAALIDTLREQWNGLAKLDEQVAQIERRMRQWKKEERAVKAISAIPGVGLLTATAAVAMMGDAKAFRSGREFAAWAGLVPKQTGSGGKVHLHGISKRGDTYLRTLLIHGARSVLTHAKEPGAWVEQMRKRRPANVIVVALANKIARTIWAVLAHDRQYQKGYVSVKPA

SEQ ID NO: 253950 - protein, 374 aa, unidentified
MSHHNEAFVAFDTSKLRNTVAVAEAGRAGEVRFVGEIDNTAGATAKVVKKLAARYGRLTFCYEAGPTGYGLYRQLKSLGHECIVVAPSLIPQKPGDRVKTNRRDALGLARLLRAGALTAVWVPDERHEAMRDLSRARGAAVEDLRGKRQQVSSFLLRHGLHYPGRKTWTQAHMVWLASVKLAHTEQRIAFEEMLLAVRQAQERIERLEQAIRAAVADWSLAEVVTALMAMRGLDLISATTFLAEIGDLSRFRTPRELMAYLGLVPSEASTGDTVRRGPITKTGNRRARRILVECSWSYQHAPRVGKKKLEKVAAAPPAVREIAWKAQCRLSARYRALLRKGKPKNLAVTAIAREFAGFIWAVSRQVTSAAAAAA

SEQ ID NO: 253951 - protein, 333 aa, unidentified
MYYSGIDLHSDNSYITTVDDSGAVVKQQRVENNNELVLDYFQSLPGSHQAVVESTTGWYWLNDLLGENGIELVLAHAKYLKAISYAKVKTDKVDSQTLAILLRQGLIPRAHKISRELRGLRDTMRVRLRLVQQRSDTLRRLHSIHAKFNGSVPDPYRFQLAVLEHTRDTLSKEILALEKSLHPVLIPNDDIQRLLNIPGIGKLSAFTIYLEIDGIQRFNSDKHFVSYCRLVPAADNSNRTLHHRSSKDGNKYLKIAFSDAAVHAIQFYPEYKRLCQKLVRRSGEATARTVVAKELAKIVYYVLKNKTAYTGLKGQPMSRQKSQQWPRLSSPLF

SEQ ID NO: 253952 - protein, 424 aa, unidentified
MKNTAAMKRKQVPEGYLVVGVDPHKKRHAAVAITQDFTTQAKFKFDNTREGLEMMLDRAKVEMLKFGCRGVMFAIETGGHYWRNIAYYLDERGIPFRFINQYTLKRRREGKDLNHRKNDYRDSEVAAQLLCTGEFVESVIPQGVYAELRTSHNAYQRLVKERTRITNLVKGLLDALFPEFTRVFKDPGGLTALSVLSTCPIPRVIAGMTEDEFEVTIEAQHKGRRLMRKKLRALHYSATISIGIHAGARSVSSEIAFLVEKLELIRRHIRVIEGTLVKLVDETEEGKYLLSIRGLNYIAVAGLLAELGCFKLYRSAKQMIKMAGSNPTESESAGKKRSKTPMSKQGRPLLRYCAWTSVIPMLRFNPDFRAWAKQRRERPAHANPLSGREIVGAALNRLLRLAFALVKNQTYYQDVKPALIPVAV

SEQ ID NO: 253953 - protein, 460 aa, unidentified
MNNYTLEVARTAGAKELKNQKAAKAKRIVMGTDVHSRSYQAARKIDNGPIGAVAKFRSQEELLLYVEKQKEQAEEVVVVYEAGPLGYVLYRALKARGLRCYVCAPDSREQKRKRRKNNTIDTRTLTSNLFNYLQGNERALQLVRVPTEEQEQARWQSRQHDQLVEERKRLGAKGNALLLSRGFGSWKNWWRPKAFSRLSQLVPEWLLELLETWVDLLRKLDEKIRRAKVALAKRCSGLRPKGVGAPSLVQLQSEVLDWGRYRNRRKIGCLAGMVPSEWSTGDTQRRGSITKVGVGAIRRIITEMVWRIILFQPQYKAVQKWQEVLRGSNRGLKKKAVVAIGRQLMVDLWRLQTGRISAQELNLVMIGGSSIFAVPRKFSGINLGLYPKPRFGGNSKKSWRLGHAPAQRRKPSYPATKDLTLSTLERRAPVFALGCLKPVGRLGALVPLERCVSCIMRCHT

SEQ ID NO: 253954 - protein, 464 aa, unidentified
MTTDKELWRNQKQRKELARRLRSEDPGLEVVHPHAAGIDVGNSAHYVAVRPDRDPEPVRRFECFTADLHRLADWLQSCGVKTVALQSTGVYWIPLYDILEERGFEVYLVNARHTKNLPGRKSDVQESQWLLKLHTYGLLNHSFRPTSEIRVLRTYWRQRAEHVQGAATCIRRMQKALTQMNLQLANVISDLSGLTGQKIVRAIVAGQRDPYKLAELRDPRIQASPEDIAKSLEGNWRPELVFVLTQEVDMYDTYQQRIAECDQQLQKHLTRFADTVPPQAKEETKKKKGKPSKNTPSFPLSGELQRITGVDLTRIDGIDVMVAQTLVSEVGLDMSRWKTEAHFASWLGLCPDNRISGDKVLSRGTRHVVNRAATALRIAATTLLRSQTYLGAQYRRLRTKLGAPKAITAMAHRLARLVYRMLKYGQQYLDKGAAYYEQRNRHQQIQFLRKKAAQLGLQVIAAHP

SEQ ID NO: 253955 - protein, 346 aa, unidentified
MVNRSKPEAQVFAGIDVSARELSVAVRCGTEDRAVTTFGNNAAGHKALLPYLLLRGNGRSRVCLEASGNYSLDLALTLQAHRQVEVSVVNPRRARRFAESLGERSKTDPVDAGVLCEYAARMPWVAWQPPSSLALRLRAITRAIEALGVMHTQEKNREHALASSQAFPAVVIQEMRRHQRYLEHRMERLRREALRLIARDCELDRRFRLMLTVPGIGQTSALQILGELVVLPDTLDARQWVAFSGIDPSQFTSGTSVQKRPRISRGGSRHLRRALYMPALVAVRHEPHLRAFYQRLLSRGKARLQAVVAVMRKLLHALFAMFRSNQSYDGSKLCPIELTNKLAAVA

SEQ ID NO: 253956 - protein, 370 aa, unidentified
MDPLLCGSTAMSHNEFQSSELIEPQEASAMKHEINVLGIDIAKHVFHAVGMDDRGNIVYRKRLSRHDLMPCIAKLPPVRIGIEACGGAHYWARRFRAYGHEVKLMAPQFVKPYVKSNKNDSRDAEAIAEAVTRPTMRFVPIKDVDQQDLQALHRVRERLMGERTALVNEVHGLLHEYGIVIPKGVSKFRQAVVGKLEAEKDKLTPLSQEMFWKLVEEFAALEAQLAYYQEKLDTLAQTHPECQRLMTIPGIGPLTATALVAAVSDASAFKNGRQFAAWLGLVPRQHTTGGKERLLGISKRGDTYLRKLLVHGARATIRWVGRKTDRRSQWIRQLVDRRGKNRTAVAVANKNARIVWALLTSHQDYQPATS

SEQ ID NO: 253957 - protein, 465 aa, unidentified
MRHNPKRQRVSEKDRPSVSLLERIQPDAAGIDCGQNSHFVAVPPERDPQPVREFRTFTAELERLADWLAQCRIKTVAMESTGVYWIPLYEILEQRGLEVMLVNARDVHNVRGRKSDVMDCEWLRELHSVGLLRSSFRPAAAIIPLRSFMRQRATLVEEASTRIHRMQKALTQMNVMLHVVVTDITGQTGLRIVRSILAGERNPERLAAHRDPRCHASRAEIVAALTGNYRAEHLFALRQNFAAYEFLLRQIAECDGEIEVLLTALAAQQPPPSAPLPAPRKRDSKHQPQFDIRSPLHRLTGGADLSQIDSIGPHAALQLIAEIGTDMRRWPTEKHFASWLTLAPNNKISGGRLLSSRTPPSANRAAAIFRRCAMSLTRTSTALGAFYRRLAARAGKAKAITATARKLALLVYRVMSGQLVYTDPGVTAYQQLHRTRELKSLRRRARQFGFQLVDQTTGEILNAVS

SEQ ID NO: 253958 - protein, 418 aa, unidentified
MSDQVRWFVGVDWASAQHRVCLLDAEGKCVAERDVTHGGAELSELCTWLVEKTGAEPAEIAAAIETPRGPVVEALLERGFKVFAINPRQLDRFRDRFSVAGAKDDSRDAQVLACSLRTDQPAFRCLSVDDPLVIELREWSRIYDELKQEQNRLTNRMRGQLWRYYPQAGELSDDLAAEWFLDVWQQVPTPARAARVSEKTIARILKNYRIRRLDAAEILRILRRPPLGVAPGTTEAATAHIRTIAARLRLINQQIKEAERRLDELCAAIEAAAESAPGQICEQRDVAILRSCPGLGRINIATLLAEACEPLRRRDYHVLRILSGVAPVTRRSGKSCIVVRRHACDTRLQNAVYHWARVAIQHDPISRQRYAELRRRGHSHARALRGVADRLLYVLCMLLQRQVLFDPDYKSSQMAAAA

SEQ ID NO: 253959 - protein, 435 aa, unidentified
MKNSDPHMSPSSNESWAACVGLDWADEKHAVVLQAAGSQIKEHATLEHTPEALSDWVAQLHQRFAGGKIAVILEQSRGSLLYALLPHAHLVLYPINPQMAAKFRKAFYPSGAKTDPLDAELLLQILLQHRDRLKAWQPDEPITRQLQLLVEARRRFVADRVRLSNRLENALKSYFPQALQLAGESLTTPMACAFLQKWPTLEAVQKAGAQRLRKFYYGQHSRAEELIQQRLLLLAQAKPLTTDAAVVSAQSLLVKSVAHELAALPAILAEYDQQIATLFAAHADCGIWDSFPGAGAALAPRLAAAWGTQRDRFESSDAMAAYSGIAPVKQASGRSVWIHMRWACPKFLRQTFHELARTSLCFCVWAQCYYQMQLQRGKGRHAAFRALAFKWQRIMWRCWRDRVPYDDAKYLASLKRDNNELYTRIIAFQSAQVGA

SEQ ID NO: 253960 - protein, 354 aa, unidentified
MSQIPNTAIAVIGIDIGKNSFHVVGHDARGAIVLRQKWSRGQVEARLANIPPCLIGMEACVGAHHLSRKLASLGHDARLMPAKYVRPYSKGQKNDFNDAEAIAEAVQRPTMKFVATKTAEQLDLQALHRVRERLVSQRTGIINQIRAFMLERGIAVRQGIGFLRTELPTILATRTDVLSLRMLRVIEELAGDWRRLDQRIDGLSGEIEALARQDQACSRLMTVPGIGPIISSAMVAAIGTGDVFSKGRDFGAWLGLVPKQISTGDRTILGKISRRGNRYLRVLFVQAAWVVLVRIKDWERYGLKSWIEAAKRRLHHNVLAIALANKLARIAWAVLAKGRAFELTRTDDAGVRPA

SEQ ID NO: 253961 - protein, 370 aa, unidentified
MNQIIRIGIDTSKSVFVLHGVDAAEQPVLRRKLRRGQVLGLFGKLEPTKIGIEACGAAHHWARELTALGHEVVLLPPQYVKAYVKRNKNDAADAEAICEAMSRPTMRFVPVKTTDQQAALMLAGRRDGLIRRRTQLSNTIRGYAAEFGLIAAKGLDKIAPLLGRIAADNDLPELAKELFADYGREYTALGKQIMKIEAKLMAWHKNSELSRRLAELPTIGPIGASMLTMKVTDPHAFGSGRDFSAWIGLTPKDHSTAGKMRLGVITRAGDEALRSTLVAGATAVIQQVRRGRGNPTPWLADLVRRKAPKLAAVALANKMARIAWKLMVSGERYDRQRAAGRFVPPTSRGAPSSRRQGRFAPPAAVAVGQP

SEQ ID NO: 253962 - protein, 391 aa, unidentified
MTERKTETVNDLSRCLDPLDMDATLIAVIEMSQSSWLVGGIVPGVERQPLKKLAIDERALLKLLSRWRAEAEKKGHRITRIAVAFEAGHDGFWLARWLAAQGIEAHVIHASSVAVTREHRRAKTDRLDTGLLKRGFLGWLRGERGHCKMVAVPTLAEEDAKRPSRDRETLVGEASRIITRVKAAFVRLGIRRFNPKLKTAAAGLEALRTPEGEPIPPNTLAALKRDLERHRIVKQQIREIEQTRLERLGKAPAEGSHAMVRLLARVIGIGVETADMLVQEVLSRNMRDRRAVARYAGLTGSPDESGAKRREKGLARSGNARVRRGMIQLAWRFLMFQKDSALAQWYRQRTANAPSTRKTLVVALARKLLIALWRLARDGVVPEGVRLRPAA

SEQ ID NO: 253963 - protein, 349 aa, unidentified
MPMLADRIDYVIGIDCHKNTHTAAVVDQLGGLLATVTVATNGSGYRELWRWVCRQALGRRVWAVEGAGSYGAALTDLLIEKQEWVVEVDRPKRSKRKAGVKSDSVDALRAAKDALAADHLAEPRQRGELEAVRVLKITRKQTVQVNAEAVVQLQALLVSAPEALRARLRGLSAAQLVTACADLRDQPSQSTSWQATVAALRTTARRARHAASDVAQLDRRLSALVKAQAPKELLVELGVGTVVAAEVLSAWSHKGRLHSEAAFAKVAGTAPIEASSGQLVRHRLSRGGDRQLNSALHTVVLTRWRQDERTQRYVARRRAEGKTDREIRRCLKRYVARHLFRVLEAAPDS

SEQ ID NO: 253964 - protein, 353 aa, unidentified
MKCDKYMGMDVHQAMTVVAVMDADGRVILETMVPTEAAAMIRLVQSMSGPLHVTFEETTQAQWLYEVVRFFVADVIVCDPRHNKLLSEGSKGDKIDARKLADLLRTGMLRRVYHGNEGTRKLKQFVRAYETLSTDTKRTMVRIKAIYRGRGIRTPGRNVYQTKQREQWLELLTEPGLRERVGWLYEELDHLRPLRRQAKQAMLSEGRHHRAVQLLRTIPQLGPIRAAVITATIDTPHRFRTRHQLWSYSGLAVVTHMSAEYEMKAGRVVRSRKPIATRGLNRNCNHRMKEIFIGAATAGSQTEPYRSYLQALEQKGIRKEMARLTLARKIAAVALTIWKKGETFDLKKLNSTT

SEQ ID NO: 253965 - protein, 340 aa, unidentified
MTITTVGIDLAKNVFAVHGVDQNGKTVLIKSRVTRAALPCLIAGLPPCVIGMEACSGAHYWARLFRQYGHEPRLMAAKFVSPYRMAGKSGKNDAADAQAICEAVCRPHMRFVPVKDESQQAMQCLHRTRQGFIEDKTAMYNRLRGLISEFGVIAPQSTDAPRHMISAEKDSLPLQVQQCVDDLLEHVARIEANIDEYDRILSRIAKTDHRSQRLMELKGVGPTTACALVSSIGNAHDFKNERQLAAWLGLTPSQYSSGGKSKLDRITKAGDSYLRTLLVQGARSVLIGAEKRTDSFSRWVCSLVERRGYWRAVVAIAAKNARLCWASLHYGDDFRLYSAS

SEQ ID NO: 253966 - protein, 352 aa, unidentified
MEQFIGCDAHKKFSVFVAVNEKGQAGEALRVAHDRQLYREFLARLPAHSTIAVEASGSYSWLVDEMERSGHHPKLCNPLEAKRRMGLTNKTDTLDARGLAILLRNGTLPEVWIPPSELRDQRELLRLRIFLVRLRTRVKNRIHGTLSRHNVQVPGADLFGVAARLELGTRLPELPEHSREAIEQELATLDFLKIQIEAAEQRLEAIMKVSVEADLLKTLPCVGKILSMVLMLEIGRVDRFPTAAHLASYAGLVPRVHSSGGHTRLGQVCGNVNRNLKWAFVEIGNLVVINQRRLGGVHVVRLYQRIKRAKNHQKAVVAVARHLAEAAWWVLTKQEVYREPQNLRLALSSTHG

SEQ ID NO: 253967 - protein, 357 aa, unidentified
MKTTQVSEKPDFSGESIYVGIDVHKKQWNVSIMSAFKEHKTFVQPPEPNVLGNYLKEHFPNASYYSTYEAGFCGFWIHDALKKEGIENIVVNPSDVPTTDKEKKQKNDRVDSRKLCKSLREKSLTGIYVPTQEQLEDRGAMRLRKKLVGDIARCKNRIKGMVNFYGIKVPVEYDSAYWPKPFIAWLMGLELTQPSGTFSLHILVGELEGIQKLKKQVERHLIQLARQKYAIQVGLLRSIPGIALIGALTFITELGDMKRFRRLDDLCSYVGLVPNVYSSGDTRHVGHLTKRRNPYLQPILIQCAWKAASKDPALLKAYQDWCKTMKANKAIVRVARKLLNRIRFVMLNQKKYQLMKA

SEQ ID NO: 253968 - protein, 338 aa, unidentified
MTVYTGLDVSDRTTHICAVDEQGRVTWRAICATDPQALAQMLREHCPQAVRVVLETGALSAFLYHGLIERGVPAVCICARHAKGVLSVRANKSDPHDAEGLAQLARTGWFKAVRIKDDATHLDRARLKVREQLIKSHRALLNQLRGLLKLFGLRLGQATTPGKRMERLVALFAQKPQLRPILAPLVASLTMLEAEIGKATRALKLRAAADPVCARLMSAPGVGPVCAMTFKSAIEDPARFQRGADVGAYAGLVPRRFQSGERDTRGRISKAGDPMLRHALYEAANSLLGRLKRDCALRTWGMALAEAKGAKRARVAVARKLAALLHTLWRTETSFRWA

SEQ ID NO: 253969 - protein, 345 aa, unidentified
MEQISRIGMDTSKHIFQLHGVNTAERPVLRKKLRRKEMFAFLEQLAPTVIAIEACGASHHCARLLQSFGHSVKLIAPQLVKPYLKRGKNDAADAEALCEAMSRPTMRFVPVKTAEQQAALMLVGVRDRLIRNRTQLSNAIRGYAGEFGLTAARGRAHLASLLERIQADESLPALARELFAAQAREYTQLQAQIDEVDARLIAWHRADECSRRLAKIPGVGPIGAVLLTMKTPEPELFRSGRQFAAWIGLTPKDHSTAGKVRLGGITRAGDAGLRSVLVVGATTVIQHAQRGGRPSPWLTQLLKRKPPKLAAVALANKTARIAWKLMVTGENYAAKAALVALAGAA

SEQ ID NO: 253970 - protein, 412 aa, unidentified
MAKRTVEFEQVIERGCGLDVHRDTVVATVMGKGIQTETRTFGTTTSSLKELGEWLERLQVTDGAMESTGIYWKPVLHVLREYPLNLLVVNARHIKNVPGRKTDKADSQWICKLLISGLLKGSFIPPENIQALRDLHRYKKKLVGTVASEKNRIIRVLEDANIKLSSVVSDTSGVTATYLIKGLIEGRKDLEKLVSECYHKKLQATPEQIVEAINGRLTPHLTFLLKAMQKHIQSVEEQLAEIDAEIERHIKDFEKEVELLQTIPGVGREGAIGIVAEIGVDMGVFPSEHHLASHSGMCPGNNESAGKKKNSRTRQGNKHLKATLTELAWGATRTKKSFYKAKYESLVVRRGKKRALIAIGHKILCASYHIIKNKEAFKELGYEYLAERKKKNRLEYLKRELREHGYNVEKAA

SEQ ID NO: 253971 - protein, 417 aa, unidentified
MNESAKLLPQKYMEGDKVHVLGIDVSRGKSNCALLHDHTVIKEFQIIHNKSGLAKLKSIITSDLPVMAVFETTGIYSRVLTRFFIDEGMNYLEINPLESSIRMAGLRRQKTDRSDAVKLALLGIDQKSLIHGRRPYSRPYEQLHLMAHRYLEITKERSRIINHLHAALDQTFPELNDIFNPIRSVLGLTFVSLFPHPDFLTGYIPGTMAKQIIGLVSPKIHSDLIVRRCNEVWQAGQLSYPAQPANSFLTNQIHSYCEEIQRYNQAHDLLKRQLITYAKTFPEFKLIASIPGAGEISTALLLGFTGKIARFPSYKQLNAYVGIDLRRIQSGGFKEADRINRRGQSSARYIMFEMIRSMLRNKARIDNHIVDYYYKLKKGPHPKPDMVAMIACVNRLDRTIMNLVRTNQIYNYARTSH

SEQ ID NO: 253972 - protein, 346 aa, unidentified
MPIVGGLDIHRKQITFDYLDTATGELQRGQIAPADRAHLAAWLARRFPGGQDADFALDGCTGWRYVAEELAAAGISAHVGEPAETAAFRGPKKRAKTDRADSRHMRQLLADGRLPQCWIPPSHILECRALLELYHDLRVEHTAWVQRIHATLFHQGAPQLGEQNLRTGEGVAALQAIAAAQLSPAGQLQVATALDMLAVLEGHLDVLRRRLLDAARHLTGAKVLRQRLYGVGPVTALALTCWLGGAGRFSSARKAVRFTGLDVTVYSSAGKRSPGRLSRQGPAVLRWCVYEAGKTHARASAPDHPYYAGVKDRIDGKRAAISEARKIIRQACHILAELGDDALTTT

SEQ ID NO: 253973 - protein, 306 aa, unidentified
MDRDGNITREHIFPSSKKAVERFLCDIPSSGITIAIEACGMWRGTYKILTDMGYEVKLANPKKTHDIACKTKTDRIDAKILADLLRTKYLPEVWIPDEQTLKFRDLTRHKSSLTRLKTQVQCKIKSYLLRKGVKYGKLWNEKTLSTLAEEDQDIQNLINVYNSLKKEEKEIMKRIKQIARNRKETTLLMSMPGIAEFSSLMILAEIGDIQRFRSPKELVSYAGLCRGIYQSASTERSVRNTAVNKWLKWIIYECSGRAIMLDQRFQQYFYPIQKRKGKNTARRATARKMFTIIWYMLTNKETYRAS

SEQ ID NO: 253974 - protein, 352 aa, unidentified
MHMIAFDSHKRYTVASVQSIDGQIIKETRINHGRGSIVRFLSQWDKGSPVAVETIGNWYWIVEEIEHAQMRPRLVHARKAKLMLGMINKTDKLDARGLNRLQQTGTLPTVWIPPLEIRDQRELPRTRMVFANQRTRLKNRIHSVIDKYGLQQKFTDISDMFGKEGRKLIKESLALLPEQTRYTLKTLLHHLDEVERQVEKIEKRMKKVFHPNEETKLLMTMPGVGFILSVVISLEVGDVGRFNGPERLSSYSGTVPRVHASGDKVRYGRLRPDTNRYLKWAFSEAGNSVAVNRKKWPQRHVSKVYGRVRHRQGHAKAVGAVARHLAEATYWILTRKEQYRERGVSRVSRTEA

SEQ ID NO: 253975 - protein, 472 aa, unidentified
MRVSKTRRGQTPRWRNERRREDWTRAVIGTTVCCGPEVFSRSSTQSSISLGTAAYAFWALNRKEGVMEVVVEIGAGLDVHKKRIVACCLDGRSTPPKRIRRTFGTFFNQLQSLRDWLVTAGVTDVAMESTGVYWMPVYRVLEGHVRIILGNARLMANVPGRKTDESDAEWIAVLLRHGLIRPSFVPPKAIRELRQLTRCRRKLVQMRTTAQLRVDKLLQMANIKLSSVASDLFGVSCRKMLRALTDGITDPVVLSELSYSTLRNKRPQLIQALTGTLSVEDRQLLKIQLDLVDDLKRELGRVDELIQQKVIPYEAIVQLLDTVPGINRTIAQEILGEIGTDISIWPSQRHFSAWAGVCPGNRESAGVRRRARSREGDRYLKSILAQAATSAAHVRGSYCAARFRSLKFRLGERRAILALAHELALSIYFILLRQQPYREPLAADPRLVRDQRRRSLIKQLQKLGYEVTCSDL

SEQ ID NO: 253976 - protein, 438 aa, unidentified
MSDHSEVFVAFDTSKLRNAVAIAQGGRRGEVRFLGEIENTEEATSRLVKKLAARHRRLTCCYEAGPTGYGLHRLIESLGHECMVVAPSLIPKRPGERVKTNRRDAVALAKLLRAGELTAVWVPDARHEAMRDLVRTREAAVDDLKSKRQQVLALLLRLGLHYTGKRTWTQAHWNWLVGQNLAHREQRIAFEEMLQAVREAQQRIARLDQAIRAALPDWSLAPAVTALMALRGLDLVSATIFLAEIGDLSRFATARELMGYLGLTPSEHSTGDKVKRSGITKAGNWRARRILVECAWSYRHPPRLGKEKLARVAAAPKAVREIAWKAQARLCARYRALIRRGKRPTVVVTAIARELSGFIWAVGHAVAAPTRGATKLLQEACTGLRSGHDNIVQRRGRSHGRGTPDFAVWPIARSTPVRRQGQPRTNTRNCGSNPRIRA

SEQ ID NO: 253977 - protein, 354 aa, unidentified
MSSEKYIGLDVHQATISVAVMDSQGKLIMESILETKASTILEFLAGLRGTLSLTFEEGTWAAWLYDLLKPHVAHLIVCNPRKNALLKHGNKSDKMDARQLADRLRLHDLKPVYHGETGVRMLRELARSYLTVVKDLSRVMNRLKALYRSWAIPCAGRDVYYTRHRSQWLEKIPEAGTRRRAEQLYQQLDMLQHLRQQARRELLAESRKHTITAKLRQIPSLGPIRSALAVALIQTPHRFRSKRQLWTYSGLGLETRDSGEYHFVKGQVQRKKPVWIRGLNKDYNHDLKGLFKAAAMRASIQPGPFQEFYQRSLAKGIKPTMVRLTLARKIAAIPLTVWKKGENFDVEKLKSQAA

SEQ ID NO: 253978 - protein, 343 aa, unidentified
MQAVTTIGLDIAKSVFQVHGVDAAGQVLIRRQLKRRAVLAFFQKLPVCLVGIEACASSHYWSRELQALGHSVRLMPPAYVKPYVKRQKNDMADAEAICEAVARANMRFVPTKTPEQQSCLMLHRTRHLFIRQQTAVINSIRAHLAEFGIVAPVGRKGVTELLHIVADPSDKRVPEVARVCLAALGNQLLSLKEQIVEFDRMIMVWHRSNETSKRLHYIPGVGPMLATALVASVADPRTFRSGRNFSAWIGLVPKQHSSGGKDRLGSISKQGDRYLRSLFVAGALAVIRYAKIHGTGHRPWLTALLGRRPTKVAAIALANKIARMAWAMMAKGERYKQPAALAR

SEQ ID NO: 253979 - protein, 384 aa, unidentified
MNRIIKIGMDVHSTNYTLCAMEPVLDGEDRIFANIKVTPDYKNVIQFISKLKNKLGTSDTYSIECGYEAGCLGYSLYHQLTDAGAKCTILAPTTMLTSQGKRIKTDKRDALMIAQCLSYGGYHAVHVPDEKDDAIKEYLRMRDDHKLMLKKIKQQINAFCLRHGHFYDGNKWTIKHREWLKTLKLSDLYRETLDEYIATCEEQELKIERLDHRIEELASDSAYKEKVKKLGCFLGIKTHTALSLIVETGDFKRFAKGNTYAAFLGLVPGESSSGDNVNRTGISKAGNSHLRTLLIEGARGICKGRIGHKSKDLRLRQAGNSAEVIAYADKANVRLRSRYYRFMRHEKKKNVAVAAIARELACFIWGMMTDNISIVPERGKQNVA

SEQ ID NO: 253980 - protein, 438 aa, unidentified
MMTIMKTINTSEFAATIGLDWADRKHDLWICPEGQAKAEHLRLDQTPEALHHWVAKLRERFPNRRVAIAVETSRGPVISALMAYDFIVLFPVNPKGLKDYRGAFCVSGAKDDRTDAMRLEELVRLHRDKLHALEPDTELTRKLAGLVENRRHLVDERTRLVNQQHSTLKTYFPLALDLLEDQMNTLLAAEFLTRWPSLAALQKEKPKVLRAFFYQHNSRNAQRIEQRIQAVPAAQPLTTDAAIIEPACALVSARAGMLRPLLKAIAHLDEAIQEAMDQHPDAPIFRSFPGAGPALAPRILVAFGTNRDRFASADEVAQFYGIAPVVEQSGNSKTVHVRYRCPKFGRQSFHENAACAFKKEPWARAYYDQHKKKHDDKHHPACRALAFKLIRIYFACWRDKRAYQSDLYVQALRKNGSPLHKTLKTQRAPSCEYLSKNP

SEQ ID NO: 253981 - protein, 343 aa, unidentified
MSAYYYIGLDIHKKTISYCIKAIDGTLIGQGKVDADRKSLGEWVQGLPGPWVGAMEATIFTGWVYDFLKPHALALKVAHPEMLKAITAAKKKNDRADAEKIADLLRVNLLPECHMLSEEIRELRRILRYRNHIVRMAVNMQNKVSGLLMEVGASYSKKRLHGKKYFRELLERVEDIPPSVKELLKLSRSSYEMFRSFQKRLVETLHTNNLIHDQVERLMTIPGVGELTALTWVLEIGDSERFTSIWKAVSYCGLCSAQRESAGKEQRGPISKKRNKHLQTMLIEAAKLAPRWNEQLAILHERELKRGDRNRATLAVARKLVAYMLAVDKKQADFKLPAEMQAA

SEQ ID NO: 253982 - protein, 344 aa, unidentified
MNHYAGIDVSLESSAICVVDGAGKILREAKVASEPEALIGWFRAWGLPIERIGLEAGPLSQWLYAAMREADLEVELLETRHVRDAFKAMPVKSDRNDARGIAQLMRLGWFRPVHCKSLEAQETRAVLTARKLLQSKLRDVENSLRGVLRGFGLKVGKTTERTFASRIEELVTGHPGLELVARALLAAHGVLLREFKGLDKQTQKLARSHPQASLLMTTPAVGPIVALTYAAAIDDPKRFPSSKATGAHFGLTPKKYQSGQTDYTGRISKIGDASVREALYQAAHVMLTKPVKNCSALKSWAMRIAKRAGMRKAKVALARKLAVILHRMLADAKPFNSMARATAT

SEQ ID NO: 253983 - protein, 425 aa, unidentified
MQVLYPRCAGLDVHKDTVVACVRVMEGGEINTEVRTFKTMTSQLLELSDWLSDNGCTHVAMEASGVYWKCVWAVLSDDEFTLVLANAAHVKNVPGRKTDVNDATWLAELLAHGLVRSSFVPDPSSQELRNLLRTRKQLVRERSRHVQRVQKTLEEANVKLASVISDVMGRSGRAIIEAIIKGETDAAKLAGLAQGRVRASQTELTEALRGRVTKNHRFLLKLHLQQIDAIETAIDAVDKEVDAHLREKLNSFRDAIELLKSIPGVSELSAITFLSEIGADMTRFPTAGHLVSWAGLCPKSDQSAGKRRSNRLRKSAPWLKTALVQSAWAAVRAKGTYLQAQFHRLRARRGATKAICAVASSILTAIYHMLKDGTFYKDLGPQHFQRRSKHTQARRLLRSLEYLGYAVQITSLAPELSVSSIDDVL

SEQ ID NO: 253984 - protein, 344 aa, unidentified
MDQVSRIGMDTSKHVFQLHGVNAAEEVVLRRKLRRKEMVTFFEKLAPTVIAIEACGASHHWARLLHSFGHTVKMIPPQLVKPYVKRGKNDAADAEALCEAMSRPTMRFVPVKSPEQQAALMLVGVRDQMVRHRTQLANAIRGYAAEFGLTAAKGMAHLVPLLERIQTDESLPALARELFAAQAKEYEQLQMQIDEVDAQLMARHRADECSRRLAKIPGVGPIGAMLLTMKTPAPELFRSGRQFAAWIGLTPRDHSTAGKVRLGVITRAGDEGLRSVLVVGATAVIQHARRHGKASLWLAGLLKRKSPKLAAVALANKMARIAWKLMLSGETYTATPAPAAAGAA

SEQ ID NO: 253985 - protein, 423 aa, unidentified
MKFKQNDAQNQRIENITSNHLVVGVDIAKETQVARAVTYRGIEIGRPCSFKNDSLGFQKFLNWIKTIQKQHSKTSVIFGMEPTGHYWLNLAWWLLEQGFEVVVVNPYQVKSNKENRDNSPTKNDFKDALVIADMVKNGYYSPLRLPTGNYQALRVLMSDREFVIKQFITIKNQIHRWLDIWFPEYHLVFKDWSCKTSLVTLRLFPLPSELKVLTPKEIYARWKPHMKRRASISFAEALVEKAQQSIAQTVAPEQVKRSLLFLLDQYEALSIQLAHLEQEAISLLKEIPQAQSLLTIKGIGKITIAGILAETGDLSKYRHGQQVLRLAGLHLGEDSSGKHKGKVQITKRGRSGLRKFLYLAVLHLVVNNEEFRALRHHYTKIRKMKKVHSIIKLCGKLARILVGIVRQGQSYTPEKVVTALNAA

SEQ ID NO: 253986 - protein, 337 aa, unidentified
MQPTVPLFVGLDYSQHKVQVCALDPQGKVLGNRAVPDSAAAIDQAVRRLGAVQGAALEACTGAADLAEELADRFGWPMHRGHPGFVSRMKQSPDQSDFSDARVLADLERVGYLPRVWIAPKQLRELRTRVRDRQQLVAQRRNLKLAITALLREHRQRCEHQRWTAAWRAWVAQQAQLPEQARWVMTQRLRRLEWVVAEVHAVERRLEEVTKDDSTVRRLRALKGLGPVTAWTVRAEVGRFDRFRTGKQRARFCGLSPCNRSSGDKAADAGLIRAADPERRRVFVEAAWVLIRCQPRGRQRAQRLRAQGKPRTVVTAAVANRFVRWLDHEGVRQQAVA

SEQ ID NO: 253987 - protein, 349 aa, unidentified
MKIIGCDFHPGYQQIAMLDKNTGEVTEKRLSHSNAGEEARKFYSQLTGPVLVGLEASGQSQWFERLLAELGHKLWIGDAAKIRASTERKQKTDRRDANLLVELLDQGRFPRIWVPTPEERDTRQLLLHRAKLVRVRTQVKNQLQALALNQGVQRKRKLWSAVGRKQLENLPLLPWASRRRAELLKLLDELEGSITALDGAVLQEANARPTVRRLMTHPGVGPITALAFTLTLGPAERFRRGKQVASYFGLIPSEHSSGGKQRLGHISKQGSSFVRGLLVEAAQSAVRHEPQLRREYQRLAQRRCRALAKVAIARKLAVRLYWMLREEADYAQLLQGSYAGQPESSRGRS

SEQ ID NO: 253988 - protein, 397 aa, unidentified
MIAVGIDVSKSKSTVAILNGDGSIRAKPFDVHHVADELQALVDYIKRTSEPPTILMEPTSHYHYPLLKAFTEAELPVCLINPYQMKKYGDTELRKAKTDKRDSLRIAQYALEKSYSLIPYTPQDQKYEDLRFLSRQYSQRISTLTVAKVQLLSLLDETMPGITTILPLKSRDPDNCVLLRFIKRFKSFDVIRKMGKTRFLVSYQVLVKKTKDRFAGSKGLAIYELVLNSVTTRGENPLSAMTQDQCVDLVSTSQKAADEINLQMRIIAETMPEYKVLRSMAGVGDRLGPIILGEIGDIRRFHSGKALNAYAGNDAPPYQSGQFESRNRHISKRGNPALRKACFEVMQALKLTKPQDDPVYLFLLKKEQEGKPYNVAKMAAVNKFLRIYYARAMELYK

SEQ ID NO: 253989 - protein, 338 aa, unidentified
MTKRNVIAIDLAKDVFQVAVIANGKVKTNKKIRRQKLESFLARQPKSVVAFEACSGMHYWGWISQEHGHEVKAIPAKTVTPYRQGHKNDPNDTLAIHQASERPRLNLAPIKSVEQLELQSISRIRDHLIDEKTALSNHIRGVLSEFGITIAKSFGALKRRLPEILEDGENRLPNRLRDMMALLWNKFLRLEQECKTLDRQVAQLAKDTEPCRRLLALEGVGPVGATQIYATLGNGSAFANGRNASAYVGLTPKQHSTGGKTVLISIGKIGNRRLRSVLIQGARSVVHKLKEPKTAKEHWLWEIIQRCGHGKAAVALANKNIRTAWAMLQSGEEYQLAV

SEQ ID NO: 253990 - protein, 467 aa, unidentified
MAKKAKKIKTKKGLKLEIVNPNAAGIDVSCTEMQVCVPEDRDGDNNRRFGTFTCDLHEISAWLKACKIDTVAMESTGVYWIPLYMRLVADGFDVLLGNAAAIKNFAEKKTDEVDAEWIMLLHSYGLLKASFQPCNYARELRNLARHRDNLLRNSSKEVLRMQKFMTLMNIKLANVISDILGKSGQDIIYAIIKGERNPKVLASLADPRCKATPEEIEKSLEANWDENLLFMLKQCFELYHYIQKQMIETEKQAEKLIFEYKSSLPQGAVHLTQCKRSNKPESPKNKVSIDIEQYAHELWGVNLMRIPGIKKGSLFRLVSELGHDLVNKFDSYKDFCNWCNLVPNNKITGGKQLSSKIPKRKNPVGQILRVAANSLNNEKSSIGIYFRKIQSRKGYKAAIVATANKIGRIIYTMIKNQTEYDESLGQEKHVEILKKRIKRTQRELDKLQKQINDCETAKQEAELLLVI

SEQ ID NO: 253991 - protein, 417 aa, unidentified
MTDFAALLGIDWSDKKHDLCLIDSATGEREASVLPHSPQQIEEWATGLRARFGGRPVAVCLEQSRGPLIYALLKYDFLTLYPVNPRTLARFREAFSPSRHKDDPPDAAYLAELLLHHRERLRAWQPDDERTRSLRLLVEHRRRLVGDRTRISNRLTSLLKCYFPQVLEWFPDIRTALVCDFLLRWPSLDALKRVRRQTLIQFFRSHNSVRRETLEQRLNSIKGAQPLTTDDAVLHSSAAMTKALASQMKATLDAVRDFDQQIEALCAVHQDFELFKSLPGAGEVYAARLTAALGSDRQRWQSADELARLAGVAPVMERSGQSCWVRWRYFCPKFLRQTFHEYAGESIRHSFWARAYYESQRAKGKSHHAAVRSLAFKWVRIIFRCWQTKTLYDEVKYLESLRRKGSPLLNYAANNPA

SEQ ID NO: 253992 - protein, 346 aa, unidentified
MMLIGCDYHPSWQQISWLDTATGETGEKKLEHASGEAEKFYRGLPGPALIGMESTGNCQWFVEMATTAGHDVWIGDAAKIRASDVRQQKHDRRDAALILKLLMEGRFPRIWTPSGEQKDLRQLLIHRYKLVRIRAQVKNELQHLAMNQGVTKKRKLWSKAGQKVLRELPLKPWASRRREDLFKVREMLNGQVDLLDQAVVEAAEKNEKARLLMTQPGVGPITSMAFVLTMGDVNRFQRGKQVASYLGLIPREYSSGGHRRYGPISKQGSRFMRMLLVEAAQNAVRYDPGFRNEYLHRCHTKAKGVAKVAAARKLAIRLYWMLRTKTGYPEVVRVESSSRVPLVSAS

SEQ ID NO: 253993 - protein, 338 aa, unidentified
MTQLGNERIVGVDVSKDRLDLYDWDSKSPDSMANDTDAIDRWLDGFSLPVRFAIEPTNQYHIALAERAHARGHAVYFVDPHRLSHYRCGVGQRVKADPQDAQLLARYLAREGDDLAPWKPLSQGQQRFWRLLRRRATVVRARIQLQQSLAGLEALNSEVDALLERFNTLIRKMERALLSEARRLGWERDLDHAQRLHSGAFCFVGKPPLRSRLRCQAIPGIGPLSALALTAIFHQGTYRNADAFIAFMGMDVRVRQSGRWKGKSKLTKKGDPEVRRLLFNAAMQARRNPLWEPYYLALRERGFSTTAAFVALGRKLARVAFALLQKNADFDPKLHTAG

SEQ ID NO: 253994 - protein, 348 aa, unidentified
MSQSNIHQYVGLDVSLKETSICVVDESGKIVWRGRTDSTPQAIAEAIKKHARHVVRIGLESGQLSTWLFHGLNERSLPVICIDARHAKAALSLKVNKTDANDALGLAQIMRVGWYREVTVKGLDSQAVRALLVARAQLVSQITTLKNCVRGILKTFGFVVRTGLRSQFPKHVREAIHANPALAAIVEPTLRVLEAARAQLLVYDRAVIQRARSEETARQLMSAPGIGAIVVLAYMTGVESPGRFRRSSSVAAYFGMTPARYQSGEVDRAGRVSKCGDGMVRGLLFEAAKVLLSRSARPCALQSWGQALAKRIGTKKATMAVARKLAVILHRMWATGATFRWPTPAPAA

SEQ ID NO: 253995 - protein, 352 aa, unidentified
MKHYIGSDAHKKYSVFVTMSESGKASSPERVEHDRELYRKYLHCLPAASPIAIESVGNWYWMIEEMEKAGHKPILVNPRKAKLLLGNYNKTDKLDAKGLALLNLNGSLPAVWIPPAELRDQRELTRMRMAMVEVRTKFKNRIQATLAKYAIVIDEVSDIFGVKGRLLLKEAIKGLPLETRRSVAEQLKLLDHVIEQLERIERHIHQVVKMTPEMQLLKTLPGVGDILAIVITLEIGSVERFFNANKLASYCGTVPRVNSSGGKTYFGRVRPDVNHYLKWAFIEAANCISLHPERMEGRHVLELLRRVQKQKGHPKAMSAVARHLAESSWVMLKYNAPYHEPRLGKVVSSNQG

SEQ ID NO: 253996 - protein, 348 aa, unidentified
MKKYVSIDVHAATCVIRVENEKRRRLIEQIVETRAEELIGFFRKLGKETTVVFEEGCQSKWLYDLLQPYTSQVMVCHTRGQKVSGQKNDKADTVKLLDSLRAGTLQSVYQGQATARGLKELAASYRMIVDDCRRVMNRMKAAFRSRGIRCAGKKIYGQKERSEWLERLDLEELRLRVEQLYGQLDLLMKDRKEARTALIRRARQEEAYRRLRKVPGLGAIRVALILAYVMTPHRFRTKRQFWAYCGLAVVTWSSGEYVMRGGQVVRNKKRVLTRGLNTNRHPVLKDVFKGAAQLAIRREMKEWYDAACERGLTANHATLDVARKIAAMTLAIWKTRSAFDIQRVKPAA

SEQ ID NO: 253997 - protein, 336 aa, unidentified
MYNFIGIDVSKLTLQIYIEAHDTSIEIDNNEKSLKILYRDLQKLYTNNKPFVFIYEPTANYSVALTKFCAINKIYTYVVNTYVSSNFSKSLGNRNKTDISDAHMLFNMQMMIDKKEITVPIINPTVESLRELVGYYRFLQKQKTAFKNYNEAASVNKSSSYILDDIKKNIARIQKEQELLIAKAQKTIDDDKTLKEAFEHITSIKGVGALVGILLLHLFLNYPHANRQQITALLGLDPITIESGTSIKKQSRISKKGLSMYRGVIFYSILSTVRFNEEFKAYYEHLKNRNKHTTSAQIAVMRKLILLAHSLYKNNVDYNPEQFKLKKSIQKEMCAA

SEQ ID NO: 253998 - protein, 343 aa, unidentified
MQVTTIGLDLAKHWFQVHGVDASGAVAVRRKLRRSEVLGFFQSLPSCLVGMEACATAHHWARELAKLGHTVKLMPPAYVKAYVKRNKNDAAGAEAICEAVGRPSMRFVPVKDAEQQSALMLHRARNLLVRQRTMLVNALRAHMAEFGIIAPQGLRHVELLVKEVAHEQERLPELVRSILQLIVHQLHDTMARVREIETRLTKWHRQSKVSQSIATVPGVGIMGASAIAATVADPSLFRSGREFAAWLGMTPRQNSSGGKERLGRTSKRGDKYIRSLLIAGAVAVLRHARNRPTRDGAWVRALMEHKPTKVAAVALANKTARIVWAVMMRGDGYRARQVLGQSA

SEQ ID NO: 253999 - protein, 431 aa, unidentified
MAKTRTSRTVDIVYPVCCGMDIHKDFLVACVAVTDERSHTEHHIKRFSTYTKGLRALVVWLGTFGCRDVCMESAGKYWVPIFNILEAAGLHVCLTHPKYVKAIKGKKTDKKDAKWIAELFKCDLVRSSFIPPADIRQLRDLCRYYVKLTYISVSEKNRAQNCLTMCNFKLDAVFSDLFGVSATRVLDALLGCGNANFDIGPLLDHRCKASVEEIADALEGELIPEQAAKLSLVRQHREEIVKLQASLESLILQLSKKYKPQIDLLLTVPGISDRLTAIRILAEIGVDMTVFETSKQLCSWTGLTPQNQESAGKKKTTRIGRAGAYLKPLLVQIALAVSQSNKHVELKSKYHALKKRRGGKKATIAIARRLLTAIFHMLSKGEAYNAELYHKADKPPKERVLTPDQALDFARRHGFLIEGIDPPPKDPTAAA

SEQ ID NO: 254000 - protein, 318 aa, unidentified
MDSEPTYVGIDVSKERLDLAAHPRHEIRRFANTPTGINNIVQHIKDLGPVLVVMEATGGYEISLAAALGEAGIPTAIVNPRQARDYARSTGRLAKTDAIDARILSDFAAAVRPEPRVLADIQTLELREILARRSQLNEMITAEKNRLHHARGPIREHISAHIAWLGRSLAEMDSELKRFIEESPIWREKDNLLRSVPGIGPVLSSTLVASLPELGTLDRKQIAALVGVAPFNRDSGKMRGKRSCWGGRANVRAALYMATLVATKHNPVIRTFYERLCAAGKAKKAAITACMRKLLTIVNAMIKHHTTWHYSPEAAAIS

SEQ ID NO: 254001 - protein, 453 aa, unidentified
MKEKSVSMKVVNSHAAGIDVGSRSHFVAIGQDDDQVREFGAYNEDLNSLAQWLISNDVKTVAMESTGTYWQNLYTVLQGAGLEVILCNGKFTKNIKGKKTDVQDCQWIQKLHTLGLLSGSFLPDEASEQLRTYCRHRANLLGLAASTTHKMQKYLQLLNLRLDIVVKDVTGLTGLSIIHAICSGESNPEKLASLRNGNCKKSEKEIAKALQSNGRKDYLFTLTQEYRLYLSLQEKIKECDQEIEKMLQEQINGDDEKKQHFIEKKVHKRVNKNTPKNIDINLLAYQYYEGVDLLAIEGVSHATILTLMSEIGTGINKFATAKEFSSWLRLSPNTKISGGRVLSSKVAKGSNRLKIALRNAANAIGNLKDTALSNFFRRIAFRKGRVSAISATARKLAVIIWNMLVKKVPYRPETDYEFLDQKRKRKVMEMKKLIHKFDITPDDLGLQLNINNL

SEQ ID NO: 254002 - protein, 352 aa, unidentified
MKEDTREQVVAVMGIDLAKRSFQAYGVNARGERVLSKKLSRAGLKTLLVKLSPCTVAMEACGSAHYWARTFRSYGHEVRLIAPQFVKPYVKSNKNDAADAEAICEAAQRPGMRFVPVKTVAQQDIQAIHRMRSLAVDRRTAQVNQIRGLLLEYGIEVAQGRAALTRRLPEVLEDADNGLSARFRAELGELAEELRHLDARVAHYDAQIEAIAAADEQAKRLLTIPGIGVLGATALVAAVGEDPSLFQNGRGLAAWLGLVPRQHSTGGRERLLGISKRGDVYLRQLLVHGARAVLRWVERKEDRTSCWARALQARRHTNVACVALANKMARVAYAVMTSGKPYDPSHAVLARG

SEQ ID NO: 254003 - protein, 331 aa, unidentified
MSNIIGIDVSKASLDCAYLRDPDQEKAKRKSYHNEVRCFASLVAWAEARSGLPVQSLAFVIEPTHVYHEQLVQFLHHAGATVYLVNPGRVRKFAEGIGILSKNDLVDADLLTRYGLIARNLIAYQPVAQEVNDLRSLLNRLEVLERNLRSELNRQEKIGKTMVFHRLEQQSIARSAKQLKTEITRFKQAIRQCVHSTPWLQQRFDLLCTIPGVGAKTAWVMLVILGSREFRSAPEVASFLGLNPIEKRSGKSQYRRPRLSKSGSGHYRQLLFFPAMVATRKNPDIQALYERLLAADKTKMCALGAAMRKLVHICYGVVKNQTPYQAQTRSS

SEQ ID NO: 254004 - protein, 313 aa, unidentified
MHEEVFVGIDIAQETLDVHVLPQRDAFRCDNDADGIEKLIKHLQRVAPTVIVMEASGGFEINLAAELGAANLPVAMVNPRQVRDFARGTGKLAKTDAIDAYVLASFAQTNKIEPRPLPSEDEQLIKDLVRRRQQLISLRAMEKNRLHRVRSKPVRESILVVIQTLDEQIRTIDRDLDDILRRSPLWREEEDLLKSFSGVGPVTARTLLALLPELGKANRQQIAALVGLAPFNRDSGKMRGKRMIAGGRTDVRNALYMAAVSARKHNSTIKAFYERLMQAGKPAKVALTACMRRILVILNAMIKTKRPFEVRFT

SEQ ID NO: 254005 - protein, 388 aa, unidentified
MNITTDQPEAPTAIRTDLGAIFVSLELSRSSWLITSLSPGGGEKMSKHAVRGGDVSRLLERFSQLREKARARTGKVFPLIVIQEAGLDGFWIDRVLQNEGIESHVVDPASIATSRRRRRAKTDKIDGETLVRSLLAYKRGEPRVCSMVKAPTPEEEDQRRLCRERKVLTAERVLHVNRIKGLLFCQGICGYEPLRRDRRDRLEELQTGDGRPLPPHLKAQVERELDRLELLLKQIKTVEGERDALLAVAITSMPAPAAMLLDIKGIGPEFAAVLWSEGLFRHFDNRRQVAAYAGLAPTPWQSGAIDREQGVSKAGNPRLRTTLIQLAWLWLRNQPQSALTIWFHERVLRNGGRLRKTTIVALARKLLVALWKYVTTGVVIEGATMKAA

SEQ ID NO: 254006 - protein, 393 aa, unidentified
MYIVGIDVAKRSHEAIVIDDSGSTVHKAFNFKNDADGFRKLFSVLDSVSADPADFIIGMESTSHYWLALFSNLTKSPYTVHMFNPIQSNALRDMYIRQTKTDERDCFIIAEVIRFGRYSQGSMPPADIYALREMCRARFFMVDMTSDLKRKVIALLDQVFPEHETLFTDIFGLTSSALLCTCPTPAEILAVDTEKLIELISVPSHKRFGRQKAEQIRSVAKKSFGVLLGNDAISGLIKQYMEHIRFSQQQIMELDENIAALFSKFDTPITTVPGVGPVLGAAIFSEIGDISRFRSAAKLAAFAGIDPSVRRSGEFSGIRNHMSKRGSPYLRRALWQASVIAALHDPALKAFFQKKRAQGKSYMNVIGHVTRKMASIIFAVLRDRTPYYVPDLN

SEQ ID NO: 254007 - protein, 342 aa, unidentified
MYYMGIDLHKKYFVSTIMDKDGKVLKRSRVSTDRESIKHYFSLLKDKGLIKAVMEATFNWVYFYDEISPFVDEAILAHPLKTRAIAEARIKTDSIDSNTLAHLLRSDLIPKAYTPGFETRDLRNLLRFRIALVKVRTSLKNRVHAVLDRNYIEDPIFKGLSDKFGKKGMKIMRALKLKGNDTSILNGYLDLIEEITKKINDLEKRIKSFVKEDKITLLLKTIPGIGDIIAFLMRYEIDDIERFSSAKKLYSYAGIVPSTYSSGGKTYHGRITKQGNKWLRWALAEASHKAIVKSPSLRRYYNKIKYKKGSNTATIALSRKLLEIVYKVWKEQRPYYEKEICF

SEQ ID NO: 254008 - protein, 398 aa, unidentified
MVNIGIDLHKTQFTVCVRTYSGETFAKYPTTEAGYQAFLAEAAAWQRKGQEVRVGVESTGNTRYFKSRMEEAGIGVTVINTMKFKVVNESVKKTDKHDASTIAEFLEKDILPTSQLCSRESEQLRRLLKVRTTLVRAEVVIKNQIHALFAAEGQEDVKSASLQSKRGRKQVLNALNQWKNGLVAQPLFDTIERLEENVKGIEEQLRALTFGDRMVELLMSIPGCGEIGAWTIRAYTDDIKRFASAKKYCAYAGLAPWVQNSNETIHHGKITKRGPKELRTALVQVVMGLRRMKDKSSSLRLMQRYEAMRKNKIPGKVIIATARKVATIIWHMLSEDTEFDIGKMVDQKLMKKAKAMSNSVGLATTTLKEHQEKPKESKTGSKREKKPGVAREKRKKVG

SEQ ID NO: 254009 - protein, 346 aa, unidentified
MVILGIDAHKRTHTVVAIDEAGRQLGTKTTLTTTTEAHLEMVRWADRFGPERRFAVEDCRHLSRRLESDLLAAGEVIVRVPPKLMAHARASARTYGKSDPIDALAVARAALREPDLPVARLDGPSRELRLLVDHREDLVRERTGHINRLRWHLHELDPTWDPASRSLVRYMRLDAVAARLEGQGGMVARIARDLVARIRELTVQERALEREITTMVKKLAPRLLALPGVGTLIAAKIVAETADIRRFRSKDAFARHNGTAPLPVWSSNRVRHRLSRTGNRQLNCSIHRMAVTQKRCHPDARIYLDRRIANGDTKLEALRALKRKLSDVVYRALLADAVVGVVAEAA

SEQ ID NO: 254010 - protein, 313 aa, unidentified
MSADVVIGIDVSKAQLDIGVLPTGEVWQSANETQALSDLASRLLELAPKLVVMEATGGLEIPVAAALSRGGLPVVVVNPRQVREFARSMGRLAKTDKIDALSLALFGERVRPERRPLPDDLAQAFDALLARRRQLVLMLAEEKNRLQQARSREVRSGIQRHMRWLESEIKSVERGLTDSVRKSPIWRAKDDLLRSVPGVGRVTSFTALAELPELGRLNRKQIASLVGVAPHACDSGTLRGKRIIWGGRAAMREALYMAALAASRFNPALRAFYQRLLASGKPRKLALVACMRKLLIILNAIIRDGQPWNPLAA

SEQ ID NO: 254011 - protein, 341 aa, unidentified
MGQASTIGLDLAKHIFQAHGADASGRVVFRKRLTRAKVVRFFAAQAPCVVALEACAGAHHWARELGKLGHTVRLIPPAYVKPYVKRQKNDMADAEAICEAAQRPSMRFVPVKSEEQQANGVVFRARDLLVRQRTQCLNALRGHLAEYGYVVAQGSTHADAVIAHVEDPNTSVPESARSILAVLVGTYKALEAQIRALDAEITRRAKADPVARRLLTIPGVGPIAATATTALVPAPEGFRAGRDFAAWLGLTPLQKSSGGKQKLGAVSKRGERTIRRLLILGASAVVRWASQRGAPEGSWLARMLARKPKMLVTVALANKMARVVWALLVKGGVYRAPAVAA

SEQ ID NO: 254012 - protein, 333 aa, unidentified
MGFEPEPSKEGSWMMAQNDLIVAGIDVAKDKVDVCIRPLSLRRTFASTAEGRRELASWLRRKKVGKAVMEASGGYEREWAKALRDAKIEVRIVDPKRVRDFARSAGRLAKNDTIDAEMIAWFAETFDEAPGQAHDAAREELAQIVTARQGLLDLQTKLLNRGEHAGPEPVQKMHARMLKKIAVEIAKLETVIAAMIKATPRFAELAEIIESVPGLAETTSATLIAKMPELGQVNNKIGAALLGAAPYDDDSGRRRGERHIKGGRRKVRNLFYMACLGAATLHNPVLKAFYDRLIAKGKEKKVALVACMRKLIVILNIMIARRQKWDPNLHVVG

SEQ ID NO: 254013 - protein, 349 aa, unidentified
MSQSLNSAIAVIGIDIGKNTFHVIGLDGRGAIVLRQKWSRGQVEVRLANMPPCLIGMEACVGAHHLSRKLQALGHDARLMPAKYVRPYSKGQKNDFRDAEAIAEAVQRPTMKFVATKSADQLDLQALHRVRERLVSQRTGIINQIRAFLLERGVAVRQGLRFLRAELPRILATPPDVLSARMVQVISDLAEDWRRLDERIDRLSREITVLAQQDAGCERLMSVPGIGPIISSAMVAAIGTGDAFSKGRDFAAWMGLVPKQISTGDRTILGKISKRGNRYLRVLFVQAAWVVLIKPRSWERHGLKHWIEAARKRLHRNVLAIALANKLARIAWGVLAGSRTFEASKLQVA

SEQ ID NO: 254014 - protein, 337 aa, unidentified
MKYSGIDLHSNNAVVAVIDDQDRVLYCKRLANDLSSIIAVLAPFHEDLQGVVVESTYNWYWLVDGLMAAGFAVHLANTSAIKQYEGLKYAGDERDAVFLAHIFRLGLLPEGYIYPSEERGLRDLARKRMQLVQQSTLNTLSIENILARQLNLRLNAQQVRHLDSTAVNALCLPPHTECALMANLTVLRTLQAQIHAIETVLHRTVKLRPEFAILKTAPGIGDTLATTIMLETGTISRFASVGHFSSYCRCVESKRISNGKKKGEGNAKNGNKYLSWAFIEAAAIAMRSCPQAKRFYERKRARRMPVLAMKALAHKLARAAFYMLRDGKPFEVKKCFG

SEQ ID NO: 254015 - protein, 395 aa, unidentified
MFIVGIDIAKRSHEAIIIAEDGQVVRKAFSFRNNCTGYNLLLEQVRRLTLVKSQIVFAMESTAHYWLALYARLLKDGYTVMVLNPIRSHSLRELYIRKAKTDARDSLIIADLVRFGRCKASNVPQDKILALRELCRSRAYLVDMAADLKRKLIALLDRIFPEYESLFDSVFSKASIAVLSKYSTPQKVKNANLRKLTDLLMESSNGHFGEWKAHQLKEAACSSFGIDDSGGVYSTLLGMFLEQILSLTAQADSLEKQISIFFQEFNNPLTSIPGVGTVLAATILSEIGDITRFSSADKLLAYAGLDPSVKQSGEFKSNQNRMSKRGSPYLRRAIWLASTVAVHRDPMFQTYYEKKISEGLHYMNVIGHVSRKMTAVIFAVLRDGQPYQPILQSAG

SEQ ID NO: 254016 - protein, 414 aa, unidentified
MELLHERCAALDIGKKDLKACVRTPSPKGKRSRRQEIRTFATTTNALLELRDWLVGERVSLVVMEATGDYWRGAFYLLEDDLEVILVNAAHAKGLPGRKTDVCDSSWLCQMGECGLLRASFVPPEPIRQLRDLTRYRTTLATERTREAQRLEKELEDAGIKLSSVATDILGVSGRAMLAALIDGERDAQVLAEMAKARMRPKIPRLVQALTGNFGEHHAFLCRLHLERIDQLTAAIGELSARIEEQMLPFARQLEYLATIPGVGQSVAEVIVAETGADMSRFRTAAHLASWAGVCPGHHESAGKRRSGKTRHGNRWLTGALGTAALAAARTKDTTYLGARYRRLTRRAGKKKALVAVEHSILIAVWHMLTNDVEYTDLGGDHFARLDPERAMRRIVRQANALGFTVRFDPIQAA

SEQ ID NO: 254017 - protein, 387 aa, unidentified
MAQVNDLSRSLTAFDPISTLVVVVEMSKASWLVSGVVPGVERQPLKKLEPDATALLRLIERWRNEAVRAGRPISRITLAYEAGRDGFWLARWLIARGIEAHVIHSASVAVSRERKRAKTDRLDAAMLMRVFLGWLRGERGHCGMVAIPTMEEEDARRPSRERESLVDERSRITNRMKSALARLGIRGFKPHLRKAPERLASLQTAEGTGLPANTIEEFRRDMARLKLVREQIISIEKTRAERLEQAPDTGSHAMVRLLARVIGIGIETADMLVREILSRKLRDRRAVARYAGLTGSPDESGLKRREKGLAKAGNARVRRGLIQLAWRFLMFQKGSALAQWYRTRTEGPSGARKTTMIVALARKLLIALWRLVTTGEVPDGVELRPAA

SEQ ID NO: 254018 - protein, 438 aa, unidentified
MRPRIHHHLIVGIDIAKDKHHAFFGTAKGQALWRRLIFTNDLTGFRRLIEQVDILKARHALDQLVFGMEPTGNYHKPLIHWLTEQGYLVVFVAGKAVKDNRELLDGRWDKNDTKDSANIADLISQGKCLFYENPDADILALRNLLSIRRHLKKEIHRLRMRIRNGLLAKYFPEMDRLWGSCITENLAIVRWYLDPRKIAATDFDVFVRHVTTTDRGVRQLRRLRKIHDAAACSIGVPVDAAAEHEGKILVDRFKAVAEELEAVMEQIESICREMPSYRILLTIPGFGPYITPLVLSALANPLRFKSRKQVIRLAGLDLNASRSGKTSKQQVPVISKKGDAELRYGLYQAALIASYHNDAFRRLYNRMLEGRQGERGIKTKARVKIAAKMLVIAWTMLKKSEPFNPNHLMAEPVHLRGNIDFGRDNPEPAIPMARASNV

SEQ ID NO: 254019 - protein, 355 aa, unidentified
MNSEKYIGLDVHQATISVAVMDPRGKVVMESILETKASTILEFFAGLRGTLSVTFEEGTWAAWLYDLLKPHVAKVVVCNPRKNALLKDGNKSDRIDARKLAELLRLDNLKPVYHGETGVRMLRELARSYLTIVKDLTRVMNRLKALYRSWAIPCAGRDVYYTRHRTEWLGKIREAGVRRRAEQLYQQLDMLQHLRQQARRELLAESRKHPITAKLRKIPSLGPIRSALAVALIQTPHRFRTKRQLWAYSGLALETRTSGEHRYVRGQLRRSKKQVSIRGLNKDHNHDLKGLFKAAATRASVQPGPFQDFYQRSLAKGIKPTMVRLTLARKIAAITLTLWKKGENFDAEKLKSQAA

SEQ ID NO: 254020 - protein, 343 aa, unidentified
MDHFAGLDVSVKDTSVCIVDEVGKIVREVKVASEPAALLAVLRNATYRFKRIALEAGPLSQWLFSAFAEADLPVICVETRHMRAVLKAQINKTDRNDARGIAQMTRVGLYRPVHVKTLRSQQLRMLLTHRKLLQSKAIAIDNDLRGTLRNFGLKVGVVGAVRFEARIRELVEDLSDLAILVEPLLVVRRVLREQIAVLHRRLLAVVRDDEVCRRLMTVPGVGPVVALTYRATVDVPARFRKSKSVGAAFGLTCSRDQSGERDRPGAISRCGDEMMRAMLYEAAQSMLVHSTRWSWLKAWAMTIAKRRGMKRAIVALARRLAVIMHRIWVDGTEFRWTRDAAAA

SEQ ID NO: 254021 - protein, 344 aa, unidentified
MQPQPYVGIDLHRRRSVIVQRSCEGETLSVTQVANDDVVAFAKAVTDAGEHPEVVIEAAYGWYWAVDLLEDLGCRVHLAHPLGNAWGNRRVKNDLRDAEDLVDLLRLGRLAEAWIAPKEVRELRELVRHRAKLVSLRTNLKLQVYSVLAKEGVAVPMTDLFGVAGRALLAKAPLAPAYAARIESLLDLIESFDRQVAIFERDVARQLVDDAGYQAIQQIPGVGEIFAAIFVAEIGDVRRFTSPAHLSSWAGLTPRHRESDTTLHRGPITKQGSRLVRWAAVEAAQRQAAGTKLRADFARITANHGDTQGARKVARVALARKIVTLVYYGLKDGTIRSKAICEAA

SEQ ID NO: 254022 - protein, 416 aa, unidentified
MKLFVGIDVSSEKLDVCFLTDDDQLSILSEIPVTNDIEGATSIRDMILEFNENYHFNQIMIGMESTSMYSFHPSMFFHEDEELKKLNTLVTIENPFRIKQFSRMFDEDKTDRNDALRIADFLRIQRFTTSPIKEEKYMALQRLTRTRYQLIKQLTRTKQHFLENLTYKCNTLAREMRDESTSLFSATVISLMTEDFTLDELAELPLEAFCDLLQEKGRGRFKQPEKIAKAIQRAIRSSYRLGSVAQESIDIVLGVLVCEIRALEKNIKELDKAIEQLVVVIPEYQCLTSIPGVGKVYAAGLIAEIGQIERFEDQTKLAKYAGLSWKVKQSGNYQSQNTPLTKQGNRYFRYYLVEAANSVKNYLPEYKAFYQSKYKEVPKHQHKRALVLTARKFTRLVDTLLRNHQLYTPPRSVIDK

SEQ ID NO: 254023 - protein, 342 aa, unidentified
MDYYAGIDVSLEASSVCVVDASGKIVKEAKVPSEPEMLIAWFKALPFVLARIGLEAGPLSQWLYAGLKQAGFAVELLETRHVRDAFKAMPIKTDRNDARGIAQLMRLGWFRPVHCKSAPAQETRALLTARKLVQGKLLDVQMSLRGILRGFGLKVGLTTKAGFASRIRELTEHHPALKAIAKALLAVHAVLLKELNGFEKQARKLAKSDARTRLLMTAPGVGPIVGLTYVAAIDDPARFSSSKSVGAHFGMTPKKYQSGETDVSGRISKMGDKGVRAALYEAAHVILTMPVKGGALKSWAAKLARRTGMRKAKVALARKLAVILHRMLANGASFNAAKAATA

SEQ ID NO: 254024 - protein, 385 aa, unidentified
MNHIGIDISKYKHDCFIATETDHFSFSFENNQEGFLKLLFELKKLSGEIKIGFEITGHYAENLKAFLISHKFAFMEIHAYLVKKFVESQTLRKTKTDKKDAQMISNYLQSVDYKTYLQQSYHIGALKELTRLRSKLISERTKYFNLLTKTLDIIFPEYKGFWQNNRFSNTSLYILEKFTEPLKIAKMTDHHYETLRKISMGKFSYPKFTYLKELAKSTVGVYQAFHKVSISIYLNNIRLLNAQVESIEDQIKHLMKSYPTKIETILGIGTISAAIILAEYGSISNFDNPGQMLSYAGLEPSVNQSGTHIANGRLVKRGSRMLRSTLVQASFYMLRGNPKFYAYYLKKKSEGKHHHVALIHLTRKLVRIIFHLETTQQNFNLALIK

SEQ ID NO: 254025 - protein, 408 aa, unidentified
MKDSRKRYIGLDVHKQYLIALGVDDELNIVLPVRRVELTRLEAWMKKTLTQQDEIVLEMTTNTWQLYDELCEHAGKVIVVHPPHVALITRSQVMNDKIAASILARLLAKGLLVGIWVPPQEVRELRGLVAQRKKMTGLATQAKNRLHAVLQRHHLVPPKGNPFYASQQRWWLTLPLGALEKVNVQSDLDTLHFAEAQRIHLTSMMEEIASQQEQVTRLLQIPGFGVVTAVTVWAAIGDIQRFVDPQHLVGYAGLGTRVHDSGMSTRTGRITKAGRRDLRVVLIEAAQVAANSHPHWKAELARLQPRLGRNKAIVAIARKLLVAVWYILAQHKTDRFAEPEAIAQKFLKFAYQLGKANRPAGQSAAQFVRKRLDALQLGHELTSIAWGSKKPIPLPPSTNKVSDVPNTK

SEQ ID NO: 254026 - protein, 360 aa, unidentified
MKIVGVDLHAKQQSIAMLDTETGELTEKVIRHEGNAAREFYASLEGLVVVGIEATGSMQWFLELLDELGVQYRVGHPAKIRATEPRKQKHDRRDARLILELLTANRFPDIWMPSTEQRDLRTLLRDRHQWVKMRARLQHTLQSIALNHALRKGTSLWTAAGLETLQRLPLPPYTSQRRNQLLRLYAELQKRIQELDRQVEEQAQQRPQARRLLTHPGVGPLTALATEVFLGNPSRFTTAKQVASYIGMIPREYSSGQRQRLGALTKQGNSLLRYLWTEAALHAVRKDPELKRFYRRKLIPKGMGKARIAAARKLGIRLWIMLRDQIEYEEFCRRGKLRQNGEAQAGMPDFNSGAATAVTG

SEQ ID NO: 254027 - protein, 334 aa, unidentified
MESVRKHIGVDVGKEWLDICHPDGTKEHVRNSRKFRRRLIEKAKHQDAIVSFEATGPYEEALAEECTQAGVKAVRLDAWATRKYAESQGRIEKTDEIDSEMIRDFAASLKAEKLHLVKPVSLARRHLKRLVAVRDNLLKAVAILRNQLEALADDTGLRRDVNAAIRAIERKIEKVEAECDEVIASDDEMRSLSERFLRVKGVGPCLVRTVLASCADIGAFNSKSIAKMSGNAPIDHRSCTIVRKSKPRRGRSDLKKAFYMAAVSASRNNQVLHGIYQRLVSRGKPKKVALVAVARHLAIVLNYIAKYPDFEPEPDQRRGERKPSASREKPKMAN

SEQ ID NO: 254028 - protein, 312 aa, unidentified
MANQTFIGIDVGKSNLDVNLHGNQAVKRFSNSPTGIQKLEYFLREQIEPLVVMEASGGYESLVAKTLRQAGFPVCVVNPTLVRRFAQGMGTMAKTDAIDARIIARYASIKQPKPQAARGEDEERLVALMDRREQLNEMVVMEKNRLSTAPILIRESIQLHIEMLKQQIKQIDQVVDELIAANQDWQNKIKILTSFKGVGTVVAVTLLAELPELGQESRERIGALAGLAPINQDSGTRSRKRKTLGGRAKIRRVLFMVALGGIRYNPVIKEYYERLLNRGKEKKVALVACMHKILTILNALLRKEQLWLTDYA

SEQ ID NO: 254029 - protein, 417 aa, unidentified
MEEGEKASTCRYIGLDIHKYYSVVAGVDREGQEILSACRVEHIDLEDWLKKHLLATDRAVIESTTNAWHVYDLLKPLVAEVLVANPIKVKQIACARVKTDKKDTFILARLLAANLVPTVWVPPKHVRELRQLISHRRRMAGMHTQVVNRMHSVAHRHHLNHPKGKDFQPKNTLWQRDESLSRLEKMQLELDMETREHLEKQIGRMTRELGRMSHEEPWASEMLYLMQVPGCGVVTGMTVLAAIGDITRFETPKALASYSGLTPGLEQSGVKLRGKGITKEGRRELRWVMVEVAWRAVKADPHWKKYFEELKRRMHPNQAIVAIARHLLTMVWYVLTRHEPYSHYTPERIAYKYLTWSWALDEEQRQGLTRPQFARYYLMRLGIGNELKRVALNPKFPYKLASVEEILALWPEFRPPD

SEQ ID NO: 254030 - protein, 369 aa, unidentified
MAEDSTVFVGIDAAKLKHAVAVAEPGRSGEVRYIGEVDASPEAMRKLLTRLAARHGKLHVCYEAGPTGYGLHRQVVALGHECTVVAPSLIPRRPGDRVKTNRRDALQLARLLRAGELTSVWVPDEAHEAMRDLVRAREAAMDDHRRKRQAISSMLLKHGRAFPGKKAWGARHARWLQEQAFDHPAHQVVLQELVLAARHAAERLERMDAAIVEFLPRWSLAPLVEGLQALRGVGLVTAATIVAEVGDLGRFENPRQLMGYLGLVPGERSTGDAVRRLGITKAGNGRVRRLLVESAWTYRHPARVGAKKLYLLQRVSPAVRDIAWKAQSRLCARYRALSARGKKLTVTATAIARELAGFIWAIGREVRPA

SEQ ID NO: 254031 - protein, 355 aa, unidentified
MQSNKISFKGQNIYVGIDVHLKTWHVTTLTESGYKYSFAQHSDAKELFDRLNKKFPGAHFKSAYETGFCGFSVHYALTAQGFENIVVNPADIPTTGKEKAMKTDAVDSEKIAWSLKRGELTSIYIKDKCYMDDTNLMRLRQRFIKDLSRQKNRTKHLLYTQGVAYPERFSKKGTHWSRNFMKWLREDVELLSEEKRTLMLLCNQVENIRKDILAITREIRRLSTADKYKENFSLLSSVPGFGLITSMSILTEYDNNLMRFPNERKFVAILGLIPTCHDSGEKKVNGVKTFRGNKQLGPLIVEASWVAIRRDYQLGCYYTNCCQSMNPQKAIIKVARKLACKAYAVMKTKKTYVLS

SEQ ID NO: 254032 - protein, 418 aa, unidentified
MKEVYRRCCGMDVHQKTVVVCVLPPVGNEGKLIRKVYGTFRNDLIRMRVWLKQLKVTEIAMESTGVYWRPIWNVLEEHGFQRLLLVNPLQVKALQGRKSDGRDCQRIAEFLQDNRLDGSFIPPPEIRQLRLMLRHRVALLEQRNEVHNQIRDLFETVGIKLSSVMTDLMGVSGRGIIEALIAGIDSPELLSWKVRGRLRKKEKLVRESLKGYFNEFHRTMLQSYYEHYQFLTRQIAWLEVKVEEHMHPYAELVALLMTIPGVDRIVAWTLIAELGTDPSVFPDAAHCASWAGVVPGEDESAGKQRSRRCRKGNKTLRRILTQAAWAASHCKHGYLRALFYRIKARRGWGKAILAVGHKILLIAYGIIKDRVPYRDLGDDYFDKLNPARTVKRLVHRLERMGLEVQVSEVRSDASTPNL

SEQ ID NO: 254033 - protein, 367 aa, unidentified
MFKFQPSTVVVGVDVHKYSHTAVALDPWGQEKGRLDFSNDNLSEHASWLNTLGEQKDILVALEDVNSYGVHLVADLTTRGFAVRYVPAILTERERRQSTKRHKSDYVDAKRVGKVILTKFEETLPAKESIAEKAELIIAQTLDLLLMERRDLVKEKTALKNQLHALLHQYYGDHYADDFPKPFHKRAIAFYLSDLEQITASSAVDIGKKMLADSIVRRLKRLLLHEEQITVITKKLTDIGKQSLEVQALSEKLHGCGAVTACAIMAEVTTVKRFVRKDKFAMYAGVAPTERSSGIHNRLHTNPFGNRRLNRALHTVALSQIACKGDKRGKEYYWKKLKEGKTKLWAMRCLKRQLANQVFQILKQARI

SEQ ID NO: 254034 - protein, 339 aa, unidentified
MVYVGIDVHRKQSHLAALGEDGRVVLSRRVRTCPEEFLRVFGELEPEPLEVVFESTFGWGWLADLLADAGIPAHMAHPLATKAIAAGRVKNDAVDARTLAHLLRGNLLPEAWMAPPEAREARRLVRMRASLMRVSSRLKCQVHAVLAEHCVTPAQSDAFGKQGRGQLSKVVLPEISQHRVEANLRLIDGIANEVKLAERELTSLFADDPRVRRLLPIPGIGLITAAMVVAEVWDVSRFRSPDQLSSWAGLTPKERSSAEHTRRGHISKQGSRWLRWILVESAAQHALRDPELRTLFNRVCRRSPDRIKIAHVAVAHRLLTLCFYALRDEGGCRAYPVAS

SEQ ID NO: 254035 - protein, 404 aa, unidentified
MLFFGIDWSCDHHDVCIRSEAGECLSRLRIEHSAEGFRRLEAERSKFAVPAHECLVGIETAYNLLVDYLVDLDYVVYIIAPKATDGYRNRQRLSGAHDDASDAALLADIVRTDRASHRQWRANAPLTQQILGQVRLIEVLRQSIQRQTNQLREALVRTYPAALDTFKDLNAQIALHFLAAYPTAQEAAELSGEQFAAFCREHAYYRKDVALRYAQLQNTVPTAHPAVVQAQRNQVRVLAQVLLGEVRYRLEALTELRSLFAQHPDAPIFDSLPGAGDLLAPALLAKFGDDRTRFLVAADVQALAGTCPVTARSGRVTDIRFRKGCDHEFRRIAQAFALSSVGQSGWAQASWQQVRQHSRSDSHATRILANRWLAIIWKLWQTRCPYDEAYYLQQRSRRCQPKKV

SEQ ID NO: 254036 - protein, 355 aa, unidentified
MNVYTGIHSYYCGIDLHARTMYVCVLDKDGQKVYHKNIPCTPERFLEAVEPFRGDLVVGVECIFCWYWLADLCEEEGIDFILGHALYMKAIHGVKTKNDRIDSLKIARLIRGGNFPVAYVYPPEMRATRDLMRRRNHFVRKRAELLSHIQNTTMQYNLKPLGTISRPHHRRDKNIVGHFPDPVVQLIVETDLQLIDHYDPIIKNLDKQILSLAKGHEPKSLGLLHSVPGVGEVLGLTMLYEIHTIERFPSRGEFCSYARLVKGQKQSAGKNYGTSGARIGNAHLRWAFSETAVLFLRHTPSAERYYNRLISRHGKAKALSIVAKRLGIAVYYILKRGQPFNLNQFLNGSMSKEKA

SEQ ID NO: 254037 - protein, 318 aa, unidentified
MAASAVNVGIDVSKSRLDVAVRPTSQQFSVANDEAGHEELRKRLKKLKPERIVLEPTGGYESQVVQVLLAARLPVVVVNARQVRNFAQALGRLAKTDRIDADVLAHFGEAIRPEMRPFPDEALLELEALVNRRRQLVDLRAGEMKRKQTAPTAVHANIDELIEFLDKQLADLDDDLHKLIKRTPAWREADQLLQSVPGVGPVLSSTLTALVPELGKLNRKQIAALVGVAPFNNDSGKSEGKRSTWGGRAPVRAVLYMATSAARRFNPVIASMYDRLVSNGKVPMVALVACMRKLLTILNAMKRDNRPWTLQLETGSSK

SEQ ID NO: 254038 - protein, 492 aa, unidentified
MRTIYPKANPAIENLFEHAGTPRKVMCVAFDYAKATHTAMVCNGEGMQLRGAFNVHNNPAGLDYVQKIVSGLCRKHSIAREHVFCGGEDCGPYASNFIHALAAKGFLVVGVNAKDAKNERGNMLASTDKIDLLGVAGMLVKKRGRTIPAEISHVEQLRKLTHHRLSLVQSRTASANRMHALVDQLLPGFLDVDQSGIYPFTRASLWLMSERFSPKGIHGRPMPTLVSRLHEFAVHDAEGAARKLKALCESVLPPPSAMLDCLQQCLSHEVTVYRMLSDSVRALEVEAARQLAATPGAMLTTMPGIGVGLAAGIYAEMADPTRRQALFRMASYAGLVNRLKQSGGPDKEASACGRPRHANVFLKNLLLDLVVHIGNYGDGELKADYLRRTEDGQYSRLTMARKLLRICSHLIGGDFYVPATLRQNPSTEALAQYYQTAWTRILWRWRDAAAIRQAFAKDAPLEKWRCMINELYGLKLSNVSPQAGQTRKEERI

SEQ ID NO: 254039 - protein, 359 aa, unidentified
MILSSEKKTPRGTTREEEAVKTLYAGIDLHSSNQVIVVTDSEDTVVYRKRLRNELDVTLGALSPFSDGLRGVVVESTYNWYWLVDGLMDHGYRVHLANTGAIQQYSGLKYANDASDAHWLANLLRLDILPEGYIYPKEERPVRDLARKRGGLVRQRTANVLSIKNLLARNTGRSMSASGVKRLTDEDVDGMFAGEDLGLAVKSTLAVLRCIEEQIAILEKTILKRVRLRDGFRNLLSVSGIGPVLALTIMLETGDIHRFETVGDFASYARCVGSAHFSNGKKKGKGNTKNGNRYLGWAFIEAANFAIRYNETIQRYYQRKSAEGKHMLVAKKSVAHKLARACYYILRDQTVFDVTRAFA

SEQ ID NO: 254040 - protein, 389 aa, unidentified
MKLYVGIDIAKLNHFAAAISSDGEIIIEPFKFTNDADGFQLLVSKLESFDKNSLIIGLESTAHYGDNLVRYLVAEFYQVCVLNPIKTCQMRKNNIRKTKTDKVDTYVIAKTLMMQDDLRFVSFYDLDMMDLKTLGHFRQKTIKQRTRLKIQLTTYVDQVFPEIQYFFKSGLHQNAVYALLKEAPSPKEIASMHMTHLANLLKVNSHGHFTKEQAKELRVLAQKSVGANDSAISIQITQTIQQIELLDSQLDKIEAEMTDIMKFNDSVIMTIPGIGYINGGMILGEIGDIHRFSNPNKLLAFAGLDPSVYQSGNFQAKTTRMSKRGSRVLRYALVNAAWNVVRNNATFKAYYDAKRAEDRSHYNALGHCAGKLVRVIWKMLTDEVEFNLE

SEQ ID NO: 254041 - protein, 317 aa, unidentified
MMQAAPIFVGIDVSKARLDIALRPSGATESFPNDETGIRTLVQRLCAVKPLLIVLEATGGIERSAVRALVAAELPVTVANPRQVRDFAKATGQLAKTDVLDAQILARFAEAVRPVLRPLPDEMTLELRALIGRRRQIIEMLTAEKNRLSRAPQRVQKRIATHIRWLQSELERVNEDLDQAIRQSPIWREQEDLLKSVPGIGPVVSRTMLAELPELGSLNRKQIAALVGVAPLNWDSGLLRGRRVIWGGRAHVRTALYMAALAASRRNPVIRDFYRRLRAAGKKPKVALVACMRKLLVILNAILKHRVPWRPVVAQVP

SEQ ID NO: 254042 - protein, 422 aa, unidentified
MNYKQNEKINQVKESTLVVGIDIGSTTQYARAFDWRGIELGKVFTFSNSREGFEAFKAWMQHLQDKYRKSDVIVGIEPTGHYWFDLGAYLEDEGILLVMVNPYAVKQTKELDDNSQSKNDRKDPKVIAKLVTEGRYSAPYTPDGVYADLRIMVANRKRLIREMTQIKNRFARWFAIYFPEYTDVFGDYEAQSSMLLLKKVCTPEAIVELGAEKINQIWRDAKLRAVGMKRATTLCETAKRSIGLKKGSSAARYEMKLLLEDYEYKKAQLDAVMEEIEKLCRKIPESEQMLAIKGIGVITVAGFLAEVGDVRRFESPRQIQKLAGLSLRENSSGKHKGQTTISKRGRSKLRAVLFNAAIPLIAKNPEFKSLHEYYTTRANNPLKKKQSVIAISCKLIRVFYAILANGVTYDAQKMLSDIHRQP

SEQ ID NO: 254043 - protein, 442 aa, unidentified
MSKLKIIHRKAAGIDIGSEKFFVSVDGHQVESFDTFTSSISLLIAYLSAHKIETVAIEATGVLWLPLYDALERSGFEVYLVNGAHARNIPAQKSDPADCRWLQRLHSYGLFRASFVPKGSIRQLRTFMRFREDCLEISSSHILHMQRALELMNIKLKNVISQIHGTSGIKIIEAILAGERNPDSLLKLCHGSIRRKKREQVLQSMEGNFQSEYLFLLQKAYDGWLFYQMQIEECESKIEEVLKELTANLPTPKPTPASPGRHHPVGIANIHDMMVQLTRGRDATVLPGISDTTVLKLISELGTDLSRWPTDKHFTSYLGLSPKKCESGKRKRSKRNVAKTKAGQIFRESAMSIANSKHLALKGFYHRLKSRSGPRIAMKATARKLAVLYYRFMTKGMDYVENGLKNYEDRFKLIMIKSIEKKAKDLGISIVVDNQTFTSIVH

SEQ ID NO: 254044 - protein, 318 aa, unidentified
MPPAAPTFVGIDVAKAELVIAIRPSGDRWTVTNDEAGIQTLVKRLDRHAPALVVLEATGGYERAAIAALAAAQLPLVVANPRQVRDFARATGQLAKTDRIDADTLALFAERVRPNPRALPDEAARALDALLTRRRQVLEMLIAERNRLEHALPAVRRGITQHIRWLERQLQDVDRDLDDNIQASPVWRAKENLLRSAPGVGPVLSRTLIGELPELGTLPRKQIAALVGVAPLARDSGTLKGKRLVWGGRAPVRATLYMAALVGTRCNPVIRAFYLRLLAAGKPKKVALTACMRKLLTILNAMMRTNTTWRQIDQSQTT

SEQ ID NO: 254045 - protein, 412 aa, unidentified
MQVVYERCCGLDVHKRTVVACRIVPESRGQWRPEIRTFGTMTQDLLALVDWLQEAGVTHVAMESTGVYWWPIYNLLEAQFTVLVVNARHLKAVPGRKTDVKDAEWIAELLQHGLVRGSFIPEQPQRELRELTRYRATLVQERARVVQRLQKVLEETNLKVGSVITDITGVSGRAILGALVAGQTDPASLAQLAKGRLRKKLPELEQSLVGIVQPHHRFLLVEHLSHLDFMDEAINRVSQEIGERLCPFEAQVQGLDTIPGVNERIAQVMLAEVGTDLSRFPSAHHLASWAGICPGNQESGGKRQSGKTRKGSPWLRAALIEAAHGAAKSKGTYLSAQFRRLVSRRGKKKALVAVAHSILVIAYHVLTRREIYQELGGNYFDERERTVVERRLTRRLERLGYQVTLEPISATA

SEQ ID NO: 254046 - protein, 407 aa, unidentified
MQVFLGIDWSHTHHDACWLNERGQVLNRLTVPHTLEGLTQLDVACQQLGVSRSECWIGLETAHTLLIDFLWEQGYSQVFVIPPGAIKGARRRYRQTNAHTDQSDAWVIADVLRTDPATLQPWRPDGVIVRQLRAKVSLLHFLTQEIRRYSNRLRAVLARYYPAALHIFYDPASPIALRFVQAFPTPQAATALTRQAFGQFARGQRYRQSDYVLAAAYARLQAAYPVASATTVAAYQEEAVWLAQHLLAAIEHKKAELAQLQDLFLQHPDHELFASLPGTGDFLAPALLAKFGDDRDRFPDPQSLQCLAGTCPVTEQSGKAHHVHFRQACDHEFRQIAQQWARASVGQSSWAATYWHGVLAHSRSLSHAYRCLANRWLAIAWKCWQSHHAYDEAIHLQNRARRLVTRA

SEQ ID NO: 254047 - protein, 315 aa, unidentified
MTNTTIGVDISKDHLDAYRMNDGASRRFANKAAGHRAFLDWLGPSEARQGLRIVYEPTGPYHRSFEQKLAAAGLALVKVNPRQARRFAEATGQLAKTDPLDAAMLARMGALLELEARPVRSPIANDLKDLHMAREALVKNRIRAKTRAKMLALPLLKRQNAEQLKQIERQMAVIEKEIMAIIAADPDLASRLAILVSIPGVSAVTAFALLIDMPELGTLEHGQAASLAGLAPVTRQSGRWTGRASIRAGRANVRRALYMPALSAMQFNPDLKAKYQQLKAAGKAPKVAITAIMRKLVVLANALLRDQRTWAPSLP

SEQ ID NO: 254048 - protein, 312 aa, unidentified
MDKLFYGGIDVSKDRLDVVVLPEERFFSVSNDTAGCAELVARMRPLVVSAIGIEPSGGYERGIIRALLAAGLSVRRVNPNKLRQFARARGVLAKNDRLDARLIAEYVAIMPTRVVQRDEAVERLAEVVTMRRQLCDEHVTVENQAAHIEDAMLRRLNKRRLARLEADTRLLDKRLAEMVATNAALAQRYELLTSMPGVGPVLAFTLIALLPELGQMSRKQIAALVGLAPYDFDSGKLRGHRSIYGGRMPVRNVLYMAALSGCRYNPALKAFHKRLAAADKKSKVVIVAVMRKMITTLNAMLRDNVEWQPESA

SEQ ID NO: 254049 - protein, 358 aa, unidentified
MNKTSTLKEQVIGIDLGNAKHAVCVVDAKSGEILKERNITNHLESLRRLSKSHPNALVVMEVGTHSPWTSRFFQAQGHEVLVANPRKVRAIFENDRKCDRYDAQMLAKIARFDPSLLYPIEHQSEEAQRDLLQIKLRDSLVRRRVDLISSVRCTLKSLGIPLKSPNTNYFAIHARRDLAEEHGNTLTLINPSLNAIDSMTTEIKTLDRAIEVLAETRYPETTCLMEITGVGALTALTFVLVVGDPERFVRPRDIGAYLGLVPKRDQSGDVDKELRISCKGDAYMRRLLVGCAQYILGPFGPDCDMRRRGLELAARGGTRAKKKAVIATARKLSVVMLTLLKSGADYEPLRGETKDEAA

SEQ ID NO: 254050 - protein, 316 aa, unidentified
MADFVCVVGIDLSARRWDVACYPGDAVASFTTDAEGRSGLLAWLARHAPAGVIACEASGGLEQQLAELLVPTGFTLRILDAARVRRFALAAGQRAKNDRLDARVIAHFAATFPGPAYLPDKDRAALAELGAVRDGIVADITAVTNQLRHIRLAGLQALMADRLAALRRWQRRVEAQIEAVLSQNLVMAARRRLILSVPGVGPVSAARLIAHMPELGQLTGRQAAALVGVAPFDDDSGGRRGRRRINGGRTNVRNTLYMAALVAARQNPVLKTFYERLINAGKAAKLALVAVIRKLVVILNAIIKSGQPWTNPANTN

SEQ ID NO: 254051 - protein, 414 aa, unidentified
MEVLYSRCAGLDVHKKTVVVCRLGVDVKGNKLKEVQTFGTTTADLLRLSDWLTAGTCTHVAMESTGEFWKPIWNLLEGNFELLLVNAQHIKRVPGRKTDVQDSEWLADLLQHGLLKASFIPPVEQRDRRDLTRQRTQLVRDRASVLNRIQKVLEGANIKLSSVVSEINGVSSRAILAEMVADHLNPAQLDALVHGRLRDKLPELEQALTGRVRAHHRFLLAQHLAHLDFLDEQIAAYSREIERSTAPFDELVALLDTIPGVARTTAELILAEVGADLSRFPTADHLASWAGLVPGNNESAGKRLSGKMRQGSQWLRAGLTQAAHAAARQKNNYLAAHYHRLAGRRGKKRATMAVAHSILVIAYHIIQHRQPYQDLGSNYFDERQKVSTANRLTRRLEKLGYHVTITPPSTPVAA

SEQ ID NO: 254052 - protein, 337 aa, unidentified
MQITTIGLDIAKNVFQLVACDDRGKVLKKKVLRRGQVLRYFAQLPVVRIGIEGCASAHYWARALTAQGHRVELLPAQYVKGYVRGNKNDYNDALAIADAVRSPEMRRIPIKTVAQQDVQALHRLREGQIKARTAQANRVRGLLAEYGIIVPQGLCALRRRIPEILEDAENGLSEWFRGLLSQSMDQMRALDEQIAQYDRRVRAHSRTDESCRRLQTIPGYGPMVASVFAAYVGDGRGYRRGREVSASVGLVPGQYGTGGKTVLLGISKRGDRYVRCLLVHGARSVVRVAAHKDDPLSRWINQLRERRGVNKATVALANKMARIGWAVIRSQRDYQPV

SEQ ID NO: 254053 - protein, 349 aa, unidentified
MTVTIVEEGRPITGGVDTHADTHVAAALDPVGGLLGVGEFPATAAGYARLLGWLGGFGTVCLAGIEGTGSYGAGLARHITAAGIRVVEVDRSDRQDRRRQGKSDPLDAVSAARAAQSGRARGAPKGRDGAVEAIRTLMVARRSAAGERTRTINQARALVLTGPDDLRARFARHTPAALITGLASLRPRTGDVTGHATRVALRELGRRAQFLDGQLERLDDFIVPLVTARAPGLLALYGVGPRTAALLLIAAGDHPGRLRSEAAWAHLCGAAPIPASSGKVTRHRLNPGGDRQANHALWRIVFTRLGSDPATRAYAERRTAEGKSKAEIIRCLKRYVAREVYPYLRPAGG

SEQ ID NO: 254054 - protein, 355 aa, unidentified
MSQEKYIGMDVHQATISVAVRDVQGKLIMESVLETKATTILEFVQGLRGTLALTFEEGTSAAWLHDLLKSHVSRLVVCDPRKNALLKDGNKNDRVDARKLAELLRTNQVKPVFHGEHGTRALKELGRSYLTLTQDRTRVMNRIKSVYRSWALPCAGTSVYTRRHRAEWLAKLVEPGVRIRAEHLYQQLDSLEPVRQEARRQLLLESKKHAAVKLLRQIPSIGPIRAALLVALLQTPHRFRSKRQLWAYCGFAVEVHDSGEYRWVRGKLQRNRERITVRGLNDNHNSDLKNLFKGAAISASTRPGPLQDFYLARVAKGMRPTMARLTLARKIAAITLTMWKKGANFDTQQLQRQAA

SEQ ID NO: 254055 - protein, 349 aa, unidentified
MNNISVIAVDLAKHKFQVHGYGPQDEQRFAKTLTRAAFEKLLREQPPCKLVMEACGSAHFWSRLALELGHQPAQLPAQFVKAFVIGNKTDRNDANAIHEASKRPNVRPVPVKSVEQQDAMLPHLTRQRLLKTRLELTNQLRGVLRERGIAFAKGDAALRRGLRDLRDAEPTRELSPRLLAWVGQALEEWTELEARLSGVERQLQQDYRDSPRCRQLGELPGIGVLTATAVQARVTSVDSFPDSRAFASSLGLVPSEHSSGEKQRRGGIHRRGDPYLRLLFIHGGRSVVQSVLRKQRAGIVLDVFEQWVLGVYQRRGYNRAAVAVANKNARIVWALLKTGEAYRKPPLAA

SEQ ID NO: 254056 - protein, 340 aa, unidentified
MGQVATIGLDIAKSVFQVHGVDADGGVVIRQKLTRARLLRFFEKLAPCLVGIEACGTAHHWARELIGLGHDVRLMPPSYVKPYVKRQKNDMADAEAICEAVTRPTMRFVPVKSPEQQGVMVLHRTRSILIRQRIQISNAIRSHMAEFGMAAAVGRQGLQALIAIVEDSSDDRVPAEARGCLGMLAAQLRLVNEQILDTDRLIRTNARSTEVGRRLMEIPGVGPLLASALVGTIADPKAFKTGRNLAAWIGLVPKQNSSGGKERLGGITKQGDRYLRQMLVVGALAVVRYAVRNGTRRPWLVQLLARRTPKVAAVALANKTARMVWAIMTSGERYQEPLAA

SEQ ID NO: 254057 - protein, 344 aa, unidentified
MGHYVGIDVGLRSSSLCIIDEQGKVCLEREVASEIEAIADAVRGFAEHVDGVALETGNLTPWLTAGLRAEGFRVVVMEARQVKTTLSSLRNKTDRNDARGIAQILRTGWYREVHVKSLESQRLKTLLAARKALLRRRIDLENEVRGLLKVYGFKLPAQIYHARFDDMARQAVMADPALAEALGPLLDARGHLYRAFLEIDKRVRSIAHDDPICQLLMSAPGIGFIAALTFKAAVDDPKRFRRSKTVAAHFGLTPRRYQSGEKDNPGHISKAGDVEVRSAMFLAANTIMNGRGKPSSLRSFGARLARRKGRKRAMVAVARKLAVVLHAMWTDGTLFCNVEKEALA

SEQ ID NO: 254058 - protein, 356 aa, unidentified
MINIGIDVHKKRCVATVKQESREKLEQLDFENSESGIIEFIGHIKNLYGNDARAVCESTANYWIRLHDTLEENGIDTVLAHPAKTKMIAQAKLKNDKLDSEVLADLLRTDMVFESFVPEKYYRDLRNMVRTRLGLVQNITRHKNMVYAILAKYEHVSPTQKIFSKKGMQCLHEIKLSYTDRMAMNAYLENIEMTQRQVNAFETRIAATSNDDDRTRLLMTIPGINYITALTVISEIVDIKRFVTPEKLVSYAGLAPSQRNSGETNKSGGITKHGSAWLRNAMVEAANTTIRFDPRMKSFYTRIAKRRGKQKAKVATARQMLEIIWHMLNNMEAYRTQNHELTLQKYKRMKDRSQVS

SEQ ID NO: 254059 - protein, 315 aa, unidentified
MTSEGKIHVGVDVSKDRLDLAVLEENRIEQYTNTAGGIKELVKAMIALGPSLIVVEVTGGYERAALISLFEAGLPVARVSGYRARQYARAKGLLAKTDPLDALNLADYGKHVQPRLFEAKSEQGQCLSGKLARRRQLGEMLKAEKNRLRLAYGDTGASLERVIEFLGGEIKQLDHEIRTLLDNDPEWLEQEQLLRSAQAVGPVTAATLLAELPELGTLNRKQIASLVGLAPINRDSGKRSRYRKTGKGRPSVRSVLYMATLTGIRYNPVIRKQYHDLVSRGKVKEVALTACMRKLLTILNAMMRDQKPFRYAEIS

SEQ ID NO: 254060 - protein, 351 aa, unidentified
MKSYDSIVRVGVDLAQSVVQLHAVDAAGNVVVAKQIQRSALIAWCEKLHEGCVVAFESCSAAHHLARQLSTKGLVPRLIAPCFVSPYRMTGATGKNDATDAEAICEAACRPRMRFVAVKTPDQQGWLAVHRLRDGYIKDRTAWMNRARSLLFEFGIMLPRASARFRDALQEAVSDRASGLPVNARPALRRCCAHLDELQRQVAWCDQQIAKHARSDENARLAMQVRGVGPLSASALAASLGDLTQFRNGLQFGAWLGLVPRQRSSGGTQRLGRITKRGDAYLRKLLVLGARSALTVAARHDDADGKWALQLQGRVGWPKACVALANRNARTLWRTLARRDPAGTAGKGASR

SEQ ID NO: 254061 - protein, 394 aa, unidentified
MIYAGVDIAKTDHVIGAVDERGAEMCPPMPFKNTEAGLEGAVAWLEGLAGSPSDVVVGMEATGHYWMACYSFLVARGYSVAVINPMQVKAVRKLKGLDKVKNDRVDAGLIAEALRIGQYDETRLATDEMASLRSLSRYLQSLRGMVAELKTQCICLMDAHFPEYAGIFSDMFGAGSRAVLSKSPLPFELARRRADSLARDIAEASRRGGKSSGYAAKIKAAAKSSIGVRLGQEAASFQVKSLIRQIEFADSECAGVEARLRSLLDEVEPLVLTIPGVSYVTGAQIVSEIGDVSRFRNAPALVSYAGLNSSVSQSGQFDSGGGPITKHGSPYLRRALWLAANRARQYDPGLRAFYDRKRAEGKPHRVAVTAVARKLCHIVFAVMRDQVPYDPGRK

SEQ ID NO: 254062 - protein, 341 aa, unidentified
MDIAVLGIDLGKNSCSVVGLDASGRVVLRRRLQRKTIVALAAKLSPCTVAMEACCGAHHLGRVLAAQGHTLRLMSPEYVRPYVKAQKNDDRDAEAIAEAATRPTMRFIALKSEDQLDMQTLHRVRDRIVAERTSLMNQLRAILLERGIIVPKGRAKLRLRISEPILQPCEELSPRIRLLIEDMLTRWQALDDRIAAFDAEFAAEARQNEAARRLTAIPGIGALNATALVAAVGDAQTFGRGRDLAAWLGLVPRQATTGGKPRLLGISKRGNRYLRKMLIQGARSALPTLSRGQTSLGQWLRGLLARAHVNTVVVALAAKMARTAWALLRHGRTFEPRVITG

SEQ ID NO: 254063 - protein, 315 aa, unidentified
MSDMPCFIGIDVAKAQLDIALRPSGERWAVPNDASGVATLVDRLQALHPTLIVLEATGGLERAATAALATAGLPVVVINPRQARDFARATGQLAKTDALDARVLAHFADVIRPTPRPLPDAQTQELRALLGRRQQLIVMRTAEQNRLAGTSARLTKDIAAHITWLNAGIATLDDDLETMLRASPLWRENDDLLQSAKGIGPVCARTLLLELPELGTLTRQQIAALVGVAPLNCDSGTMRGRRTIWGGRAHVRTVLYMGTLVATRFNPVIRAFYKRLLAAGKVKKVALTACMHKFLTILNAMLKHRTPWKAQEVQS

SEQ ID NO: 254064 - protein, 401 aa, unidentified
MIVGYASIAKTVAQSHMRRRPVMRDATRFVGLDVHAETIAVAVAEPGRGEVRSLGIIPNELGAIRRLIQKLGKKNLRACYEAGPTGFALYWQLVELGVECEVIAPTLVPKSAGDRIKTDRRDALKLARCYRAGDLTPVWVPDQAHEALRDLVRAREAAKYDQHRARQRLGKFLLRTGQKPPSGTTWSVKYVEWIRTLRYQHVAQEATKVDYLAEVDHASERILRLEKAIDEAIQQASPSVRAVIDGLQALRGVAKLSAVTLAVEIGSFSRFETAKQLMAYCGVVPSEHSSGNSRRQGAITKTGNAHVRRVLFESAWGCRHRPNLGKQLKLRQRGLSATTNEIALKAQHRLHRRYLALMARGKPSPKVLGAIGRELLGFIWAIAVQVETEHASAARTTKLAA

SEQ ID NO: 254065 - protein, 361 aa, unidentified
MNATTVAVDLAKSVFQLAVADEHWRVVETQRLTRTQFERWFLNHEVSLVIMEACGSAHHWGRWLNALGIEVRLLPAQYIRAYVKRNKTDAADAAALLEAARASDMRPVRIKSVEQQALQGMHRIRSLWMGTRTSRINALRGFCREFGIAIPVGARTGIEAIGRVLADPNTAVPDLLRGTAKLLLEEIRLLEARIAQLERELAALARLSPACTTLLSIPGIGLLTATAMVAATSGDVSHFKDARHFSSWFGLTPKEYSSGSSRYLGRISKKGDRYLRMLLTHGARSVLRAAKVADNAGREVCGVRRWALDVQARSNHNKAACALANKLARICYATLRDQQPFGEPTVRLGKKINRESFVMPA

SEQ ID NO: 254066 - protein, 409 aa, unidentified
MEVIVERPAALDVHKEQVTACVRVPGPGGVRSEEVAQFRTTVRGLLTLRDWLAAHGVTQVALEATGVYWKPVWAVLEDEFELLLVNARHVKQVPGRKTDVSDAAWLCQLLEAGLLRASFVPPKPIRALRNFTRYRKAQIAERQREANRLHKALEDTGIKLDCVASDILGVSGRAMLDALVQGTTDPELLAELARGRLRAKLPALREALGGRFDALHAVLIGAILAHLDFLDEQIERLSEAIEEQLRPFAPAVELLRTIPGVETRTAQVIIAEIGVDMSIFPSDRQLASWAGQCPGNDRSAGKRRSGRTRKGSKWLDQALKDAAMAAIRTNDSYLQAQYRRLRPRIGHGRALGAVKHTIICACWHMLTTGELYRDLGGDYFRRRNPERQTRRLVAQLEALGHTVTLKEAA

SEQ ID NO: 254067 - protein, 479 aa, unidentified
MNVNVQVNEVPVRRLAGIDLGVASEHTVRVLDGTGQKIAAARCVPSRESLLAVEARALAGAPAGTRLEVVLEPTGPAWFPVARFFAARGHKVFRVSSAKAADLRKFYRRHTKSNGIDADTLARLPLADPDGLTELTLAEGDAATLDRRVRACDRLTQQAARHKTRIKALMRQLLPMTPLTGDLGKADLAILERYADPRALLDLGLAGLTALISQASHGKQGQARAQAWISAAQQATDLYGPADPAMPYAGLAAEVATEVRLLNAIETELKAHAAAREDAYRQVDPGQIARTLPGLAEIGGPAMTAVTGSPARFASGHHFKSYLGLAPRASETGETDRKGEPMSKAGPSLGRATMIRAADTARKLDPQLARIYYIQMTERGANHLKALCVVAGQLALRLHATMLRASPYQLRDTDGSAVTADQARQIIAANWTVPDDVRKRRRSRKNKGKTPQQASKPVQRGGPPRPGSRPGRTPVKPAP

SEQ ID NO: 254068 - protein, 410 aa, unidentified
MEVMFDRVAGLDVGKETVTVCLRTPGPKGRRHAETRTFKTTTGSLHLMRDWLVEAGVSIAAMESTSVYWKAPFYCLEEVMDVWLLNAAHMKAVPGRKSDVRDAEWIAQLLEHGLLAPSFVPPPEIRRLRMLTRYRVQLMGDRRRDIVRLELMLEDASIKLSSVASSLKTVSARAMLTAMINGETDPLRLADLAKGRMRRKIPDLAQALTGHFDANHARLARSMLRRLDVVEQALAELDAVIIEACQPWAHQIELLQTIPGVGQKVAEVLIAETGGDMSRFPTAAHLAAWAGLAPAMNESAGKQSPAGKRHGNKWLTAMLVEAAGSVGRMHGKNYLAAQHARLMKRRGMGRAQVAVAHSMLVAAYWMLKRDEPYHDLGADWHRRRSDEAHTRRLVAQLEHLGHHVIIGPAA

SEQ ID NO: 254069 - protein, 399 aa, unidentified
MSNYTAYVGLDWATEKHDVSVKIGTGPSETQVVKHSAEAVREWVEGLHNRVGGQIAVCLEQSRGPIFNALSEYSYLSLYAVNPATLSLYRKAFTPSGAKDDPVDADLQRELLEKHLDKLRLAEKMDPVTEELKLCTENRRAAVNERTRLVNRVRACLGGYYPQIIEVFSDLTSRVFSAFLLQWPTLEAAQSASETELLAFFHANRSYAKRNKERVARLKSALPLTTNAALIRASSLRARGLAAQLNALHESVSQFDDRIKELLALHPDAKLFASFPMMGDIHRARIISVFGTDRKRFASATAVQVCAGVAPIKDRSGKKEVTRMRQACSHFMRQSFVEWAGATIQACPWAEAYYAKARAKGKSHQVAVRALAFKWIRILYACWKASSSYSEEKYMKNLH

SEQ ID NO: 254070 - protein, 369 aa, unidentified
MKTLVRKPRRFKGLTVGLDVHKRFVQYAVLNRKGDQVGGGRLKAEEAALREQVRKWRAQGEVQVVLEACGCFVWVFDLLVAEVGRAQVHVAQPGKLRVIAKSQEKNDATDAWWLAYLLYEGRLPEAFVAEGQLRELRIAVRELRSYTDTRSDQLRRLRSHLAQAGLKAPSAWHTSKVKRAQVRTLMKAVPGERGLALHRVYQLIYRLSQQVRYWRRRVQELSKGFTAIERIDEELPGLGLVTASAVHAELGPAERFHSEKAYAKATGLTPGYRVSGGRMSGQVITKAGSRLARWALTRAALACLRCRSGPGLQVKYWMLRRMKHKSRKKVLVAVARKLAEGIWRLFRYGEAFDVRKAFPAPKALPGQAA

SEQ ID NO: 254071 - protein, 356 aa, unidentified
MSRDVKYIGMDVHKEAIVIAVLNDGGKLAMECIIETKASSLLQFIHGLRGELHVTWEEGTWAAWLYDLLKPHVHQVLVCDPRRNALLKEGNKSDKVDARKLADLLRTGMLRPVYHGEHGLRTLRELGRSYQTISKDLNRVMNRVKALYRGWSIPCAGTKVYAPRYRQEWLGKIEHAGVRRRAELLYEQLDGLQALRRTLRPELLAESRKHKASKLLRQIPCIGPIRAARLIGLMQTPHRFRSKRQLWTYSGLGIETHDSAQYCYVNGQLQRSKKPQQIRGLNRNHNHEMKEIFKGAATRASCGVGPLRDFYVTLLDKGMKPEMARLTLARKIAAIALTLWKKEERFDAEELKSQAA

SEQ ID NO: 254072 - protein, 354 aa, unidentified
MKRNSKYVGLDVHQAMTAVTVRTEGGRVIARSVIETSEHSITEFFDALAGTVHVAFEEGTQAQWLYDLLSPRVGRVIVCDLRGEKRSGNKGDRIDADYLSERLLRGGLRAVYHGSSERADLKELTRAYRNLVEDSTRVMLRLKALFRARAIRTTGSGVYDPTERAAWVAQLAGQGARLRAETLYAQLDVLRTQRKKAKAAMVTEAKRDPAWGVLETIPYFGPVRIAMLLATIGTPWRFRTKRNLWAYSGLAVVTHTSGEYEMFDGRPRRRHRRPLTRGLNRNHNRVLKAVFKGAATTATGKPGPLQDFYHGMLERGMREELARVTLARKLAALTLRLLKTGEVFDPTQLSRPQT

SEQ ID NO: 254073 - protein, 370 aa, unidentified
MLNTTTFVGLDVHARSIKAVALDAMTGEVRSATFGYDAAEVAGWVSSVDPSAKCVYESGVTGFDLQKRLSSMGIDCVVGAVSKMIKPSADRRRKNDRNDAEFLARMLSVGNVVEVWVPDDECEAARDLTRALDDAREDLKRCKQRLSKFLLRHGLVFSETNAKGQRKKNWTAAHWAWIRSISFPDKADDEVLAYYIDAARQAMEDKARLERLVEAEASKPRWKKRVDSVRCLKGIDVTSAADLVFEAGEFSRFKNARSFAAWIGLTPSEHSSGESVRQGGITKAGNKHLRRVLVESAWHYLGCSPHSKDLAKGQAPDPGARRHAAKGVRRLVGRRAAMLERGVHKNKANVATARELACWCWAIGRMVENG

SEQ ID NO: 254074 - protein, 391 aa, unidentified
MIYIGIDVAKNKHDCFITNSDGEILFKPFTIPNNLEGFDDLYHKIESTTNDPSQVKVGLEATGHYNYNLLGYLIDKGLTTYVINPLHTNLFRKSQSLRQTKTDKVDARTIASMLMSDVNLKSYSDTSYHNEELKSLTRYRFDKVKERAKLKTSVSRLVCILFPELEKLVPTLHMASVYALLSEFPSAKHVATAHLTRLTNLLSESSKGRYGKDTAITFRDSARASIGSNMPAKSLELKHTIKLIQELDSEIDEIENEIKIIMDEINSPILSIPGINYRMGAMIIAEIGDFNRFDSPDKILAYAGFSPSTYQSGQLDGAYAHMEKRGSRYLRYALYNATKYVCHWDPTFAAYLAKKRAEGKHYNVAISHAVKKLVRVIYHLEKTKQQYIKAA

SEQ ID NO: 254075 - protein, 319 aa, unidentified
MAQNDPVVAGIDVSKDKVDVCIRALGLQQIFPSCAQGHRELVVWLGKHQVNKAVMEASGGYEGDWAKALREADIEVRIVDPKRVRSFAHSAGRMAKNDAIDAQMIAWFAETFRQAPGQVHDAAQQELVALVKARIALVDLKMQLAAQSEHSASGQVQKARDRVLKSLIGEIAKLEATIAARIDATPPLAERAEIIASVPGFAKTTSANLVAGMPELGQVSNEIAAALMGLAPYDDDSGNRRGERHIQGGRRWVRNAIYMPCVGAATLNNPVIKAYYDHLIARGKKPKVALVACMRKLIVILNTMIARRQKWDPSRNVLS

SEQ ID NO: 254076 - protein, 396 aa, unidentified
MHIRWGVAPRAPVQGTIRHRGGLAAKGSEGVVTEDVEWFAGIDWASQTHQVCLVDAGGKIVGERGFAHGGAGLAELCSWLLTMTRAAPTAIAVAIEVPHGPIVETLLERGFQVYAINPKQLDRFRDRFTVAGAKDDRRDAHVLGDSLRTDRHCFRRLSAENATVIELREWSRMSEDLQQERNRLANRVREQLWRYYPQALAISDDLAADWFLQLWAAAPTPATARRLRESTVGGILKRHRIRRITAAEVLASLRQKPLTVAPGTAEAASAHIRTVAQRLTLVNRQIKQAHHRLDALSDRITENEGDSDAMGQKSEQRDVTILRSLPGVGRIVLATLLAEASEPLRRRDYRTLRTLSGVAPVTRRSGKYCIVVRRQACHMRLRSAVYHWARVATQHD

SEQ ID NO: 254077 - protein, 400 aa, unidentified
MLSIGIDVSKGKSTVCGMKPGGEIVYTPFEVQHTREGMSELVSLLRSSGEEVRVVLESTGSYHCPVVAALLENGIFVSVVNSLRMKRFCSQSIRKVKTDRIDAMQIALYGLTYWQELQPARLPEDTYRELQLLARQYYQMTSMLIKAKVDFIALCDQVLPGMQELMNDHAGRHKLSDFVLRYHHITHILEMGETRFQKDYCKWAEKKGYRNCERMAAHIFATAQNGIPVLPNAPSTQIVITEAIRVLHTVEASRDTILAQMQSLAKTLPEYSLVREMPCIGDTLAPRLIAEIGDVRRFHSKRALIAYAGIDAPPYQSGKFCAHNRHISKRRNRYLRKTGYEVMQSYVMHKPANDPIFTFIEKKRSEGKCGKLAMVAGLNKFLRIYYGKVTELYRSLAAVE

SEQ ID NO: 254078 - protein, 372 aa, unidentified
MSDTIIPYQSFVGVDLHKTTVTLVAVAPDGATIAQLTINTKCREKIAAWLLTLPRPSRMAVEAVGFVEWFIDEFRPRVDRIDIADATELANRRGKRRKRDPGDARDVALRLARNECPLGYIADEELMQLRKLGRHWRQLSTVQARAKQCIKSMLLAANLRGPKFDGGSAQRWLLAHGHLLKPAQRRAFADFVQIVQLVELQREPLRYAIIEACRSERFAPLMKLLQSVPGIGEIWSCIIAAEIGPFDRFPNADALEFWAGLTSDLKESAGRTQPGKITKAGSRTLRWALCNAALTMCHSDAKQEAIRQRLIRKTGGIKAKANVAMGRRLLRILYAMVRDGKRYKGGPSRRRNAAANKARAAKLARKNRKEAA

SEQ ID NO: 254079 - protein, 370 aa, unidentified
MRIIGCDLHARQQTLAMLDTETGEVVNLTLMHEGNNVREFYSKLPRPVLVGIEATGSMPWFLNLMEELGIECRVGHPAQIRAAEPRKQKHDRRDADLILKLLAQNRFPAIWLPSKELLDLRALLLHRHQWVRMRVRMQNALQAIALANGLRRGPALWSYDGQAKIAFLPLLPHAAYRRSALQAMYKNMQSEIENLTRRVAEQAGNRCGARLLMTHPGVGPVTALATEVFLGDPQRFTDSKTLASYVGIIPRKYSSGEHQRLGGVTKQGSPLLRFLWGEAGAHAARRDPELKRFYRRKLVQKGLGKARVAVARKLGIRLWIMLRDEIDYQEFCRRGQIQQKTVRPVVGMPETGNGAKSHRQSDEATRLPES

SEQ ID NO: 254080 - protein, 421 aa, unidentified
MNNSGDDSFAAFVGIDWADAKHDICLLSADSEVSESLVIAHRAEAIEEWALNLQRRFKGQPIAICLELNKGPLVSALCKYDFFVLFPVNPQSLARYRTVFSSSGAKDDPTDAQLQLDLLRKHRDRLKPLEPQSASMRSLQQLVEHRRLVGDKVRITNRLTSTLKNYFPQVLQWFSDKDTVIFCTFLSRWPTLKTAQQARRVTLERFFTQHDVRYNQVIQERITQIKEAMPLTADSGVIAPNALMVEALVGQLRTTLDAIRRFDGRIAELAREHSDFAFFDALPGAGPVYAPRLLAAFGEQRHRYPNANDLQQYAGIAPVTNRSGNKTWVHWRMSCPTFLRQTFVEWAAQSIRQSFWASAFYEQQRDKGKSHQMAVRALAFKWIRILHRCWQDGTPYDESTYLKNLKKRGSPLLKHLSGATT

SEQ ID NO: 254081 - protein, 344 aa, unidentified
MDNHTQYSGFAGVDLAKKVMQIHFVTGDGEITDKQVKRAEFLDFFRNRTKCLIGMEACGASQDWARKLEAMGHEVHLMSPKAVKPFVSGQKNDYNDAIGIYKAMFNGVRRVPVKSTEIRDLQTLRRIRSQVTKDKVKEINHVRGLLAEYGIVMGKSITAFNKGISSALESLKERGDVSPLVAEELQTTVESIKTKIERQKRLDREIEQLARSCKNYENFLKTPGVGPFTAAMLCVLLCDPAIFANGRQFAAYIGLAPRSRGSGGKNFIIGIPSKFNCDSESRAVFVECAQALARYKNKSPWVDGILRRKPKKVAVIAIANKLARQVWAMANKGESFKQMTILTA

SEQ ID NO: 254082 - protein, 344 aa, unidentified
MTIVTLGIDLGKNLNSVVGLDAQERVVLRRRVRRATLSELADKLQPCTVAMEACCGAHHVGRLFAAKGHEVRLMSPEYVRPYVRAQKNDDNDAAGIAEAATRPSMRFVELKSQDRLDLQTLHRARSRLVAARKTLVNQLRAILLERGHTFRQGREILEREIDPFLSEPPADLSARMLRLVGDMRTEWQSLNERIDALNDDLKEHARADEAANRLTSIPGIGVLGATALVAAVGDGEAFRRARDVPAWLGLVPKQMTTGGKPRLLRITKRGNVYLRMLLIHGARAALPSLSKQATPLGEWLRGLLSRAHRNVVIVALAAKLARIAWATLRRGVRFHPQMGAAAMT

SEQ ID NO: 254083 - protein, 341 aa, unidentified
MASHLYLVKPEQLTGRPPAIPNLARTGELDPMDSDLVFVGIDISKATLDVDSYPANEPRRFLNEDASREKLCEWLKTRNPTLIVMEATGGLEMPVAALLAAAGLPVAVVNPRQARDFARAIGVLAKTDAVDAAVLARFAQAVRPAIRELKSDEAQELEAVLTRRRQIVEMITAERNRQLKAQARIAKQIKAHIAWLEKRLDDANGDLERLIKNSPIWLHKSQLLTSVPGVGRVVATTLLAELPELGTLNRRQIGALVGVCPFNRDSGARRGKRLISGGRSSVRAALYMAALAATRFNPAIKVFYDHLVKAGKHKKVAIVACMRKLLITMNVMIKTDSAWKY

SEQ ID NO: 254084 - protein, 415 aa, unidentified
MTKVMEAIIPCCAGFDVHSKTVAVCIRRAGTLGEIHSEVRTFRTLTRDLLDLCDWLSREGVTHVAMESTGVFWKPIYNILEGQFEILLVNARHVKNVPGRKTDVKDCEWLAQLLQCGLLRGSFVPPRPQRDLRDLTRLRAQLTHQMTSVANRIHKVLEDTNIKLGLVATDILGVSGRKIIAALIEGETDTVKMADMARGRLRDKIPLLEEALVGKVTEHHQFLLKALMDQLIYLESQIERFNQRIEQAARPFEKAITALIPMPGYDLVSAQSVIAEIGPRLETFPSHAHLCSWAKVCPGNNESAGKHKSGATGHGNRWLEAMLVQVAWAASHKKGSYFQAQYRRLAGKRGKKRAIVAVAHSILTDTYYILKHERTYKDLGADYFDRISHDRIRRYHVKRLQDLGYKVELAQKEAA

SEQ ID NO: 254085 - protein, 345 aa, unidentified
MDKIITIGLDIAKQVFQVHGVDAAGGVVLSRQLRRGEVLKFFAKLPGCVVGLEACASAHYWAREIVALGHEVRLMPPTRVKAYGRRGRKNDRADAAACCEAVTRPSMCFVPIKTPDQQAALMLHRARQMLIEQRTRLGNAIRAHLGELGIVARKGAGGLAALLQMLETAQDERVPAAIRPILQPLVEQWRCAAAQIAGLDRQIAAWHASNEASRRLATIPQIGPIIASALLATAGDATRFKNGRQFAAWIGLVPSQNSTGGKQRLGAITKAGDRYLRQLLVVAASGMIRRVRANPLLSPWLAQLLARKPAKQAAVALANKLARIAWALLATGQTYRTPTPAAAKP

SEQ ID NO: 254086 - protein, 464 aa, unidentified
MKNAGMSGKTRSAVSNGLKAIRPMVAGIDIGSREHWVCGPLRDDGAANVRVFGTTTVQLMELVDWLVVQGVESVAMESTSVYWIALYELLESRGIEAVLVNARQLHNVPGRKTDFHDCQWIQLLHSCGLLRGSFRPKDAIVAMRAVHRQLFNLVEERTRYVQWMQKALSQMNVQVHHAVSDLAGTTGMAIVRAIVAGERDPGRLSALRHPRCRKSAEEIARHLTGTWREEHLFNLGAALTLYDAVEEQIAAYEARLAAAVAALQPEERRNASVPVHPNPRKEKDIRGRGDQAVRTALWRFSGVDLSRIDGVATGVAQTVLTEVGPDLSAFPTEHHFVSWLRLCPRRPISGGKPLNKTRNALGANRIAAALRMAATSLQRGKTALAAAYRRTARHKGASVAVFAIARKLAQLIYRMLRYGQDYVDIGEEAYEQKFKARRVAGLRETARSLGYSLMEAPSSQGSPA

SEQ ID NO: 254087 - protein, 393 aa, unidentified
MILVGIDVASNKHDIVIMNNEGLVYKKAFVIENSMEGYKKLLSAIQAAKEFFNEDKVRIGLESTGHYSRNILYFLTTNNFEVMFINPLLTNMDRKASSVRKTKTDEIDAKAICTFLIRNQNDFKPYTLSSYHIDELKVLVRQRKSLKKQMNRLTNQLRAYIDQAFPEYYKVFKNILSKASLTLLTNYASISEFKRVRVHTLAELIKKNSQGRHGMNKAELIKGLIKTSIGIDSESLSLSIKQLVSQIRLIELQVEDITNLLEHHIEESKTTLLSIPGIGIQTGAIILAEIGDINRFESDDQLLAYAGLDPSVYQSGNYSGSFKISKRGSSILRWAIFQAAKIAVQHDSIFMNYHNKKLAEGKHYLTSIGHVTKKLLRVIRSILKNNSIYTVSN

SEQ ID NO: 254088 - protein, 342 aa, unidentified
MTLYIGVDIHARQQTLSYLETEDGTTGQVVLDHEVDDVAGFYRQFQGEVIIGIEACGYTNWFEELVERLGHKLLVGDAAEIRRLARRRQKNDRRDADLLLDLLVHDEFPALYRYCQESREVLRQLRYRHKLVKLRTMVANTLHALALNAGLSLRAKLLTKGGRQQLSALPLSAISQQQRNELLSLADELTRRIQLVEQWLAVQAARDGRVQRLQTHPGVGLLTSLCVVHTLGEVQRFSSTRKVAAYVGFDPMEDSSAERKAYGGISKAGSRLLRYLLIEAGQTAAKDDEQLKQFYRRLLPRRGKARAKVAVGRKLLIRCFIMWRAEIDYAEFLRRGQKEETE

SEQ ID NO: 254089 - protein, 351 aa, unidentified
MKRSKSTTKNRKGKPGEGVAEAPTKTKARNKTKTKTKSPRAEIAGGVDVGKAWLDAAVHKAPGKPLRQPNTPEGRAAIIGFFLEHKVTRVGIEASGSYEFEMVEAMREAGLEVIVFQPAQVRAYAKFLKLRAKTDPIDAALIAQCAAAQQEVRDRPDPRLAPLAEHLTYLDQIGEDIARLRTRLDRYRDQRLSAGIKEEIARLTRRQRAEFALMGKAVRLHPDLLERFRLLLSIDGIGEPTALALLIRMPELGTISRERASSLAGMAPFTQKSGRWVGEAHVSGGRGRVGRALFAAAQAASQRWNKALVELYKRLKASGKHHSVAVVACARKLVIFANTVLARGTPWAAQT

SEQ ID NO: 254090 - protein, 424 aa, unidentified
MHNRKANRMKSWQELTHYAGFDWAKDHHALVVVDRQGRIVADFEFAHTLEGWKGFADKLSAWPNLAIAIETSQGAAVDQLLQQECLVYPVHPVAAQSYRERKAPSGTKTDHLDAWGLADALRGDGHGWKALQPMDPLTQQLRLLCRDEVSLIEQRTALVNQLQQALAEYCPIALQAFDDWTRPFTWEFVLAFPTPQVLAGAGKRRWEKFLHTHKLWRPETAEKRLRLFAQADQFKASEPVVRAKSQLAVSLCKLLCTLEQQLKLYRKQIEALFREHPDHDLFGSLPGAKQVLAPRLLGAVGNDPDRYGSQEVLQCIAGTAPVSYQSGQINKVRVRWLCDKFMRHTVHLWANCFRKASVWGQTYYRKKRREGMSHAAALRCLGQRLLKILFRMLQTKMPYDAELHARSQQKHGSWVLKLVNQSPA

SEQ ID NO: 254091 - protein, 412 aa, unidentified
MTVTNQFAAHVGLDWADKKHDVCVQFKNGERVFDVIEHTAEALDAWLTELHQKVKGRIAIALELKKGPVVYALQKYPFITVFPVHALSLARYRQAFSPSGAKDDPQDAELALELMLRYPQKIKAIEPDNADIRLLQQLVEQRRQLVEDKRRFVNRIINTLKQYYPQPLEWFSHRGSLLLCELIIRWPSLQQLKRARRDTIRNFLNAKGGRAMALTEQRVESIDNAIPLTTDPSVIEANALMATALATQIKVVSEIIKTYDERIETLFDTLPDAGLFKSLPGMGPCMGPRMLAALGDNRDRFNSAEEIQNYAGIAPVTERSGQKSWVHWRWQCAKFVRQTFVEWAAKTVNSSYWARLYYQGLREKGKSHQSAIRALAFKWIRIIYRCWKTRTRYDEAKYLLALEARHSPLLKP

SEQ ID NO: 254092 - protein, 405 aa, unidentified
MKHIIAFDVSMGKSTVVVYDRYKRCKYEGELEHTISGFQSLKERIESLREQDGQIPDMVFEATGVYSKGLESFLQAQHYPYIRLNPLEAKLQMAAMRRHKTDISDAHELAKSHFKSDRQETYVQEDYFEQMQALGRYYEDIEKEIRHHHNRLHAFLQLSFPLLEKVFAKSSAMYLNIVQLYPHPACLHGISKEDLSKQIKQATRKNISDQKAEEKAALFITVAENSYAAITPDDVRCQHLRHYAKRILELVNQKKDIIKQMVELSKERVDFQVLVSFPGIGENTAVRLIAELGDIRRFKNPKQINAYAGIDIQRHQSGKLQYQDRINKRGNRRLRKILYFMVMSMISWRAKTKNTIVDYYDHLKKQPQGKPHKVAVIACANKFLKVAFHLIQHDILYHYESAKAS

SEQ ID NO: 254093 - protein, 390 aa, unidentified
MIYVGIDVAKTTHYAAAADSDGVVLVEPFAFDNDAPGFAKFISKIASFPKEQLIIGLESTGIYSENLICFLFDSGYKLAVINPIQTATLRKTNIRKTKTDKVDTLLIIKSLMVNSYRLYTEQDTQSLKLKSLCRFRQSLKKSKARLKIQLSGYVNLLFPELLSFFKSGIHISTCYTLLKRCSSPAEIAALRLDSLSRLLSNASRGRFSRSTAEALKSLAKSSVGVKNPYISIQIAQTIQQIELLEQQIDEIENVIKDTICELDSVIMSIPGIGAIDGAMILGEIGNIDRFASPAKLLAYAGLDPTVCQSGKFKARSTKMSKRGSKILRFALINSAWQLTLKNDTFFNYYQLKLSQGLSHYGALGHVAHKLVRVIFTLLKHNVLFDPTRLV

SEQ ID NO: 254094 - protein, 357 aa, unidentified
MGKSSRNLSTVTRVGLDLAKRVFQVHAVDAKGEIVVARKLTRSQLIPFFAELPPCVVAMEACSSAHHWGRALIELEHEVRLIPPAHVKPYVRRNKSDQVDAAAIYEAMSRPGQRFVPVRSIDNQAELMRHRARELLAGQRTAALNALRGHLAEIGVVAPQGVQHAYDLKRLAGDGFNENGEVVVPDCVRVALRPLISQIDALDEAIGALDREIAASVKADATAKRLMTIPGVGPVTASAIVATVQDAGAFASGREFAAFLGLTPRQNSTGGKTRLGRITKMGDRYLRKLLVIGACATLRHRRGHSDALRLWASGMLERKTVKYKFKLTAVALANKVARIVFVLMTRGGQYDDRPVAA

SEQ ID NO: 254095 - protein, 352 aa, unidentified
MMIIGCDFHPRFQQISFLQEETGEYGQRRLMHTAEAVEFYRSLRGIRVCIGIEATGSYGWFRRLLSELGHELVVGDATQIRASNPRRQKTDKRDAEHILGLLTAGRFPAIWQPPAENEQLRQLLLHRSRLVRLRTRVTNQLEGMAKNEGLLVPGGWSGKRRKAIEALLLPGWYGERRKDLLGLLDRLEERIAPLDKAVSQAAASNAEACLLMTHPGVGPVVSLAYVLTIGNWQRFPRGKQVGSYLGLIPSEDSSSDKRRLGHISKQGNTLLRWLLVEAASTAQRYDPSWHRQYLRLSMTKHHGVAKVAIAHKLAVRLYWMLRSGEDYQHVRERGSHARQSECPGGRSTRPIE

SEQ ID NO: 254096 - protein, 335 aa, unidentified
MHYLYYVGLDVSKETFDASLVAFEDANEMAHRKFANSRKGICSCLHWVEKRHGIRLVDVIFCAEDMGSYISEMAVCASDRTLNFNFSLISPLVIKYSMGIARGKTDRVDARRIAEYAITHYRKIALYLPAEKELCQLRTWLILRAHLAKQRVAKLVLLEKLDYKEKFADVSIQRSMLQEEIAYAETHMKTIEREMKELITADSNICRNYKLLTSIKGVGPITAIVMLCSTLNFTKITDHRKFACYCGLAPFEHSSGTSVCGGCHTSSMANRDIKVQLNRSALIAIRCDPQLKAYYERKVAEGKHKFSVLNAVRAKIAARCFAVVRRGTPYVALQI

SEQ ID NO: 254097 - protein, 353 aa, unidentified
MKKYIGCDSHSRYSVFVSVDEHGRVSPAVRVEHGSRELRDYLSTLEPGTPVAVEASGGWYWFLDELEAAGMDARLVNPLEAKRRMGGKNKTDKLDARGLAILLRNGTLPEVWIPPGELRDLRGLMRARLALRSHTTVLKNRLHAAIRRYGTLTGEPPGDLFGKRSRRRLALAIGRLPEETRTAAWHECELLDEVERHIGELEVHIRTRIGCIGWVRLLKTLPGVGEILGATMHLEIGDVRRFPTAAHLASYAGLVPTVHASGGRSYYGRTSPQANHYLRWAFVEAAACIVAHKHRWAGRHVVELYERLKKQKCHGKAAVAVARHLAEASWWMLIKQEPYRQPHAATVSSSKNG

SEQ ID NO: 254098 - protein, 403 aa, unidentified
MSIFVGLDWGGSNHAVCIVDPAGKMLDRFAVAHDRDGLADLIARLSRHGPPGATPIAIERPSGLLVDMLVEAGFIVTPVHPNVVKACRPRYRAVAAKSDPGDAYILADILRTDGHRLTPLTPQSDAIKALKALVRGRDDLVASKLVLANQLRALLESFWPGAAGLFADITSPIALAFLERYPTPDSASRLGEKRMAAFLAQNQYCGRRSAPDLIARLRSAPPGAAGEGEGDAKGELVRALARTLESLVAQIAKLTSRIEHAVAELPEGRIVMSFPRAGKICAAQITAELGDVRDRFQSEDHLAAEAGVAPVTYESGRSRGVAWRWACNKRLRAAVTCFADNSRHASPWAADVYRRARQRGCKHAHAVRILARAWLRILCRAWQDGIPYNPDKHPAARAILANG

SEQ ID NO: 254099 - protein, 404 aa, unidentified
MIFVGVDWAEAHHDVHVQNEDGKRLAGGRLPEGVDGIARFHALVGDHVHDPGQVVIGIETDRGLFVAALVAAGYEVFAVNPMSTSRYRDRHSTSGAKSDPGDAKVLADMVRTDRHNHRPVSADSETVQAVKILARAHQSMIWSRGRHTNGLRCTLREFYPAALVAFDDLASGDALEVLRVAPTPELGRGMSVAKIAAALRRGGRQRRVNERAGEIQAALRAPQLAAPAVVSSAMGATVAASVAVIAVMVTQIAELARELEAGFESHPDAEVVRSLPGLGTVLGARVLGEFGDEPNRYANAKCRKNYAGTSPITRASGTKRVVLARYARNDRLADAIYLWAFAALSSPGARAHYDAHRDAGNTHHAALRALGNRLVGILHGCLEHHTAYDEHTAWGHRQHLADAA

SEQ ID NO: 254100 - protein, 390 aa, unidentified
MSTKPRSPCVLSEDATGQVVAELREFGGFKRDRRAMAQWVASFKPDVVVMESTGIYWKSPYAALEQVGIRALVVNARHVKQVPGRKTDLADAQWLAILARSGWLHGGFVPPANLRELRLIARQMQTLTGILAGEKNRLHKVLTDGGIRLSVVVSDLHGKAAWAMITALVAGDTPSQVLHHASQRLKATEQELLDALDGDLSESHRFVLAQVMDHVDDLERRIACFRAKLLAGLAPQQGLLNALQTIPGLDELGAALLLVEIGDDMQAFGTAERLASWAGVCPANHESAGKRQNGKQRKGNPYVRRLLCEAAQAASRTRCGLAEKFKALLVRRGRKRAIFALAHKLSKLVFIIIPRGDYYRDATVDYEAMSVARNAPRWIKMLTKHGYLAA

SEQ ID NO: 254101 - protein, 389 aa, unidentified
MSQSFDASRSLTAFEQDSTLVAVIEMSQSQWLVAAVIPGVERQPLKKLDVDASALLKLLRRWRDEAHQAGRDIKRIVCGYEAGRDGFWLARWLQRHGVEAYVIHPASVAVSREHRRAKTDRIDTELLKRSFLGWLRGETRHCSMAAIPSMAQEDARRPGRERESLVAERTRLVNRVKSILALFGINGFNPQLRKAAEKLATLRTAEATPLPENAQAELVRLLERLRLLREQIRSVENERLRRLTAPPAAPGPHAMVRLIARVFGIGIETADMLVQEVLSRNLRDRRAVARYAGLTGAPDESGKRRREKGLARAGNGRVRRGMIQLAWRFLIHQKDSALAQWFRDRTVDGRKTTRKTMIVALARKLLIALWRLATTGEMMHDIKLRPVGA

SEQ ID NO: 254102 - protein, 316 aa, unidentified
MNENTVERFVGVDVSKSTLDVCIDSPSEVLHVDYDDKGIKTIGVHLKSIAPTLIVMEATGGLEMRLACELAALGLNVAVINPRQARDFAKATGQLAKTDLVDAAVLAAFARAIRPQARPLKDEQTRELDDMVSRRRQLVANRVQEALRLDTAASKPLQKSLKAHIVWLDKRIAEIDEDLSHRLKASDVWRAKDDLLRSIPGVGAVTTVTLLAKCPELGKLNRREIAALAGVAPLANDSGKHRGKRFIWGGRADVRVVLYMATISAMRCNASIKEFANRLKQTGKPTKVVIVACMRKLLTIMNSMLKNNESWGPKNA

SEQ ID NO: 254103 - protein, 497 aa, unidentified
MSNSTSIYAKQNPKIHEIFERAGHFKKVLAVALDYAKSKHMVLFCNGLGDVLKKPFPIENSSKGLEVLLQEVHSTCQHRGIQTEHVFFGGEDRPTYAENFINQICQKGFLVVRVNAWEAKRQRDNHQASTDQLDLRGIAKTMLQQCSYSESDRSSTHQNLREISRCRSYLVGEQTAFKLHIHGYIDRLFPGFLDPRKSGITPFSTASLALMSNGFSAEQIGRRRLRSLVAELERHSVAEPESAAQKLQQFAREALPAEPKHLNTWQSSLQQCVALYRQFNQSILALDKDLAHWLAMSPGALLTSIRGIGVVLAAGIVAEIGDPAQWRGLRQSCSYVGIVPGVEQTGGPDKPALTTPVKRRCNRRAKNWVVQAASQMGKHGPSPLHEQYRQLVDNGQHADFVMSRRLLRIGKDLMRRGSVYRPKELLDPNTPLPRLANYYQELWPALLEKWSGLLEWDHLFNSQYPLGQWRQMVQELYRICLPLPSEPGRFNSAGSRR

SEQ ID NO: 254104 - protein, 405 aa, unidentified
MRRVIGIDVHRTFGEVVFWEDGRLRHAGRIDMTRTALEGFGKTLLASDEVVLEATGNSMAVSRVLAPFVARVTIANPLQVKAIAQAHVKTDKIDAGTLASLQAAGYLPQIWTPDAATERKRRMVARRYQVVRHRTRLKNEVHSILHAHLIPRCPHADLFNARGRAWLAAQQLPDDERAAIDRHVRELDRLAEDLALLDREIAQDAIEDSAVNRLMTITGVNLAVAAGIMAAIGDISRFNSPQKLVSYFGLNPRVRQSGLGAAHHGRISKIGRSHARAMLVEAAWAAAKAPGPLHAFFVRIRARRGHQIAAVAVARKLTVLCWHLLTKAEDYLWARPALVANKTRAMQLQAGHPQQKGSRRGPAYAYNIKALRDREMLIAAQAEQSYERFVSQWKPRRPKTGARAP

SEQ ID NO: 254105 - protein, 370 aa, unidentified
MTHEHGVAGIDPHKNSATIAVLDQRGGVVGSESFPITEEGIDELLTFLLGIELTIDRIGVEGSGFLGRPLVLALTAAGYDVREVQANRTAERRKRRRRAKTDIEDAEAIARETLADPQLPPAGKHATPSPAWQTLTVLRDWRASLVLQRVRLLNEAVAVRVTLPVAIRDALPATSRVLPQLTALADGHVAPAALAPADRLKLDRLATSLLDITTLTKRIKELDQRIPPLLTELGSTLTDLHGVGVVTAMDLLVEIGDPHRFTSEAQFARWCGIAPVAVSSGEGHGPARRHRLDLGGNRAVNSILHIIHVTQARCHPPAKEYVARKMLENKSKREARRCHKRQLANVIIRHMWNDAERNTPPAVTDRPAAA

SEQ ID NO: 254106 - protein, 415 aa, unidentified
MALKIVYKICCGIDVHKTFVVACIASTDSKGVTTYEHHRFSTYTKGLKDLLQWLLKHNCKDVCMESTGKYWIPVYNVLENDCTIVLAHPKYVKAIRGKKTDKKDAKWIADLFKHDLVAGSFMPPADIRQLRDLMRYRFKLTCFMSSEKNRLQNCLTVSNIQLGNVVSDTFGKSAQAILDKLLENPADTSFDLEPLVYKSLKKKLPELRDAIDGYITPEQAGKLKVIKAHYENLESRKAELEELILALAAPYQQELAILQTAPGIRSDFTAIGIISEIGTNMEAFPSAKHLCSWAGLTPTNNESAGKKKSVRVSKAGCYIKPLLVQCANAVVTSKKHPEIRNRYLRIKKRRGHKKAIIAIARMLLTALYHMLKNGENYNAELYRKSDLLSVDREITVEQAIIIARKQGYKIKSATA

SEQ ID NO: 254107 - protein, 426 aa, unidentified
MAYKIAGIDVHKKMLAVVVCDVEVDGEYQFARRMFGGSPEQLRALAAWLLDQRVDEVVMESTAQYWRPVWAALEMYWKPICAQRDDHRPGSAKLHLALALSNRGRRGRKRDFADAERLVKRLVAGELTLSFVPDAEQRLWRTVTRRKYQLTRDRIRLQNQLEMLLEEAHIKLSSLVSDLLGASARRILHALAKGETDSAALAALADKRLRATAEQLSDSLGAAHDLKPTYRRLLKMALDQLELLDLQIGQLDQEMAGLINQHQDAVQRLTEIPGLGVDAAQQIVAEVGPTAATFPSAKSLSSWVGVCPGEEESAGVNHSHRSPKGNRQMRRLLNQTANAAVRAKGSIFEFVYRRCVARLGHKQAIGAISHRQCRLIWMILHQGVRYEERGPAVIEQSQRKRTARMIRQLRSLGYKIDAPQTTTAGA

SEQ ID NO: 254108 - protein, 356 aa, unidentified
MQTQITKKIDFKDKELFIGLDVHKKSWSVTIVVDGIEHRTFTQPPDPGALNNYLQRMFPGGSYNSAYEAGFCGYGIHRELNSLGIKNIVINAADIPTSQKDKLQKRDPIDSRKIARGLENGSLRGIHIFDRDMEELRSLNRTRFYLMRDLRRSKCRIKSFLQYYGESIPAEFDNNQWTLKFLSWLKQMKMQTMSGQDAFTNLIRSYEFHREQLLTLSRQIRQRIQEYDKELYTLLKTISGIGPLTSSALITELGDINRFPHIDHLSSFVGLIPRVRESGETVHTGGITFRCNTFLRTLLVESSWQAIRKDPALMQYYQRHVINNKGHKVIIKVARKLLNRIRYVMKNRQPYVTGVA

SEQ ID NO: 254109 - protein, 345 aa, unidentified
MTESKIVAFDLAKRIVQACVIDGTGAVIAEERMGPERVLSFTARHPHATVALEACGGAHHWGRALERQGHRVLLLPPQRVKSYGDPACKDDRRDARAIAEAASRSYLRPVPVKSEGQQALQSLDRVAALLARQRTQTVNALHGHLSEFGITLPKGPHLLKRRFTELEASPRWRELPEELRAAMGELFAAFLALEDRLSVLKARLAKGAKQSKLGRLLLEIPGIGPITAVSLEAAIGDDPGRFASGRQFAAWLGLTPRVSASGERRQLARITKRGSARLRSLLVVCAQAMLRQYRQGRHGDPLACWARHLLARKRWNVAVVALANKLARIVWKVASSGAAYQARTS

SEQ ID NO: 254110 - protein, 344 aa, unidentified
MKHTTIAVDLAKSVFEVAVSIHPGQVAERHRLSRDAFLRFFAQRQPATVLMEACGSAHHWGRQLQTLGHRVLLLPPQHTRPYVTRNKTDRSDAKGLLEAQRNEQIQPVPVKSIDQQALSALHRLRSAWLAARTGRLNTVRGLLREFGIAIPLGAKRVVPTLQALLEDADSGLPDSVRPALDQARAEILELERRMRTVEHQLRALARQTPAVYKLRTIPGVGLLTATALVAFVGDVGRFPSARHFASYLGLTPRERSSGLRRRLGAISKRGDVYIRMLLTHGARAVLWKAKSRKHPDRLRAWALQLERTRGHNKAAIALANKLARIIWAVWRRDVEFTEQAPTPA

SEQ ID NO: 254111 - protein, 326 aa, unidentified
MFFIGIDVSKAKLDCSLLLDVASNKRRAKSVANSRTGIHDLLVWCTKQQIDTHELHAILEGTGVYHEQAALALSDAGVTVSIVNPAQVKDFGRSLGIRTKTDGVDSLILARYGALLNPKLWTPPAHEARILQALLARREAIAQDLQRERNRLEKADATDTPSLIQQSIIDSIGFLEKQLTKLQHDIDDHINKHPALKADRDLLTSIPAVGPQISNHMLSVMHNHHFQSAEQLAAYLGLVPVERQSGTSVLGRPRLSKAGPARIRAVLYMAAIVATQHNPHLKALYQRLQERGKSKMSALGAVMRKLVHLCFGVLKTRQPYQADYGI

SEQ ID NO: 254112 - protein, 337 aa, unidentified
MTSVHILAIDLAKRSFQVCATDRGGAVLFNRVLSRTRLQQLLHEQPPCIVAMDACATSHFWGRFAQGCGHDVRLIPPIYVKPFVKRQKNDAADAAAIAEATLRPNIHYVEVKSAEHQARAVAFRTHQCFVRQRTQLINALRGHLGEFGIIVAQGPANLSAVTGILADETNDLPKGVREIGELYLDQIRLLTEKIDGLMLKLREATKANEEMRRLCTVPGVGPVTAGAILAFAPDLRAFKSGRNFAAWLGLVPRQHSTGGKTRLGGVSKMGQTDIRKLLIVGAMSLIRWIVRKGVLPDNWLGAILGRKPRMVAAVALANKMARIIWAMMTREQNYRMA

SEQ ID NO: 254113 - protein, 341 aa, unidentified
MNITTVGLDLAKNVFQVHGINAAGEVVVRRRLRRSQVCAFFADLEPCLIGMEACGTAHFWARELAALSHDVRIMPPSYVKAYIRRGKNDAVDAEAICEAVMRPNMRFVPIKTEEQQAALMLHKARELLIRQQTMLVNALRAHMAELGMITPQGRGRVEDIIAVIEDDEDESIPGLAKSALKPLVTQLRAAEETTASLDAEIMSWHKSNEASKRLATIPGVGVLTASAIAATVPDPSFFCSGREFSAWLGLTPRQNSSGGKDRLGRISKQGNRYIRRLLVIGATSVLRHARAKSAPGADWVNGLLERRPPRLVTVAMANKTARIAWALLTKGETYRAPIAVV

SEQ ID NO: 254114 - protein, 347 aa, unidentified
MRFYTKQHQFYCGIDLHADAMYVCILNSVGEVVVHKNLPTKPKAFLRLINPYRERLVVGCECMFSWYWLADLCEAEGIEFVLGHALYMRAIHGGKAKNDKIDSHKIAVLLRGGSFPLAYVYPKELRATRDLLRRRNHLVRKKSELIAHIQNTATQYNLPPLGRIAKPTERDGLLDKFIDPVVRRMVEVDLLTIEHYEQLLATLEWQLERITQRQAPVELALLKSISGVGRILGMVMLYEIENIARFPRVQDFVSYCRLVKPEKQSNGKSYGHSGKRIGNAHLRWAFGEAVVLMLKGNKPLQAKRQRLASKHGKGKALAILSHRLGRAVYFMLKNQEPFDQEKFMRGI

SEQ ID NO: 254115 - protein, 420 aa, unidentified
MEEMPERELFVERIAALDIGKRELEVCVRLPSDRPGRRRQEIRTYGATTRSLLTLAGWLAEHGVTLVVMEATSDYWKPPFYLLEAEGFECWLLNAAQVKNTPGRPKTDRQDAIWLAKVAERGMARPSFIPPKPIRRLRDLTRYRRALTHDRTREKQRLEKILEDAQIKLSAVARDILGVSSRAMIEALIAGQRDPKVLAQLAKGRMRIKISALQEALTGHFDDHHAFVCQIMLDNIDRLCAQIDNLTTRIEELIAPFQHQVDQLDEIPGVGRIGAQDILAEIGVDMTVFPTDAHLVSWAKFAPQIKESAGKRKGSSTTGQGNPWLGGALGEAATGAARSPTFLAARYKRIAKRRGTRRALVAVGHSILTIAWHLLSDHHAHFVDLGADWHTSRINPEQQTRNLVRQLQRLGHTVTLEPAA

SEQ ID NO: 254116 - protein, 367 aa, unidentified
MKELTTKAAATIGLDLAKSVFQVHGADESGRRVFGRSLKRAEVIAFFVAHPPCLVGMEACSGAHYWARQLRALGHEVKLMPPQYVRPYVKRQKTDANDAAAIAEAVRRPDMRFVAIKTIEQQVVLAQHRVREGLLKQRTALSNRIRGLLAEFGVVLPRGMRALRERLAQAMAPLDGELPEAMRPLLAQLHEQLLVLEKDIGVTERALQQWHRANPASQRLAEAPGIGYLTATATVATFNDARQYRSARQFGAALGITPRQHSSGGHTVLGGISRQGDGYLRQLYIHGARAVVNAHQRRVQQQPSAGRGWLHEILKRRPKNVAIVAQAHRNMRIVWALLRHPERRFDAQFKPAARNAERTAVATVPAA

SEQ ID NO: 254117 - protein, 362 aa, unidentified
MLGFAKTNTPKGAFMRFYTNTHKHYCGIDLHGRKMYVCIIDGEGKVLVHRNINCNPDEFLRIIAPYREELVVGVECMFAWYWLSDLCRKEKIEFVLGHALYMKAVHGGKAKTDKIDAHKIAVLLRGGTFPIAYVYPPKMRATRDLLRRRNFFVRKRADLMAHIQNTVTQYNLPKLGFDLSSESNRHEVVQLFPNPEVRKMIDIDIAMIDAYDKVLKVLESDIEKTARQHDWHALTLLRSIQGVGPILGLVLLYEIHDINRFDTVQQFASYCRLVKCCHESAGKKKGTGGAKIGNAHLKWAFSQAAIHFICNNPPARKLLENLAKIHGKGKALTILAHKLARAIFYMLKNKRPFDRDKFLATA

SEQ ID NO: 254118 - protein, 387 aa, unidentified
MARKRILSTLDTSIAYEAVGLDLAKTDVALAAFDSDHKEPYFIDRIPYDKLYELLANMAPTLVAMEPCSGAHQIAEQIQALGHEVMMISGRHVQAWVKDHCNGQKTDLNDAFAILNLAYDRWLTPIRGKTREECRLLALQASYRQLKGQRTKTMVHVKATLHAWGFPIRTGSFNQKALRELIDANREAFGGEMAETLHLMIDRVRGLDHDIATVLKLLTEATKRDPRASLLRSIPGFGVLTTSRWCAVMGDIARFDSPKQTMAFIGLVPNNRITGHHTETSSGREARGQGRMSKRGDKMLRSLCILGAASLCMLVRKDRLQDCPFVASIKARLASPRPWFKVLVYVAAKLVRIATALLKYGEKFSFEKAGISKAVLKQWKLEQAKAA

SEQ ID NO: 254119 - protein, 342 aa, unidentified
MKLFIGLDVSLAKTAVCVVSEHGQIVKEAETESEPEALARWLDELDGSIAAVGLEAGPLSQWLHRGLSEAGLDAVLMETRQVKGALKAMPIKTDRRDAEGIARLLHLGWFRPVHCKSVSAQETRAVLGARKALQQNMIALEMSLRGLLRNFGLKVGAISRGRFEPRIRELANGNPMLETATEPMLRARSSLRQELAGLEKHVRQLAGDDPVCCRLMTMPGIGAVVALTFRAAVDDPARFRSSKRIGPWVGLTPSRNQSGERDVSGGITKAGDVNLRRALCQAATVMMNRGRSTWLRTWGAQLAQRRGRKIAMVALARRIAVILHRIWVDGTIFQSDAAPNTV

SEQ ID NO: 254120 - protein, 323 aa, unidentified
MIKIAYPFTQVVGVDVAKGKLDFLLTDEKQPLSIKNTQDQIVSKLIARIKHPRSTIVVMEATGGYEGLLVTLLHQHEIALAVVNPRRVRDFAKGIGRDAKTDPIDAGVIAFYGEVVRPEAQLAKSDEEKKLKNLVERRRQLLDLIGQENNRLQHTIDQEIRGYIQESLETLKKQVKTIDQRLARCVKEDTVNARKVEILNSVKGLGPVSISTFLAELPELGKFNRGQIAKLVGVAPMNRDSGQVSGRRRTFGGRSYVRRVLYMATLAATRFNPRIKAFYQRLVAQGKPKKVALIAAMRKLLTILNTLVKNNVLWSEEPKKAGV

SEQ ID NO: 254121 - protein, 419 aa, unidentified
MLTARWFVGIDWATEAHEVCVLDPEGQVCDRRSVPHSATALQAFVDALLERAHGDASTVAIGIEVPRGAVVDVCVERGFGVYAINPKQLDRFRDRFTAAGAKDDRRDAHVIGDSLRTDPQAFRRVRLDHPLVIQLREWSRVDEDLAGDLTRMTNQLRDLVYRIAPGLLTLCPAADERWLWTLLRDAPTPADQRRLSLRRLERLLRDHRVRRLEAAQVREVLQTPSVYTAPGVVDAVAAHIQLLLPRVDLLAGQRRDAEKQLERLLDALDAQEPAAGDQREHSDVAIVRSMPGIGTRVAARMLAEASQPLVERAYHVLRATMGVAPITKQSGRRRTVSMRYACNARLREAGYHWARTGAQKDPASRAYYAQLRARGHSHGRALRSVADRLLRVLMTLLNHGQLFDLTHGQHAPAAISAGA

SEQ ID NO: 254122 - protein, 360 aa, unidentified
MFTERTSVGLDVHARSVVAHAMDVQTGEIFKARLCPDPVEVTAWIKALPGPSAAIYEAGPTGYGLARTLLGNDIRTVVAAPSKLQKPSGARVKTDAIDAEHLSMLLRLDAFTAVAVPDELTEAARDLVRTREDCRSDLMRARHRLSKLLLRHGIVYSGGQTWSNAHDAWLKLQHFDSPLVQAAFDEAYDSVVTITARRDRLDERITAMAADSPWTNTIHRLGCLRGISTLTGFGLAVEIGDWTRFSGNSIGSYLGLVQSENSSGQSRSLGPITKTGNGHARRLLVEAAWHHQHRYVPGKTIRDRWDLASPAARARGDLGNRRLNKRWNQFKARKKTNNVANAAIARELAGWCWSLAVLDD

SEQ ID NO: 254123 - protein, 449 aa, unidentified
MKEPQEICDVEHEQILERAAAVDVAKASGMVCVREPHPGRPERRRSLVWEVPATTNAVLELAEHLARDRVQKVTLEATSDYWRIWFYLLEAAGLDVQLVKAHDVKQAPGRPKTDKLDAVWLAKLTERGMLRPSFVPPAEIRNLRDYTRLRTDLTRERTRHYSRLEKLLEDALIKVSAVASKLDTVSVRDMIEALIAGERDPRVLAGLARGRMRAKHNALVEALTGRFDEHHAELARMLLDQIDSLTGQIDRLTARIEQLIAAIPAAQGVDPDGTTGPDAGLAAGAPVLPAVDRLDEITGIGRQTAQVIIAEIGLDMTRFPTPGHLVSWAKLTPRTIQSGAKNRSGRTGKGNPYLKGVLGEAAAAAARTDTFLGERYRRIVKRRGKLKALVAVARSILVTVWHLLADPDARFRDLGSGYYASRTDKDRKTRTHIRQLEALGFTVTLTPAA

SEQ ID NO: 254124 - protein, 338 aa, unidentified
MTIKALGIDLAKNVFQLHGVDGIGNLVLRRRVLRAQLLELVAQIEPCIIGIEASTSAYFWAERFERFGHTVRIISPQYVKPFRLSQKNDTNDAQAICTALQQPNMRFVPRRSAEQQDVQALHRARQRLVNHRTALASQIRGFLRDRGLVFPRNIGQLRRTVPQILEDAENGLTVSARTTIAELFDFLREVDRRVTVFDRRIDEAFRASSLAQKIARIEGVGPKISTAVVAAVGDGRDFKNGRHMAAWLGLVPRQHSSGDRTQLFGISKRGDQHLRTLVVHGARAVVRTAARKTDPKSRWVNQLRERRGFNRAVVAVANKNARVIWAVLRREEPYRRAA

SEQ ID NO: 254125 - protein, 347 aa, unidentified
MDYHAGIDVSLEASSVCVVDASGKIIREAKVLSEPENLIGWFRDLGLEMTRIGLEAGPLSQWLYAAMKEEGLAVELLETRHVHDAFKAMPVKSDRNDARGIAQLMRLGWFRPVHCKSMPSQEVRALLTARKLVQSKLFDIEMSLRGILRGFGLKIGRTTPNRFGLRVEELVAGHPTLEIIGKALLAAHEVLLRELNGFEKRVRQQARQDKRVRLVMSAPGVGPIVGLTYVAAIDDPARFKSSRQVGPHFGLTPKKYQSGETDYSGRISKIGDASVRTALYEAANAILTKPLKGAPTLKSWGMKLAKRAGMAKAKVALARKLGVILHRMWVDGTKFADKGISPKPVTA

SEQ ID NO: 254126 - protein, 343 aa, unidentified
MELYVGMDVSLKETSICVVDGSGEIVSEGTVISEPAAIAAFIEAKAGSALRIGLETGPTTTWLWHELRALGLPVICIDARHAKAALSMQINKSDRNDAAGLARIMQCGWYKEVQVKSVSCHEIRAVLNSRAQLVKIKRDLENQIRGLLKNLGLVIGKAGGTAFTRRVEELLGRQGLLGEAVRPLLEVREKVRREIAGLYRRLLGLARNDIDSRRSMTVPGIGPITALAFHSAVDNPTRFRRSRSVGAYFGLTPRRFASGEVDWSGRISKCGDAMVRTYLFEAAGVLLTRVAHWCKLKAWGHRLWKRIGFKKAKIAVARKLAVILHRMWCDGTDFIWSSKEAAV

SEQ ID NO: 254127 - protein, 346 aa, unidentified
MHYIGMDCHITTLDFAVVNEAGRLVKAHRVATSVNGFMGFVKTVPLPRTIYMEEGTLAAWALETCVRFREKLVITDAKKNHWISSSGQKNDPIDALKLAQLARGGYIKEIHHPVGQRRRFRELMIAYHDAVRSTTRIKNKIKARFRQNGLQCTGITVYSETHREEWRGKLPQETTLLLILDNLWRQLEQSEQTEKELLAAARAQAKHYPEIKHFEALPGIGFISAATISAILETPYRFADKKKVWMYAGLGIMTRSSGGKVYSEKLSTDYNRLLKYSIKQAVEAAIQAKDNPFRRKYLDMTLLRGIAPHRAKLTIARDMLATMWAMWRKGEKYNPEIREKAACKQG

SEQ ID NO: 254128 - protein, 340 aa, unidentified
MNIKRIGLDLAKNIFQIHAVDHHEHVVLRKTLRRDRMTAFFSQLSPCLIGIEACGAAHYWARELTRMGHTVRIIPPQRVKSYLKGQKNDANDAEAICEAISRPGMRFVAMKTERQQTLQAEHRVRARLVRARTALSNEMRGLLGEFGLVLPVGIRQLRKALPEILSQQELWDDRFIRLLSELAEELQMLDERVARHDRRLEQSARDDIRIKRLLAIEGMGPVVASALVAAVGDGRQFTSGREMAAYLGLVPRQHSSGGKARLGSISKRGDSYLRTLIIHGARAVLNACQNKTDRRSQWLKALSERRNRNIATVALANKNARIAWAILSREEDYHGLQAAG

SEQ ID NO: 254129 - protein, 377 aa, unidentified
MDTHGETHAAAVVSPLGKVLGIESFPATAAGYRRLLVWARKLGMVRRAGVEGTGTFGAGLSRYLLAQHVEVYEVNRPDRTARRLLGKSDPLDAQAAARAVLSGRARARAKTGDGPVHSARMFKLAKDSAVKARTQAINQLKAVLVIADPALRERLSSLGNRELFPTCARLSLPDGDDEDAVAQATRITLSLLAQRIEQLTGQIDELNQRLTRLVERHAPQLLIPVGIGPDSAVTLLITMGDNPERLSTEASFAALCGISPVEYSSGRRSSRRLNHGGDRQANAALHRIVFTRLRFDPRTQAYYERRTQEGKTRREIIRCLKRYAAREVFNLVRTVSTAPPVMLRDPRELARPRVRSRTAACYPFLATVAPGVAVEPR

SEQ ID NO: 254130 - protein, 321 aa, unidentified
MQPILGIDCAKAKFDAALLIEGKYKAKVFSNDVRGFGELQAWLSQHGSGTVHACMEATGSYHEALALFLVEAGYAVSVMNPAQIKGFAQSVLTRTKTDRVDAKLIARFCLVSTPALWTPPALEVRALQALVSRLEALNQMRNQEGNRLATAQPLIRGSIEKVIALLDTEITALKQQIHDHIDGHPGLREQARLLESIPGVGEATIAQLLAVVGDLSRFKSARQLAAFLGLTPRQRQSGSSVRGKTRMAKMGHAQLRKALFFPAIVAVRYNPLVHAFAQRLAQAGKPKMAIVGAAMRKLVHIIFGVLKSGRPFDPTMHAACA

SEQ ID NO: 254131 - protein, 359 aa, unidentified
MQTQRKELNFEGQSVFVGIDVHLKSWTVSIFTEKLHHKTFSQPPKAEMLSEYLKFNFPNASYFSTYEAGFCGFWAHFQLEELGIKNIVVNPVDVPTTQKDQKRKSDPVDSNRLGRFLRSNELKGIYIPRPETLEDRTIIRVRFTIVKDLVRQKQRIKSLLYLYGIEYPIEFQNANTHWSKRFINWLKTVQLQYSTGTDGLNLLIKEAEQQRLLLLEATRKIRTLSKTERYAKNIELITSVPGIGLITGMMLMAEIEEIKRFDNSDKLAGLIGIVPDCHSSGLTEKKGEMTSRGQYFMRKGIVECSWVAASKDPALSLAYYNYCKRMEPNKAITRIARKLINRIFSVLKNEKKYEIGIVK

SEQ ID NO: 254132 - protein, 425 aa, unidentified
MTQPYGNTGEKVLVAIDIAKKRNAVLIQLRDESRKKFMVANKLSDYQEFSAYLKNLRFPCVIGLEATGNYHRPLAYYLIQQGFEMKLVSSVAAARTREAMYNSWDKNDPKDAQVILHLLKTGLTQTYHDPLLHRINDIQELSKTYYQVSLRKTRVQHSIMTHYLLLYFPEMQKYYYTSRAQWFSSLLLRFPSPSSVLKYSREEFIKAARDVAGRKVNKTAWLTDFYETAASSIGLPVEEFSEAMVMFRLVLQEHQHLCRLRRSIEERAELYLKDNADYNRFRTIPGVGPVIALTILAEAGDLRRFSHYKKFLKYCGLNLSTQQSGNFRGISKLSKHGNARLRCVFWLAGTSAIRMRENTFRKKYENYIKTDPNNPDLKRKAYTAIAAKMARVAYALIKSERDYRCFFESSIPSGKIPSVGPLRHS

SEQ ID NO: 254133 - protein, 261 aa, unidentified
MNATTVAVDLAKSVFQLAVADEHWKVVERARLTRGQFERWFHNRAVRLVVMEACATAHYWARTLRARDIEVRLLPAKYVRAYVKRNKTDAADALALLEAARGSDMTPVAPKSIEQQALQALHRLRSGWMGTRTRRINTLRGFCREFGMEVSVGAARGLAQIARLLADENSAIPAMLRAPMRLALEEIRLMEARIEALERELATMARQSDACQALATVPGIGLFTSTAMVAAVGDPRSFDSGRRYASFFGLTPREYSSGDQR

SEQ ID NO: 254134 - protein, 357 aa, unidentified
MKIIGVDLHTRQQTIAMLDDQTGELVEQELQHEGEEVRRFYSALPKPVLVGLEATGSMHWFLRLLEELNIEYRVGHPAKIRAAEPRKQKNDRRDARLLLTLLAENRFPAIWMPSREQHDLQILLRHRDQFVRLRTRIQLSLQALALSHGLRRGHSLWTQGGQHTLRELRLAAHAREQRDTLLALYPQLQIPINDLDRQVERETQQRPQSLRLMTHPGVGPITALATEVFLGDPRRFPDGKAVGSYVGMIPREHSSGGRQRLGRISKQGNSLLRFLWGEAAIHAVRRDPELRRFYRRKLVQKGMGKARVAAARKLGIRLWIMLRDEIDYTEFCRRGHQRRQCSGAACAGMLHEDSGLN

SEQ ID NO: 254135 - protein, 384 aa, unidentified
MYKHNIFFIGLDTHKVSTEVAHVEGQRGAKPVHYGKINTTKAAITKLARQYQSKYPQATLHFVYEAGPCGYWIYRLLTSLGHCCYVVAPSLIPKKPGDKVKTDKRDALKLAKLIKDEELTPIYVPEPEDEAIRDLSRARETAMKDLKDAKYQLKALFLRNNITCKVNDNWSNQHLRWLTELVLPHPSQQIVLQEMIQIITERIKREKRLANELFHQVRQWRFYPVIKALQAVRGIKLLIATGIVAELGDLRRFDHPRKLMSYLGLVCKEDSSGDKRALGNITKCGNGRARRLLVQGAHTYKHKANISTELQKRQENLPREITDIAWQAQLRLCRRYNRLLSRGKHRNVVVIAIAREMAAYIWAIAREVVISPVNPRLRISRVPA

SEQ ID NO: 254136 - protein, 408 aa, unidentified
MPISTNNLIDVFVGVDIGKRFHCATAINGRGDVLLKPVKVLVGTEGFAAFEQRLNQLDDKSAVLIGLEASGHYWMSLWRFLQERDWTVQVINPVLSSKSARTHLRGRKTDADDALFIARTVRDADFIPLQPAPRDTQQLKLLCRQRRFISHELANAKRRLTGLIDLSFPEFSRHFKNIHSQAAHAVLKAAPSAAAIGELSLRRLQGLIARASRGRFGAAKAKALKKSATESLAARHRDPALDLLIHSMIAQLDFFQQQLAQLDLHIQGLFRSMAHPIKTIPGNGPITGPLIVAELGDLRRFAGHRPLHALLAYAGMDPRVRKSGQWNGKIKMSKRGSPTLRTALYQAASMARLHQPRLAEIYHRHRHQMNKHHSVAISHVARKLLAIIYVVCARGQSFDPAKICPQPT

SEQ ID NO: 254137 - protein, 345 aa, unidentified
MELHTIGIDLGKTVFHLVGLDLRGDVVVRKKFSRTQLLRFTANVHVRLIGMEACGGSHFLGRALREQRHEVRLIPAQYVKPYVKTNKSDYIDAEAIAEAVARPTMRFVPIKTDDQLDMQSLHRVRERWVMRRTAVINQIRGLLLERGITLRKGRHHVHAALPLILEDADANLSGAVRLLWTQLKLDLDQLSVRIDEADAVIQKTAHENEACRRLVAIPGIGPVTATALIAAIGNGGAFHKGREFAAWMGMVPREHSTGGQQKLLGISKRGNSYLRRLFVQGARAVLQQRTKQSSGLSAWLAQLTSRTHHNVAAVALANKLARIAWAVLAKNEQYRPSVVADVAAA

SEQ ID NO: 254138 - protein, 421 aa, unidentified
MQHEVHEAFVAFIGLDWADATHDVCLPAAGSEHREHCSLAHTPEAIDVWVGSLHKRVEGKPIALGLELNKGPIVFALRTYPCFVLLPVNPLTLARYRAAFPPSRAKDDPTDAALQLALLRTHRDTLQPLPPQSPTMRALAPLVAPRRRVVGDTGRITPRLTRTLKNSFPHALQWFQDKDTRMFCDVRSRWPTLQAVQRARRATLETFFRAPPVRSADVMTQRLNAIKAATPLTTNAGIITPHALLVQALVSQLRATLRALQDFDHAITQCAPSHPDFPLFQSLPGAGPVCAPRLLVACGAHRDRSAAAAARQHCAGIAPGTERSGKKGWGHWRLQCPTCLRHTFVEWAAASIRHAFWAQVYSQQQRDQGTAHQAAVRALAFKWIRILLRGWQDRPPYDESVSLTALNSRGSSLIHHLAKGS

SEQ ID NO: 254139 - protein, 434 aa, unidentified
MRQQNISTPSTPPVYAAFVGLDWGDEKHALSLCAAGATVIERTTLPQTPEALADWANVLRSRFPSGKIALCLEQARGALLAGLMQYEHIVPYPVNPKTLARFRQALYPSRSKDDPIDADLLLDLLLKHREHLRAWQPDTVQTRQLALLNEQRRHFVDHRTALTNELLSHLKAIFPQALELVGQSLASRLATDFLKKWPTLQAVQKVKPAVLRQFYYGHNSRSEELITGRLQRVKNAVALTSDPALLAVHSLAIQTLAGQLQALRPFLDQHEQQIAELFAAHPDAALFDSLPGAGSALAPRLLAALGSDRSRFPDALSIQCYSGIAPVTERSGKTQYWVHLRWSCPKFMRQSWHEFANCSLKFSTWARACYQDLNKRMDHHEAIRKLAYKWQRIVWRMWQERQPYDETRYLRSLQKRGLKIYADLVPQPIAPAGE

SEQ ID NO: 254140 - protein, 349 aa, unidentified
MRHFQPPANTRFYGGVDLHARSLFLAILDHDGQERFARNLPAAPEPFLRAVQPFREGLVVGCECMHCWYWLADTCREHAIAFVLGHAWAMKAVHGSKTKCDRHDAQAIARLLRGGNFPLAYAYPKERRGLRDLLRARLRLVRQRAELYGHVHTARRQANLPPVSSDVKYKSKRGGITADIADPFVRRRVETHLALLEPLDTTIRRLEAEIEEAAREIFPTELAVLQSTPGVGPVLSLTILLEIDTIDRFETRQQFCSYARLCGAVQESAGQRTGAGNRKAGNAWLKWAFSEAAVLSAQKDERIGRLLERLASKLGKAKALSALAHKLGRAFYHVLHTKEVFDVNRFVRR

SEQ ID NO: 254141 - protein, 348 aa, unidentified
MGMVGGLDLHRGQITFDVLATDTGEVWRGRIWQPDRERFGRWLRVELAERAAGEPVALAVEGCTGWRYVVEEICSAGFEAHLAEPAETQAARGRKRRAKTDRTDAKLLRELLIAGELPESWIPPECVLEWRERVRLYKSLLDQRTQWTQRIHAELFQHGVAVPDGEIRSETTRASLADPALAVSPAARRRIQAGYTMIDATDSELGPLRSELARFGTRQPACRALVTNHFGIGGLTAVAIWSELGDCRRFSRSLQVVRHAGIDITVDASDRHRASGHLSHQGPETLRWALYEAAKASSRPSAPDHAYYASVKQRHDGKLAAIATARKLVRRCYHTLRAVDPEEVYAIP

SEQ ID NO: 254142 - protein, 438 aa, unidentified
MKKIRAHAAGIDIGAKKVYVCIEGQPVKGFDTFTEDLEALGVYLVAHGIETVAMEATGVYWVILFDILASYGLDVWLVDGASTKQVPGRKTDVKDCQWIQQLHSYGLLNKCFIPDILVQELRAYQRLREDHIRSGAMHISHMQKALILMNIRLKEVISQIHGASGMRIIRAILSGERNAEKLALLCDQRILKTKKEWVVKSLKGHYSEAALFELDQALACYDFYGQQIAMCDRKLEEGLKKMSTDSTPRPSTKKARKAIRHNRPAIENMGEHLLGIFEGKDATVLPGISDYNWMQLLSEVGTDLGKWKSEKHFTSWLGLAPKQHNSGKMKRNYKPKGAPRAGLIFKQAAAGLLNSKHIALGAFGRKIRAKKGGLVAIKAVARKLAELYWKLFVKGLEYVENGIQKYQEKMLLNKQKAVTKMAQELGLEVISVKTQAAV

SEQ ID NO: 254143 - protein, 387 aa, unidentified
MPQPNDLSRSLVALDQNSTIIAVVELSQSSWLVAGVLPGVERQPCKKLEPNPERLLILLHRWRDEAVRAGRTITRIALAFEAGRDGFWLARWLAARGVEAHVIHASSVAVSREHRRAKTDRLDTELLKRGFLGWLRGERGHCSMVRVPTVAEEDAKRPNRERDCLMGERTRIVNRIKSTLARLGIRNFKPTLRKAAERLASVHTPEGIPLPPNTLAELQRDMARLGFVVIQIREIEEARQKRLEQQHETGPHATVRLLARIVGVGVETADLLVHELLSRPMRDRRAVARYAGLTGSPDESGAQRREQGLARAGNARVRRAMIQLAWRFLMFQKDSALALWYRARTADSRSGTRKTMIVALARKLVIALWRFVTTGETLEGVILRPAG

SEQ ID NO: 254144 - protein, 347 aa, unidentified
MHKDESEHVLCLCQKMKKEPLNQNTSSLYVGMDVAKATLQVHLNHHQIEFTNDAKGHAQLIKRVGKFPHPHLICEATGGYERPVVEALHQANIAISVINPAHTQAATRAQGIRAKNDCCDATSLTDYGERYHPEPTPSVSSEMRAVTELTLWLKQLIDHRAVAKTQAEHLFNTFVCGQHKQLLAHYEKQIQAVEEKIQKRVESMQEFQQRLDCLTEIKCVGFRTALMVLVFMPELGQLNRGGTAALAGLAPWTHDSGTMKGKRCIGGGRSQVRPVLYMSALSSIRFNPVLKAFYTNLRERNKPAKVALTAVMRRLIVYMNSKLKDLAALPPAEKVKPIQHRENPLAN

SEQ ID NO: 254145 - protein, 353 aa, unidentified
MFHKPGEATEMKLTTVGIDVAKNVMQVHGVDERGKAVLKKQLKRNQVLAFFGNSEPCLIGMEACGGAHYWARKLEKLGHTVKLMAPQFVKPYVKTNKSDAADAEAICEAVGRPTMRFVPIKTGEQQAVLSLHRARQSFVKARTAQANQIRGLLCEYGIVIAQGIGHIAKRLPEILEDGEHDLPGQFRVLLQRLGEHLKELDRQACELELQIQLWHKENEASRKLAAIPGIGPITASALVASIGDARDFENGRQLAAWLGLIPRQHSTGGKPTLLGISKRGDTYLRTLLIHGARAVTRVAERKAGHAESWLARLMARRNKNVAAVALANKNARIVWALLAQARTYRANYKAIAA

SEQ ID NO: 254146 - protein, 348 aa, unidentified
MKYIGIDCHKQYDHATMIDTETGEVTARRLAHIKKEFEEFIGDRADTRMVIESCRDWSKTYELSEDLVEEVILAHPLKVKAIASAKVKTDAIDSHTLAQLLMADLIPQAHLRKAENRLKQRVIRHRAFMVVMRTRVKSRIHGLVDSQLLPVEVLKAKPKDLFSKKGMEWLVSLEWAKGEDRKLIDSHLRVMDAVNQEISTTNEMVREIYKQDADAQLLATIPGIGVTLAMLISTEIDGVERFRSSSKLCSYAGLVPSTHSSGGKTYHGRITSEGNHWLRWALVEAAVPASNTDVEVKERLNGFRGRKGANVAKTAIARWLLKVIFHVLKERRPYITGYGQLAKAGTAF

SEQ ID NO: 254147 - protein, 443 aa, unidentified
MRFVGGDAQALFVGQVRGFDPGQCLLVPVDVGKSTAMALVADLFGEIVVEPFGFDLTESGVSVLVAAVSEAETERGAILVRFGVEAAGRYHRTLMAGLRRQGLEVVELNPGAVKEARSGQGKRRLKSDVRDLAAMADLLARGGGRPPQPVDAEMAVQAAWAGHRRRKLKVRTALQNQMIGQIDVVFPGLIGCFGDLLETKAGRVIVHHICEPSRIRRLGIEGLRSYVAKRGCRMSRPKAGQVLAAAKTALRLDDAEHQAASAVLAADIALLATVEAEVERAEVLLGQMLDQTPAGVLASLPGVGVVRASNYEAALGDPHRFANAAAAYRFSGLVPTDYESAGRRRPGPHISREGSTELREANIELGRGLASHQPDFGAYKASKLAEGKKPSVAAVAVGRRAHRLAFAMMRDQTRYDPDHWAEAVAAGRSVMTQTQRRVDVTTT

SEQ ID NO: 254148 - protein, 357 aa, unidentified
METKVKALVDGVDQFIGIDHHKKTSYITIKDRQGEIIKRGNIDTRPDALSAFLKDGTQEEGAVRVAVLESGRTYRPMWRWLSEEVDEVVLAHPGGLKIISDTVYKDDKLDSGKLADLLMLGMIPRAHAASDEAWERRLTLRHRMMLVRMQVKVKNIMHMTVDLYPDVFPRKPEMTDMFGKQGISWLMKLQIPRDDRRRLDELLEFWEFLETKIRKSDSLVRKIVKEDERCQWLMTIPGIGYFFAALIVAEVDDINRFPSPKHFVSYIGLVPRRDKSGEVDRGGKMHKRGNRFLRWALVEAAIPATRSNLALKNKYDRISARKGRKKGRNIAKVAIANKLAWIVYAILKEERPYEIRY

SEQ ID NO: 254149 - protein, 368 aa, unidentified
MNTVKFIGMDVHKKTITIAIIEQGRKKQPRFYGSIANQAEALDKFCRKMLSTAARLHFVYEAGPCGYGIYRHLTQKGFDCMVAAPSMVPKKSGDRIKNDRRDATMLARLHRAGELTAVYVPDARDEAMRDLARAREDAVAAARRSKQRLNAFLLRNGLTFAGRTKWSKAYFGWLSDIAMPYPAQQVALQEYIDTVHESLQRVNRLTDQIRQLVADWRLAPVVSALQAARGVSLITAVTVLAELGDLSRFDNPSQLMAYLGLVPSEHSSGESIKKGSITKTGNGHARKALVEAAWAYRMQARLSRALLKRQQAVPERVCQIAWKAQLRLCARYRKLTARGKSKQKVVTAIARELSAFLWAMAKQMQPMV

SEQ ID NO: 254150 - protein, 337 aa, unidentified
MSKITLIGIDTAKQVFHLVGIDQNGKFVYRRKLSRARLLPTLAQLESCEVVLEACAASHHWGRQIERLGHRARLLAPQHVKPYRRGQKNDYRDAEAIISAALAPGIHFVGIKGVAQQAEQALHRVRSRLLSQRNAAANELRGLLGEYGLVFAKGIKPLRAGAVRFVDSGEAAALGLAELVWDILDELERLQLRFDAYKDRIAQRVDADETSRRLCTELNGVGVLSASALRVKVAEVRDFANGRHFAAYVGLAPGHRGTGGQVTIGKLQRKHDRYLRQLLIHGARAAVRHLGDKQDPQSRWLRELKARRGFNIAAVALAHKNARQAWAILGQEQTAQG

SEQ ID NO: 254151 - protein, 378 aa, unidentified
MENYAGIDVSLELASVCVVDAKGKIVKEAKVDSNPQALVAFFNGVGFPVTRIGLEAGPLSQWLHAGLTQAGFETVLLETRHVKAALSAMTVKTDRKDARGIAHLIRMGWFRPVHAKSVGSQEVRALLVARKQLQRKLKDVELSIRGILRGFGLKVGQVTRTKFEWRIRELVAGQTMLEQVTAAMLAARAALLAEFNKLHKMILNIVRDDKVCRQFMTVPGVGALVAITFKSAVDDPHRIKKSKAAGALFGLTPKKYQSGELDVTGGITRIGDQMVRSILYEAAHTLLSRLTRFSALKKWGLDVAKRRGLKRAKVAVARKLAVILHRMWIDGTTFRWTNAPATTTELEVDHGLKHCGAGPAIRRQPLAPSAQPLRGVGG

SEQ ID NO: 254152 - protein, 391 aa, unidentified
MIYIGIDVAKDKHDCFITNSDSEVLFKAFTIFNNLDGFNDLYQKIESVMDDVTKVKVGLEATGHYSYNLLGYLIDKGLPTYVINPLHTNLYRKSLSLRQTKTDKVDARTIASMLMSDVNLKSYSDTSYHNEELKSLTRYRFDKVKERAKLKTSVSRLVCILFPELEKLVPTLHMASVYALLSEFPGAKQVANAHLTRLTNLLSEASKGRYSKDTAITFREAARASIGSNMPAKSLELKHTIKLIQELDSEIDEIENEIKIIMDEINSPILSIPGINYRMGAMIIAEIGDFSRFDSPDKILAYAGFSPSTYQSGHLYGAYAHMEKRGSRYLRYALYNAAKYVCHWDPTFTAYLAKKRAEGKHYNVAISHAVKKLIRVIYHLEKTNQQYIKAS

SEQ ID NO: 254153 - protein, 373 aa, unidentified
MTDYSGVFVGMDVSKSSIAVALAEGGGAEEARFLGEIEANEVSVTKLVRRLTAMHGKLTFCYEAGPTGYGLYRLIGELGHECRVVAPSLIPRRPGDRVKTNRRDALNLARLLRAGELTAVWAPDERHEAMRDLVRARSAAAFDLRVKRQQTGAFLLRLGRVYPGKKTWGGAHRKWLAGQAFAHLEQRVAFEEFVAAMDETKARVARLEKAIEEAVPDWSLAPMVTALMAMRGIDLVAATTILAEVGDLGRFRTPRELMAWLGLVPSEASTGDRIRRFGITKAGNGRARKALIESAWCYRFPARIGSAKLARVEAAAPAARRIAWKAQTRLTARYRALIRKGKLKTVAVTAVARELAGFIWAIHRALETEQAAA

SEQ ID NO: 254154 - protein, 433 aa, unidentified
MLKLNYMSTLFVGIDVSSKTNAVYAMDFEENKYISSSFGNNQPGADQLVNMIAECMQKHKNLDTVLIVLESTSVYSVHISNFLSASEVLMPYRPYVFCVNPKAASNYRKSYIGMEKTDPTDAYLIADFGRVGRTKKLEPWRGGQFISLKRLTRHRMHLSECITREKTYMVSNLYLKFSELQLLEGDDKPFGSLYGATSSAVLTEFLSPQEIIDMPEEELLTFLAGKSRNRISDLSKTSELLRKAARDSYRLGKCMYEPLNISLASSFNCIHAYQKEIKLIEQAIEKCINGMNPNALLILQSIPGIGPIWASGILSEIGDITVFHSSDALAKYAGLYWPKGDSGDFTSEDNKMSKAGNPYLRCYLGEAANSVRKHIPEYADFYARKYAEVTKHQHKRALALTSRKLVRLVFGLLVKNQLYTGEKLDTEYNIESN

SEQ ID NO: 254155 - protein, 288 aa, unidentified
MSETVIFVGVDVSKARLDVAVRPSGDTLTVLHDEAGIAGLVMRLHAWQPAAVVLEATGDLQLPLVSALIAAGLPVHVVNPRQVREFARATGRLAKTDRLDARVLAQFAEAVRPAPRALPDEATQTLSAVLTRRRQLIEMLTAEKNRLSQARLSLRKRIEAHIEWLTSELRRVDADLDTAIRHSPVWREQDDLLQSMPGVGPGLSRTMLAELPELGTLSSKQLAALVGVAPHNRDSGTLHGKRTIWGGRAVVRTALYMAALAATKWNPVIKAFPSIISSSREGRPKRWR

SEQ ID NO: 254156 - protein, 342 aa, unidentified
MRFYCGIDLHAKDCVLCVIDNKEKIHLREKVPNRLERIIGMLRGFSPRPAVAIEATLNWYWLVDGLEEAGYKVKLAHTHGLHMITGAKVKTDPRDAFSLARLLRLDAIPEAYIYPKEQRPVRDLLRRRHGLVSLCSAAYGSLRRNLLQQGMWDYTFAAIRQLDALRICELFSDAAIQASMLLELERVLLYSQEIEKVEKILLDTVADQPMFELLRTIPGVGKILALTIFYEVGEIERFGSAKQFCSYARVVPGLAQSSSVTRRGRGSKQGNPHLKWAFMQAAGLAVRYNPAVRKFRQTHLARRRSKSKRLVSLSIVAHKLAIGAYYVLKGQVPFRQELMFTS

SEQ ID NO: 254157 - protein, 387 aa, unidentified
MAAVVIGVDPAKRSNTIEVIDAGETVLLTARFENTSADYRRMRTLVKRWPERKWAVEGATGVGLGLAQRLVADGERVVDVPSKLSTRVRAIDTGHGRKNDPTDAHAVAVVGLRTAGLREVTVDDETVVMRLLSQRRRDLVRSRTQAVNRLHQALMQLIPAGARKKLTADKAKTLLVTVRPRDAAGKARRQLAADLIDDVAVLDRKLDAVDKRIADAVKASATTLTDIVGVGPVTAAAILGEVGDVARFTTADRFASYTGTAPLEVSSGDVVRHRLSRAGNRRLNNALHIVALSNKRYDPRGKAYYARKLAAGKGKKGSLRCLKRRLSDVVFRTLVEDRARANPGGQMGATLTASAVDQIPKANTSDKPQPGFTTEATPPRRPAKAAS

SEQ ID NO: 254158 - protein, 332 aa, unidentified
MMAQNEVVVVGIDVAKDKVDACIRSLAQRKTFPSTAEGRRALIRWLRKYKVGKAAMEASGGYEQDWAKALRQAGLEVLVIDPKRVRSFAKSAGRLAKNDPIDAEMIAWFAETFVEAKSQAHDAAREKLVQIVNARQSLLDMQTRLQNRGEHSTPEVVQKMQERLLKKISVEVAKLEVAIAAQVKATPHFVELAEIIESVPGLGKVTAAGLIAAMPELGQVNDNIVAALLGVAPYDDDSGQRRGNRHIKGGRRKARNLFYMPCMGAATRHNPVLKAFYDRLIAKGKEPKVALTACMRKLIVILNTMIARRQKWDANRYKVSVPARLPPSACPA

SEQ ID NO: 254159 - protein, 327 aa, unidentified
MQSISTIGLDIAKSVFQVHGVDAAGQVVIRRQLKRRFVLSFFEKLSPCLVGIEACASSHYWSRELQALGHTVRLMPPAYVKPYVKRQKNDATDAEAICEAVTRPNMRFVPTKTVEQQSGLMLHRARHLFIRQQTAVINSIRAYLAEFGIVAPVGRRGVEQLLEVVADTADRRLPEVARACLAALGSQLRALKAQILEFDRRIIVWHRSSATSKRLDAIPGVGPALATAPVASVADAKAFRSGQDFSAWVGLVPKQNSSGGEHKLGSISKQSDRYLRSLFTAGALAVIRYAKVHGTGHRPWLTDLLARRPTKLLRSRSPTRSPAWHGP

SEQ ID NO: 254160 - protein, 343 aa, unidentified
MQAVTTIGLDIAKSVFQVHGVDATGQVVIRRQLKRRYVLAFFERLRPCLVGIEACASSHHWSRELQALGHTVRLMPPAYVKPYVKRQKNDMADAEAICEAVTRANMRFVPTKTPEQQGGLMLHRTRHLLIRQQTSVINAIRAHLAEFGIVAPVGRKGIEELLGAIADPSDKRVSDVVRACLAALGSQLLGLKKQILDFDRMIMAWHRSNQTSKRLNCIPGVGPLLATALVASVADPKAFRSGRNFSAWIGLVPRQHSSGGRNRLGSISKQGDRYLRSLFVAGAFAVIRYAKLHGTKYRPWVAALLARRPTKVAAIALANKLARMAWALMARGERYNYPAGLRV

SEQ ID NO: 254161 - protein, 397 aa, unidentified
MIAVGIDISKAKSTVAVIDSDGTVLASPFTMAHTQPEMEAFVTYLKGLGEPTTILMEYTGHYHYPVLKKLQDEGFPVCIVNPYQMKKYGDVEIHKAKTDKKDALRIAAYALEKSYKLVPYSSMEQKYEDLKFLSRQYSQRITYVAKLKIQLIALLDQTMPGITRILPLNSRNPEKCALLLFIKRFKSFDEIHRIGKARFLASYDVLAKKASERSASSKGLSIYELAVDSITTRGEDPYIWLSQNQCVDLLSATQNAADEIISQMRNIAETIPEYKVLRAMRGVGDRLGPIILAEIGDIRRFHSGKALNSYAGNDAAPYQSGQFESRNRHISKRGSSALRKACYEVMQALKLTKPQDDPVYLFMLKKEQEGKPFNVAKMAGVNKFLRIYYARAMELYK

SEQ ID NO: 254162 - protein, 339 aa, unidentified
MQVSTMGIDLAKNLFVLHGVDHNGKTVLRKKLSRRQFVPFIIQLPACLIGMEACSSSHHFARLFSNVGHRVKLIPPQYVKPYVKTNKTDAADAEAICEAVTRPNMRFVQIKTAEQQGVLALHTERSFLVRERNGCANSLRAMLAEFGCVMATGFSALYKAVPEILEDEENELPHFVRVSVQRQLEHLKTLETRIRQTEHELSDWARTQPACQRVEKVPGVGLMTATYLVASIGNGRQFSTAKQFTSWLGLTPREHSSGGKQKLGGISKRGDSYFRCLLVHGARAVLRHISKNEKRMPWLAALVRRKHRNVAAVAQACKTARILWSMLFHETEYRPLTEA

SEQ ID NO: 254163 - protein, 354 aa, unidentified
MIIIGCDYHPSFQQIAFVDTETGELQERRLQHREEAEKFYRDLAAQGRKVGVGMEASGHARWFERLLAELQCELWIGDAAEISAKRVRKQKTDRQDAQLILRLMMKDDFPQIWVPSWENRDLRQLLWHRHRMVQARTRIMNQLQAVALNEGLRSKKRLWREAGREQLEAIRLAPWASQRRRDLLELLDRLNPTIAKLTQAIEEEVGKCPAARRLQTHPGVGPLTALAFVLIIGKADRFQCGKQIASYLGLVPLEKSSGHQRRLGHITKQGNSLLRFLLVEAAQVTVRSLPEWRSKYVHLTMRRGRKIAKVAMARRLAVRMYWMMRKEWDYERLRKFGSHAGKPGSGDGVKSNTE

SEQ ID NO: 254164 - protein, 392 aa, unidentified
MGKKEAKRGTTPMNYIGIDIHKKQCVLSALNEAGERTREARIGTNDRAGFEEYLRAVGGPCRAVIEACWGWGKVHDLLEATGLLEEVVLAHPFKTRIIAEAQIKTDKVDARALAFLLRLGAVPRAHVPGLAVRRRKEVLRQRLFWVRERTKIRNRTHALLDRQNTELALPVCSDLFGGKGMKALETLTGTLAEPDGTLLRQDLEVMKELKAKILECEKMMAADNAADPDAELLGSLPGVGLVIGALLACELDGIARFNHPRKLVAYAGLAPTTYSSGEKTYHGRLLPQCNGWLRWAFVEAAWVAIGCDGYFGALYRRAREQAGHGANTAIIIIARRMAEIAWQMLNKKRRYENRTPRAPSPQRARTKAARPTKQTCDPKAFPARSRISLAAS

SEQ ID NO: 254165 - protein, 324 aa, unidentified
MTIVVGVDIAKHKFDIAILQANGKYRTKGNQSNDPAGLRAFGKWLQTHAEPGAWVIMEATNVYHEALADYVLAQGYRVSVINPARIASYAQSQLQRVKTDKTDAKLIALFGQRHVEELQPWQPEPPARRRLRALVRRYDELKELYQMESNRLDTADMSVKESVLSVMVHVERRMDEVLKEIRQQIDDDDDLRGKRDLLVSIDGISDKTAALLLAELGDVSRFDSARAVVAFAGLNPRLQESGKHKGQVRISRMGSALLRAGLYMPAISAMTHNKAIRALRNRLEEKGKAGKQIICAAMRKLLHIAYGVLKSGQPFQAELALPAR

SEQ ID NO: 254166 - protein, 373 aa, unidentified
MPRYSTAFGMDVHLRSTTVCALDAETGEAVTRRFRGNPWGEVAEWMSGFPGPSLAAYESGYLGFAPQRELSGLGVDCVVAAVSKVPRSAADLSSKNDRNDAARMAKAILSHDISPVWVPSPEIEGLRDLAGAHDAATARLAAAKQRLLAFLARRGYAYGGTTPAGNPRRYWTYDFLRWLDKVRPADDGGIRALAALRSEVEAAAETRDDLLAEYRAAVAAGPLSAEVEALQSIKGCGFALAAAFASEVGDFSRFRSGRQVTSYFGLAPKQRSSADSMRLGGISGAGNALVRRLAVEGSWSYVQASHQPKLMPKGSGVPLEVRMHGRKGSERLLRRREEMLARGMPQAKANAATAAELVRWLWALGAMCREATE

SEQ ID NO: 254167 - protein, 343 aa, unidentified
MKISRVGVDLAKNVFQVHGVDRSDRPVLRRQLKRSNWLRVLMERLEPGCEIGMEACGGAHHWARELERRGYRVMLIPPQFVKPYVKSQKNDATDAEAICEAMSRPGMRFVGIKTLEQQDIQSIHRVRSSLIGQRTAQANQVRGLVAEYGLVAPKQLGPLRKAIPDWLEVAENGLTDRFRALLHGLWDALLRLDERIAGLDHEIDVISNTHPDAKRLKQLRGVGPLIATALVARFGDGRHFHRGRQAAASVGLTPRHHGTGGKNRLMGITKQGDPYLRSILIHGARSVVSTAHRKEDRLSCWATELKERSHMNVAAVALANKTVRVAWAMLRNGTDYEPEFAVA

SEQ ID NO: 254168 - protein, 340 aa, unidentified
MKTYVGIDLHSTNNYVAIINQKDKRLFQKRLPNNLDKILKALGPFKKQIEGIAIESTYNWYWLVDGLQEAGYKVHLANPSAIKQYEGLKYSDDKWDSFWLAHLLRLNILPVGYIYPKEQRAVRDLLRRRLMFVKQRTAQILSLQSLFARNRGVNLPGSSIKRLRDDFIEDSFESSHLVFTAKRNAATIRFLSKIIEEIEKEVRSQVQLEKEFQMLRTIPGIGNILGLTIMMEVGTIDRFAKVGNYSSYCRCVESKRVSNKKKKGENNKKNGNRYLGWAYVEAANYAQRLCPFAQKFFQRKMSKKSGNRAIAIKALGNKLTKASYYILRDQVTYDPKKLFH

SEQ ID NO: 254169 - protein, 463 aa, unidentified
MSKPIIITVDVSKGYGDFIVVDSEKKVLVAPFQLDDNKAGHTQLREQLVLLKKQHKAGRILFVAESTGGLEDNWLRMVKQPALSGFVEGYRLNPKTTHHEYRVQKRNSISDAVSTLTMAHHVAKNLEWFTPSDVEVDPKYAASRNLIRHLVSLQADCTGHKNSLQILLYQYLPSLVPLIPTAWSKYFLHILINYGGKRSIQLAAKQGFKKVSRVPKGKADQIHAALLDGIDMNETPELVVATIRSKARQILALEEEISELEKLLCQTAPVAESQVELLCSIKSMGKVAATKFLCFFEDIDRFDDANAMASFFGVQPRIKKSGDGMVKIGMSKQGSGIVRREAYLVCFRTLRTVPYLKSIYAKFRQKGMCHDAALGVLMHKLIRMMYGILKSGTPFNPGVDQLNQVDPRTKEDTLVSTEQVKQDPKRRFQLASQDAPLSNRQRRKLKKDQESQAATMAESTGSS

SEQ ID NO: 254170 - protein, 301 aa, unidentified
MDHFAGLDVSVKETSICIVDDTGRIVREVKVASEPEALLQVLGNPIYRFKRIGLEAGPLSQWLFSALAEAGLPVICVETRHMRAVLQAQINKTDRNDARGMAQMMRAGLYRPVHVKTLRSQKLRMLLTHRKLLQSKAIAIENDLRGTLRNFGLKVGVVGTVKFEARIKELVENLPDLAVLVEPLLMVRRVLREQFAILHRRLLAIVRDDEVCRRLMTVPGVGPVVALTYRATVDVPARFRNSKAVGAVFGLTPSRYQSGEINRTGAISKCGDEMMRVMLYEAAHIMLLRLAKWSWLKAWAR

SEQ ID NO: 254171 - protein, 347 aa, unidentified
MLADELDFVIGVDPHRDVHAIAVVEVCTGVVAFESSVAADSGGYRDALRVAEEHAPGLRAFAIEGAGSFGAGLSRFLAEQGEQVFEVGRVRRERRSSGKTDALDAVRAARAVLEQKRPARPRSSGEREALRALMAARAGAVNAKRAALCQLRDLLITTPEPLRSELRTLSRARLLSRLSTTRPHRRNDPELRGTLLALRALARRIHQLTAEERELAREIERLTRRLAPHLLDQPGVGPHAAAQLVLSWSHQGRIVSEAAFARLAGAAPIPASSGQTIRYRLDRSGDRKLNRALHQILVTRRRTHPATIAYIQRRLQEGKTRREANRCLKRYLARNLYRLLEHPPATA

SEQ ID NO: 254172 - protein, 334 aa, unidentified
MEQSSVCVVDAAGKIVREARVASEPEALVRFFRELGVRVSRIGLEAGPLSQWLHAGLAEAGFDAVLLETRHVKAALSAMVVKTDRKDARGIAQLLRMGWFRPVHAKSPAAQEIRALLVARKLLQAKLLDVELSIRGILRGFGLKMGEVSKARFVARVRELVAGQAMLERIVTPMLRAREALRTEYGQLHREMLTIVKRDAVCRQLMTVPGVGALVAITFKSAVDDPGRFAKSKAVGAHFGLTPRKYQSGETDVTGGISRVGDAMVRAVLYEAAHIMLSRATRFSSLKRWALDLAKRRGLKRAKVALARKLATVLHRMWLDGADFRWGREVGAAA

SEQ ID NO: 254173 - protein, 331 aa, unidentified
MAGDVGIDIGAKQVVVTHRLAGHTHAAKSFEQTTAAHRKLITELKRLKPQRIVLEATGVYYFDLALALFEAGLPVAVINPKSFHHFAKLKLTQSKTDPLDAALLAEYAERFEPPLWTPPEPTRLALRDIGRQINRLTATRTQAKNRLHALCAKRSTFALLIEDEREAIATLDQRIKRLAQAAEELLAQDTALAAQIEHLRAAKGVGKASAIALLAELCVLPQHLRAPQVSRYAGLDVRLTQSGSSIDRPGRLSKAGNAYLRAALYMPALTAVRHDPYARAFYQALHKRGKKKIQALCAVMRKYLTGIWACLQHNVPFDSSRLFSEIHFENA

SEQ ID NO: 254174 - protein, 325 aa, unidentified
MKFILGIDIAKDKFDCCLLSEGRKFHQEFLNGPRGFKQLLGWLQKADASPAALWACMEATGIYGEALLRFLFEKGLRVSKVNPAQIKHYARSLLSRNKTDRQDAWIIAEFARERSASGQLRIWQPPSPAIARLRQLTRLLAARKGQRAREKRRARMVDRELRAHTRAMLRAFEKQIDAIEAEINALIASSAELKRRHDLLRSIPCVGPVTAQTVLAELPEQIANARAAAAYAGVTPRREDSGQKKGRARLSKTGNAHLRQALYMPASSGRKTNPRLRACAQRLAQKGKTRKLAIGACMHLLLRLCVGVMASGKPFDPHWPKQPMR

SEQ ID NO: 254175 - protein, 367 aa, unidentified
MSSVASQAGLIHLGMDTSKNTIVVATLLPGEDSPVTDRIANEEAAIRRLVGRFADRSLLRAWYEAGPGGYELWRLLASMGVACQVVAPSLIPKGGSDKVKTDKRDSRRLARLGRAGELTPVRVPSAAEEAVRDLVRARDAMLADRKRAQQRLTAVLMRHGRIWRGATYWTAAHRAWIAAQRYGEPALAAAIGYYRAALAVREAELAAIEAELAPWAAREPLAPAVARLGCYRGIAELGALTLAAEVVDWRRFPAARAFMSYTGLVPAEYSSGERIRRGHITKAGSEPVRTALTEAAWACRHAPAIGAGLRRRQAGAAPETLARSWTAQRRLHDRYVHLVHAGGKAAPEAAVAVARELAGFAWAEMTA

SEQ ID NO: 254176 - protein, 317 aa, unidentified
MSKPTMICAGIDTAKRKLDVALASRAERLLVDNAAEGHRTLVDWLRRHRVKRVGIEASGGYEQAVVAELRRKRFVVVVFQPAQVRAYAIFKLQRAKNDKIDAALIASCTAEVTKIHAPPDPRLAPFAEHLTMIEQITDDIAGLKNRYESCRDPRIRQVWKMEIARFEKLEKTELKSLVAAIRAQRDLAERLDLINSIDGIGLRTAVAILVRMPEIGRITREEAAALAGLAPYDDDSGDYVGVRHIEGGRKRLRGALYKAALPAAFRWNPQLIALYKRLIGAGKLHKVALIACARKLLIFANTVVARGTPWTAQPSTA

SEQ ID NO: 254177 - protein, 320 aa, unidentified
MSNLTEENFVGIDVSKTQLDVAVGQAGETWSAGNTDSGIAKTVERLKQLGVCLVVVESTGGLERKLLRELQLAGIPFALVNPHRVREFAKSLGLLAKTDKLDARLLARFGAAIHPAPTILPSEAEQFLSALIARRSQLIDFRTAEMNRRASAHPSIQASIELLLRQLAEQITLLDQQIEQLISQNDDFKNKAEILRSVPGIGPITSAILIADLPELGHTDRKKAAALVGVAPFNDDSGYRRGKRRTKGGRAAVRKVLYMATISASRYNPIIKSFYEQLLKRGKLKKVALVACMRKLVTILNAMLHSRSPWRFPNSALHTP

SEQ ID NO: 254178 - protein, 410 aa, unidentified
MEVVHAHCAGLDIHKDTVVACVRHMTDGKVTTTIKTFNTATQELLALSDWLSAENATHIAMEATGVYWKPVWNILSDGEFELVLGNAAHIKNVPGRKTDVKDAAWLADLMAHGLVSGSFVPDQTTQEMRDLLRTRKQLVRERTSHTQRIQKTLECANIKLDSVVSNVVGVSGRRMLEALIAGQTDPKELAAMAHGRLQATPAELEAALRGRVTAHHRFMLRLHLDQIDSFDEAIARIDKEVNDNDQNFRAAVELLKSVPGVGSLAAEVIVSEIGIEMNRFATAGNLVSWAGLCPKNDESAGKRRSNRLKAGAPWLKTTLVQCAWGAARSKGTYLHAQYVRIRARRGNQKAICAVAASILTTVYHMLKDGTFYEDPGPDYFDKRNKNQQANKLVNRLHNLGFNVTIQPAAA

SEQ ID NO: 254179 - protein, 422 aa, unidentified
MSCLPALAGVCPPQHQVRRDTIILTESTLIVAGADTHADTIHVAAISLTGAAIGDREFPTTRVGYAGAIRFLYSLGQVERVGVEGTASYGAGFTRALTAAGIAVAEVTRAVKSTRRLKGKSDPLDAYGAARTALAGDGLATPKDDATSGLRALQIARRSAVKHRTAVINQIKAMLVSAPDAVREKYRELTTLRLIEALARCRPDAQSDPWAQSVLTAAKMLAQRVQFLETQAEALEAQIDVLVTAANPGLRAAYGVGSDTAAQLLITAGSNPHRLHSEAAFAALCGVAPVPASSGKTNRHRLSRGGDRSANNALFRIALVRMSHHQPTKDYAQRQLLKGHTRMEILRKLKRAIAREVFKLLTRQIAVPEYTDLRPARQAKNITVTAAANHFGIWPTVISRIERGLQRDDAFADTYRNWLKAA

SEQ ID NO: 254180 - protein, 482 aa, unidentified
MKKRNIYQNRSQELLSLFEQAGNSSKVMCIPIDFAKKDHMVMFCNGYGDILRKPFSVKNSQMGVTYLTDQVMRFCRHRRIKKEHVFFGGEDAHSYAENFFNTLRSKGFLVANVNAYEAKKQRENLQASTDRLDLMGIAVMLLNRKANCAPAQAGAYRNLRTLVRHRKKLVKMKTVVSNRTHTVIDRLFPGFLNEKKSGIQPFSKSSLYLMSDRFSAQQICRRRRSTLIKHLKRFGTKEAENIATKLQTYAKQVLTPLEEYTATLQLSLAYNIKHYRCLQENIDHLEKEIALLLSQTQGAFLTSIKGVGIVLSAGVTAEIGNPFAQKPVNNLVSYAGIVPRVKQSGGSEGQPYVGRVSKRNNHILKDYVVQSAFHIGQYGPKNLLLDYKRREAQGQHADFGMGRRFMRMAMCMMRTSQVYLPPRLRNDSVDQRDKAEYYLSIWPLLKEKWKRSGALETAFEKDRPLGCWRQIVQHLYGIELNI

SEQ ID NO: 254181 - protein, 341 aa, unidentified
MKQDISVIGIDIAKRVFHLVGLDERGKIVLRKRCSRGEVLPFMANLGPATIGMEACGGAHYWARHIRAQGHEVKLMAPQFVKPYVKSNKNDMRDAEAIAEAVTRPSMRFVPVKEVAQQDIQALHRVRERLVTARTALVNEIRGLLAEYGIVVPQGVAQFRQTLVRTLEAEQTQLTPLGQELFHKLFEEFGRLDKEVAYYQEKLEALAHTHPVCQRLQTIPGLGPLTATALLAAVSDARVFKNGRQFAAWLGLVPKQYSTGGQTRLLGISKRGDSYLRKLLIHGARATLRWARTKADRRSQWIRGLLERRGWNRTAVAVANKNARIVWALLSRGGVYGAQAS

SEQ ID NO: 254182 - protein, 374 aa, unidentified
MGQHSRAFVGIDTSKLRNAVAVAEEGRGGDVRYLGEIDTAEATTRKLVVKLTAKYRQLTFCYEAGPTGYGLHRLIGKLGHDCIVAAPSLIPKKPGDRVKTNRRDAVGLAKLLRSGELTAVWVPDERHEAMRDLSRAREAARKDLKGKRQQVSSFMLRLGRHYPGKKTWGPAHMKWLMLQKLEHREQRIVLEELLGAVRQESERVERLEQAIRDAVPEWSLAEVVTALQAMRGIDLVAAVTVLAEIGDLSRFQTPRELMAYLGLVPSESSTGDTVNRGGITKAGNGRARRILVEAAWSYRYPPRVSREKQMKVAAAPRAVREIAWKAQMRLCGRFRSLTRKGKRPTVVATAIARELAAFIWAINREVVRSHAMAN

SEQ ID NO: 254183 - protein, 341 aa, unidentified
MSIVGAFDVHRRQLTFEYLDTATGELRRGRVVPADREHLRQWLARFAGHGEVEFALEGCTGWRYVVEELCRAGIRPHLAEPADTAALRGKKRHAKTDKTDCRHLRVHLMAGDLPESWVPPEHVLEARAVVRLYKDLLDERGAWHQRIAATLFHQGVPAIGTMAKPEGRAAVAEVELSPAGRQAAEAGLRQIDRLTGELDPLRRQLDMLSRRQPGCAALRATQFGIGAVTSVAIWAELGDVRRFASSDNVVRHTGLDITVYSSDTKRSAGHLSRQGPELLRWALYESAKSAAKRTSPDHGYYTAARDRRTAGLATLSVARKLARRCYHTLRELGEEALQPAA

SEQ ID NO: 254184 - protein, 350 aa, unidentified
MMIIGCDYHPGFQQIAFIDTETGECGEHRLPHREETEKFYRDLAAQGMKVRVGMEASGHAHWFERLLAELNFELRIGDAAVIRTKRVRKQKTDRQDAQLILQLLMEDRFPRIWVANWENRDLRQLLWHRHRMVQARTRIMNQLQAVALNEGLRCKKRLWREAGREQLESFSLAPWASRRRRDLLEVLDRLTPTITELSQAIEQEAEKCPAAQRLRTHPGVGSLTALAFVLIIGSAERFQCGKQIASYLGLVPSEDSSGERRRLGHISKQGNALLRFLLVEAAQVTVRSLPEWRNKYFHLAMRRGRKIAKVAMARKLAIQLFWMMRKGWDYEQVRKFGPHAGQPENRRGVQ

SEQ ID NO: 254185 - protein, 318 aa, unidentified
MAEVVLFEQIVERGCGLDVHKKTVVATIDGAGLKRETREFGATTRSLTELKEWLLSSGITHVVMESTGVYWKPVYHVLEPSGMTVWIVNARHVKYVPGHKTDKRDSKWLCKLLLAGLLKPSYIPPREQRELRDLTRYRRKLIEQIASEKNRIIRLLEDCNIKLSSVLSDTQGVVGTKLIDKLCANGKVSMKDIEEVYHGKLQASKEEIYEACEGVVTEHHVFLLQAIKEDILSCEAIIAKITSRIKGMLSTYENVLELLKEVPGLSTKSIEDLIAEIGLDMNAFPTEKHLASWAGVAPGNNESAGKKKVDALHTEISR

SEQ ID NO: 254186 - protein, 363 aa, unidentified
MKIIGVDLHTQQQTIAMLDDGTGELVEKELEHAGDQVREFYSALPRPVLVGIEASGSMHWFLRLLEELEIDYRVGHPAKIRAAEPRKQKHNRRDARLLLTLLAENRFPAIWMPSREQRDLHALLRHRHQFVRMRTRVQHTLQSLALSHGLRRGHALWTPGGQLTLRALPLAPHATRQRDTLLALYPQLQGPIDDLDRQVEKQAQQRPQARRLMTHPGVGPVTALATEVFLSDPRRFADGKALASNIGMIPSEHSSGRRQRLGKLSKQGNSLLRFLRGEAVLQAVRRDPELQRFYRRKLVQKGMGKARVAAARKLGIGCGSCCATRSITRNSAAAANNCGGSVAVRPVRECLQATVVLSDRSPE

SEQ ID NO: 254187 - protein, 416 aa, unidentified
MNAVGIDVSSRKSTVAVLRPLGEVVCLPFDVTHDIVGLASLAEKLKTIDGETRVVMEHTGRYYEAVAKALHEAGFFVCAVNPLLIKEYGANSLRRVKTDKADAVKIARYALDNWADLRDFTPMDAIRYDLKTLNRQFQLASKQRTASANNLIALLEQSFPGIRKCFDSPVRSDGTQKWVDFAHSFWHVDCVRKQPFAAFCERYRKWCKRHAYLFKLSNAEEVYALAKRAVVLTPKSKVVKVLVQEAANQLISISRSVEVYRAEMDRLAAMLPEYPVVMAMYGVGKSYGPQLMAEIGDVRRFERKQALVAFAGIDPMPNQSGDKNVRSNKSSKRGSPYLRKTLFNVIRTYLQCAPQDEPVFQFLNRKRAEGKPFYVYMLAAANKFLRRYYAKLRDYFASLDTLQPVAPIPTILKATL

SEQ ID NO: 254188 - protein, 318 aa, unidentified
MSDSVFIGIDVSSQTLEIASSDQAKTWQVANDTSGIEQLVSQASALAPGLVVLEATGGYEFEAACALQAAGLAVAVVNPRTARDFARAMGALAKTDALDARMLAAFARVLHQHPERERFVKPLADAELQQLQALVLRRRQLVQMLTSERQRLRLAHAAARPSIERVIEFLKKELGDSEAEVAAHVQRHHAQLAQALASVPGIGAASVAVLLAELPELGKLDRRRIAALVGVAPLNRDSGQMRGQRSIWGGRADVRRTLYMATLTAVRYNPALKICYERLLAAGKRKKVALVACMRKLLTMLNAIAKHGSTWDSTMHTA

SEQ ID NO: 254189 - protein, 422 aa, unidentified
MFEDVYYERCAGIDVHKKFLVVCLRIGRKTEMRKIGTLTSELRDMVAWLKANGCQMAAMESSGSYWKPIYNIFEQEGLPVMLCNAYHIKNVPGRKTDVNDAQWIAKCLSQGMLNPSFVPDREQRELRDMTRFRKSQIEERARNINRLQKFLEGANIKMGDWLSDIEGKSATLLLELVIGKPDFTVEDVASRMHKKMHASADEMFRALEGCMTPVQREFFAHVMSIIREQTAQIEKTDAMIKRNLSEGYKAAIAALDAIPGIGEISAEVIVAETGIDMSRFKNQHSLSKWAGVCPGNNESAGKRKSGRTPPGNKTLKSTLTQSAKSAKANKKSFFSAQYSRLVSHRGKNRATMAVAHSIIIAIYFVLCGNQFKDLGADYYTQFNRDKKINSHVKQLSKLGVSIPKEFLEEARIRPPTPKSRSA

SEQ ID NO: 254190 - protein, 404 aa, unidentified
MFDIEGVGVFLGMDVGKTAHHGHGLTPAGKKVFDKPMPNSEPKLRAVFDKLKAKFGTVLVIVDQPASIGALPLTVARDAGCEVAYLPGLAMRRIADLYPGEAKTDAKDAAVIADAARTMPHTLRSLELTDEITAELTVLTGFDQDLAAEATRTSNRIRGLLTQFHPSLERVLGPRLDHPAATWLLERHGSPAALRKAGRRRLVELIRPKAPRMAARLIDDVFDALDEQTVIVPGTGTLDIVIPSLAASLAAVHDQRRALEAQINSLLEAHPLHPVLTSMPGVGVRTAAVLLVTVGDGTGFPSAAHLASYAGLAPTTRSSGTSIHGEHAPRGGNRQLKRAMFLSAFAFMNADAASRTYYDRQRARGKTHTQALLRLARQRISVLFAMLRDATFYESRTPTVTLTA

SEQ ID NO: 254191 - protein, 339 aa, unidentified
MSKQPHPTQTTLFCGIDVSAKTLAVAVEQQDGRFQQREFANSAAGHKQLIAWLHKRGAPVRVSLEATGIYSLDVALALDATDGIEVAVLNPKLVNRFAQTLRRSKTDKADAVALAEYSLRMPFVPWRRPRPVTLQLRAISRHIATLTQLHTAQNNRGHACGSSAAVPRCVREDIKRSMDGLKKRIARLRREAIALIQQDVEMARKFRQLHSIKGIGETSAIQLLGELASLDPEMTVRQWVAHSGLDPAHQVSGTSVHKPSRISRHGNSHLRQALFMPALVAVRFEPYMRAFYLQLQARHKAKLQALMAVARKLLHAIYGIFKSNTPYDGAKLFPETTIA

SEQ ID NO: 254192 - protein, 423 aa, unidentified
MHQDNFQFFVGIDLGRWLHVASVVDSSGQFLAERGFAHSYEGLAETVDWLLNFAHQDTDRIAVGIEVPHGPVVETLLQRGIDVFAINPKKLDRFRCRYAVSGANDDRRDAFVLADTLRTDRPRFQRLSLPPPEIIALKELLSARDQLIKHHVALSSQIRDLLVRCWPHLLTLAPRNRALDSFFCELLELFFHPDRTVSLQPQSIQALLKKQHIRRVKTDQILETLQKPSLRVAPGTIAATSIHIRLLIQQLLLVWRQRRDSDQYLERWFKQNQLASELKKPTDAAILASLPGVGSFVLASVLAHAHDAIRLRNLVALRSLGGIAPVTKQSGKRRHVLMRRARSQPLNYALHHWAHMAVLRDPHFKLHYQSLRAKGHRHARALRGVMDRILAIAVAMLRDRTLYDPSRRNNETDKNIVNEKNFS

SEQ ID NO: 254193 - protein, 477 aa, unidentified
MSKTIRQQEIRGSRGPVPAKGKRNKQPNRPGQPDRPVFEPNAAGIDIGAREIFVAVPPERDPDPVRKCETFSGDLHQMAEWLVRCGITTAAMESTGVYWIPVYDVLEQHGIKPCLVNPRNMKNVPGKRTDFHECQWIQHLHAMGLLHAAFRPDGEVCAVRSLMRHRNDLVMMAGEHIQHMQKALTQMNVQFQHVISDITGLTGLAVLDAILAGERDPAVLAKLRDPRIKAPEETIRKSLEGNWRAEHLLALKQRLSLYRSHRELIHECDQEIQKLVAAFAPRVDPAERPMPEDRKQKQRKRKSKSGQRDFNMRAEAYKLFGVDPTQIPGLMTLVFMLFSEVGRDTSRWPTAAHFVSWLGLCPDNDISGGKVLWRGARRTKNRAGTLFRLAAHSLHHDQTPMGDYLRRMKAKLGPAAATTATAHKIAIIFYTMVKNQVEYDASLWAHRDALREKRLEARLHKQAAQRGYKLVPLEPAA

SEQ ID NO: 254194 - protein, 411 aa, unidentified
MDVTYERCCGIDVHKRSIVACLRCGKKQEIRTFGTTSKEIRALAKWLWDEKCQMAAMESTGSYWKPVYNLFETSHLGVMIVNARNMKNVPGRKTDVKDAEWIADLLQHGLLSASYIPKREQRELRELSRYRKSLIAERARELNRLQKMLEGGNIKLSSVVSNINGKSSRSLLQKLLKKDAPLQKDEVEESLHGALRHKVEDVMQALDGFLTPLQKQLILQVVDHIDDMTKRIGQMDKLVKQYSSGYEDAIEKLDEIPGIGRQSAETILAETGLDMSRFATEKHLSSWAGLSPGNNESAGKRQSGRTTKGNATLKTTLIQCAKAAIKKKDSFLSAQYDRLVVRRGAKRATVAVAHTMLIAIYHILKLGEPFIDLGADYYNKFNKERKINSYLTKLKKLGWQPETATFSAAST

SEQ ID NO: 254195 - protein, 347 aa, unidentified
MGLVIGLDAHAKTCVYKVKDDGGTVVGEGTIPSTPVDLSALAETYPGATVVVEASTVTEWIYDCLTDRGVRVFVCHPENMRRGGRKSDARDAGRLADAFRVGALTPAYVPPREVRALRQLARRVVFLSKESTRFKNRVHAILKRRGVRLLDDETEDDVRSIFALKHRDRLLAVGDPEIPLLVDMIDAVAEKRRASDVRLEAIAASDPDVANLATIPGFGALAAVTMYAEVGDVRRFPNAESLCAYFGLVPTESQSGETRVRGHITRRGPPNVRWLLNQASWQHVRLCPRSSVGKDYKRLARRLGKKRAITAVARRLVKVCYWILRERRPFTLNGFDQVRASTAPCAT

SEQ ID NO: 254196 - protein, 338 aa, unidentified
MPVTTVGIDLAKHVFHLYGEDAQGKAVLHKRLSRAALKPFLATLPPCRVGMEACGGAHYWAREFRQLGHEVRLINPKFVKPFVKSNKNDSRDAEALCEAVTRPTMRFVPIKTVAQQDIQALHRVRSRLVGQRTALVNQIRGLLAEYGLILPQQISHVRRGLPTLLEEADNGLTPWARELGRELYAELGQLDERIERLEGQLQRVFRQQAECQRLAQVEGIGLLTATALVAAVGDPTVFRNGREFAAGLGLVPRQHSSGGKTVLLGISKRGDRYLRTLLIHGARAVVCRADTKSDPRSRWVAAVKRRRGLLKACVALANKNARIAWALMAHAEPYRKAA

SEQ ID NO: 254197 - protein, 341 aa, unidentified
MSLAPPEALFFTGIDWAAETHAVCVADAAGTIAAGFTIEHSADGIAALVRHLARHGEAGDMPVAIERPDGRLADLLLEAGHPVVPVSPNASKAWRDGEVLSGAKSDAGGAAVIAEYLRLRQHRLKTAAPYCDETLALRTVVRSRGDLARHGYSGRRTAAGLLARLRDAGLAAVGVLTALNASVKNPGRSVAAHLGEHPDGKIFTSLPRSGQVNAAQVLAEPDDCRQACDGPGSVAALAGCTPVTRESGKHRGVHFRWACNKRFRAAITLFAGNSRHASPWAAKTYTDARASGKDHPHAIRILACAWIRVIWPCWLNGIPCHPARHGAAAALAEQPAKQIAA

SEQ ID NO: 254198 - protein, 376 aa, unidentified
MAQTDVQYPTIHLAIELSRSAWLVAARLPGVEKPSLHRIEGGDTAALLALAAALRARAAARLGTPVRVACCFEAGRDGFWLHRLLTAEGIAAYVLEPTSILVNRRARRAKTDRLDALGMLRVLAAYLGGDRQACSMVRVPTPEEEDAKRPHREREELVRERVRLENRIAALLATQGVRERPSLRSWERDLAALRTGDGRPLPPHLRAELDRLRRRLVLTLGLIREVEAERDAALAAGPRDAAGRKIAALCRLRGVGANFAAVLTREVFYRAFDNRRQLAGYVGLAPVPHQSGEADRDRRISRAGNARARTTLIQLAWLWLRYQPDSAPARWFRDRVGALRGRTRRIAIVAMARKLLVALWRYVETGLVPEGVEVAA

SEQ ID NO: 254199 - protein, 376 aa, unidentified
MGDYSEAFVGFDTSKLRNSVAIADGGRRGEVRFLGEIENTPAATAKLVRKLAARYKRLTFCYEAGPTGYGLHRQIKGLGFECVVVAPSLIPKRPGDKVKTNRRDALSLAKLLRADELTAVWVPDGHHEAMRDLTRARETAMLDLRTKRQHVSAFLLRLGRSYPESKKSWTKAHLSWIAEQKLEHPQQRLVLEEMMLAIRQAQERLARLEQAIAAAVPEWSLAAVINALMAMRGMDMTSATTLLAEIGDLSRFQTPTELMAYLGLVPSEASTGDAIKRGPITKAGNRRARRMLVECSWSYQHPPRVGQAKQPKVDAAPPAVREIAWKAQCRLYRRYRTLIRKGKRKTVAIVAIARELAGFIWAVARAATTARVVAVA

SEQ ID NO: 254200 - protein, 483 aa, unidentified
MGQRRLSVYERLQRGQKLGRRDRRELQRQLEAADPELKIVHPDAAGIDVGNASHFVSVPAGRDPQPVQEFGSWTADLQRLAAWLKSCGIRTVAMQSTGVYWIALQEVLEGEGLEVYLVNARGTKNLPGRKSDVQECQWLMKLHAYGLLLNSFRPPEEIRGVRTIWRQRARLIQNTGEAVQRMQKALTTMNVQLANVISDISGVTGMAIVRAILKGERDPRMLAKLRDQRIQAGEQEIAHSLQGNWRQEVLFELGQVVEQYDFYRKQIAACDVELKERLSQLPSHQVIKNTETAADQRPRKKRRSKTPRKNEPQFDLGSELQRIFGVDLTTIDGIDVMTAQVLLSELGTDLSAFPSEDHFSSWLELVPRNEITGGKVIRQKSRKSKNRVGNALRMAAESLSRSDSYLGARYRKLRARMEGQEVVKAMAHYLARLVYRLLTKGQEYVDRGAAYFEKKNNERVLMALQRKAMELGLRLVPAQTAES

SEQ ID NO: 254201 - protein, 341 aa, unidentified
MNYYAGIDVSLEASSICIVDASGKIIKEAKVLSEPEALIAWFKALPFTLARIGLEAGPLSQWLYAGLKDAGFAAELLETRHVRDAFKAMPVKTDRNDARGIAQLMRLGWFRPVHCKSVPAQETRALLTARKLVQAKLYDVQMSLRGILRGFGLKVGRTTPVGFAVRIRELTEHHPALSAIAKALLAVHEVLLRELNGFEKQVRKQARCDSRVRLVMTAPGVGAIVGLTYVAAIDDPERFSSSKTVGAHFGMTPKKYQSGETDLTGRISKSGDKGVRAVLYEAAHIILTMPVKGGALKSWAAKLAKRAGMQRAKVALARKLAVILHRMLADSAPFDAAKAAA

SEQ ID NO: 254202 - protein, 307 aa, unidentified
MYIGVDTHKKAHVLVAIDDQGQICDTHTVANTPSGWAAALCWAHSLDATCIWGIENSGSLGKGFAQFLLIQGESDVHEIVPHRTAQYRKRGRSQDKTDAADALAMARLLRAETEFLPTVPRDDVSTELRLMSDHRDNLVAERTRLINQLHAQMLQIDPCYAEKSGALTSLAGVRSCRDLEVPHAEGVVRTRLLIVRQLVSQILPLAEAIETVETALTQRVQASETPLVQLCGVGTIIAARLIGELGCVPRVHSAAALAALAGIAPVAVSSGGKHGHRLNRGGNRRLNKAFHMIALSQLRCEPLERFS

SEQ ID NO: 254203 - protein, 462 aa, unidentified
MTGVSRQSYLAEETQEMDVVFTHCAGLDVHKKSVTACRLVSDSTGQHPEGVAELRTFGTMTHELLALADWLVEAGVTHIAMESTGEYWKPVYNLLEGLVTIFLVNASHVKNVPGRKSDPADARWLAKLMRYGLLQASFIPPVAQRDLRDLTRYRTKLVQERAREVNQIQGVLERANIKLASVASDVLGVSGRAMLEALIAGQTDPATMAALAKRRMRSKIPMLEQALTGTVRDHHRRLLALQLAHIDFLDEQIEALTSAIASCLTTLSQEAVADTALSTPTLADVPAPTEPLPPLTFTRAVELLDTIPGVNQRGAEMIIAEIGIDMARFGTASRLAAWSGVAPGNDESAGKQRSGKTRKGNQVLRAGLTQLAHGAVRTKGTYVSALYRRLAARRGKRRAILAVAHSIMVSIFHMLTRNEPYRELGANYFDERRRHYTVDRLLSRIEHLGYRVHLEPVAAPTV

SEQ ID NO: 254204 - protein, 492 aa, unidentified
MPQLNKHATIKWPTESKGVGRSKSRRVSKSRRSSADPTEGLQVGNPNAAAIDIGCSEHWVAVPAGRTERPTQRFGCCTAELNRLADWLKECGVDTVVMEATGNYWVVLYDILEERKLNPVVVNPRYAKNMSGKKGDICDCEWMQKLHTYGLFSNSFRPTQEIRVLRAYLRQRETLVGAAAQEIQHMQKALTEMNVQLANVISDISGETGLRIIDAVLGGERAAGVLAKLKGPRIMASLVTLERSLEGHWKEEELFRLEQARLSYAHFQEQLQQCQQRIEQQMQTIQGRVPLQDQGRAPRTMSAADKAAEPVPGQGDGRKSKSFDLGVELKRVLGVDLTQIDGVGPVAAQVILSEVGTDMSRWRTEKHFASWLGLCPDHRISGGKILGRATRPVVSRARNALRLCAYTLTHSKSWLGAKYRRLKHKLGAPKAIVAMAHHLARLIYRMIKNGQDYVDKGMEVYEAKYRENRIKWLKKQAKELNLELHEMQALAS

SEQ ID NO: 254205 - protein, 332 aa, unidentified
MSTFVGIDIGAKTFEVVVRRNDKNSDVKSYKQTHQDHEKLAAQLLKLNPASVVMEATGIYYLNLAVVLFNSGLNVSVINPKSFNHFAKLKLSNSKTDGIDAALLAEYAQRMTPRLWTAPDPKYLSLRDIGRQINRLVGRRTEAKNNLHALEAKNTTYKPLIDDELEGIEYLEFRIERMRNLALEIMQHDEELSQKLNNLTAATGIGINSAIMIICELELLPGHLKSSQVSRFAGLDVRLNQSGTSINKPGRLSKAGNAYLRTALFMPALSAVTHDPNTKAFYQSLILRGKKKMQALCAVMRKMLTGIWACLQLNTPFDSSKLFSEEHKKACA

SEQ ID NO: 254206 - protein, 453 aa, unidentified
MKEQNQISMDIVNPKAAGIDIGSRSHFVAIGQKEEHVREFGVYNEDLKAISNWLKENGIQSVAMESTGTYWQALYAVLLNDGFQMILCNGKFTKNIKGRKTDVQDCQWIQKLHSIGLLSGSFLPDLQTEQLRTYCRHRASLIDVAANTSKKMQKYLRLLNLRLDVIVKDICGLTGLKIIDAICNGETNPEKLAELRNGNCKKSEQEMAKALETNGRKDYLFGLKQEYKMYKNLQIQIKECDVEIEKILQEQIDNDHNKKQHYTDPKIHKRINKNTPKNIDLNLMGYQYFEGVDLLKIEGFSHQTLLTLMSEVGLDGIKKFSTAKQFASWLRLTPNNKISGGKVLSSRIPKGSNRLKIALRNAANAIGNLKESTPLRDFFHRINFRKGRVSAISATARKLGVIIWNMVVKNIPYHNPKEYLYLDEKRKLAVQKRLQKQVENYQFSADDFNFLTN

SEQ ID NO: 254207 - protein, 450 aa, unidentified
MSPLALDVVTKTGKTPVLGRMLSKYVGRKTSSVENDITKARNHSRQRGNIMRVVFGIDVSKASSEVAILVNGEKIHGYTIPNDAIGFNRLLGDLRTVYQPEIVFEATGVYSRRLQAFFEDNSYAYIRLNPLESKKQLNSLRVRKTDKIDAEKLATSQFILNRKPSYVQEALYQELRNLSRFYQNLTEDIVCSKNRLHKVLQVTFPELANILSSPTGKQYWNLVMASPCNSFVLELDDAALRAIIRQSTSKRISEKRVTYLVDKLTKLANHSYCAVKKTFPMMEEVKYYAGELLRLSEYRQSVLEEMITLAQPLPEYEILLSIPGIAETTATSIIGELGDIRRFHSANQINAFIGIDLRHYESGDFLAKEHITKRGDPYARKILFKCIHNIASASHTNPCHIADFYEKRKRQSQVTSTKPHTIASIHRLIRTKYYLITHNKLYDYTSTQNH

SEQ ID NO: 254208 - protein, 356 aa, unidentified
MNYVGVDYHKKYSVVTCLDEEGREVDTRRLDNRPEEFQEFFHELGGPCRVVLEASRTWGVMFDLLEELGEVESVKLAHPLKVRAIAEAKIKTDKIDAHTLAQLLRADLIPAAYIPGKETRGHKEMVRQRVFLIRTRTRLKNRIHVLLDRLHIPLPAVTDLFGKRGTDYLKKLEVAGVDGEILREDLKLLDALNELIKEAEGEIRKLLGEDRRVEWLLTIPGVGPILAVVIALEIDEIERFLNPGKLAAYAGLVPSTYSSGGKTFHGKLLPMCNKWLRWALLEAAWLAIRQSPYCRAYYDARKRHKGSHTGAVALARRLSEIIWHVWKEQRPYEERPLPRPHRLLKTWTAPAALTAT

SEQ ID NO: 254209 - protein, 465 aa, unidentified
MNRPFFYPYDKYRIFYHPKQRFLKPVAITLRRFFTCEHIIKTPKTVVNTGFSYFISPKFYTFPNIWIVFTYFIFHNDIKELSISCVKLKAKTLIIKLNTMQETLTQIKTADKLFIGMDLHKNTSTLCVKNEAGAEILSQRILTDKNAMKKFIGDIKEKSTELSLVMEPVSQWYYYADLIENLGVDVHLAHPMRVKAIAAARIKTDKIDAGVLADLLRTNLLPEAYFSSVDVRGWKEQCRFRASLLNLRTQVKNKIHAILFKHALRHTFSNLFGKGGMAWMGSLKLKEPFKTNLDKYLLLVDQFTELVLQAEQMIQSTVTHNPQANLLISIPGISFCSALTIMAEIGDINRFNSAKKLQGYAGLVPSTYASGEKQVHGRITKQGSKWLRWIMIEAAYHQERCKKIPGFGSYYLSIKKRRGTKTAAVATARKLLAVVWRLLKDNRPYEVTAPHCWKSGTLAPKLSSI

SEQ ID NO: 254210 - protein, 470 aa, unidentified
MSQTSTKASTKRSKRKTARNAAFERCHPNAAGIDIGAREHWVAVPADRDPDPVRSFSALTHSLHELADWLAACRIDTVAMEATGVYWVALYEILEERGIDVYLVNARHVHNVRGRKSDVIDCQWLQQLHSFGLLHRSFRPTAPIVELRTYVRQREMLVQTAGDYVRRMQKALELMNIHLHKVISDITGDTGMAILRALVGGTYDPEDLSKHRHYRCRASRAQIADALRGNYRPEHMFALRQGLALYDAHIEQLRICDDQIHQTLDALAAASERPPQPPPKPRKLQRPKGKQPTFEIRDPLVRITGVDLTQLHAIAPLTAMNIIAEIGTDMTRWPSAKHFASWLNLAPGTRITGGKRLSGRRPPTTNRVANLLRLAAVTVGRTNTAIGGFYRRMAGRLDAAKAVVATAHKLARIIYTLLRNGGSFEDPGVEAYEQRYRSRMMHNLERRARALGLELVPATSPLTDATGAVT

SEQ ID NO: 254211 - protein, 351 aa, unidentified
MERFIGLDVHAASTTCAVIDARGKRVRVDVVETNGQALIEFLKLQPGTLRLCLEEGTQATWLAEILTPHVAQLAVVHVSQSRGPKDDERDALALAEQMRNGKLETTVYKHVGPFGALRNLVKTHAMVVRDVVRTQNRIRALFRSRGVPVAGKAVYGTKEREAWVAKLPANAQGAGRLLYAQYDAVNEVREEAEKKMVEESHRHPITRVLETCPGVGPIRAAQIVSVVVTPDRFRKRQQFWSYCGLGLVMRSSSDWVKSEKGSWERATVNKTRGLNFNHNHLLKQVFKGAATTIVTQLSEHPLHADYQRMLDGGTKPNLAKVTLARKVASIVLAMWKHQEVYDTVKYNKPSS

SEQ ID NO: 254212 - protein, 345 aa, unidentified
MLYLGLDVHGKWTTVRGFDPATGEIVRIDRMSNEREAIRENLGGLDGPLQGVMEAGTNSWAMYREFLPFFERLVVADPAKLWDRKTDRGAKTDRRDALAMAEKLYRGEIHPIYIPDERTQDLRVLVRGKIRASRWVTRLTNEIGSLLKSWGYVGERSLLCKAGKAILDEAETPSRSARVLQLWREMLEKAQEIESELQAAIEEEAAEDADCEILQSIPSVGAFTALLVRAEIGDVRRFAKAESLASYAGLSPRTFQSGDCCYYGRLGHWGNRWLRYGLGLLAQRVARGRKDNSLHRLYWRVCLRSHRNSAKIAVARKAAEIVYHLLRNGELWEDSVREERAAVRV

SEQ ID NO: 254213 - protein, 338 aa, unidentified
MNKITTVGLDLAKTIFHVIGLNERGKEVKRKKLKRSQVLAFFANLPPCLVGMEACASGHYWARQLRALGPEVKLIPAQHVKAFLRGNKNDYNDALAIAEAVSRPQMRFVEIKTEAQQDIQALHRLRERRLQERTALCNQLRGLLAEYGLVLPRGIHVLRRTLPELLEDGENGLSDLFRRLLAQSYQQLQQLDAHIETYSEELKRYSQHSDACQRLQTIPGFGPVVASAFSGHVANGESYRRGRDVAASIGLVPRQHSSGGKEVLLGISKRGDRYLRCLLIQGARAVVLRANKHDDPLSRWINRLVDRRGKNRAIVALANKMARIGWAVLRYKTVYRTA

SEQ ID NO: 254214 - protein, 372 aa, unidentified
MNNTTVYVGMDVHKESFTLCAYTLEKEKGSYSRRTPADYKEVLKYLEFLRTVYGNDTIFVCGYEAGCLGYTLYHQLTDHHVDCVILAPTTMLEQRGKKRIKTDKRDAEIIGKCLAQHNYSPVHVPTASDEEVKEFLRMRDDHKLALKKVKQQILAFCLRHNYRFDGNSHWTAAHINWLKSLTPEALYKEILDEYLLTYMTLSDKLERLDKRIEELAAKSEYKEAVKKLCCFIGVKTHTALSVIVEVGDFKRFASAEKFASYIGLVPGEDSSGDGQTRLGITKAGNRHVRMLLTEASQCYSRGQIGYKSKALKERQAGNTPHVIAYADKANERLKRRYYKMVLGKCKKHNVAKTAIARELACFMWGMMTDNIA

SEQ ID NO: 254215 - protein, 368 aa, unidentified
MSHSSIALFVGIDAHQNSLSLAVLPQGAEGCEPVRKILSDPRSIRRQFSRLLEKGPVKAVYEAGCLGFHLQRLLRSLGVDCEVAAPSLIPTRPGDRRKTDRLDARRLARYLRSGELSFVVPPTPEHEALRTLTRTREAFQRDLVRVRHRITKFLLTRGQHFQEGRNWTQKYMRWVKALELPVADDRLTLDFLLSQIELREQSVAELDRRIERRAEQPDCAEAIATLRAFRGFDTVAAAAVHAELGDVRRFPSGSKLAGYTGLDDVERSSAGKGGRLGISRGGNKRLRRLLVEAAQHYRRSRMVAGKRLRKRREQCPAKAVVIAHKAERRLGTKYARLAATKHTNVAKTAVARELAGFLWAALHPDLQH

SEQ ID NO: 254216 - protein, 411 aa, unidentified
MQVIYERCCGLDVHKRTITACRLRWLGSEWQKEIRQFGTMTKDLLALSDWLVKEGCTQVAMESTGVYWKPVYNILEGQVELLVVNAQHLKAVPGRKTDVRDAEWIAELLAHGLLRGSFVPPPSVRELRELTRYRSSVVRDRARTVNRLQKVLEAANIKLANVVSDIDGVSARLMLEGLVARQRDTQQLASLAKGRLKEKHGQLVEALSCRLQPHQSFLIAEHLAQIDYLEGAIERLSGQIEEKLRPFEQQIGWLDTIPGINRRTAEVLWAETGGDMGRFASARHLASWAGMCPGNNESAGKRRSGRTRKGSPWLRHCLVEAAHGAAHTKNKYLRSQYHRIAARRGKKKALLAVGHSILVIAYHLLTRKQAYADLGANYFDERDRQAVTKRCVNRLQKLGYEISLEKLQMAA

SEQ ID NO: 254217 - protein, 344 aa, unidentified
MTIVEDRPAITGGVDTHSEVHVAAALDPVGGLLGTREFPATAAGYASLLGWLGKFGDVALVGVEGTGSYGAGLARYLAARGVRVVEVDRADRQDRHRKGKSDPLDAVSAARAAQSGRASGEPKGRDGAVEAIRALMVAKRSARNERTQAINQARALILTGPDELRARFARKRAAALAEAIAALRPRPGDAAGYAVRTALRELGRRVEFLDAQIERLDDLIVPLVAVRAAGLLSLYGIGPDTAAMLLIAAGDHPGRLRSEAAWAHMCAVAPIPASSGKTRRHRLNRGGNREASHALWRIVITRMSAHPATRAYVKRRTAEGLSKKDIIRCLKRYVAREVYPYLRG

SEQ ID NO: 254218 - protein, 340 aa, unidentified
MIIGCDFHPRFQQIACLDTETGELVERRLMHPAEAESFYRSLAGRLVRVGIEATGNFAWFRRLLNELGHELFLGDAAAIRASNPRKQKTDKRDARHILTLLVEDRFPAVWQPTEQNVDLRQLLLHRSSLVRMRTCVENQLDSLGKNEGLVASRRWTGRRRREIEELALEGWYAERRRDLLVLLDGLEERIGPLEQAVHAAAEADSQARLLMTHPGVGPVVSLAFVLTIGDWRRFPRGKQVASYLGLIPAEESSGDKRRLGHITKQGNPMLRWLLVQAATIAQKYDAHWRRQYVRLSLAKHHGVAKLAIAHKLAVRLYWMLRSGQDYRQVMERGSRAGQPV

SEQ ID NO: 254219 - protein, 420 aa, unidentified
MRNAGIHANLLLEVRRMYNAVGIDVSKGKSTVAVLQPGGTVIRKPFDVSHTSQNLNELADYLSSLDGTTKIVMECTGRYHEPMVKALSEAGLFISIVNPHLIKNFGNNSLRKVKSDPADARKIARYTLDNWTELRQYSGMDNTRTQLKTLNSQFSFFMKQKVAAKANLIALLDNTYPGVNKLFDSPTREDGSEKWVDYAYSFWHADCVRKIGLKAFTERYMSFCKKHHYIFQQDKPEKLFNASKELVAVFPKEKTYKLLIQQSIQQLNLASEHVERLRREMNELASTLPEYSTVMGIYGVGKTYGPQLIAEIGDVSRFTHREALTAFAGVDPGVDESGQHKSKSNRASKVGSARLRKTLFQIMTTLLQNAPEADPVYRFLDKKRSQGKPYYVYMTAGANKFLRIYYGKVKECLRNLEQTE

SEQ ID NO: 254220 - protein, 342 aa, unidentified
MQITTIGLDIAKNVFQVHGIDAAEKVVVRKQLRRNQVLEFFKALPPCLVGMEACATAHYWARELTKLGHKVRLMPARDVKAYVKRNKNDAADAEAICEAVRRPTMRFVQVKSAEQQSQLMLHRTRDLLMRQRTQVINALRAHLAELGIMAPQGYAGLRQLLAIIAGSADERLPAEAHASLIVLAAELQAMQTLITSIEKRIIAHHRSDERSKRLRSIPGIGLVGATAIAATVTDPKAFRSGRDMAAWIGLVPRQDSTGGKQKLGPISKQGDRYLRRILVVGAHSVLKLAKQKPEKYPWLTQLLARKPFKVVAVALANKMARIAWALLVKGGRYQARALVAAV

SEQ ID NO: 254221 - protein, 343 aa, unidentified
MLTITTIGLDIAKSVFQVHGVDAGGQAIIRRQLKRRSVLTFFQKLSPCLVGIEACASAHHWSRELQALGHTVRLMPPAYVKPYVKRQKNDATDAEAICEAVTRANMRFVPTKTPEQQSGLVLHRTRHLFIRQQTSVINAIRAHLAEFGIVAPVGRRGVEELLNVVADPNDRRVPEIARACLSALGDQLQRIKQQILEFDRLIRAWHRSNEVSMRLDEAPGVGPVLATAVVSTVADPKSFRSGRNFSAWIGIVPKQHSSGGKNRLGNISKQGDRYLRGLFVAGALSVIRYAKIHGTKHRPWLTALLARRPTKVAAIALANKIARMVWAMMARGERYKEPVTLAR

SEQ ID NO: 254222 - protein, 338 aa, unidentified
MAAYAGIDLHSNNIFLGVIDQDLKRLFNKRLPNKLDIIEKALRPYKKALAGVAVESTFNWYWLVDGLQHAGYKMHLANPAAIKQYEGIKHRDDKSDAFWLAQMLRLGILPEGYIYPKDQRPTRDLLRRRLLYVQQRTAHILSLQSMASRSTGKTLSTREIKKIKPDEAHTLFDQEHLKLACRHALATIQFLSAQVKAIEKEVMKFAKLKPEFTSLLTMPGIGNILGMTIMLEVGDIRRFKRAGNYASYCRCVKSEKLSNQKKKGSGNRKNGNKYLSWAYVEAANFAIRFQPKARRFYDRKASRTNNTVARKALANKMARASYYIMRDQEAYDESKMFP

SEQ ID NO: 254223 - protein, 316 aa, unidentified
MSGTLYVGIDVAKDSFDVASNPAGLKLSLPNDPTGRQHLLDALQNHPVALIVLEATGGYERSLVADLLGAGHKVVVANPRQVRDFARGIGQLAKTDRIDAHVLARFASMVKPQPRQKPSEQAVNLAELVTRRRQLTDLMTQESNRLPMARHAKVRKSLQKVIRLFEQQISDLDKLIRDNIDSDDGLRRTDEIVQSFKGVGPGTSAMLLSHLPELGRLNRQQIAALAGLAPWDFKSGKWAGKSRIWGGRMPVRNMLYMAALSAIRSNEIIRKFYQRLESQGKKFKVAITACMRKILVILNTLVRNDCLWSPPLPKNA

SEQ ID NO: 254224 - protein, 332 aa, unidentified
MNLIHIGIDISKKTLDLSIYGRERRDSGFLHVTNDKKGFSKILSWVKGLKIQLSQVWFCMEHTGEYGYALALFFDEHGITYSMVSGADIKGANPSKKGKNDKQDAAMIARYAHEKRDSLAPSHLNIRPLYELRCLLNERRMYVRQRAQWKAQRSERRLFSTKHRDSRVNRAIKTLSATIREIEEEIRSVIAVNEDIRRNFELIMSIPGIGLINAVNFIVATANFSNFNNARRYASHICVAPFAVVSGTSINKGTHTSKIGRHDLKTELRTTVLAVLKADSEMRKYFDRRKADGKKYNVIANNIMFKLICRVFAVVRRGTGFVETHKYLQKKE

SEQ ID NO: 254225 - protein, 387 aa, unidentified
MTNPAQVFEIIPRHYDIFGGLDVAKKNMAVTFTDHEALMRSLRLPYSSAHLLHYVRKHFPDQRVAFVYEAGPTGFGLRDELVSAGYRCLVVAPSMVPTAPGDKVKTNRLDSRKLSVQLRGGELRSIHVPAPRYRELRHLVQLRDTQVGQLRATKCRIKSLLLCEGLAFPPAPESSQWSARVLSELLELPCSPAVRFELDQLIGTLHFHFNSAAAAQKQIRYFCQNDPELRQSIRLLTSLPGIGVIVATHLVARLGDWREISNGRQIAAFLGIVSSEHSTGEKANRGRITRAGDSRLRNKLIQSAWTAIRKDAELRAFYLRIYHRHPKKIAARKAIVAVARKLTTRIYAVLKEQRPYVLRPENLPAPLTAEETVGPRGRLVGPQNEQP

SEQ ID NO: 254226 - protein, 406 aa, unidentified
MAVMIGVDPHKGSHMAVALDDSEQPLGERRVRADTNQLERLLEWAAPFVQRTWAIEGAGGLGYLLAQQLVAAGERVVDVPAKLAARVRLLATGDTNKNDPNDARSVAVAALRSPQLRAVQAEDHAAVMKVWAKRHRDLARQRSRVVCRLHAVLCDLVPGGIAGEISAAQAIRLLENVEPVGAIAAARHELALELVADVSRLDAQLRETKKRIAVAVTASKTTVTTLFGVGPIVAATVIGDVGDVSRFPSRDHFAAYNGTAPIEVSSGGRRKVFRLSRRGNRRLNHVIHMAAVTQIRHRHSEGRVYYDRKIAEGLSGKAAIRALKRRISDAIYVRLRQDALQTTPRVTTGPGGHPGNDAVASAAGSHPEHRLFGQATPGPDLTLRPASNRTRPPRPNAPSPKVREAS

SEQ ID NO: 254227 - protein, 413 aa, unidentified
MEQIHERVAGLDVHRDSVVACFRRLGPKGGVVREKERFTTTTAGLRVLGAWLGDRQVQLAAIEATGVYWKPVLYSLEDRFTVWLCNARHVKKVPGRKTDLTDAEWLADVAAHGMVRPSFVPPRPIRELRELTRYRKTQIDVRVAEIQHLEKVLQDAGIKLTSVASKVLTQSGRSMIEALADGEQDPTRLAGLAKGKLRPKIPALTEALTGHFGAHHAVACRRILAHLDFLHDTIGALTEQIDARTAAFEAVYRALLAVPGFDRLTIDVIIAETGADMTRFPTAADLASWTGVCPGSYESAGKRRNVSTTGGNPWLRRALIEAARAAARTKGSYFGAQYRQIARRRGPNKAAVAVAHSLIELVWHLLSTGEVFNDLGDDYFVRRRDPDREARRLVSQLENLGFTVSLQAATATA

SEQ ID NO: 254228 - protein, 381 aa, unidentified
MTATARQKESTGDNAVLYMALELGWSQWKLGFVREAGQKPRQRTIPARDLAALQGEIGRAKARFGLCDSSRVVSCYEAGRDGFWLHRYLESLGVSNRVVDSASIEMNRRARQAKSDSVDVQKLLSLLVRSETGEGVRWSVVRVPSVQEEDSRQLSRELETLKKERTAHRNRMRGLLASQGVDLKIRRDFREKLQGAKLWDGSSLSEGLRSRLEREWERQELLEKQIAELEKQRRERVSQAQEPVGQVAQRLCLLKSIGLNSAWLFSGEFFAWRQFRNRRQVGSLSGLAPTPYQSGDRLHREQGISRAGNERVRSMAIEIAWAWLRFQPRSQLSLWFQERFGAGGSRSRRIGIVALARKLLVALWRYLETGEIPDGAELKSL

SEQ ID NO: 254229 - protein, 359 aa, unidentified
MDATTVAVDLAKNVFELVAADQHWKVVERARLTRTQFQRWFGNRDVSLVVMEACGSAHHWARVLQQQGIQVRLLPPRYVRAYVKRNKTDAADAAALLEAVRCADIVPVRIKSVEQQALQSLHRVRSAWVATRTARINTLRGLCREFGILISAGARLGVEQISRVLVDPHSNVPAMLRETLKLLVEEIRLLEVRIAQLERELSEAAKLSPACCTLLTVPGVGLLTATALVASTGGSVQHFKDARHFASWFGLTPKEHSSGSSRYLGRISKRGDRYLRTLLTHGARAVLRAASLAQRRGAGLDPLRRWGLLLQSRSNYNKATCGLANKLARICYASLRDQQPYQSLRLAKKLERQTFPMPA

SEQ ID NO: 254230 - protein, 400 aa, unidentified
MLSIGIDVSKGKSTVCGMKPGGEIVYAPFEVQHTRKGMSELVSLLRSSGEEVRAVLESTGSYHCPVVAALLENGIFVSVVNSLRMKRFCSQSIRKVKTDRIDAMQIALYGLAYWQELQPARLPEDTYRELQLLARQYYQMTSMLIKAKVDFNAICDQVLPGMQELMNDHAGRHKLSDFVLRYRHTTHILEMGETRFRKDYCKWAEKKGYRNCERMAALIFATAQNGIPVLPNAPSTQIVITEAIRVLHTVEASRDAILTQMQALAKTLPEYSLVREMPCIGDTLAPRLIAEIGDVRRFHSKRALIAYAGIDAPPYQSGKFCANNRHISKRGNRYLRKTGYEVMQSYVMHKPANDPIFTFIEKKRGEGKSGKLAMVAGLNKFLRVYYGKVTELYRSLPAIE

SEQ ID NO: 254231 - protein, 415 aa, unidentified
MALKIVYKICCGIDVHKTFVVACIASTDNKGITSYESHRFSTYTSGLKDLLQWLLTRNCKDVCMESTGKYWIPVYNILESDCSIVLAHPKYVKAIRGKKTDKKDAKWIADLFKHDLVAGSFMPPADIRQLRDLMRYRFKLTCFKSSEKNRLQNCLTVSNIQLGNVVSDTFGKSAQAILDKLLENPADTSFDLEPLVFRSLKKKLPELRDAIDGYITPEQAGKLKIIKAHYENLESRKAELEKLILALAAPYQQELTILQTAPGISSEFTAIGIISEIGTNMEAFPSAKHLCSWAGLTPTNNESAGKKKSVRVSKAGCYIKPLLVQCANAVVTSKKHPEMRNRYLRLRKRRGHKKAIIAIARMLLTVLYHMLKNGENYNAELYQKSDLPPVDREITVEQALIITRNQGYKIKSATI

SEQ ID NO: 254232 - protein, 360 aa, unidentified
MRGQVNKLDFNGQNIYVGIDVHLKSWSVTVLSESSVLKKFRQDPRPEALHKFLVTNYPGASYYSVYEAGFSGFWTHNRLSELGINNIVVNPADVPTMLKEKLRKTDAVDCGKLARGLRAGDLQGIYIPRAEILEIRSLIRLRNSIVKDTTREKNRIKSLLRFHGIEIPDQFTRHSIGNWSKRFLQWLGEVDMSTEYGRKTLDLHIEQFVRLRQMLLQETRVIRQLSRSEPFAEPLRLLMTVPGIGITTGITLLTEIDNASRFKSAEQLAAYIGLIPMCHSSGEKEGIGDITVRKHAILRCYLVEAAWIAIRKDPAMTMAYEEYKKRMNGNKAIVKIARKLVNRIFFVLKRKTEYVPGVVE

SEQ ID NO: 254233 - protein, 373 aa, unidentified
MKNHITIGMDLGDLENYIVVMDAEGTEIEVTSIANTKERVREYFSKFPGAVVAIEAGTHSCWISREIKEAGCDVLVGNPRKLRLIWDSTDKDDENDARLLCMICRLEPRLLWPIRHREPEGQRDLQIVKSRQIMVETRTKLINHVRGAVKAVGERLPGCSTDAFAKRVVEDIPDELRVALDGVLKIIETLTEQIRRQDRLIAHLCREQYPETEFLSQVNGVGPVTSLAYVLTIGDPERFPKSRYVGSYLGLTPKRDQSGQTDKQLRITKAGDTYLRTLLVNCSNYILGPFGPDSDLRRHGLKIAARGGENAKRRAKVAVARKLAVLLHRLWMNKEPYERLHKSMNKQNHKNKAQMPGGMNLSKPDAAVAMAAG

SEQ ID NO: 254234 - protein, 342 aa, unidentified
MKIVMLGIDLGKNLCSLAGLDETGAIVLRRRLKRESLLRFTVRLEVCTVAMEACCGAHHLGRQIAAQGHGVRLMSPGYVRPYVKAQKNDERDAEAIAEAATRPTMRFVELKSEAQLEVQSLHRVRGRLVAERTALINQLRALMLERGITAPQGRRKLGGLLPEILADESNGLGSRLRRLIEDMRSEWRGLDERIMAFDDELAVRARADEAARRLVTIPGVGVLTATALVAAVGDARAFPCGRDLAAWLGLAPRQATTGGKPKLLGISKRGNRYLRMLLIHGARTALPSLARSDTPLGRWLKGLLVRTHRNVATVALANKLARIAWAVLAHDRRYVALQTVAG

SEQ ID NO: 254235 - protein, 497 aa, unidentified
MKNKVSIYGNCNPQLAKIFETAGHPAKVMCVALDYAKEKHTALMCEGRGQVLQKSFPVENSAEGARTLLDLVGQCAKRHHIEPEHVFFGGEDCPSYAENFVRRLRQHKYLVVGVNAWEAKQQRSNFAASNDSLDLLGVAKCCLNQRGQTVEDWPEEYANLRIATRNRHRLVCQRTAISNGIHVYVDRLVPGFLDSTKSGISPFCQASLDLMAERFTPGQLRRRSGKTLAQWLRQRGLEQPQEAAAQLKALAKEALEPAPEQAALLQQSLAQLVQLHRGLTTSIGLMDKEVAFWLARTPGAVLTSIDGIGVTLAGLWTAELGPVSQWRPVRCLCSYTGVVPRSKQTGGPDKEPVVGSTHRRCNTRLKNAVLQAVQKVRQYGPADLVQTAQQLEAQGSHVEFAMAKRLLRLGKWLALNQTVYRPKALMDPDTPQAALASHYQGLWTKLVEKWKDKADLKDVFSPQHALGKWRKMAQELYALELRLPQVRTAQKSGASTP

SEQ ID NO: 254236 - protein, 415 aa, unidentified
MKKHSNSPKKSESRSKRAKLRGPVQQDTKEVLAELVGKLREKLDPKVGAASAGEEHQQGRPRPNLDRLTVGVDLGDQWSQYCILGLEGETLAEGQLRTTKQDVSEFFEALNAARVVLEVGTHSAWIREVIHSYGHEVLVANPRLMEGSKRRKRKNDRIDANKLARLGRVDPQSLHPMQHRSAEVRQDLVMLRARDALVAARTELINATRGLVKSMGTRLPKCSSPSFAQKVEEAVPAEIREALLPLVRMTAELSDCIKGYDEKIEKLASEKYGHTALLRQVKGVGPITALAYVLTLESPERFVKSRDVGPYLGLVPKQEDSGESQPQLGISKAGDTMVRRLLVGSAQYILGPFGPDTDLRRYGLRLCERGGKNAKKRAAIAVARKLAVLLHRLWASGEVYEPLRPALSTPITAAA

SEQ ID NO: 254237 - protein, 424 aa, unidentified
MNLTQNDRLKQVTADTLIVGVDIGSKTHFCRAFDWRGFELSRKVFRFSNTGVGFLTFLRWTEEVMNKTGMKNVIVGCEPTGCYWLTFQKFLQDHEVQLVTVNPFTVNRSKELDDNSPEKSDLKDPKTIALLVKDGRYSTSYLPRGVYAEIREASVCRDQIMKQHVRLSNQIQGWLQKFFPEYLECYADWDSTSGLLLLKEAPLPQDILKSGAGGINQIWRNAKVRAAGIKRAQTLIEAAQDSVGLEAGEAARLEIWVLVNDYLLKAEQLKRLDEYLEEKVKEVPNVEKLLAIKGVGMSTVIGFVAEVGDIGRFTDPKQIQKLAGLEIVKKSSGKKKGQPRISKRGRRKLRRTMYESARALMNWNPAFQDVFLYYRNRKKNPLGGMQAKIAVACKAIRIFYVVLQTGCDFDEEKFRKDIIRQEAA

SEQ ID NO: 254238 - protein, 350 aa, unidentified
MTEAYDGRQVVGMDLHRRRSVLVRMTEDGRRLETARITNSAAELRRQIAKAGQHPKVVLEATYGWYWAADELAAAGAEVHLAHPLGVKAFSYRRVKNDEKDAGDLADLLRMGRLPEAWIAPPEVRELRELTRYRIKLVRLRSSGKAQVHAVLAKLGIPVTCSDLFGAWGSAWLDGLALPQPYAGKVASLRELIGWLTTEIGLLDAVIADLLGSYRPYYAVRALPGLGPVLAAVAVAEIGDISRFPSPGRLCSWAGLTPRHRESDLKVARGHLTKQGSPILRWAMVEAVQHQPDGSPPRELKDRIVARRGAQARNIAKAAAARKLLTCVFYALRDGQVRSLSARSRADEAG

SEQ ID NO: 254239 - protein, 338 aa, unidentified
MNYHNLIAIDLAKNVFQVCTMSTNNHVLMNKSFNRQGLTEFMLNQPTSVVAMEACYSSHYWARLFKSFGHQVKLLPAQHVKPFVRGNKNDHNDALAIAEASQRPGIKAVPIKTVAQQDIQSLHRLRERCVRQRTSLSNQTRGLLSEYGIVFPAGFKSFKQTLAVLIDPSNTQLTEPLKQQLRYVADEFDRMSARLTELNQVLAQIAQTNPHCQRLMSIPGIGYINATALYSAIGNGGQFNNARELSVWLGITPKQYASGNKQVMAGITKRGNRYLRKQLIHGARALMRYCKKRDDQLSQWLQAVEQRRGKNKACVALANKMARLCWILLQTNQMYRSR

SEQ ID NO: 254240 - protein, 352 aa, unidentified
MNVIHYIGFDVHKKSVSYCVKDAAGKILEEGKLRATRPALRQWAGDRTEPWHGAMEATLFSGWIYDTLKPFATELQMGHPAMMKAIGASKKKNDKIDARQTADLVRCNLLPACYVAPTEIRELRRMLRYRNVVVAQAVRMKNKMSGLLMEVGAEYNKQRLHGKKYFTELLGSLEEVPESVKDLLRLSRGALELFETTQKRILDRLQKEPRLVRRLEGLQSIRGVGVVTALSWTLEICDPHRFPSIADAVSYCGLTSALVSSADKQQRGPLSQQRNAHLQTVLIEAAKLAPRWNSQLAAVHEREMNRGNRNRATLAVARKLVAYLLAVDKSGKPFQVQTPPAPATETEVPAVA

SEQ ID NO: 254241 - protein, 439 aa, unidentified
MVLSAVCVATQREKSTGRRAGLLLCRCYGASGEGMAPSALFNGYRWSSPMSQHSHFDASRSLTALEQDNTIIAVIEMSQSKWLVAALVPGVERQPLKKLDAQEEALLKLLHRWRNEAGQAGREIKRIVVAYEAGRDGFWLARWLRARDVEAYVIHPTSIAVSREHRRAKTDRLDTELLMRAVLGWLRGEMRHCSMVAIPTIEEEDARRPNRERQNLVTEQTRIVNQMKAIFARFGIRSFRPTLRKAEEKLKGLRTAEGTPLPESTHAELRRHLARLCVVREQIRAVEQERLRKLAAAPVAQNGSHAMVRLIARVIGVGIETADMLVNEVLSRHWRDRKAVARYAGLTGSPDESGRRRRERGLARAGNARVRCGMIQFAWRFLRFQKDSALAQWFAARTADRRASTRKTMIVALARKLLIALWRLVTTGQVSDGMVLRAA

SEQ ID NO: 254242 - protein, 357 aa, unidentified
MAEGSWVGLDVHARSTVAGVLDGRSGELRTLRVPPRSGQTVEWLRGLPQPVRVAYEAGPTGYGLARACAEAGIACTVAAPSKIPRAPGDRVKTDRRDAERLARLLRLGELVAVRVPEPRVEAARDLVRAREDARGDLMRARHRISKLLLRHGIVYDASAWTLAHDAWLRRQRFPSRPLALAFDECYGAVLQAKTRRDALDAAIGEIAGEPPFAEVVGRLVCLRGVSTLTALALTVELGDWQRFRPQSLGPFLGLTPSEDSTGERRRLGAITKTGNSHARRLLVEAAWHQRRPLRASAALERRRQGQPAAVRSQADQSARRLHQRWHALERRGKRRTIVAVAVARELAGHCWALATMK

SEQ ID NO: 254243 - protein, 423 aa, unidentified
MEVMYRRVAGLDVHKETVVGCVRAMVGRKTTRECRTFATTTEGLLALLGWLTESQCRHIAMEATGVYWKPVWNILSDGDFSLILANAAHIKQVPGRKTDMNDAMWIADLLACGLIKASFVPAADIQELRGLMRTRKQFVREQTRQVQRLEKTLEEANIKLGAVISDLIGVSGRRMIEAMIAGECDPQRLASLAERNLKASPQALHDALHGRLREHHRFLLKLHLQQWDALDRAIRQIDRQVAWQIERSDVAAVDDQPAFCQLILRLSAIPGVSRLSAIAILAEIGRDMSRFPTAAHLVAWAGLCPAQNESAGKRKSSRLRKGAPWLKTMLVQCAWAAKRAKDSYYMAQFHRLPSRRGPQKAICAVAASILTAVYHMLKSGLPHRDLGADYFDRRSPQAQAKRLVSQLARLGFKAQLQPLPAAA

SEQ ID NO: 254244 - protein, 311 aa, unidentified
MTKQVVGIDVGKAKLDVGVNDEKRVRQWRNDETGRAELSEWVLKQDASLVVGEASGGYEAALVSELVGRGQAVALVNPTRVRAFARAEGILAKTDKIDARVIARFGATSKPQARARREEAPVELNEQVTRRRQLVLMLTAEKNRLQTASPAMQAHLTSHIVWLQTEIEALEQQISQAIKANSEWAETAKRVESVPGIGFITAATLVADLPELGRLNRQKIAALVGVAPFNHDSGKQRGKRRIFGGRTSVRAVLYMATLSAIRHNPVIRGCYQRLLDKGKLKKVALTACMRKLLVILNTLIKSGQDWNPTIS

SEQ ID NO: 254245 - protein, 341 aa, unidentified
MSNANTYIGVDLHKKTCYVTVMNQEGKIKKQTEISTDTDKVSKFFKKYHDSKVAVESTLNWIPFYENLESIGCNVVLSNPLQTKAIAAARIKNDKVDSRILADLLRTNLLPTAYIQPRDIRDLKELVRQRMSFVQMRTQIKNRIHSVLFKNNLKHDFTNLYGKAGMEWLKNLMLRDIYRQELDWSLAALDKLDQLIDEISQKIMDTAKDDFDCQLLMTIPGISYFTALVIKSEIGDISRFPNAKKLCSYAGLIPSTYASAEKVRHGRITKRGSKWLRKALIDSVTSGSRHPSRLCFTYRHLKKNKGTGKAKVATARKLCGIIFAMLTDKQPFRQFTPVKQR

SEQ ID NO: 254246 - protein, 348 aa, unidentified
MPQNPSRSMAVIGIDIGKNSFHIVGLDARGAIILRQKWSRGQVEARFANMPPCLIGMEACVGAHHLSRKLKAFGHDARLMPAKYVRPYSKGQKNDFRDAEAIAEAVQRPTMKFVATKTADQLDLQALHRVRERLVSQRTGIINQIRAFLLERGVAVRQGLRFLRAELPRLLATPLDVLSPRMVRVIEGLAEDWRRLDERVDHLSGEITALARQDVGCERLMSVPGIGPIISSAMVAAIGTGDAFSKGRDFAAWLGLVPKQISTGDRTILGKISKRGNRYLRVLFVQAAWVVLIKPKSWERHGLKHWIEAATKRLHRNVLAIALANKLARIAWSVLANGRVFEARLQAA

SEQ ID NO: 254247 - protein, 324 aa, unidentified
MNTIGIDVSKEKLDCAWPREEGKLKTKIFSNTITGWKELIEWSLKNTGLEIEQLHFVMEATGIYHEQLATWLYDAGAKVSVVNPAQVKFYAQGLGVRTKNDKKDSVVLARYGLKENPKLWQPEVLEIRTLKALIARSDGIEKDLQREKNRQEKALISKAPEEVLISLIQMIELLETEQQRLDRLIEEHINKHEKLKENKALLESIPGVGKVIATRMLMVIGSRQFESASQCSAYLGLVPVQHESGSSIKGRSRLSKAGNPVIRAKLYMAAVVATRYNPDIKAQYERLTSKGKSKMSALGAAMRKLVQICFGILKHQQPYQPQMG

SEQ ID NO: 254248 - protein, 343 aa, unidentified
MDYFAGLDVSVKETSVCIVDDAGKIVREARVASEPEALLQVLTKTIYRFKRVGLEAGPLSQWLYSVLAEAGLPVICVETRHMRAALKSRINKTDRNDARGMAQMMRVGLYRPVHVKTLRSQKLRVLLTHRKLLQSKAIAIENDLRATLRNFGLKVGMIGTVKFEARIRELVANLPDLAVLVEPLLIVRRAIREQVSVLHRRLLALVRGDDVCRRLMTIPGVGPVVALTFRVTVDVPARFRNSKAVGAVFGLTPAKYQSGENDRTGAISRCGDEMMRMMLYEAAQSMLVRTVKWSWLKAWAMKIARHRGMKKAIVALARRLAVIMHRIWVDGTEFRWTREVAAA

SEQ ID NO: 254249 - protein, 363 aa, unidentified
MTKKRLRGNHLLDFIGADEKTPVWIGLDVHKKSYHVALRRADGVCQSWVSPADPIVLAQQLSAISQRISLIVYEAGPTGYCLERVLKENGYKVAVIAPSRIPRPVTNQAKTDKLDCLKLAEYAAKGMIEAITTPTAQESAERSVLRRRNQLVDSTRKTKQRIKSFLLFHGIEEEYGLRYWNRSARAELSKLPLQSDLKFVLKSLLRQLSYEEEELARITNRLARIAKRSQHWEVVKNLKTVPGVGDIVACAFRTELFRPERFRRAEEVCSFLGLAPAIRQSGEKRQGGWLMRSGQKRLKSLLIEAAWMWRAKDPWARKKYQTHLSRCGITQKAITALARRLAVILWRLSVENRAYVMLQVDSV

SEQ ID NO: 254250 - protein, 352 aa, unidentified
MKNSSRVAGWSVVGVDLGDRSSRICRLEGETGAILEEVRLSMSSTSLQRYFSGLVSSRVVIEVGTHALWVRRLLESLGHEVITANSSKVQAIASSQQKTDERDARWLAQLGRVDPQLLSPVYVRSPEAQQGLAVVRAREGLVKARTMLINQVRGMVKSFGARLLGCSAKSFARKVPQTLPPELKAALEPLLAVIADLSERIRSFDQDVEAWAQRLPVTQRLRQIRGVGALTALTFVLTLDDPHRFAHSRAVGAYLGLVPASRSSGRSAPQLPITKQGDRLLRRLLVQAAHYVLGPFGQESDLRSFGLELARRGGKNGKKRAVVAVARKLAVLLHRLWVSDADYQPHRLPAAA

SEQ ID NO: 254251 - protein, 317 aa, unidentified
MSQKELVIGIDISKSHLDIAFGSQDKKGLRLKYDEDGVAELVRRCKTLRPKLIVLESTGGLEKVLMIALLDAELPVARIQPQRIRYFAKSLGILAKTDALDASVLAKFGEAVQPEPTPLPTTEQQRLASLLARRAQLLEMRTAEQNRLSTMPAVVRTHIQEHIDYLQAEIARIEAEIDDLINNTPDMKSKQAILKSTPGVGQVTASLLIARLPELGRLNRKQIAALVGVAPFNQDSGRKNGKRVVYGGRKDVRNMLYMATLSAIRFNPVIQQFYQRLVDIGKPRKVALVAAMRKLLVILNAMVAANKPWRQAVHTSA

SEQ ID NO: 254252 - protein, 392 aa, unidentified
MYIVGIDIGKNHHEASIVSPEGKQIGRSLRFATTHKGADSLMSFIFKNIGNSPCVFGMEATGHYWYPIYSFLKAKGYTIYVINPIQSDSLRKMYIRQTKNDSIDSFLIAEVIRFGQFGTTSMADENILAMRQLCRYRDSVISSRTEIKLRIGTIMEQIFPEYEKQFSSLWLSTSMGILEKYLTPENIENAPIDELFEIIKDKSHNRLTRAKAISIKEAAADTFGIKIAQDAFSFQLKQLIDRMNFLDKQIEALDCQILEYYEKFDCYLHTIPGIGIIGAATILAEIGDISRFKNSSSLIAFAGIDPTVRQSGEFNSTHNHMSKRGSPYLRHAIFLAATTCSFHNSPLNAYYKKKRDQGKHHLTATGAVARKLTSVIYAVLRDSKPYEPKSFC

SEQ ID NO: 254253 - protein, 353 aa, unidentified
MATARSFTAPLKYVVGIDIAKDTFVACFGRIDPSQYLSFGKETTFANTAAGFAALLVWTAKQQVVAAPQWFVVEATGVYYEELAYFLADNDQVLSVLLPNKVKHFAQSTEQKSKTDQLDARLLCRLGLERALPAWQPPTPALRQLRALSRERQSLTQQAARLKTQRHAYQHSYQPDARTLERLADRIQLLDQQLKAVDQDLAALLEAEPELARKLAHLTSVPGIGLTTAIVVVAETNGFVLMENERQLASYAGLDVVQRQSGLSAGATRISRRGNVRLRTALYLPAVSSLRFNPQQMAFYARLRARQPSGKPGVIAVMRKLLLLCYSLWKNDCAYDPHYHPARCLEKEVAPTS

SEQ ID NO: 254254 - protein, 423 aa, unidentified
MDVMHERVAGLDVHKEMIVACVRIMAGSKATRECRTFDTTTSGLEALLSWLVESGCTQVAMEATGVYWKPVWNILSEGPLELILANAAHIKNVPGRKTDMNDAMWIADLVSCGLIKASFVPEQEIQELRSLLRTRKQLTREQTSHVQRIQKTLEEANIKLDSVITDVMGVSGRRMIEAMITGVRNPFKLAELADRRIKASRKQLYDALHGRLTDHHRFMLRLHVRHYDVLAAAIAEIDQQVDAAIAKMDSEVAADQATFRTLMALLLTIPGIGELAAKTILAEIGTDMSRFPTAGHLLAWAGMCPGQNESAGKRKLSRLRKGSPWLKTLMVQCGWAATRKKDSYYKAQFNRLRGRHGAKKAICAVAASILTAIYHMLKDGTEHQDLGANHFDRRSTEIKAKRLATQIKKLGYEVDIRPLPEAA

SEQ ID NO: 254255 - protein, 427 aa, unidentified
MKKEDSRLEEFRQLRNEIRGSEKHLLVGIDIGKEKQNAFLGTATGKTLYKRLIFENNKEGFEKLLTHTEAAKVQNNLSQVVFGMEPTANYHKPLGEYLITRGHEVVLVSGNAVANNRQLLDGRWDKHDGKDAANVADLISQGKCQYYEYPCREVRDLRVLLSLKRKLKKQAQGLWLRIRNNLVAQYFPEMDRYYGSCAQDNLEIVRNCLSPSVIAGMEYNEFFKTVVSRKKGLRQHKHLYRLWQLAGDSICCEAGDAAICEAEVLVEQLKQTRKAIEQVEKEIEKLCNLFSEYEFLMSIPGFGPDVSAKVLAYIGDQYRFDKASQVVKMAGLDLNANRSGKTTDKAVPVISKKGKADLRYALYQAALIASTRNQHFIKYFTEKIRGREMEKGIKTKMRVKLSAKLLIIAWTLMKNKEPFNPDYLTVA

SEQ ID NO: 254256 - protein, 355 aa, unidentified
MERYIGMDVHAASCTLAVISETGRKLRDFPVETNGQALVEAVRMIPGRKHLVFEEGLQSAWLYETLRPHVEELVVAGITESRGPKSDKRDAYGLAEKLRVGNLDKSVFKAPREFTRLRELSRIHMTLVGDVVRAQSRIKSLYRSRGVLVSGENVYGIRPREAWQQQLPSSAQARATRLYAHLDFLRAQKDEAEADLLREAKKHPIVGILETAPGIGPIRSARLVPIVVTPHRFRTKRQFWSYCGLGIVTRSSVDWIQTSEGSWVKARVPQTRGLSRQHNRFLKYLFKGAATTVVTQRNKDPIHARYERLLDGGTKPTLAKLSLARMIAATVLRMWKDEEEYDPERAGLPSKTREG

SEQ ID NO: 254257 - protein, 356 aa, unidentified
MNSPHYIGFDVHKKTISFCIKTATGEVVEEGVVAAQRRALQQWASARSQPWRGALEATLFSGWIYDTLRPYGEQLEMAHPAKMKAISAGKKKSDAIDARTIADLVRCNLLPACYVAAPRIRELRRLLRYRSLVVSEAVRMKNKMAGLLMETGAIYVKEKLHRKKYFANLLEELEEVPPSVIELLRLSRGALEMFETTQKRLVRELLADPELTQRVERLMTIPAVGEITALTWALEIGDPHRFRSGAEAMSYCGLTAALKSSAGKQQRGPISKQRNRWLQSTLIEAAKLAPRWNPQLAAVHARELERGHRNRATLAVARKLVTYLLAVDKSGHSFQLRGPLIEDRAQQEMPLKIKTS

SEQ ID NO: 254258 - protein, 410 aa, unidentified
MEIVHTRCCGLDVHKKTVVACVLISQADGLIERQVRTFNTMTADLLALADWLSSMHVTQVALESTGVYWRPVYNVLEDDQRTLLLVNPQHMRAVPGKKTDVKDAEWLADLLRHGLLRASFIPPAPIRVVRELTRYRKTLVQSRADEANRLQKSLEGANLKLASVATDVLGMSGRAMFAALIEGERDPEVLAELARGKLRAKLPQLRQALVGRVQPHHLILISQILAHIDFLEEAVAQVQAEIERCLPPFDEALQLVQTIPGIKEIAAAILAEIGTDMSRFPSAGHLSSWAGLCPTNKESAGKRMKGPANHGNVWLRAIMGEVAWASIRTKASYFYAQYHRLARRRGKEKAAFAVAHSLLVVIYHVLRTGQPYKELGVDYFDNLDSARIERHHVRRLEQLGYTVTLTPTAA

SEQ ID NO: 254259 - protein, 350 aa, unidentified
MIIIGCDYHPGFQQIAFVDTETGDYGEQRLAHSEVAEKFYRDLAGQGKKVRVGMEASGHARWFERLMAELNFELWIGDATEIARKRERKQKTDRQDAQHILQLLMENRFPKIWVPSGENRDLRQLLWHRHRMVQARTRIMNQLQAVALNEGLRCKKKLWREKGRQQLEAFRLAPWASRRREDLLQLLDRLNPTISDLTQAIEQEVEKCPEARRLRTHPGVGALTALAFVLIIGRTERFQCGKQIAAYLGLVPLEDSSGNRRRLGHITKQGSSIVRFLLVEAAQVTARSIPEWRSKYFHLAMRRGAKIAKVAMARRLAIALYWMWRKGWDYEQLRKFGSHAGQLGTGDGVK

SEQ ID NO: 254260 - protein, 338 aa, unidentified
MEWTVAIGVDTHKEVHVAVALDALGAELDSREIATTLAGYRCLLSWAQELGVPAFAIEGTGSYGAGLVRFLERAGVSVYECERPRRQERRRGKSDLIDAALAARRLLGGERLSLPRGGGRREDLRLLLLERRSAVQARTAALNQLSALLVTAPDHVRERLGGLSGERLAQAAARLRPRPDVTNGVLRRLGQRVERLSKEVAEAERALAALLAEVAPDLLQECGVGPVCGAQLLVSSGDPSRMTSEASFAALAGTSPVEASSGKQRRHRLNRGGDRQLNWALHVVALQRIRHHAETTAYYQRLLAAGKTTREARRCVKRALARHFYHRLREMPTLLLTT

SEQ ID NO: 254261 - protein, 472 aa, unidentified
MARAARRQGGSQLRKGHSKGARSAQLEQLNLNAAGIDVGADAHWVAVPPDRDERPVQCFGAFTADLYALAEWLRQCQIETVVMESTGVYWIALFEVLEERGFDVKLVEAHYARPVPGRKTDVKAGQWLQELHPSGLLHAAFRPDAQVCVLRSSLRQRGVLVASASRAVQHMQQALEQMNLTLTEVVSDMTGKTGMEILRAILAGERDPQRLALYRARRCKHDQATIAKALEGHCRAEHLFALQQALEQYEFLQQQLQACETQIEACLLTFVTHVEVDSPPPAPARTRRSRQRHAPGFEVQVYLDAMTGVDLTQIDGIDALTALKVISEIGRDMTRWPTGKHFASWLGLCPGNKLSGGKRYRMRSKPTANRAATALRLAAQGLVHSHSALGAYYRRMRTRLGAPKAITATAHKLARLVYSMLRYGTAYVDAGQQAYEQKYRDRVLTNLQRRAKAFGYQLVHVEDRDGGVASTL

SEQ ID NO: 254262 - protein, 343 aa, unidentified
MKVTTIGLDIAKSVFQAHGTDASGKCLLKRKLGRSEVAAFFGKLERCRVVLEACGTSHHWARVIREAGHDVKLIPPEMVKPFVKRGKKNDAIDAAAICLAAAHPDTRFVPIKNEEQQSLLSLHSTRSLLVKQLTMTVNALRALAAEFGLIVPVGNSRLSELMTKIDVLPELPVTMRQTATLLFEQYSRLAENIESLEAQIRTHAKQDENARRLLTVPGIGPVTASLIVASVTDIGAFDTARHFAAWLGLVPRQHSSGGKTRLGRITKAGNREIRKMLVLGATSMLYRAQKWESAAGAWLCKLLERRPGRLATVALANKLARIIWALLSRKEIYRPAGRSVATA

SEQ ID NO: 254263 - protein, 366 aa, unidentified
MQKISTMRTIGDRILKADKLTIGLDLGDRFSSYCVLDEAGEILLEHKLATTPEAMKQTFGRMARCRIAMETGTHSPWVSRLLTALGHEVIVAHAQNVHLIVKSRRKDDRLDARTLARLARIDPELLSPMQHRSAQAQLHLTEIRARAGLVSARTALVNAARGLVKSYGERLRKCGTQQFRRETTSELSTGLREALEPLLREVESLNERIKEYDRRIERMAKETYPETALLKQVKGVGDLIALGYVLTIEDPHRFRKSRDAGCFVGLQPGRRNSGESEPQMHISKEGDEYLRTLLVQGAHYILGPFGEDSDLRRWGQKLAARGGKNAKKRAVVAVARKLAVLLHRLWVSGEVYEPLRNSQKVMRAVA

SEQ ID NO: 254264 - protein, 361 aa, unidentified
MNTVIRVGIDLAKYLIQVHAVDASGKVVTNRALKRGKFLLWCADLPAGCVIAMEACSGAHHCSRKLIDRGFDARIIPGSSVAPYRIQGRTGKNDANDAAAVCEAASRPHMNFVPPKTLAQQGMLCVHRLREGLKEERTACINRIRGLLAEFGVVLPQSPEVLRRHLSDIVEDASNDIAGVARLVLQRAHEHWRELDAHIKWCDQRIADHQKFDEQVQRAAELMGVGSITASALVATVGEFRQFRNGAQFAAWLDLTPKQYSSGGKTSLGSITKSGSVYLRTLLIQGAKAIVLTRQYDKPIFLWAQKLRERIGWQRAVVALANKNARILWAVMTREKRYDAHHVSCIPLLAAVTAPALVSVA

SEQ ID NO: 254265 - protein, 375 aa, unidentified
MKEKVRFLGLDVHAETIAVAIAEPEGEVRSLGTIANREESIRKLIKKLGAPEHLRACYEAGPTGYVLYWQLTQLGVECAVVAPTLVPTKAGDRVKTDRRDALKLARSHRSDDLTAVWVPDGDSEALRDLVRAREAAKQDQLRARHRLSKFLLRMGRRPAVGMKAWTEPHMAWVRQVRFERPAQQATLQDYLHEVDHMAARVKRLEQAITEAVKLASPQVQEVVKGLQALRGIAEISAVTIVAELGQISRFDTARQLMGYGGAVPSEDSSGKRKRQGSITKTGNAHLRRIVVEAAWSYRHRPAIGPRLRKRQEGVPEPIKEIAWKAQVRLSKRYARLAAAGKDQRKIITAVGRELLGFIWAIGVKVETPVKQQIAA

SEQ ID NO: 254266 - protein, 407 aa, unidentified
MTMWYAGIDWADQHHDAVVIDEAGKRVGTTRVAHTAAGLDTLVTFLKGIGDVTDHPDHLACIIETNRGLLITTLLEAGLPVYPVNPKTVDRHRKPAGAKTDAIDAYLLARTGRSDLADLRRLTPDSPVIAELKALTRDQDTLIQSQTRLVNQLTACLKAYYPMALELFGKLQQPTTLAFLQAFPTPDQARAAMVEHIAAVLKAASHPTAEVKARQIHDRVSQPQLRGDAVVTRTKTRLMLTLAAQLRVLLPEIAAYDEEITRLFRLHSDSRAFASLPRAGQRLAPRLLAEWGDDRERYTDAASVQALAGTSPVPFQSGNFAKAHRRYACNKPLRNALQQFAWQSTQKEPWALTYYQRKRRDGKSHAMAVRALANQWVRLIYALWINHDTYDPAIFHAAQQAHAPRAA

SEQ ID NO: 254267 - protein, 389 aa, unidentified
MLEPFNPSRSLAALEQDSTVIAVIEMSQSRWLVAAVIPGIERQPLKKIDPDEELLLKLLHRWQNEAGRAGREIKRIVAAYEAGRDGFWLARWLRARGIEAYVIHPTSVAVSREHRRAKTDRLDTELLKRAFLGWLRGEKRHCSMAAIPTLEEEDTRRPNRERVNLVTERTRLINQMKAILVRFGIRTFKPTLRKAEEKLEGLRTAEGTPLPQNTRAEMRRQLARLRVVREQISAIERERLRKLAAAPAEERGPHAMVRLLARVLGVGVETADMLVNEILLRHLRDRKAVARYAGLTGSPDESGRRRRERGLARAGSARVRCGMIQLAWRFLRFQKDSALAQWFRARTTDGRSATRKIMIVALARKLLIALWRLVTMGEVPRGIILRAAS

SEQ ID NO: 254268 - protein, 342 aa, unidentified
MKYIGVDLHTTQLTICYRDESGDEEIKTVKISQIEEFLKRVDSSDKVAFEATGNSLFLQNMLLTVVPLDNIYVVNTLQFKLISKSVKKTDKNDARLLAEYLSKDMLPEARLRSESDNQIINLIETRDMLVSSNTAFKNQIHNILLKLGIKLKSIEVSSKKKRNGLVERYELTGIYKFQVEFALSNIEHNYAEIAKLEAKLEELKLEMKQVENLTSICGIGDKSAMGIKAIVGDINDFESPDKLAAYVGLCPRVNNSNETVCHGRITKRGNKLVRKLLVQCAWVSIRYNPLLKEFYTVLKKKKPAGKAIIAVARKLVHQIFYTLKYNWYFTNTENTEKEIKVF

SEQ ID NO: 254269 - protein, 474 aa, unidentified
MTVMSSVRSIPDKAPLLFSERRTPVNHVAQTVLPVAGGLDVHKSFVVAVIKSTSDQGTVNTVKKRFSTFRADLEDLRDWLLQNNCHHVCMESTGKYWIPVYNVLETAMDEVRVCNPKWLSLVKGEKDDNKDAARICDLYRNGMTKSSYIPSKQIRTLRELTRLRQKYVQQRASDHNRLINCLTVNNYKLDMVFSNVRGISASRIIDLILSGESYTDEDILKCVSKRCKASQEDILRACHGLEFDKFQREKLKIIRDHIDELTKEIEKLDQLIAEACEDHKEPIDLLMTIPGVSEISARKIIAELGTEMDQFGKDSRVAKWAGLAPGSDESAGKIHSRHITKGGKHLKPVLIEVAWAAVRSKNPYYRCKFEILSLRLGKKRAIVAIARKVIVSIFHMFSDMKEWHPKDCDDCFVPRGLSVQKESRKLNKTVSTLKAMGMTEHQILKTIAKGFDDSEIKDDAGNSYDSITGEYITA

SEQ ID NO: 254270 - protein, 370 aa, unidentified
MDEGIKFFVGLDVHKDTIAVAVAEAGRAPARLVGSMAHDVGKLIKLLARYATPAQVQVVYEAGPTGYGLQRELARRGYQAQVIAPSLIPKRAGDRIKTDRRDCLRLAELARAGELRAIWIPDPADEAIRDLARAREDAVHARTQARHQMKAFLLRHEVRYEGRTSWSNAYHRWLGTLNFGAEGAQTAFTEYWQAVSAADERVARLTKALLPAITGWRFEAVVLALRALRGVDTISAIGLVAEIGDINRFAHPRQLMAYLGLVPCEHSSGERIARGSITKTGNTHARRLLTEAAWNYRFQPRIGAAAQRRAEDLPQAIREVAWNAQLRLSGRFVRLRARGVQINKVCVAVARELAGFVWAIARTHAKLAQS

SEQ ID NO: 254271 - protein, 330 aa, unidentified
MKKKEIIGVDVSKGTLDLHFNYAGNHLQISNNKSGFKKFDKYLVQLSIDPSDILLVMEHTGMYSYKFEEYLREHGISFSKVSALEIVRSAGIVRGKSDKADACMIAKYGAKNPDKISPTMSSDQNYQLKALLGLREKLVTQKAGFTASLNEQKEFMKVLKSSSLIRSQQQMIRTLEREIEKVEAEIKQILDSEESTKKNLELLTSVVGIGFVIAASMIMWTDNFSKFSSARKFACYCGIAPFEYASGTSVKRRTKVSQLANKRAKSLLDLGAKSAIIHDPEINQFYARRLKEGKNQKSIRNIVRNKLVYRMFAVIKKQEPYVKNHVYNAA

SEQ ID NO: 254272 - protein, 427 aa, unidentified
MNNTQNAKIAQVTNDTMVIGIDIGSQKHWARAFDNRGMELSKKAFGFNNTAAGFASFEVWYEGQRRAAGLKRIMVGLEPTGHYWFNLNRFLSENGVKVVLVAPQHVKHSKELDDNTQRKDDLKDPRVIAKLVTEGRYFLPYRPSGVYADLRDGFNRRCGIVESMTQAKNRLHRWFCINFPEYLEAYGSVAAKTGLMVLKKAPLPKDIVALGVDGIVKIWRDAKVRGAGKKRATTLVAMAEQSIGEKTANEAARLELWQLLEDYEHYAHQYEVIEEMLERRVHEVPNADKLLQIPGIGYFTVIGFFAEVGSIERFDDPKQIQKLAGLSVVENSSGKRKGLPGISKRGRDRLRWVLFQAAMSAVKNNQTFREIHQYFTTRKDNPLKRMQSLMAVAGKIIRVFYGMARTGSDYDPDRLLRDIRRPEKAAV

SEQ ID NO: 254273 - protein, 348 aa, unidentified
MALTIVEDTRAVTGGVDTHADMHVAAALDPIGGLLGIEEFPATAAGYARLLGWLGGFGTVALVGIEGTGSYGAGLARHVTAAGIRVVEVDRSDRQDRRRQGKSDPLDAVSAARAAQSGRARGAPKGRDGAVEAIRALMVAKRSARAERVQTINQARALVLTGPDDLRSRFAGHTAAGLVSGLASLRPRPGDVVGYATRIALRELGRRAEFLDGQLERLDELIVPLVTARAPGLLVLHGVGPDTAALLLIAAGDHPERLRSEAAWAHLCAAAPIPASSGKVTRHRLNPGGNREANHALWRIVITRMSAHPPTRLYVERRTKEGLSKKEIIRCLKRYVAREVYRHLRAVG

SEQ ID NO: 254274 - protein, 368 aa, unidentified
MIKYKLKAAPTAISKEQNSQRGAKANRILIGVDVHLKSYEAARKIDNDSVGVVQRLGSKEAFLLYAQKQREQAEEVVVVYEAGPLGYTLYWDLKARGIECLVCAPQSQEQKRKRRKNNAIDARTLSGNLFNYLNGNKHALQLVRVPTKAQEQARIESRQHDGLVEERKRIAAKGNSLLLSQDYGSWSNWWRPKAFERLSQLVAPWVLKQLKRWVKILGELDRQIQQAKVELTQQYQGPRPKGMGAPSLAQLNAEVLDWNLYSNRRKIGCLAGMVPSEWSTGEGQRLGAITKVGVPAIRRILTEMVWRMFLFQPEYKAIQKWQEVLKGSNRGLKKKAVVAIGRQLIVDIWRLQTGQITAQELGLIMIEA

SEQ ID NO: 254275 - protein, 405 aa, unidentified
MEIIVDKGCGLDVHKETVVACIMGRGMQKEIRTFSTMTNDLLRLKQWLEEKGITHVAMESTGVYWKPVFNILEDSCEVMLVNARHVKNVPGRKTDVQDSEWLCKLLRSGLVRGSFIPPKEVRQLRDLTRYKRKLIQTMAAEKQRIQKTLEDANIKLSSIASDTFGVSGMRILEELMKGELQPEEMAELSKGRLRKKKADLKEALVGTMEEHHTFMIRVSLGHIKMMEDLLATVEQRIQEKIECHFKEEYKLLKTIPPVKDNASVIIAEMGVNMDLFPTEMHLSSWAGMSPGNNESAGKKKPGTTTYGNKHLKNILVEFSWMASRMKGTYLRSKYHSLVGRRGKKKALVAVGHKILIMCYHILKKKVPYRELGANYLDERKKDRIAKSYLRRLTNLGYTVMLNEAA

SEQ ID NO: 254276 - protein, 465 aa, unidentified
MTKRHQSQVKRNSGSKVSRSLTLLNPDAAGIDVGANEHYVAVPPERDEQAVRRFGAFTEDLHKLAQWLLQCGVRTVAMESTGVYWIPLYQILEDYGLVVRLVNARHVKHVPGRKSDVQDCQWLQQLESFGLLAGSFRPEAKICVLRSYMRQRQMLISNASRHIQQMQKALTQMNLKLHQVISDLSGQTGLRIVRAILRGERDRLKLAALKDPRVKSSLGTIAKSLEGDYRAEHLFALRQAVELYDYYQQKIAECDQAIWNEMQSLETRAAPGSIPPTPRKGKGRSRHNPIPFDSRAELYRIMGVDLTSIDGLNEATVQLILSELGLDLCKKWPSEAQFCSWLGLCPNNEISGGKVLRRGTRKVINRVANALRMCAESLLNSKSALGAYARRMRAKRDSKIAISATAHKLARLVYRTLKYGQEYSDIGQTQYEAKYRTNAIKSLQKRARQLGVQLVDLHPTSVVVP

SEQ ID NO: 254277 - protein, 446 aa, unidentified
MDVLYTHCAGLDVHKKQLTACRWVPDPTGQCAEGLTEIETFGTMTIELLGLVDWLTEAGITHVAMESTGEYWHPVYNLLEGHFTVLLVNAAHVKNVPGRKTDKADARWLAKLLRHGLLQASFIPPRGQRDVRDLTRYRTKLVQERAREVNRVQGVLERANIKLASVVSDVMGVSSRAILAALVDGRADPATMAELARGRLRSKLPLLEQALSGLVRDHHQQLLAMQLAHIDFLDDQIATLNTTIAERLSALTPPETVAVPVAADEPAGGRAPHVEAAAPLTFDQAITLLDTIPGVDRRGAEMIVAEIGTDMSRFGTAARLAAWAGVAPGNDESAGKRRSGKTRKGNRALRTGLVQLAHSATHTKGTYLATLFRRLAARRGKQRAIIAVAHSILVSVFHILARHEPYRELGASYFDRLRHSQSVERLTRRLEQLGYAVHLEPRPAAA

SEQ ID NO: 254278 - protein, 363 aa, unidentified
MSIVAKRQSKEKRGQVNFDGKACWVGVDVHKASYAVAILDEDGQRQVFSTSAEPKKLLLQLLGMGMTIKALAYESGPTGYGLAWACQELGIRVLVVAPSRIPRPVSKTGKTDRLDSMKLAEFLARGMIKGIAIPTEAENHLRSLERCRQQLVERRRTVRQQIKSMLLFHGLDEPAGLSNWSAASVQSLQAMVLPDALRLTLDCYLNEHAFLLEELSRLRKQLSAALQAEGKIQTVKHLCSIPGVGETIATTFMTEIFRPERFGRAEELCAYVGLAPVTSHSGSGKATARLGQVGQNYLRSILVQGAWRLVSAEQRYHDLFTKIRTRTGLFAKALVALARRLLVLLWRVAVENRPYRPVSAQGS

SEQ ID NO: 254279 - protein, 402 aa, unidentified
MNCVGIDVSKGKSMIAVMRPFGEVVISPFEVQHTASELSELAKLLKSLDGETRVVMESTGNYHTPVAWLLHDAGLYVSVVNAMLVHDYGNNSLRRAKTDKKDAVKLANYGLDHWLTLPRYVPEEDTRLLLKNCYRQYQQYSKVQTMLKNNLISLLDAVFPEVNRLFNSSPRADGSEKWVDFVSTFWHCQCVSTLSLKSFSARYLKWCRKHGYYFSQEKAFEIHSKAQSCIGVMPRNETTKLLVQQAIAQLKATSAALAALKQEMQSLAAALPEYPVVMEMFGVGSTLGPQLMAEIGDVRRFHSKKALVAFAGIDAPPCQSGQMDIHSRSISKRGSAALRRTLFLVMGIYLQSAPLDEPVYQFMDKKRSEGKPYKVYMMASANKFLRIYYASVTAYLNTLARI

SEQ ID NO: 254280 - protein, 367 aa, unidentified
MKQRTTKHSVQPLSEVPGCKTVAVDLAKRVFQVAGEDALGQVVYEQRIKSRDTFQAFLQQLPEGVTVLVETGPGAQAWARQVQQRGNAVRILPAQHVGKHRSGPKNDRNDALAILRAGHDRRIASVPVKNVAALAMQALHRARQGYIRRRTALSNQMRGLLLEQGIALAKGDVAINRRIPEILEDASQPIPDPLRELIDELLAEWRQLGERISVLSGRLEAQARADQTAQRLMSVRGVGPIIATALLAKQTQPERFANARQFAAYFGLVPEQHSSGEKVRLGKMGKRGDGYIRSLAIQGAQAVLQQLRPDSEQPDDRRLLRWQQRLGRKGAAVRLANRNLRILWVLLQNEQTYHRQPTRRQEATMNN

SEQ ID NO: 254281 - protein, 350 aa, unidentified
MVWIGIDAHKSSLAVAVIDELGRELACAEFGNEVSEHEALHAWVIGQAPGERRFGIEGAGWLARGLACFLLERGEDVRDVRGMLTERERRRLRGAGKSDQRDALAIARVTAREELPRVRADSAARELKLLCDYRSQLQCERTRVANRLHVDLVTLRPGYQRRAPTLTSSARLEQAEQLLEEDESVQAALARRRIERLRELDAEIKQIGREIGGRVRATGTGLVELVGLSDLLAARIIGEVGDIDRIQTKDRFARINGTAPISASSGNTNRHRLNKGGNRRLNYALHMMALTQARMDPRARAYVERRRAEGRTYRDAIRALKRHLSDAVYRQLREHAKTSRRRCTPGVNLT

SEQ ID NO: 254282 - protein, 454 aa, unidentified
MAQRNPSIKLKSGKSRQPPLTITHPNAAGIDIGCASHFVAVPPDRDDESVREFPSFTVDLNALADWLTTCGVDTVVMESTGVYWIPLFELLESRGFTVLLVNARHVKNVSGRKSDVLDCQWLQQLMTYGLLRGAFRPVDAVCVLRSLWRQRGMLLYGQGRQVQHMQKALTQMNIQLANVISDVVGETGQKILRAIVDGERDGAVLAAMKDRRIRASTDEIAKSLQGNWRTEHLFALKQALGMFDFIGMQLAECDREIEQQMQTMHAHDGEPGKDKSRSRPRNAPKLDLRTQLFKMCGVDLTRIDGINVTTALAVISEIGTDMSRFPTVKHFACWLGLCPGTKITGGKVMSSKTKRVANRAAQALRMAAAALRSSQSALGAYFRRMCSRMDKPKAITAAAHKLARLIYTMLTKGEEYTDQGQDYYEERYRESVLRNLAKRAEKMGMKLVASEQPA

SEQ ID NO: 254283 - protein, 309 aa, unidentified
MRNLCGVDVSKAWLDSWSAGRYQRFANTAEGVAQLLAFCREHSVELVVMEASGGVEQAAFLALWKQGQPCAIANPRAVRSFADAMGNLEKTDRIDAEMIAGYADARQLVATPPPSEDQRRLTALTARLRQVTADLSVQKQRLHSTSEPTALASLKEAIAFFNRQTKALAAEIAALITADPLWAELDKTIRSIKGLADRTVAVLLADLPELGTLSNKAIAKLAGLAPLANDSGQRNGRRRVRGGRPSVRSILYLVADVARKYDDDLASFRDRLLAQGKAKMVVRIALARKLLVRLNAKARDARAQMAHAL

SEQ ID NO: 254284 - protein, 331 aa, unidentified
MQISHFVGIDISKETLDAALYPARDRKTDFLHFANSSKGLGEMMSWLKSRGVKSSELLICAEHTGIYTNTLIAFAHKKGIALSLNSPLDIKRSIGLARGKNDAVDAARIAEFAYTRRDKLRLYEKPSEGIIKLQYLLTERRQYVRQRTAIINLHSAMGQYETSAGRSRNESAINHTEKLIKKVEEQMHTVISEDPAIKRNFDLVHSVKGIGLINAINTIVYTNNFKSFESPRKYACYIGVAPFDYTSGTSIRGKTQVSKICRTQQKAELSMAARSAIVHDPGLRRYYQRKMKEKGGDKSAHGIVINAIKFKLILRMFAVVRSGEPYKVINY

SEQ ID NO: 254285 - protein, 437 aa, unidentified
MRASLDRCVQRTSAHKYTFRRTARFSGISPIGGSEMTDNQKRYVGLDVHKHYVMVGAVNADQEMVLPPRKVSLTEFEGWAKKYLRPTDEVVLEATTNAWYLYDLLEPLVGRVLVCHPPQVKLIAAAFVKTDKKDTMTLAKLLAVGMIPAVWVPPVHVRELRALINHRHRLIAQQTRLKNQLQSLLHRHHLVPPGGKLFGAANRSWWLGLSLNPSEKLRLRQDLTLLDQLSPLISEVEEELNRLSLAEPWADQMPYLLQLPGIGLITAMTILGAIGQIERFPAAKKLVGYAGLGAKVHSSGQTHRTGGITKQGRRELRRVLIEAAWTAVRYDQHWQEQFERLAYRIGREKAIVAIARKLLVIIWHVLTAKVADRRAEPQQVARYFIRWGRQLRVKTTLGLKASEFARQHLDRLKLGQELERVPYGTVTYCLPPSTTAT

SEQ ID NO: 254286 - protein, 429 aa, unidentified
MNISTSIAEADSKYVWSVGIDWADEKHDISQRCWADGRYQTFQIGADPVSVRTWLEELKELAGPQGRIVVGFEQNRGSLFEMLREQKDWLDLCPLNPLTLSRYRQSFYTSGAKDDPLDSQLIEELVRKHLDRLRLYEPPEPVLRQLDLLCQLRRKAVDSAVGLENQLRSHLKVYYPLAVELHEDLSSTLTLHFLKRWPTLQSLKRAKAQTLRSFYYQHHSRSQSLIEERLQKIARAEAVTEDCTLIDPLVLSVQGLVNQLLAHKASEAAFDKAVQKLALKHPDYEIFNSLPGAGPQMTPRLMVAFGSNRSALTDPSQMQKKSGIAPVLDRSSQSQRIHRRWCRPKFLCQTFHEFAAYSIPHCTWAKAYYEQLMARGKSHHTAVRALAFKWIRIIFRLWQDHTTYDEERYLRDLQKRHSPLSQKIQLQPL

SEQ ID NO: 254287 - protein, 323 aa, unidentified
MSSSSEAKTNSYVGIDISAERLDLHVLPTQQRQSLVYDNAEVTQLVLFLQQLKPALIVVEATGKLEITLVASLAAAQLPVVVVNPRQIRDFARGLGLLAKTDRIDALVLARFAESVQPKPRVLPSEQQQAMQELVNRQRQLVEIRGAESNRLRRTRTTAVRHNLQIHLDWLDKQIQQLDRQIRQLITESPVWREKDQLLQSVPGVGPKLSSVLVAHLPELGQLNRREIASLVGLAPFNCDSGKWRGKRFIAGGRSKVRCTLYMSSLAAAYHNPVIQALRRRLQNQGKPFKVVLTACMRKLLIILNAMVKNGTHWNSDLCRNFS

SEQ ID NO: 254288 - protein, 341 aa, unidentified
MAEASTIGLDIAKHVFQAHGADSSGRVVFRKKITRAKLMQFFASQPRCLVALEACGGAHYWGREIGKLGHTVRLIPPAYVKPFVKRQKNDAADAEAICEAAQRPSMRFVPVKDEAQQANSVVFRARDLLVRQRTQCINALRGHLTEYGHVVPQGTAHVDTLVALVEDATSSVPESARTILTVLIGTFRALQTQITQLDAEIARRAKADPVARRLMTIPGIGPIAATAITALVPAPEGFRTGRDFAAWLGLTPLQKSTGGKQKLGAISKMGERTIRRLLILGASAVVRWATQRGAAEGSWLARMLGRKPRMLVTVALANKMARIVWALLVKGGTYRVPAAAA

SEQ ID NO: 254289 - protein, 477 aa, unidentified
MVTARPSQLNRKQRKELARRLRVEDPGLTVMHPHAAGIDVGNSAHYVAVRPDRDPDSVRRFECFTADLHRLADWLVHCGVTTVAMQSTGVYWIPLYEILDARGLEVYLVNARHTKNLPGRKSDVQESQWLLKLHTYGLLRNSFHPPAEIRVVRTYWRQRGDHVHAVSTCIQRMQKALTQMNIQLANVISDLSGWTGQRIVRAMLAGERDPEQLAALSHPGIHATRQTIAKSLEGTWQPDLLFVLQQEVAMYDAYLQRIAECDQALEQHLKGVADKVADTLSDAESQTPSRETRRFGPKRRRKAGSHAPQFDLGRELHRISGVDLTRIDGIDVGVAQTVISEVGLDMTRWKTEAHFASWLGLCPDNRITGGKVIRKGTRHVVNRAATALRLAATTLLRSQSYLGAQYRRLRARLGAPKAITAMAHKLARLVYRMLKWGHEYVDKGLQYYEERHREQQVQLLKKRAAKLGLQIVEPEAA

SEQ ID NO: 254290 - protein, 385 aa, unidentified
MLRKADITETSIRTDLRAIFVSLELSRTTWLVTSLSPGTREKMSKHSVSAGDIGGLLVRLRSLQERERARRWQLPPLVVIQEAGLEGFWIHRVLTENGIESHVVDPASVATSRRRRRAKTDKLDGDTLVRTLLAYKRGEPRVCAMVQPPTPEEEDRRRLSRERRVLLKERVQHSNRIKGLLFGQGVTGYEPLGRDRRQRLVGLQTGDGRPLPPHLKAQINRELDRLEMVIEQIKAIEDELRQAIVAADTVTPVPRMLIELKGIGNEFATVLWTECLYRSFDNRRQVAAYAGLAPTPWQSGSIDREQGVSKAGNPRLRAMLLQMAWLWLRHQPDSVLSQWFLDRVKANGGRLKKPMIVALARKLLVALWKYVTSGVVIEGAIVRAA

SEQ ID NO: 254291 - protein, 311 aa, unidentified
MPQIGVIVGIDVSKGKVDAYIRPSGERLSTKSPEALVSWLQEYDVVAAVMEASGGYEQDWAKVLLQAGVVVRIVDPKRVRHFAKSAGRLAKSDPIDAEMIAWFGATFPDARNLEDDPEREELDHLVGGREGLKDLLVRIENWGEHERPRLVARMLAKLSRTVKAELKKIEAGIAAKIKANAAFAECAEILTSAPGLGDHTAAGLIAWMPELGHISNKEAAALIGVAPYDEDSGTHKGDRHIKGGRKALRTLMYMATMSASTQHNPVLKAYYQRLRAKGKPAKVALIACMRKFITILNVMLARGEKWNPAPA

SEQ ID NO: 254292 - protein, 409 aa, unidentified
MYFVGIDIAKKTHQAAIICSDGKLIGKPFKFPNTVDGFNLFLEKLTAVNTDLSQFEIGMEATGHYWLNLYTWLSDKSFRLHVINPLQSDALRNLYIRKTKTDSVDAKIIADVIRIGQYSETQLADENIIALRDLNRQRFYLVDMAADLKRKIIAMMDRIFPEYQDFFSDMFSKTSVQIMKEYTSPEQILQIPTERLTQLLKKASRGRFTETKAKELKALAANSFAALLSSEMTTLLIRQMLEQLDLLEKQIADIEHIIAAQFTQFNTKLTTIPGIGTTLGATILSEIGDINRFDKPKQLIAYAGMDPSVKQSGNFVGTQSHMSKRGSPYLRRALWLAAVVAVSHNDLFKYLFQQKMNAGKTYAQAMGYICHKLLNTVFAILKTGEEYKPVYPPQIDVSKFADQPINSQL

SEQ ID NO: 254293 - protein, 346 aa, unidentified
MRKVVGLDVSLDKTAVCVLDRDGTLVWQGKVGSEPGPLIDKLSLWKADLDLVGLEACPLSEWLHHHLTEAGFPMVCVETRHAERFLSTRPVKTDRNDARGLAEMMRVGHYRAVHVKSPEAQMVRTILQARRQIVAALMQVQGTIRGLLRMHGLKMGEVHRCKFADRVRELVAEKPMLGVAIDPLLRSAEVMATERKAIDRRLEQAARRDQVCLRLMTIPGVGPITSLAFRATIDDPARFGSSKSVGALMGLTPRVYQSGEMDRSGQISKAGDDMMRHLLYEAASALMTRVRKPSRLKAWGVAVARRRGAKRARVAVARKLAVIMHRMWIAGTRFETGVEATMPAAA

SEQ ID NO: 254294 - protein, 391 aa, unidentified
MILVGVDVAKDKHDCYIMTSDGEVLFKSFTISNSMEGFDQLYEKILSVTNNLDKVKIGLEATGHYSYNILGYLLDKGLTPFVINPLHSNLYRKSLSLRKTKTDKVDSRIIASMLMSDVSLKPYSDTLYHNEELKSLTRYRFDKVQQRARLKTSISRLVTILFPELEKLVPTLHMKSIYSLLYEFPSAKAISKAHLTRLTNLLYASSKGHYGKEKAVSIREAAINSIGSYMSVKSLELKHTIKLLEELTLEIDEIEKEIKSIIDKLNSPILTIPGIGYSLCAQIIAEIGDFKNFDSPDKILAFAGMSPSTYQSGKLYSSNAKMEKRGSKYLRSAFFIAAVCVCRFEPNFALYLAKKKAEGKHQYVAISHVVKKLVRLIFHLEKTGEDYVTLT

SEQ ID NO: 254295 - protein, 322 aa, unidentified
MNKYKETFGVDISKAVFDVHGSNKGHDRYGNDGPGFKKFLGHLPEGSLVVMEATGYYHYRLAQFLYKNGITVSVVNPLSVKRFIQMKLAKVKTDKSDAKAICDYALVNEVPLYDALTDSQSKCLQLFRLLDMYLKQRTATKNKIHGEEVLGVPSKFVYRPLVRNRKQLDKEVTAIESKILSLVKGDQQEQLTLLTSIPGIGLKTALFLIVVTDGFRKFETASQLCSYVGMTPTIRESGSSVRGRARISKVGNGKLRNLLFLCSFNACKHNRACKGVYERIVNKGKSKKLALIAVANKLLKQSFAIAKSGRPYDESYVSVLPR

SEQ ID NO: 254296 - protein, 386 aa, unidentified
MYFVGIDISKYKHDCFICTETGEVIEENLSFTNTNEGFIQLLNLLKSLDNSQEIRIGFEATGHYGMNLKLFLEKNNYTFMEFNPALVKRFISTQTLRRTKTDKKDAMLITKYLISVDYKPHPKQFYHKYSLKSLSRMREKLVKQRSYYEVQITNVLDIIFPEYKPFFNNDFTKTSFYILNKYKSPDKIKNMKDFDSIRKVSHGKFTSANFIKLKELAKNSIGISNDIFETELESLLILHSGIEVEINKLETKIKSIIKELNPPILSIRGIGIISCAGIISEFGDITRFKSADACVAFAGIEPSISQSGTESHTGHMVKHGSGHLRYFLMNAADYVFMHESVFTEFYYKKRSEGKSHRVALTHVAKKLVRIIYKLESENITFNSNIN

SEQ ID NO: 254297 - protein, 400 aa, unidentified
MYDIDDVGVFLGLDVGKSAHHGHGLTSAGKRVFDKQLPNSEPKLRAVFDKLAAKFGTVLVIVDQPASIGALPLTVARDAGCKVAYLPGLAMRRIADLYPGEAKTDAKDAAVIADAVRTMPHTLRSLEVTDEITAELTVLVGFDQDLAAEATRTSNRIRGLLVQFHPSLERVLGPRLDHPAVTWLLERYGSPAALRKAGRRRLVEVIRPRAPRMAQRLIDEVFDALDEQTVVVPGTGTLDVVIPSLARSLAAVHEQRRALEAQIGQLLEAHPLSPVLTSIPGVAVRTAATLLVTVGDGSSFPTAAHLASYAGLAPTTKSSGTSIHGEHAPRGGNRQLKRAMFLSAFAALHDPASRSYYDRCRARGKTHTQALLRLARHRISVLFAMLRDGTFYEPRTPRLA

SEQ ID NO: 254298 - protein, 334 aa, unidentified
MDKVTTVGIDLAKNTFSLHGVDASGQVVLRKTVSRARLMGVVTQLAPCTVGMEACSGAHEWARRFQAAGHTVKIMAPKFVVPYRRSGKNDGNDAEAICEAVQRPSMRFVPIKSVEQQAILAMHRVRQGFIEERTATINRVRGLLAEFGTVLPQRAAEVRRGAAAAAEALPPLARHAVEDLISHLAGLDERIKSYDRELESLARSSETVQRLMTVPGVGPLGALATVATVGHAHEFRDGRQFAAWLGLVPRQWSTGGKPRLGRITKHGDAYLRTLLIMGARAALQMAAGRGDRLSRWAIALKERRGYHRAVVALAAKNARILWAMLAHGAEYRIA

SEQ ID NO: 254299 - protein, 317 aa, unidentified
MTDFGVIVGIDVSKDRLDVFVRPEGRRFSVSNDAAGRKALVERLRLYVVKVVALEASGGYERPAVADLMAAGFAVRLLNAGQVRKFAQAGGLRAKNDRIDAEVIAHYAEVFDGPVCQRTSQTALLSELVGTRTLLVEQKVALGNRRRMMSDAGVRDSLDDVIAELERKIREIEGRLADIVAADPVLARKAEIVTSVIGVGPVVSWTVLAQLPELGSLGRKPIASLVGVAPFDRDSGVYKGRRKIEGGRKPLRDVLYMAAQSARRYNPDLASFDERLRAQGKKKKVAIAAVMRKLLVMLNALVRDNRLWTPDHVSVRP

SEQ ID NO: 254300 - protein, 361 aa, unidentified
MAGTMTWVGLDVHARSTHAAAVDVMTGELSRMRFGPGVDAPVAWLGSLPGPVWACYEAGPTGYGLYRAAVAAGIRLDVIAPGKTPRGPSDRVKTDRRDAELLARCLLAGSLKPVTVPPAGVEAARGLTRAHDACRRDLMNARHRMSKMLLRHGRVYPKDNTWGQEHRRWLSRQQFEQEISAFVFADLVARVDGLTARKAALAERVSQLAVDPEFWPTVARLRAFKGVDTLTALSIHLELGADWRRFEKPTRLGAWLGLTPSLIQSGESSRQGAITKTGSGLARRLLVESAWHYCREPRIGATLQNRQHGQPEHVLQISNTAQQRIHRVYRRMKARGKPHHVTVVACARELACFLWAAATAP

SEQ ID NO: 254301 - protein, 320 aa, unidentified
MTRIVCGVDVASKSLEARIGQRGAAGSFPNNPDGIAALSAFCHAHRAELVAMEATGGYERQAFALLSRQGLPVAILNPRAVRQFAQSMGSLEKTDAIDAAMIAWYAEVKDPRPACLAPKNQQHLRALVTRLRQLTDLRTSQLNQQRLVTDRAVQASFKTMLGAIEKQIARLEQRIAGLLQQDPLWRELDQAFRTIKGVADRTVARMMAEMPEIGSLSGKTIAKLAGLAPIANDSGKHQGKRPVRGGRASVREILFIVASVVGRHEPDFIAFQKRLKDAGKPPKVVRIALAHKLLVRLNAKAKEVRQKLATSQPGIAAQAV

SEQ ID NO: 254302 - protein, 408 aa, unidentified
MRLFVGDDWAEDHHDVEVMDGSGRRLARARLPEGVAGMARLHAMIGDQLGGADDEDVEVLVGIETDRGPWVAALVAAGYLVLAVNPLQAARFRDRLGVSGAKSDAGDAHVLADMVRTHSHELRPVAGDSPEAEAVKVVARIHKTLIWERTRHTQRLRHALRDYFPAALVAFEDLDAADTLELLAKAPTPARAARLTIAQISGALNRARRRNVAEKAAAVQAALRAEHLGQPEIVAEAYAASVQALLAVLTVLNTQVKTLQGQVETHFGQHPAAEIIRSQPGLGPVLGARVLAEFGDDPDRYAGAKARKNYAGTSPITRASGKKKVALARFVHNDRLIDALMTQAFAALNASPGARAYYDRQRARGAGHNAALRQLANRLVGILHGCLKTGTRYDETTAWSHHAENVAA

SEQ ID NO: 254303 - protein, 463 aa, unidentified
MSQFFLGIDISKGYADFVMIDAVKSNVGTSFQLDDTFQGHVCLFNYLSEFKEQHAGCTIFAGLESTGGYENNWYQMLLNCQELLPVRVARLNPAGVFAYKKANLNRINTDPISARAVAEYLITHSDKVSYHEAVNSNNPSCSMRSLRKHWGFIQMLTKQKTQLLNQLEMLLYEANPDLLHFCKNHTPQWVLTLLLHYPTAKRLARAHADSLAKIPYISKKRAASLIEQAKNSVASSSDAYTEQLIISTVKEIMHLKTQIRNETNVLARHCSFADVELITTFPGISVLSAVGLFIHIQSVARFATTKQIASFFGLNPVFSASGDSLKGSRMSKKGNKQVRQILFMIALSAIQSNPVIRNTYARQKSKGMSNMAAIGACMHKILRIVYGMLKNRQAFDPNIDRYNRLNQRKTVATENADNRRLQEYDETAPVSQRQIKKRWERKQTQNGFAIESGFRSPSPPHIV

SEQ ID NO: 254304 - protein, 344 aa, unidentified
MQNSNVIGIDLAKNVIQVCKIDKHGELTSNKAMSPSKLKALLAKSIPSIVAMEGCGSCHFWARLAQTYGHDVRIISPRRVKAFLQGHKTDANDALAVAIASTQFGMVFSQIKAEEQQSLQTLETSRKFLDKELTALNNHIRAYLYEYGITMNKGQKSLRAIMPIVLDELDTRLPQCLKSTLNVLWERYQLTVVQLKETEKCRAALVKQLEPCNRLMKLEGVGEVCAAMLYASMGDGREFKNGRQASVYIGLTPKQHSSGGKVYMMGIDKKGGNKALRAALYQGALSVISRLPSEPRTVKEAWLLKLIERAGVKRACIALANKTVRTAWALLATGKSYEPALLSR

SEQ ID NO: 254305 - protein, 327 aa, unidentified
MRQAKSLTEKAKTTVAFDVCKAALDVHIRVDGKAFQVPNTYEGFDQIALVLADYDVSLLLMESTGGYEDAAACNFQSLGYDVAVINPRHGRNFAMAMGKFAKTDRIDAAILADFAAVIDSRSDRARFIKPPTDEERKFLSQMVARRRQVVDLLSTEKQRLSHADDYAKQSINKVVAFIESQLDEINKDVSFYLKKNYSGLSKMLSKIPGIGELSVGLLIGDVPELGQIGNRQLSAVIGVAPFNHDSGKMRGKRCISGGRQNVRNVLFMGVMSATRYNPVIKAFYDRLINKGKPKRVAYIACVHKLLRIINAMVRDGTSFNPDLHAVS

SEQ ID NO: 254306 - protein, 405 aa, unidentified
MAEGRFAGVDWASEEHAVCVVDETGRIVDGSRYKHTETGLVALCSRLEQLKVTLVAIERPDGLLIERLLDAGLTVIAVHPNQVRAAGPRYSVARGKSDGFDSFVLAELARTDSHRFRILVPDSDQTKALRVLTRSRQDLVRARVALANQLRDQLACFWPGATKVFNSVDSKIALAFLRRYPSPADARGLGEQRLQAFLTKHGYPGRKPASELIGRLRAGAEGRAGELETQAHRQIVLALVSALEPIVQRISELTIEIRHALEAHPDGEIFRSLFIAKDSWLTAATMLAEIGDYRDRYPTYRALAADAGQCPVANESGKSKRATFRWACDHRLREAFNTLADSSRHHNPWAQDIYTRAKARGATHAHASRILGRSWSQIIWRLWYDHDTYQPTKHTARQKLITAEA

SEQ ID NO: 254307 - protein, 317 aa, unidentified
MAQILPTVGIDVSKDRLDAAAFPEGQRLSVANNEAGWRELIGWLRSIAPRAIGIEASGGYERGVIGALSRASLPVRSVNAWKLRQFAKAAGRLAKNDHIDAVMIGWFVSTMPTREIKRDPAREHLAELVSARRQLVDLQQELGNQLEHLRDAELRRIRRRRIGQLAVDQARLDRRIVEAIEAVPSFLHRYKLMCSMPGVGPVLAATLLASLPELGAATNRQIGALVGVVPYDFDSGKLKGLRCIFGGRAAVRRVLYMAAQAAAQHNSVLKAMKQRLVAAGKEPKVAIVAVMRKMITTLNAMVRADREWDPTRQAAAS

SEQ ID NO: 254308 - protein, 354 aa, unidentified
MSKDIILTVDYHDRVCVIRQLDRETGLEQVLTEVPTMAGALANVVDQARRKAGRRGRVVWIQESTTGWARVRDLLADRVEFDLANVLQMPRPPKARRRKTDKVDTARMQREYLNGSLPLAYQPAAELRQLRRLVAFREGLVGRRTAVRNWVDRYLAHETWFDRTGLWLPQGQQRLAGLLGSLTGTDRVILEEKLKELARLEEQLIVTLKEFSMAYRRCAAAQRLDAICGIDVVSAVSIVARIGAVERFANAEALIAFAGLAPGIQESDETRRDGRIGGGGTDRHLRHYLIEATVWARKIPRYRTTYERVKKRRGSKVGRLVVARMLVRSIYKILKEGVAFERGAEPRAATTAAC

SEQ ID NO: 254309 - protein, 344 aa, unidentified
MRPSILGWMLHQATISVAVRDSRGNLVMEATVETKAETILQLVTFEEGTWAAWLHDLLQPHVARVLASDPRKNALLKAGNKSDRIDACKLSELSYLNKLSPVYHGEQGIRTLKELARSYITITRDLTRVMSRLKAIYRGWGIPCGQQVYAPRYRTEWLAKISEAGVRRRAELYYQQFDALAALRQGLRRELLAEGRKHLNTRLLQQIPSIGPIRAVLLLALMQTPNRFRTKRQLWAYCGLALRTYGGGEYRIVGGQFKRAKKVLAVRGLNLNHNHDLKNILKGAATRAASTAGPFQDVYQARVARGVKPHLARLTLARKIAAITLLVWKKGVRCDAEHLKQQAA

SEQ ID NO: 254310 - protein, 344 aa, unidentified
MVTFGVDAHKRTHTIVAVNDRGTPVGQTTVGTTSQDHLVLLRWAARFGAERRWAVEDCRHLSRRLERDLLAAGESIVRVPPKLMAHVRDSARTYGKSDPIDALAVARAAQREPNLPLARLDGPDREVRLLVDHRESLISERTRLICRLRWHLHELDPAWEPKARSLDAQRTLDEVRGRLQDHVGVVARLAVELTERCAELTITIKALEKEITELTTQLAPALLELPGCGALTAAKIIGETAGVDRFKSRDAYARFNGTAPLPVWSSNKARHRLSRTGNRQLNAALHRIAPTQARWHPPAKEMIERRKSGGNSGREALRVLKRRLSDAVFQALLHDQTAGLTLAA

SEQ ID NO: 254311 - protein, 403 aa, unidentified
MQYLGIDLHRKQMTVSLRNHNGDVFLRRQVSTRWPKLEQFRNQLHQALAAAEKYVAVVEVCGFHDWLVQWLRQDERCHQVLVVQPLGRSASKTDRRDAHGLSELLWVNRERLLRGERVQGVRTVQVPSAEEQADRCLTQTRERLVRRRTQTLNQIHKILRRQNLEWERPTETFQTVKVRRWLKTLQLAPIDRLAMDHLLVQWALWDEQLVAADGWIRERFLANRNAQLLATMPGVSRFIGLAIACRIAPMERFPQGRSLANFLGLTPGCRSSGDTERVGSITKIGSRMVRYLLAQAIQHLLRRDGSIRAWYQRLKRRRGSKVARVAVMRRTATIMWRMLSTGEPWRCGGARSEMPEADEPRQTPVPPDGPAEQLAQSGDPELAGFRTGSSSLLAGEEVAPCPA

SEQ ID NO: 254312 - protein, 358 aa, unidentified
MGGWPVENATRVEVQAVVGVDLGDRSSQICCLDRETGAILEEKRLSTTSASFQGYFTGANRCLVVVESGTHTPWVRRLLESLGHQVITANPSKVQAIASSRQKTDERDARCLAQLGRVDPELLSPVHARSEKSQQALAVVRAREGLVKARTMLINQVRGTVKSFGSRLPGCSAQSFVRKVSQALPQELKAALEPLLAVIADLSERLLRFEQDLESWGKRFPAVERLCQIKGVGTLTALVFVLTLDDPHRFARSRSVGAYLGLVPASRSSGKSEPQLPITKQGDRLLRRLLVQAGHYILGPFGQDSDLRRFGLELCQRGGKNGKKRAVVAVARKLAVLLHRLWISGKEYEPLHRTAATV

SEQ ID NO: 254313 - protein, 405 aa, unidentified
MAEVFVGHDWSEDHHDVFVEDAEGRELAKGRLAEGVEGIARFHELVASFATEPGEVLIATETDRGLFVGALVAAGYGVLAINPMSTSRYRERHSTSGAKSDAGDAFVLAELARTDAHNHRMVAGDSELAEATKVLARAHQSLIWTRQRQTNQLRSTLREFYPAVLAAFEDLASGDALAVLAAAPTPALGRRLSRSKIASALRRGGRQRRVDERAVEIQDALRADQLEAPPLVADAMGESVAALVAVIAELVAQTARLQTELGERFEQHPDAKVIRSLPGLGMILGARVLGEFGDDPNRYAHAKSRKNYAGTSPITRASGKHRVVLARYARNRRLADATYQWAFAALGASPGARDFYDQRRAAGDTHHRALRALANRLVGILHGCLRHHTPYDEHTAWAHRTAAAA

SEQ ID NO: 254314 - protein, 340 aa, unidentified
MYYTGIDLHKKTSFITTIDARGKIVTRANLQNVEEDILAYFANLGDETKIVIESMASWYWLYDLLTGNGLEVVISNPVKTKAIASAKIKNDKLDSHMLAQLLRADLISTVHVSSLETRKLKELLRHRSRLVRDATRMKNRIHMLLMKNNFRSPFSDLFGVKGLRYLKEIDLPDYHRQQVETYLLLYEKLQEQIEPLTKTVRALAKENHTAQLLMTIPGIGPITAMFIVAEVDDISRFRSYRNLASYAGLVPSLDASAGKEKRGRITKQGSRYLRTALVEAAQAAARMQNCRLRIFFRRRIVKAGYQKAIVATAHKILQYAFYIWKNQTPYQETYPVCVTR

SEQ ID NO: 254315 - protein, 318 aa, unidentified
MSSPAPSVHVGIDVAKAKLDVCLLPSGQTLSVGNDDQGIAQIIALLKPQPIALILLEASGRYERRVASELLDAGFNVAVVNPRQVRDFARALGKLAKTDRIDAQMLAQFAQVGHVRLCEKQPEKRTLLDDLVTRRRQVVQMLAMEKTRQQVPQNKQTRLMIAKVIRLLEQQREDLDREIAELIESDDDWRNKRDLLSSVPGVGPVTAGGLVADLPELGKLNRQQIAALVGVAPMNRDSGMMRGQRRIFGGRASVRTTLYMAAFCATKYNPVIRRFAERLRGAGKPFKVMIVAAMRKLLTILNIMLRENRPWDPKLQTA

SEQ ID NO: 254316 - protein, 343 aa, unidentified
MDHFAGLDVSVKETSVCVVDDAGKIVRELKVASEPAALLAVLKNGTYRFKRIGLEAGPLSQWLYSALAEADLPVSCVETRHMRAVLKAQINKTDRNDARGMAQMMRVGLYRPVHVKTLRSQKLRMLLTHRKLLQSKAIAIENDLRGTLRNFGLKVGIAGKVKFEARIKELVESFPDLVVLVEPLLAVRRVLREQIGVLHRRLLAVVRDDDVCRRLMTVPGVGPVVALTYRATVDVPARFRKSKSVGAVFGLTCAKYQSGEIDRSGAISRCGDEMMRTMLYEAAQSMLFHSTKWSWLKAWAMKIARHRGMKKAVVALARRLAVILHRIWVDGTEFRWTREAVTA

SEQ ID NO: 254317 - protein, 369 aa, unidentified
MPLVRGERAARFTFGTPSPRGSIWRAFATVLWKPEQLIDFNSHLQGWETENMPELIHVGIDVSKDALEVACGPQSPTQCFTNDDAGHEALVNVLHVHRVDLIVVEATGGYEAPCACALQAAGLAVAVVNARQARDFAKAMGYLAKTDRIDAQVLAALAAVLANRADRQKLIKALPSDEQQRLHALVLRRRQLVQMLVAERNRLPMSHQAARVSIEALIKAIRKQIVDIEADLSSHIAHHHADLAGLLRSAKGIGPHTSMALIADLPELGKLSNREISALVGLAPFNRDSGKMRGKRMIFGGRTQVRCALYMATIVAMRHNRVIQRFYQRLLAAGKPKKVAIVACMRKLLTILNAMVRTGKQWDETFHFA

SEQ ID NO: 254318 - protein, 342 aa, unidentified
MTIYYIGMDIHKKTIAFCIKKQDGTIVDHGTVKATRPALKKWVGSLQCPWIGAMEATIFTGWIYDFLKSYAEDLKVANSKMLKAIVSSKKKSDRIDAQKIADLLRCDLLPECYMLSEEVRELRRVLRFRNLMVREASRMQNKASGLLMECGAEYSKKKLHGKKYFNSLLDSLEEIPESVITLLQISRSSYEMFQRSQKTLIRGLKNHSSIRKRVELLMSIPGVGEITALTWVLEVGDPMRFSSVKKAVSFCGLCSAHRESAGQCKRGPISKQRNKHLQTILVEAAKLAPRWNPQLAEIHAKALEKGDKNRATLEVARKLVAYMLAVDKNQKSFISAEKQAAA

SEQ ID NO: 254319 - protein, 407 aa, unidentified
MLFVGDDWAEAHHDIELQDGQGQSLVRRRLPEGVAGLAQLHALLADHLGDQEEPGSVLVGIETDRGPWVQALIAAGYTVYAINPKQVARYRERHGTSGAKSDPGDAHVLAEIVRTDRAHHRPVSGDSEQAEVVKTLARTHQSMIWTRQRQANQLRSLLREFHPGALAAFGDELTGRDALAVLPLASTPVAGRALSRSRVAGALRRAGRQRNVDSTAVRIVEALRSEQLGLSDALTAAYGASVRSIVAVITTMVEQIGVLEAEVNRCFGQHPDAEIITSQPGLGVVLGARVLAEFGDAKDRFADAKARRNYAGTSPITKASGTRRVVLARYARNKRLADALHQQAFAALTSSPGARAFYDAHRARGATHHQALRSLSNRLVGILDGCLRHRTAYDEATAWAHRHPAAA

SEQ ID NO: 254320 - protein, 356 aa, unidentified
MSHDVKYIGMDVHKEAIVIAVLNESGKQVIESVIETKASSILQFLHSLRGELHVTWEEGTWAAWLYDLLQPQVQHIVVCNPRRNALLKEGSKSDKVDARKLADLLRTGMLRPVYHGENGLRTLRELGRSYQTISKDLTRVMNRLKALYRGWGIPCAGTQVYAARTREEWLSKLPQAGVRRRAELLYQQLDGLQALRREVRPEFLTESRKHKAAKLLRQIPCIGPIRAARLIGLMQTPHRFRSKRQLWTYSGLGIETHDSAQYRCVGGQVQRSKKPQQIRGLNQNHNHEMKEIFKSAATRASCGRGPFYDFYAALLAKGMKPEMARLTLARKIAAITLTLWKKEERFDAEQLKTQAA

SEQ ID NO: 254321 - protein, 318 aa, unidentified
MDPAPLFVGIDVAKAHLDVALGPDGPVRRHPNDEAGIAATLALLAASPPALVVLEATGSLEVPLAAALAAAGVPTAVVNPLQARRFAQATGRAAKTDALDARLLALFAERVRPEPRPLPDAAARDLAELLARRRQLIAMRTAEANRLGTAAAAAVRADLEAHVAYLTGQVDAMDRRLAEAIQASPAWRAKDELLRGIPGVGPVASRTLLADLPELGTLGRRKAAALVGLAPMNRDSGALRGKRMIVGGRSAVRTTLYMAALSAVRYNPALRAFYRRLVAAGKPRKLALTAAAHKLLTIADAILRTRKPWDPAFAGTRA

SEQ ID NO: 254322 - protein, 337 aa, unidentified
MKRYLGVDLHRTQFTVCTRLENGRTYSRQWSIRELKLFAAQLRKADELAVEATGNTRLFYDAVEGYVARVAVVNPCQFKVISQSVKKTDKNDAELLALYLAKGLLPEVRMKERKQREIGHLAQTRDLLVKQRSALKAKINNLLSAEGINLKRESLSSNKALERVLSLPLSPLMLAEARVLVSQIRGLNQSVAELEALIEEEGPKLAGHKNLMSIKGVGPVSAAVLLSVIGNIGDFADPGKLAAYLGLVPRIQNSNETERSGRITKLGNKLARTALVQCALIAKRYSSFLQRFYQRIQRRRGGGKANIALARKFLGVIYHTLKNNWVFADFPNFVLAS

SEQ ID NO: 254323 - protein, 387 aa, unidentified
MNAPETALRGQDTGAAGRLYMALELGDKKWIVAVSDGVRGTSHYTLEAGDKQAVLAALVKARVRCGLAGKVVVHSCYEAGRDGFWLHRWLTEHGIDNIVVDSASIEVNRRARRAKTDRLDAAKLLTMLMRYHGGERRVWSVVRAPTPQEEDARRLHRELSRLERERTAHRNRIGSLLVLHNLRPTVKIGGRGWQHWWESHAAQLPGCSRGEIERECARLALVKAQIKGLEAAQQSAVAQGAHPLVAQLARLRGIAVSSAWVLVHEVFAWRRFDNRRQLGGCLGLVGTPYQSGEQRTEQGIAKIGNKRGRWIMVELAWAHLRYQPDSALSRWFNERFASGGKRLRRVGIVALARRLLIALWRYLEQGVLPAGMRFKASFRAAPSQVCA

SEQ ID NO: 254324 - protein, 409 aa, unidentified
MEVQHPRCCGLDVHKETIVACVRLVIDSKTVKEVRTFSTTTADLMALSEWLAETKCTHVAMEATGVYWKPAWHILSDGGFKLVLANAAHIKNVPGRKSDVKDADWISDLLAHGLIRASFVPDNATQEMRTLLRTRKQLVHEKARHILRIQKTLEDAIKLDSVITDIMGLSGRKMIEALIAGESDPAKLARLADPRVKASQETLRQALRGRVIGHHRFLLRLHLEQIDAIDAAIAKIDREVEAGIGPFRTAVEQVSSAPGIKSLAALQILSEIGTDMSRFASDANLVSWACICPRSDESAGKRRSTRIRKGSPWLKTTLVQCAWAASRKKDSYLHAQFHRIKARRGPKKAIVAVAGSILTAIYHMLKDGTMYQDLGPNHFDTRTKERQKNRLVKRLADLGYAVELAPLPN

SEQ ID NO: 254325 - protein, 334 aa, unidentified
MRQVSQVGVDVDSEKLVCMMQRVGQRMPLTTFANTAAGHKKFIRWATKRARSVRVCLEATGIYSLQFALALHDAKNVEVMVVNPRAIKDFARACMQRAKTDAVDAGGILEYLERMPFTAWQPPAPEILQLQAINRRIVQLQTELTREKNRGHASEFAGASGDAVANDIEINIRHLERRIERMHDSGLQLVHGVPALATKLAHLVSAKGIGEASAMRLLAEVLVLPVDLAAPQWVAHAGLDPRPYESGTSIHRPRRITKVGNRHLRAALYMPALVAIQHEPNVKAFYNKLVAAGKKPMQAVVAVMRKLLHAIWGMLKHDQDFDGNKFFRLAEKTA

SEQ ID NO: 254326 - protein, 343 aa, unidentified
MDHFAGLDVSVKETSVCIVDDTGKIVREVKVASEPEALLHVLMNPAYHFKRIGLEAGPLSQWLFGALAEAGLPVICVETRHMRAVLKAQINKTDRNDARGIAQMMRAGLYRPVHVKTLRSQKLRMLLTHRKLLQSKAIAIENDLRATLRNFGLKVGVVGTVKFEARIKELVENVPDLAMLAEPLLIVRRALREQVGILHRRLLAIVRDDDVCRRLMTVPGVGPVVALTYRATVDVPARFKNSKAVGAVFGLTPSKYQSGESDRTGGISRCGDEMMRAMLYEAAQIVLVRSTKWSWLKAWAMKIARHRGMKKAIVALARRLAVIMHRIWVDGTEFRWTREVAAA

SEQ ID NO: 254327 - protein, 353 aa, unidentified
MQKEKVIKQSVGIDCGKVELVVAFGVMQEGFEEKIISNTAFKNNAEGFKKLQKWAGKLTDKTVELVYVIEATGVYHEKVSLHLHNEGCKICVMLPNKVKAFSQTLTVKTVNDKTSSQAIAYLGLEKKLDAWQPPHPVYRELKQLTREREQLIEERTLCKNQLHAEQSGAWPNTGSVKRLKQRIKLLNKQMTEIDEEIKIIVEKNDWLKKKLEYVCSIKGIALISAVIIVAETNGFNLVRNKKQLVSYAGLDVVEKESGISVKGKTRISRKGNKYLRKALHFPALVAIRHNEQMKAVYSRLVSKHGIKMKAAVAVQKKMLELVYVLWKKEEMFDEQYLKNKGQQTEVATLCELA

SEQ ID NO: 254328 - protein, 394 aa, unidentified
MDKAWVGIDAGKEFHWAHALDASGTGNEMLSRRVENDEADLLKLINEALSFAGELVWAIDQPGGGAALLLALLWERGQRVLYVPGLVVDRARDAHRGESKTDRRDARLIAEQARMRGDFSELAPEESTLAELRLLLARRRDLVVDQTRAITRLREALVALFPALERALDLGAKGPLVLLTRYQTPAKIRWTGRKRLAAHLKGRGVKGADELARKALEAARTQSIELPAQEVASRICAELAAEILAFKERLASVDGQIASRFFERPEVRILSSLPGIGPILGAEFLVAVGDLSAFSSADQLAAYAGLVPAARDSGKRVGNNRRMRGGNKILKRVFFLSAFASLRCSPHSRAFYDRKRKEGKRHTQALIALARRRVNVLWAMLRDGTTFESPLLRA

SEQ ID NO: 254329 - protein, 369 aa, unidentified
MGKYSEVFVAFDVAKKKHAVAIAEGGRTGEVRFLGDVENSPLPIERTIKRLANRYERLHVCFEAGPTGYGLYRQIRALGHNCMVVAPALIPKRAGERVKTNRRDSVTLARLHRAGELTGVWTPDEAHEAVRDLVRAREAAADDLRRKRQQLLSFLLRHSRIYSGSGHWTLAHRRWLVNQKFEHVAQQIVFQEGIDAIEDALQRLRRLEKQLALIVPDWSMAPVVGAYQAMRGASFLVAVTFAAEIGDVRRFDTPRQLMSFLGLVPAESSTGDTVRRKGLTLAGNRRARRALVEAAWTYRYPARVGETLRARLEGLPKSVRDIAWKAQVRLCARYRRLSAKGKKLPVVVAAIAREMAAFLWAIGREVAPA

SEQ ID NO: 254330 - protein, 338 aa, unidentified
MDRISVLGVDLAKNVFQLHGVSERGQVVLRRKLSRQGFKKFMANLEPCLVGMEATSGSRHWQREFKKLGHDARLIAPQFVKPFVKSDKNDVNDAEAICEAVQRPSMRFVGEKTLEQQEIQMLHRVRGSLIAYRTELGNEIRAVLSDYEVVAPQGLARLREKVLEILSSDQSPVSEVGKSILGSLLEQWSNCNEQLAKMDQHLEKVFEKHEVCRRLVTIPGVGPITATAIVGTVPDIGGFKSGRHLSAWLGLVPKQNSSGGKHRLSGITKRGDTYLRTLLIHGGRSVVRASAKKTDKRSLWVIAKAKTRGKNKAAVAVANKNARVIWKILKTDQVYRAQ

SEQ ID NO: 254331 - protein, 421 aa, unidentified
MPNIEIGVDFMVKENFIYVGIDLHKETHTAVMIDCYNQKLGEITFPNRPADFPKLVTKVKKCNTDAKEVVYGLENAYGYGRPLAVWLIDKGYFVKDVNTAISHRQAKHRGAMYRKSDSDDAEAIALATLNMLDKLPDACPNDAYWSLGQLVHRRDNIMKQRTRLVNQLHEQLCIAYPSYKQFFNDISRPTALYFWEHYPSRKYLKGKSVEDLRAELVPVSHNKCSTKTCEKILDAVASDKVKNNAYQDARDMVTLSIVSDLQHYDSQLTEVDKMLEQMYKMLGCTLTTIPGVNVITAVKILAEIGDIKRFSNANKLAQFAGIAPLHLSSSGKGKDVATKQGNRRLQATIYFLAIQMVQVSSKGTPRNSVVRAYYEKRKAEGKTSQQALICISRRLISIIYGMLKHGTEYRMPVVESAGENR

SEQ ID NO: 254332 - protein, 356 aa, unidentified
MRKDNKNYFSETDIYVGLDVHKKSWDVSIYAESIYFKSFSISPPSSKVLAEFLEKNFIGGRYHVVYEAGFSGFWIYDELTERGIDCVIVSPADIPMSSKNKNFKTDRNDSKQLAQKLRAGLLEGIHIPEKVQREHRALLRLRNKFVKDRTRIKNYIKSNLMFFGKVIGKDYEDTRSWSKRFVESLSGIEYLSEEGKGIITELLKMLCVYDEALKEVEKRINQLSKTQQYKQDVEILCSVPGISTLSAMIMLIEIGDFNRFVDTNKLKSYVGLIPQEHSSGEKEIKTGITKRGNKFLKKIIVEVSWVAIRKDKTLLSRYTRLTKRMKGSKAVIVIAGILLNRIRSIMRKHEYYRIAA

SEQ ID NO: 254333 - protein, 339 aa, unidentified
MELYAGMDLHSRNTYIGIMDDALNRVFKKRVPNDLDQILQTLTPFQDQLKGFVVESTFNWYWLVDGLVDAGYSGAHLANPAAIKQYEGLKYSDDQHDAFFLAKLLILGILPEGYIYPKEHRPVRDLARKRMFLVRHKTANILSLQSFLQRCCAIKLSANDTRKLTVETLEEWLKEEYLVLTAQASLDTITFLKEKIKCLERAIIKRVKLREGFKQLLTIPGIGNILAMTIMLEVGDINRFQKVGNFVSYCRCVPSQRLSDGKSKGVGNRKNGNRYLSWALTEAAQLGRRYNEPFRRYYNRKVAQANTSLATKALGNKLARICYYVMRDRVPFRKELTSH

SEQ ID NO: 254334 - protein, 367 aa, unidentified
MSKAETGRLCVGVDLHKTQFTICALNEDGEYLLEKQYPTKEEGYSEFAREMNRFEEQGCSIELAVETTGNARFFKNRMESEFFAVKVVNTNRFKVITMSTKKTDANDAATLAYYLMKDMLPEAHLCSQTSEEIRRLLKTRSVLVQSMVKIKNQIHGMMLGYGIETKAAQLQSKRKRQELINDLEDHNFSAYTAPSLKVMLKILDDLSAEIKGIEKLLEEMVASNEDVALLMTVPGIGINTATVIAAYTAELERFEGNYKKFASYVGIIPSVHNSNETTHYGRITKHGPQELRTAFVQAALGMIRLTNVSSEWRIIKEYQRRKGDKGSGRAIIALARKITRIVFVMLSKREGFNPELMRCEEAIQQTA

SEQ ID NO: 254335 - protein, 458 aa, unidentified
MMKRTIGIDLGVTSASRLAVAEGSTIISNRRVRSSPAALTRAIHDASAGESVDLVLESTAMAWFVAGVAAERAGVEHTLYRVSGRKAAALRAFYRAHTKTDRIDAPVLARMPLVDDALQAFTLPSASELALKRLVTYRSRLVHEATRAKGRMRSMLHWAAPGLIRGQGVSDGIIRMLQRWPDLRQLARAQVRSVAAEAGIELDRAREVRQSARDAIAFYQDRVDFDALALETEINTEHLLSLARQIQRLDERIASEHQRAYPNDVLLSIPGVGPVVASVVRAIVGDARDFKNASSFRAYTGLIPREDSSGDAQRRGRISKAGPGMLRWALYLAADVARKHDPQLAALYRRLMVERGRHHNQALCAVATHLTDRIYALLREHRTYQPRDLDGRAITTAEATRLAASLAVDTATRERLRNHKRQRGPREPQPGQPKAPQGTTRPSRTSLADQALEHAQRS

SEQ ID NO: 254336 - protein, 387 aa, unidentified
MTKNKGRVVGLDVHPDSFAGAVVEGRDPASAVVLSTSTRVELERLEEWARRHTSTEDTLVLEASGNAFAVAARLRAIGREVEILDSHRAGKVGKVYCANDRVDAVKIARIYLSALSPIVWQPDQKTLERREIFSAYQAVVKESTRAKQQLRSMLNEHCVRLEKGFRLCHPHAITRLLKLREWTPARRMLLQQLHGSLLAARARRTLLRRHMAQEIVAEEALLRLTRLCGINLVTLYGVVAAVGDVRRFSHSKKLVAYLGLNPSVSQSGNFEGSGALKRHGRGALRALLIQSGKKLLEVKNPLQKWGLAIAARRGRNKAAVAVARKLCVALWHVLMGHVIGALERLDTLETKLSKFATELGPAALAAFGYNNKADFVKKKLYVLRSYP

SEQ ID NO: 254337 - protein, 381 aa, unidentified
MMKTNSDTTPQLYIGLDVHKEKTSIAIADPGATGEIRHHGEVATTQVALDRLIRRIAKSKNIPLTRISVCYEAGGCGMWIARMLHKMKVPCTVVAPSLIPTKAGDHVKTDKKDAMKLARLLRAGELVSVFVPDETDEAIRDLCRARVDAIDDRRRAKTRLLGMLRRLGYNYSGKTTWNDAHKRYLRNLSLPFAAHRVILEELIGQIDQLDERIARYETHMESLYADWRRKPIVDAVMGLKGFQIIAAMIIVSEVGDFVRFSHPKQLMSYLGLTPGEYSSGGKSKRSGITKCGNSHARWIMVECATHYGKEPRVGDHLSKRQEGLPRWIKEKSWAAQNRLYLRTTNLRKRLMHHNKIKVTVARELCGVIWEIGFKIQSNPAK

SEQ ID NO: 254338 - protein, 337 aa, unidentified
MKDFYFIGIDVSKKHLDCCLLFNSSVVRQDVISNHQKSIENYLSILCSEENIDIEQIVICAEYTGLYIYPLVIACQNNSYKLWLEDPTQIKYSSGLQRGKNDAIDAKRIALYASRYIDRIKIYKKPSVGIESIKLLSAELNMLCVDKAKYQAQISDQKEYMPNDMYKIKSKRLTLLIKELDKAINEIENEIENIVKNDVLLSRQMELLLSIEGVGKKTSLKMILETQAFTKFTDSRKFCCHAGVAPFSYVSGSSQHSKNKVSQRANKSIKTLLHLAALSAIQKKNSELRVYYERKIAEGKNKMSVLNAIRAKLIYRIFAVIKNDQLYDLNHISQYTN

SEQ ID NO: 254339 - protein, 330 aa, unidentified
MKVFYLGVDVSKKKLDLCLRSNGKDILYDVIPNDLSSIKSWLTRTFEKFFLSEDSLVVCAEHTGQYTYPLVCATKSIGVYLCLEDAAKIKYCHGIPRGKNDKIDACRIAMYAERYNDCLQPYTASELIIQKLKNLSTERSMLVADRAKYQSQLKDQVDYMEHSIYIAKCNRVEGIINTFTDYIAQIDLEIKELINQAPVIAHQMDLLMSVDGVGERVALKMIMETDAFTSFTDPRKFCCHAGVVPFVYVSGSSQRSKNRVSNRADKSIKHLLHMAALSVSQVKNSPLKKYYDRKVEEGKNKMSVLNAVRAKLVTIMFAVIRIVHFSFHFK

SEQ ID NO: 254340 - protein, 346 aa, unidentified
MKYFAGLDVSLKDISVCVVDEAGRVVLRGLVQSEPAAVADFLATRHVAPERIVHESGQLSIWLQRGLVRLGLPAVCIDARIAQKALSARLNKSDATDAEGLAHLARTGWYTPVHVRSENADRVRTLIAARERLIRLRKDLEGHVRGALKTFGIRMTAIGQGKRRQAFRDQLASAGEVDPVLAAIADGFIAAHETLCIAAEALEEDLRAIARESRLARRLMTIPGVGPIVSLSFIALVDDADRFRKVSDVGAFLGLTPRRYQSGATDYSGRVSKCGDAAMRGLLFEAASSLIRQVRRFSPLKSWAVRLAGRRGFKKAAVATARKLAVLMLTLWKNGGEFHWTKEAIA

SEQ ID NO: 254341 - protein, 375 aa, unidentified
MKEKVRFLGLDVHAETIAVAIAEPDGEVRSLGTIANRADSVRKLVKKLGPVEQLKACYEAGPTGYVLYWQLAELGVACEVIAPTLVPMKAGDRVKTDRRDAERLARSYRSGDLTAVWVPDEGSESLRDLVRAREAAKQDQLRARHRLSKFLLRTGQRPAAGVKAWTQPYMVWVKQVRFTQVARESTLLDYLHEVEHMAERIKRLEQAITEAVKLAAPAVQEVVRGLQALRGIAQVSAVTIVAELGEISRFQSARQLMGYSGMVPSENSSGGRTLRGRITKTGNAHLRRIAGEAAWSYRMRPCVGPALRKRQEGVAEEIKEVAWKAQHRLHNRYMRLGAAGKDQKKIVTAIGRELLGFIWAVGIKAEAAARQRATA

SEQ ID NO: 254342 - protein, 439 aa, unidentified
MSDLNQERVEPEFAAHIGLDWADQKHFWAMRTADGKQQRGQVLNTPEAVQVWAAELAQRFDGRPIAVALEQSRGALIAMLCKYAHLVLFPVHPNTVANYRKAFCPSGAKSDPDDGQLILELLLTHPDKFRRLQPDTVETRKLQFLAEERRKLVNQHTSEVQRLIGWLKQIFPQILQWFDDPACAMVGALLARWPTLQALQKASPKVLLKFFSRHNCRGEELMQQRIEQIRQAVVATSDDALMHTGLLCIQNSVALLESMRAGIATFDQQIAEVYRSHPDRAIMESFPGAGPALEPRLIAAVGTMRDRFASASSIACFAGIAPVKESSGKSLWIHWRWACPKFIRQTFHEWAGCSIRTCDWAREFYDGQRTKGKGHHAAVRALAFKWIRIFFRCWRNRVPYSEELYLKALRNHAPKPDLAAVEIGWKTSAGFAKLSAIPS

SEQ ID NO: 254343 - protein, 349 aa, unidentified
MQTTSFIGLDVHKDSIFISIAEEGRDAPIRFLGTIPNLPDEIGKLARKLSQHGALDFCYEAGGCGYNIHRQLTGLGHKCMVVAPSMIPRKPNERIKTDRRDSQKLAILHRAGDLTAVWVPDPTHEAIRDLVRARVDASMHLMRARQQLLAFLLRHGRNYKVGKNWTQRHRSWLAGQTFELEAHGIVFQDYLEAVWAAQDRRDALIARIAQMMASWSLGPLVEALRGLRGLDLLSAATFIATTGDLSRFESPRRLMSYLGLVPSEHSSGGSIRRGGITKTGNREARRMLIEAAWSYRYPARIAKEKAEILVRLPKPVRDIAWKSQLRLCGRYRKLATRGKKPTVVVAART

SEQ ID NO: 254344 - protein, 379 aa, unidentified
MNKRIIYIGLDVHKETISVAIAEHQKEPRSLGKITNKPEAIYKVMRKLGPFKRLKACYEAGPCGYVIYRQLSKLGIECVVVAPSMIPKKPGVRVKTDKKDATMLARLLRSNDLAPIWVPDERHEALRDLSRAVEATQGDLVRARHRVRKLLLRQGIRKPEGMSSWTYRHQRWLHSVKLPRANQQVVLREMMLTMEQAQERRQRLEAELEHSVEFSPLADLIRAWQCLRGIKVISATRLAAELGDIRRFSNPSQLMGYVGLVPSERSSGSRERRGSVTKTGNAHVRHVMVQAAWHSRHPPSLSGELRRRQRGQPERVKAIAWKAQDRLHRRFRRLVGRGKPRQKAVVAVAREMLGFVWAIAQEIPVQEYEQQPDSFSQAA

SEQ ID NO: 254345 - protein, 420 aa, unidentified
MKVVYQTCCGVDVHKSFLVATIIKTTSGVQPSYQKKRFSTFNNSILEFKKWLLDNSCRDICMESTGKYWIPVFNLLEDEINVTIANPKWVKAVKGNKDDTKDSKWIGDLFRLGLVPESYIPCKEIRILREFTRYRYKLTSCRSSEKNRFQNALTVCNIALDSVVSDIFGKSATSVIDYLLEQSDNSINHEEISSKLLRSLKKKSESVIESIEGYQMTDSQKYRMRLIHAHMDYITSTISDIDSMINSLVEPYDNAVKLLCTIPGVDRNSAITIISEIGTDMTQFSNSKRLCCWAGLTPGNNESAGKKKSVRITRAGVYLKPTLVQVAHAAVKSDKSPYYKAKYERIMKRRGKKRAIIAIARMILTAVYHMLSTGEVWNPTDLYKIDMPEPLKEKQKEKAIKQAKKLLISEGILDKSLLAS

SEQ ID NO: 254346 - protein, 346 aa, unidentified
MGKSITDLSSVTTVGLDLAKHVFQVHGVDASGRVVVAKAIRRNKLLEFFASLPSCLVGLEACGSAHHWARELIKLGHEARMMPPAYVKPYIRRQKNDASDAAAICEAVTRPSMRFVGVRSLENQAALMRHKAREMLVSQRTQLLNGLRGHLTEVGVIAAQGPRHARELAELIEACEETVSFEVCEALAPLVVQLRNLDEAIARLDRIIAKLAQKDETARRLMSIPGFGPITASAMAATIQDTSGFAGPREFAAFLGLTPKQNSSGGKPKLGRISKMGNRNLRKLLVVGAHAVLFHRKPHTDPLRMWAKKLIEKKPFKLVAVALANKMARIAFAILRGKTVYREIPA

SEQ ID NO: 254347 - protein, 338 aa, unidentified
MKITTIGLDIAKSIFHLFAVNKVGSLVKKKQLKRKQLLSYIANLEPCLVVMEACGGANYWAREILALGHEVKLIAPQYVKPYVKGNKNDYNDAEAIAEAGQRPNMRFVPIKSIEQQDVQNFHRQRERIKKERTALVNQTRGLLAEYGVVINKGVTAVRRDLPLIIEDAENGLSMRSREIFSELLDELRVLDERFTDCEKRIIALNKDNEICQRLDDILGIGAITASATYAAAGDGKEFSNGRHYSAWVGLVPGQHSTGGKPVLLGISKRGNAYLRTLYIHGARSVLLHSATKQDRFSRWAQAVLKRRGHNKACVAVANKIARMAWVIMAKGESYRAPA

SEQ ID NO: 254348 - protein, 363 aa, unidentified
MTVVGIDVSKGKSMVAAMKPGGELVAAPYEVRHSDIELSRLALDVLCMEPDTRVVMEATGRYHEPVAALLHSEGIFVSILNPLLIKQSGAGSLRKVKSDPKDALKIAKYGLDNWSTLREYTPTEAIRQQLKLCERQCDLYSKNIVMLTNNLISLSDKTFPGVNELFSSPEKADGHLKWVDFYRTFWHCDCINRMSPDAFGERYKKWCKKKGYHFSADATNALYAASCGLYTTLPRDNNAKLLVTVAADQLIALRENQSKLEAEMLNLCKQLPEYETVMAMYGVGKSTGPHLMAELGDIRRFPHRSSIVAFAGVDPGVVGSGKMQLSSVATSTSIEKSTLSSGFYLRQTQTQKRGGLPVLRQKA

SEQ ID NO: 254349 - protein, 386 aa, unidentified
MKLVGIDIAKYKHAAFIMDASTGESLCDPFLFKNNKDGFQKFYDELNKYTQDELLIGMEDTGHYNFAIESCLLAKGYKVALINPITTKNLRKASLKTVKSDKEDAILITKALLDKDYYRIISIQDEKLKEARELTRYRTQLTIEMNRKKNILQRHIDIVFPEFNTLFNNEYTITYLNILRKYGDAYTIAHTDIRSLRKCFKYCNIFSAEDLKELASNSVGIHDVSISFIIQSVISSIDLINFQIEELDKKIEELAITQDSSITSIPGISIITGTSILAELGDISKYSNAGKLIKFAGVNPYISESGEFSADKTAITKKGSKYLRATLYRVIIPVIRHNPAFNNYYHLKRSQGKGHLCALGHCVRKLLRIIYHLEINHITFDINSLK

SEQ ID NO: 254350 - protein, 402 aa, unidentified
MIGVGIDVSKLKSTICILNEYGEVLKAPYEISHTEKDLKELSRQIKGYGGKSDVRVVMEATGAYSRPVLYYLLDEDIFVSEINPLAMKKYRADINFRGVKNDTIDAMAIAKYAIEKWNRLKEYQRADKEYAAMKALSRQYLSYMKPHVALTQNLDHLIDQVMPGIKKEFEGYDVTTGKDRLADFLEEFRHYDYITSLGPKKFEERFNKWAQKKGCRPRHNKSSKIYLLAKEGIPTLAYDPTSRLLVEQAVAALKGLNQVLYQILAQIRELAEKRPEYKAVREMSGVGDVLAPLLVAEVGDPRRYHSGDALIACIGIDVPPYDSGQFKASERRITRKGSKQLRKLGYLLVKNLRKIKPTKDTAVYDYYLKKKSEGKKDKQAIVAAMNKLFRIYYARSMEAYRN

SEQ ID NO: 254351 - protein, 409 aa, unidentified
MLFVGDDWAEDHHDVEVQDEAGRRLGKARLPEGVGGVGGLHALIGQFLPAEAGPEQVVVGIETDRGPWVGALVAAGYQVFAVNPLQAARFRERSSTSGAKSDAGDAHALADMVRTDRHQLRAVAGDSDRGEAVKVVARAHQTMIWERTRHMLRLRSALREYFPAALAAFADLTAGDTLELLALAPDPAAAAALPISRIAAAVRRARRRDPAGKAEAIAAVLRAEQLSTPPALTAAYAAAVGATVGVIGVLNTQISTLEEQVNHHFGRHPDAEIYLSQPGLGQILGARVLGEFGDDPDRYTGARARKNYAGTSPITRASGKKRTVLARYARNDRLADALHQQAFSALRASPGARAYYDTLRARGTGHHAALRQLANRLVGILHGCLATGTLYDETKAWSHHTNEDQQTAA

SEQ ID NO: 254352 - protein, 368 aa, unidentified
MLKQSHYKVGCDAHKHYSLFAVLDHRGRPVEQTRVNHEPGAIRAFVSRFPPGTPVALETVGNWYWIVDEIEQASCVPLLAHAQMAKKMMGHVHKTDKLDAQGLAILQHLGSLPTVWIAPGEIRDERELPRTRMALSKVRTMLKNRMHSTLAKYALSLDTQSDIYAPKWRPQLMQLICSLPGETGRCMEQEIELLDQVQEQIHRLEARILERVQMTPTIQLIQSVPGPAKILSIVIDREVGSIDRFPSPHHFASYSGLVPKVKASGGKTHYGKMIKAANNYLKWAFIEAANVVVRQQHHPSWRQKYVVALFERTRQRKGHAVAVGTVARYLAEATYWVLKKGEPYREPVPQHPAGRKSAVSFEQGQVRT

SEQ ID NO: 254353 - protein, 377 aa, unidentified
MHSENIAAYVGLDVHKETLAVAIAAPERLGEVRYYGTINNEAQAVRRLFQKLQGLYGNILSCYEAGPCGFGLYHQLTAMNIKCQVIAPSRIPKSPTDRIKNDHRDAISLARLLRAGELTPVWIPDLTHEAMRDLIRARAAAKRDSRVARQRILSMLLRTDKHYAGKHWTGKHRTWLANQSFSQPSQQIAFQHYCQSLEQIEDRILQLDQEISRLLPEWSLCNLVCQLQALKGVGQLIAITLVAELGDFSRFSNPKQLMAFLGLVPGEYSSGNSIRPRGITKVGNSELRRLLYEAAWSYRTPAKVGGWLIYYRPDSVTQYSKDIAWKAQQRLCSRYRSLTAKGKKSQVAITAVARELTGFMWDIALAAQSSFSQQKQN

SEQ ID NO: 254354 - protein, 387 aa, unidentified
MPQPNDLSRSLVALDQNSTIIAVVELSHSSWLVAGVVPGIERQPRKKLEPNPERLLALLHRWRDEAVRAGSTITRIALAFEAGRDGFWLARWLEARGVEAHVIHASSLAVSREHRRAKTDRLDTELLKRGFLGWLRGERGHCSMARVPTIAEEDAKRPNRERDCVVGERTRIVNRIKSTLARLGIRSFNPALRKAADRLATVHTPEGVPLPPNTLAELQRDMARLGVVISQIRQIEEARQKRLEQQHEAGPHAMVRLLARIVGVGVETADMLVHEVLSRPMRDRRAVARYAGLTGSPDESGARRREQGLARAGNARVRRGMIQLAWRFLMFQKENALTLWYRGRTADSRRGTRKTMIVALARKLIIALWRFVITGEPLEGVVLRPAT

SEQ ID NO: 254355 - protein, 388 aa, unidentified
MGAVVIGMDPHKRSATIEVMTGNESIVGGGRFATDAEGYRAMLNYAKQFPERTWAIEGCNGIGRHLAMRLLADGEQVVDVPPKLSARARVFATGQGRKTDATDAHSVALVGTRMAGLRPVVNDKQLTVLRVLADRRRALGEEHNRLIARLHHLLLELIPGGAKLHLSHMQARALLAKVRPRDAAGKAIRRVASELIGDLERNHERTKAADKELKQLLAETGTTLMQLRGIGPYNAARLLVEVGDVTRFPSKAHFASWTGTAPIDASSGDHVRHRLSRAGNRQINHVLHIMAVVQLRNQTEGRAYFDRKKNTGKTSMEAMRCLKRRLSDIVYRQLLTDMLTPAGTGPGGHSGTALTSSVADSHPDIDSSDKPLPGPVTTKPRTASLAAS

SEQ ID NO: 254356 - protein, 288 aa, unidentified
MNENNINAAGIDTGKAKLDVALAGGKARLQIDNALSGWRELATWVKRHNVDRIGIEASGGYERGVVAYLREKGFTVILFQPLQIRAYAGFRLQRAKNDRIDADLIAACTAATTTVRQAPDPRFQAFCEHLTLIEQIEEDIVRAKTRLEAFRDSRHREILASEIKRLKAWRTAELKRLIAALRRHDDLANRLTLIESVPGIGPRTALALLIRMPELGSLSREEAAALAGLAPYDDDSGKHQGLRHIAGGRERLRRSLFAAALPAAFQWNPSLVALYVRLTGAGSRTRSP

SEQ ID NO: 254357 - protein, 371 aa, unidentified
MGDVSTFVGLDVHKNTITIALLRPGQDAPLEWSIVNETGAICRLSRKLGRQSEGRLRCCYEAGPTGYVLQRQLTRAGIDCRVVAPSLIPVKPGSAIKTDRRDARKLAELLRAGLLTEVTPPSEDEEAVRDLTRSRDDAQRDLTRAKNRLSKFLLRRGCVYAVGRKPTWSARYRAWLRALPFERPADQVIFEDYLLAVEQTEGRLQALTDRLEGFAQQEPWRATVQALRCFHGIDTVTALALVAEIHDPRRFAHPRQLMSYLGLVPREHSSGMRERRGGITGAGNRHVRRLLVEAAWHYRHKPIVGRALRLRRKEQPPKLIALADRALRRLTLRQRRMLHQGKHPNLVTIAIARELVGFVWSVLHPSRPAQA

SEQ ID NO: 254358 - protein, 393 aa, unidentified
MMRFAGIDIGAERHMVAVLDEQGEVLCRSSPFGEDASGYARLFELLGPSADCLVALEATGHYWRNLFVALIAKDYAVAVLNPLRTARFAEEELRRTKTDAIDALGIARFAQQKRPRAAQLPDSVTEELRELERLRERVVEDFADRLRQLHRAVDLGFPEFTRYVRTLESQLAATILSRYPTAASFRCVSVKKLARIVYDGSHKIGEELARNLIEAAEKSVGAHHSEPYRLRIKYLCEDLDVLRRRLKDLARDVERKLDDHEVGKLLMTIEGLGPLTAACLIAELGDPARFDSPGAIASYVGVIPRIRQSGKKRFTKGPAIPLGNARLRKSLFMVVLQMVRRNPWLRQYYERLRAAGKPGKVAIIAAMRKLLAAVWSVATHRRPFVPHISPNPL

SEQ ID NO: 254359 - protein, 313 aa, unidentified
MKMAQGKVFVGVDVSKARLDVEIWPAGERFQVANDREGRADLVRRLRRRGVEAIGLEASGGYERDPLRALLDAGLPARRVNPLRVRQFALACGVLAKNDRLDAAAIARFVATVPQRPVEPNPAAERLAELVTARRQLREELTRAENQAEHTVQPMLKRLSKRRADRLRADILLLDKAIDQAVADDPELARKNDLLRSVPGVGPVFAHTLLALMPELGRLSNRQAAALLGAAPYDCDSGQMKGQRRIFGGRRAVRDVAYMAAMVAGAHNPALKAFRQRLLDAGKRPKVVLVAIMRKLITILNAILRDNTPWAHA

SEQ ID NO: 254360 - protein, 341 aa, unidentified
MGQASTIGLDIAKRVFQAHGADATGRVVFRKRLVRAKVLEFFAGQPRCLVALEACGGAHYWARELGKLGHTVRLIPPAYVKPFVKRQKNDVADAEAICEAAQRPGMRFVPVKEEAQQANTVVFRARDLLVRQRTQCINALRGHLAEYGHVVPQGPAHVNRLVALVEDPKSSVPESARGILQVLIRTLNALEEQLKELDGEIARRAKADPVARRLMTIPGIGRIAATAITALVPAPEGFRAGRDFAAWLGLTPLQKSTGGKNKLGAISKRGERTIRRLLILGASAVVRWASQRGAAAGSWLARMLARKPRMLVTTALANKMARIVWALLVKGGTYRAPAVAA

SEQ ID NO: 254361 - protein, 350 aa, unidentified
MKVTTIGIDLAKNVFQVHGVDEQGKTVIKKQLKRHQMAEFFVNMPTCLIGMEACSGAHYWGRKLTAMGHTVRLMAPQYVKPYVKSQKNDAADAQAICEAVGRPSMRFVAIKNVDQQSVLALHTARRGFVKARTALANQMRALVGEFGVVIPKGLSNVTSRLPQELEDASNELTTVVRLLLQQLLEHFKEIDTQVKKLEKQIRVWSRQDEQARRIEQIPGIGPITASAVVASLGDVSLFEDGRQVSAWLGLVPRQHSSGGKTVLLGITKRGDSYLRVLFIQGARAAIQAAQRSAEGPPAWLAKLLARKHPNVAAVALASRNARTVWALLAHKRDYDPKHGLDKCISAALAA

SEQ ID NO: 254362 - protein, 355 aa, unidentified
MQSNKISFKGQNIYVGIDVHLKTWHVTTLTESGYKYSFAQHADAKELFDRLNKKFPEAHFKSAYEAGFCGFSAHYALMEQGIENIVVNAADIPTTGKEKTMKTDAVDSEKIAWALKRGELTGIYVKDKRFMDDTNLMRLRQRFIKDLSRLKCRTKSLLYAQGVTYPERFSRNRTHWSRNFMKWLREEVELLSEEKLTLMLLCDEVDNMRKAVLKVTREIRRLSTTEKYKENFELLTSVPGFGLIMSMTMLTEMDNNPMRFPNERKFVAMLGLIPTCHDSGEKTVSGEKTFRGNKQIGPLIVEASWIATQRDYQLGAYYTNCCQSMKPQKAIIKVARRLACRAFAVMKTKKKYVLS

SEQ ID NO: 254363 - protein, 346 aa, unidentified
MLHVGLDLSRKRVDVCLISDQGELIDDFAAPADRDGLYGLTRRVAVYDRPVRGVVESMNGARFVHDELVRHGWEVLVADAQRVKGLAPLACKTDKIDARVLAELSLRDLVPAIWLPTPELRRERERSRWRLHLVKHRTTPKNRVHSTLIAFGYRVPMADLFGVGGRKPLAELDVPEPWRGHVDASLQLIDDLELRISGIEAWLQRRGADHRYVPLLMTAPGFGWITSFTVACEIGDINRFPSPVKPTGDTGLCPRVSQSGDTDRRGPLSKHGPRYLRRGLMEAAIHAAPHPLYKERYQATKRRLGRQRGAKVAQIDLARKLTEAIWHMLTRNQPFAPAGATFRLAA

SEQ ID NO: 254364 - protein, 454 aa, unidentified
MQKQDSYDYYVGIDCAQNKHDFAMKNNQDKFLIKKGHFSNTLQGYEKFLNTVLSKCLDKDKILFGMEVTGIYGTNLYERLKSDGYHVVMIFPDSVKNYRDYKRLNKTDKIDSACIAELLLNGDAQIVHAEKNGYTDLKAYIRRRNALKVTCTQETNRFLAKVCLYFPDLLKVFPSGRATLKAIFSIYPTPYSIIETDFNELVSVLQKASKNKFGVDKANELIHAARNSIVVRKSISDGELYNIHSLIDSIDSLESEIRNLEKIIDSKAEEFPAYHVLLTLTGCGKITAATIVAEIGDISRFHKASQIVSLAGLYGDNSKSGSSVNKRGKISKKGSRYLRHAIYMVAEFARRNNPIFKAYFTKKKNGDRTKHILAVNAVANKLCKVIYSLMKNQSTYIIQYRDLAKLSESTQNEFFQNAETDFSAKTRRKKYLYEDEYGELHEFVFKSIKTALIE

SEQ ID NO: 254365 - protein, 420 aa, unidentified
MSFKIFRFNCCGLDVHKTWIYACIGITDSNGRTDYKQARFSSFSKGLKELCDWLAKYNCSEVCMESTGKYWIPVFNVLEKANNSVILAHPKYTKPQKGNKTDRKDAKWICDLFMCEMIKPSFIPPADIRHLRDLVRYRFKLTCMITGEKNRAQNCLTVSNLKLDDVFSDVFGKSSRSITEYMLAHPGEIFDVAPFVDSRCKTPMEEIQAAVDGAISPEQAIKLRQCLNHIDELEKHLEEIEREILRLSDKYQAALDLIRTVPGFDKNPMTAIQILSEIGGDMSVFPSAKHLVSWAGCCPRNDQSNKRIKSTRISRAGNYIKPILVQVANGLLRSKKHPEITDRYKRIKARRGHKKAIIAICRMLLTAIWHILSDLKPYTAEGFLESRPVNKAKVLTTSQALNLLKQRGYTIKDDIVPAMN

SEQ ID NO: 254366 - protein, 356 aa, unidentified
MNKRTKLNFSGQAIYLGLDVHKKSWSVSIFTKYGEYKTFSQPPEAEVLIQYLQRHFPGARYHSVYEAGYCGFWIHDQLRERGIDNIVANPADIPTQDKERRNKRDRIDCRKLARGLRGGDIKGIYTPPRWRLEDRSLIRTRLSMGRKQARCKNQIKSMLLFYGVAIPEQREMGHWSRRFIRWIEEIRMERSSGDVALKLHLEELCHLRQILAKLNRSILALARTEEYRLWISLLKTIPGISTLTAMIVLTELHEITRFRSLDQLCSYVGLIPDTQGSGEKEHVGGMTQRHHWSLRWLLIEASWIAVRKDPAMMEAFTEYCKRMRKTKAIIKIARKLLNRIRYVLKNQAEYVTGVIE

SEQ ID NO: 254367 - protein, 427 aa, unidentified
MAYRVAAVDVHKKMLAVVVADVVVEGEYRFERRKFGATPDQLHVLAQWLVQQEVEEVVMESTAQYWKPVWGALERYWKPAREKREGATKMSGALHLCQAKSNRGPRGRKNDFADGERMVKRLVAQELVLSFVPDAEQRLWRTVTRRKHQLTRDKIRFQNQLEALLEQAHIKLSSFVSDLLGLSARRMLKAIAEGETDPAALAALADCRLRATPEQLRDALGACAQLNGVYRRLLKMALEELKLMEEQMEQLDQEASNLLQHHQDAVQRVAEVPGFGVDSAVQMMAEVGAAAATFESAEELSSWVEVCPGSEESAGKSKSTRSPKGNSTMRRLLNQAAQSAVKVQGGIFDITFRKLLPRMGYKQAIWAIAHRLCRLLWMILHKGIRYEERGPAVSAKSQRARSARMIKALKKLGYRIEGGPLPAGAQA

SEQ ID NO: 254368 - protein, 285 aa, unidentified
MLIVGCEYQPSIQQIAWVETDSGEVGERALLHSTGEAERFYRELKEQGVGVRVGIEATGHARWLERLLAELGFELWIGNAAEIKAKRVRKQKNDREDARLLRTLLIENRFPRVWLPDVSNRDLRQLLWHRHRLVQMRTRVKNQLQAVALNEGVRRKKGLWSEAGRAQLESFQLMPWATRRRKDLLEQAEQHREAQRLMTHPGVGPLTALAYVLIVGSPERFRCGKQIGSYLGLIPSEESSARRQRLGHISKQGNALLRFLMIAAAQAATRSNPAWRTTRTPKLSR

SEQ ID NO: 254369 - protein, 367 aa, unidentified
MKKGSTIAAKRSTKISQQKLTVGLDLGDRSSWYCVLEEAGSIVLEQKLSTTPKTIREVFGGMPRSRIALETGMHSPWVSRLLTELGHEVIVAHARHVRLIGESRKKDDRRDAQTLARLARIDPQLLCPVRHRSAKAQADLTVIRARASLVRARTALVNTARGLAKSYGERLRGCNVRNMNPEKAEGLSPELQTALGPLLACIASVSEQIREYNERIETLAQQSYPQVALLKQVKGVGTLIALTFLLTLEDPHRFRKSREVGCYLGLQPGRRNSGQSEPQMHISKEGDPYLRTLLVQGAHHILGPFGMDSDLRRWGLKLAERGGKSGKKRAIIATARKLAVLLHRLWVSGEAYEPLHNSSRVPLPMAA

SEQ ID NO: 254370 - protein, 318 aa, unidentified
MASIGDVASGTVTIGVDPHPGSHTAAALAADRGVVGYLTVVNDLEGLRRLREWASQFPDRRWAIEGAGNHFVAPLVVELLADGEKAYSIPPAMTAQYRRCRSRSKDDQIDAENAAKALLANPDLPPHDPTNYERRLKELTRSYARISSQLKASRMALKDTKIPEVRHVLNSVITALDQAIDTLKRTMKETVQAIAPQLLATVGVGPVVASVVLAEAGRVARFKGRDRFVAYGGCAPIRWESGAHQSVRVNAGGNRRLNWAAHIIVTSRLRIDPRTQHYRDKKLAEGKTQREVMRLLKTYVCRELFKTLRATHIGPLDA

SEQ ID NO: 254371 - protein, 366 aa, unidentified
MVMIGIDPHKGSHTAVAVNGGEVVLGERLVRATGMQVPELVEWAKRLDGGDRIWAIESAGGLGYLLAQQLLAAGETVVDIPATLASRVRLLGTGRSAKNDPNDARSVAIAAVRAPELVAVRVEDHASVLRLLSRRHTQLAWTYNKAACRLHALVAEVVPGGIGKEVVVSQARSLLEQHRPVGAVAVERHLLAVDLVDELDRLVGQRKALRQRITHAVAASGTTLVDIFGIGDVVAAIIVGQVGDITRFRTADRFAAYNGTAPIEWSSGNPKRPIHRLSRRGNRTLNHAIHIAAVTQLRHRHSPGRQFYDRKRGEGHTGRAALRSLKRRLSDVIYQHLVADAARAADRPGRAVQETTPQACVAGPTS

SEQ ID NO: 254372 - protein, 421 aa, unidentified
MQAPVSDFAAFIGIDWADAKHDICLAVAGSNTHELSVLEHRPAAIAAWATSLRERFNGAPIAVCIELCQGPIVSALLEHDFFVIFPINPATLAKYRRAFTPSRAKDDPTDAQIALDLLLRHRDKLKPLKPEHPDVRALRRLVEARRDLVQDRVRLTNRLTFALKAYFPQVLQWFRDKETEVFVDFLAKWSSLQSAQRARQETIVAFFHDHNVRYANVIERRLAQIKSEVPLTTDAAVIEPSRLLVLALLPQLRLLNRAIADFDAEIAHRCQKLPDFQLFAQLPGAGPVFAARLMAAFGSQRDRFVNAASLQMYAGVAPVTERSGNKHWVHWRWSCPTFLRQTFVEWAGETIPRSFWARAFYDSHKAKGASHNAAIRALAFKWIRILYRCWLDKTPYDESRYLSALQKRHSPILKFAASSPS

SEQ ID NO: 254373 - protein, 345 aa, unidentified
MPIVGGLDIHRKQITFDYLDTVTGEVRRGQIAPADRQHVRAWLARFAGQDDVAFAVEGCAGWRYVAEELAAAGIAAHLGEPADTAALRGRKRHAKTDKTDSRHLRALLAEGRLPECWIPPAQILEYRALLETYHDLRRAHTAWVQRIHAVFFHQGAPPLSEGALRTEPGLAGLRAAAAAHLSTAGQQQVATALDMLAATEAQLGPLRHQLRDAARHLTGAKVLAERLYGVGPLTALALTCWLGGADRFSSSRKAVRFTGLDITVHSSDRKGPPGRLSRQGPPVLRWAVYEAGKTHARTTAPDHGYYTAVADRKNTKRAALSEARKIVRQACHILTELGDDALTVT

SEQ ID NO: 254374 - protein, 368 aa, unidentified
MQTSIAPLTYVGLDVHQDSISVALLRPGGQQADEDQIANTAEAVRKLVRRWKEPGAVRVCYEAGPTGYGLQRTFAALGVDCCVIAPTLIPVRAGVRVKTDRRDARKLVGLFRAGELTAIRIPPPEEEAVRDLIRAREDLGEDILRARHRLSKFMLRHDRVYREGKARWTERHLAWVRRQRFETAGLEELVGHHLAIVEARLRQRELMDAAIAKIAASEPYAQSVLRLCCLRGVKSLSALTLLVEVGDFRRFTTAAAFMGFTGLVPSEASSGERHRRGSITKSGNAHLRRVLVESAWAYRQKPALGSAWRQRFADQPAELVAYAIAAQQRLHARYWRMTNRGKLSNVATVAIARELAGFVWGVMNERWA

SEQ ID NO: 254375 - protein, 406 aa, unidentified
MKQIVSVGIDVSKGKSTVCAMIHPNTIIKESFEVLHTVEEMSMLADYIGSLDGEIRIVMESTGHYHLPVAQFLYQKGFFICVENAYIIRQFSRIMLHGAKTDPLDAKKLAKYGLAYWSELKPYKFHPSCYTELSLLSKQYQTYIKLLIAAKQNVIHLMDEMLPGFKEALDTASSVQFSKVKYVDFAKEFYHVDMIKSMGKEIFRENYKQWCKEKGYRFQSEKADELFHLAEDGIPTLPTEFPSTRLCMEVATEQVSQLGYALEQILSQMQNLAKTLPEYQTIRQMGGMGEKLCVRFIADIGDVRRFHNGKALVAYAGIDAPPYQSGQYTGTKRRISKRGNSALRKTGYEVMKSLKSHPPKTDTRVYDFIIKKENEGKSKKQAKIAGLNKFLQIYYAKVMEIYKNIV

SEQ ID NO: 254376 - protein, 345 aa, unidentified
MKITTVGIDLAKNLFQVHAVDERGRAVLRKQLRRDQMARFFANLPPCLIGMEACASAHYWARTLQKFGHTVRLMAPQFVKPYVKTNKNDVADAEAICEAVSRPNMRFVPIKSVEQQAVLSLHRVRQGFVRARTAQGNQIRGLLGEAGLIIPKGIVNVAKRVPALLEDAGDEVPASFRQLIQRLTEHLKELDRQVDELEAQIKAWHRGSELSCKLEKIPGIGPLGASALVASIADATSFDNGRQLSAWLGLVPRQDSSGGKPKLLGISKRGDVYLRTLLIHGARSAILAAQRKAVNTNVWLASLLNRRHPNIAAVALANKNARTVWALLAHGREFRADYAPEVSAA

SEQ ID NO: 254377 - protein, 399 aa, unidentified
MDVHKKMLIGCAITPDGRQLHRFGTHYADLLRLAEWLQGLGVEEVAMESTGVYWKAPWNVLEARGFGLTLVNARDVKAVPGRKTDIKDAEWLAELYQHGLLKASFVPDREQRELRELVRHRKQLVEQRSATAQRLQQVLEGGNLKLGTVATDVLGTSGRAILDQLVAGADNAEQLAELARGRLRNKREELAQALAGSVEPHQRFMLATLLRQIDFVNAEIATLDKEVKARTAGRFRAAVELIDQIPGVGERAAEQILAELGIDMDQFPSAQACASWAKICPGTHQSAETNKRVGTGKGNIWLRRALIEAAKAAVLKRDSYYSVLYRRIKSRSGSGKASVAVAHSILVTIYHLIKTGSAYQDLGPAHFDRDDRERVQRSFVRRLQRLGFKVTIEDTIAVA

SEQ ID NO: 254378 - protein, 391 aa, unidentified
MIYVGIDVAKDKHDCFITNSDGEVLFKAFTITNNLDGFNDLYQKIETVMKDITKVKVGLEATGHYSYNLLGYLIDKGLPTYVINPLHTNLYRKSLSLRQTKTDKVDARTIASMLMSDVNLKSYSDTFYHNEELKSLTRYRFDKVKERAKLKTSVSRLVCILFPELEKLVPTLHIASVYALLSEFPSAKHVATAHLTRLTNLLSESSKGRYGKDTAITFRDAARASIGSNMPAKSLELKHTIKLIQELDSEIDEIENEIKIIMDEINSPILSIPGINYRMGAMIIAEIGDFNRFDSPDKILAYAGFSPSTYQSGQLDGAYAHMEKRGSRYLRYALYNATKYVCHWDPTFAAYLAKKRAEGKHYNVAISHAVKKLVRVIYHLEKTKQQYIKVA

SEQ ID NO: 254379 - protein, 428 aa, unidentified
MQYALIQVLPDVPPGGVCAGIDWAAADHVACVVDMAGRVQDRFSAAHDKAGLDAMITRLRRAGASEVAIERGDGVLVDALLAAGLTVVVITSRQVKNLRSRYGSSGAKDDRFDSFVLADTLRTDRARLRPLVPDTAATIGLRAAVRARRDLVAHRVAACNQLRAHLAAAFPAAAGLFYELDSPISLAFLARFGSHDAAARVGEQQMTAWLQTVPARGNTAPASVLCARLRAAPRGATGADGAARAAVTAALAATLTALAAQVKTLETRIAAQLAAHPDAHIFTSLPRAGTLRAARLLAETGDCRSKFPDPESLAGLAGIAPVTRQSGKHASIEFRWAVNRQLRDAVCDFADGSRHASPWAAGIYADARARGKDHPHAIRILARAWSYIIWRCWQDGTAYDPAKHAALQRILAQQASQSADGPGPERDR

SEQ ID NO: 254380 - protein, 355 aa, unidentified
MSGAYEGRQIVGMDLHRRRSVLVRMTDTGERLEMVRISNDPQYLAQVMARAGEAPEVVLEAAYGWYWAADTLAELGAHVHLAHPLGVKMFSYRRVKNDQRDATDLADLLRMGRLPEAWIAPPATRELRGWVRHRAKLVGLRSSLKCQVHGVLAHAGIWVPMSDLFGVAGQQLLAELSAGTRLSVESRSRLDSALRVIAALEFEIELFTKLVNGRLRTDPAYRAIQAIPGVGPVLAAVFVAEIGDIGRFHRPQQLASWAGLTPKHHESDTTVHRGRITKQGSRLVRWAAVEAVQRVSGHTRLGQHRDRVAARRGRNIGVVAAARELLTLVFYGLRDHHIRALDTPAPPPAANRSAA

SEQ ID NO: 254381 - protein, 349 aa, unidentified
MDQIIRIGMDTSKHSFQLHGVNSAEEPVVRRKFSRGQMLAFFARQPSTVIGLEAGGAAHHWSRTLSAMGHEVKIIAPQFVKPYVKRGKNDAADAEALCEAMSRPSMRFVAPKTAEQQAALMLVSVRDRLVRSRTQLTNAIRGHAAEFGVIASRGLDKIDLLLALIVTDESIPALARSLFAQLGAEFAATEARLKQINAELLDWHRQDEVSRRLAQIPGVGPIGATMLALKAPDPGNFRSARHFAAWIGLTPRDHSTGGKTRLRGITRAGDEALRSLLVVGATAVVRQLRRNRGRPWPWLQCLLERKPPKLVAVALANKIARIAWRLMTAGQSYDGVLAARLRHRAKAAC

SEQ ID NO: 254382 - protein, 311 aa, unidentified
MTSAGVFVGIDVAKAQLDIAIRPSGEYFTAPHDDPGVSGVVQRLGALQPTLVVLEATGGFELDGASALGAAGVPTAVVNPRQVRDFARSTGLLAKTDRLDAQVLAHFGEVLRPAARSLPDAQAQELSAVLLRRRQLVEMLVAEKNRLPMATRRIRPQLQRHIEWLQQQVADLDRDLGALIRSSPLWRAKDDLLRSVPGVGPVLATTLLASLPELGTLNRQQIAALVGVAPLNRDSGTWRGRRTVWGGRAHVRAVLYMSTLVAVRHNPRLRSFYVRLRDAGKVPKVALIACMRKLLTILNAILKHQTPWALP

SEQ ID NO: 254383 - protein, 348 aa, unidentified
MLIIGCDYHPGFQQIAFVDTETGEFGERRLTHRDEAEQFYDTLRERSVRVGMEASGHARWFERLLRDLQFELWIGDAAEIRTKRVRKQKTDRQDAQLLLRRMVEDRFPRIWVAGAENRDLRQLLWHRHRLVQMRTRVMNQLHVVALNEGLRRKKALWRPAGRNELESLILAPWASRRRRDLLDLLDQLTPKIQELTRALEDEVEKRPVTRRLMTHPGVGPLPALAFELVIGTPERFHCGKQIASYVGLVPSEESSGDRRRLGHISKQGNSLLRYLLVEAAQVTVRSQPHWRSKFFHLAMRRGRKIAKVAMARKLAVRLYWMWRQGCDYAHFEKLGSHAGEPGNRHGVE

SEQ ID NO: 254384 - protein, 418 aa, unidentified
MLVVGIDIGAESHHVAVVDRAEAVVVKATAFAENVAGYQELFALLARAGARGGEDLPLAAASAEQERTLVVMEATGHYWQNLFAALVAQGYAVALVNPLRTHRFAGEELARTKTDSIDCLQLARFGAQKRPAVTCLPEAAVGELRELVRLRARLMQDVVDRVNQLHRLVDLGFPEFTRYLKNLNTQLATAILRQYPTAAAVRGLSCKRLAKLNYDGRHRVGEELARQLIAAAAVSVGSQHTTAHQTGVRYACEDLETLRQRLKQLDGDITARLQQHQVGKLLTTIAGIGDNTAAMLIAELGDPARFRSAASLAAYVGLCPGHRHSGKHQPKSSSLTPIGNRRLRQALWMPTLSAATCSNPWLMAFYRRLVERGKPHKLALIAAMRKLLAAIYSVAKHRRPFVPFRHSQPLDNEVPARL

SEQ ID NO: 254385 - protein, 341 aa, unidentified
MKVTRVGIDLAKTVFQVHGIDEKGRTVLRKQLRRSQVLEFFANLPCCVIGMEACGGAHYWARKLSALGHEAKLMAPQLVKPYVKGNKNDRNDAEAICEAVGRLNMRFVPVKNAEQQALLALHRVREGLVAARTAQVNQMRGLLAEFGLVMPQGIAKMRMRVPEILEDGANELPGLMRELLARCYEQFQGLDARVHEFEARIVRWHRDNEASQRLAKVPGVGPLSASAYVATLGDVQAFKSGRQAAAWLGIVPRQQSTGGKQQLLGISKRGDVYLRTLLIHGARSVLRCLKRKPTNCWLAELAKRRHHNIAAVALANKNARIMWALLAHGREYKQSYVPTRP

SEQ ID NO: 254386 - protein, 431 aa, unidentified
MKYKQKKKQNQRILRITNQTLVVGVDIAKNTHVARSIDFRGIELGRDCVFENSREGLTKLVSWMKEIQREHAKTDVIFGIEPTGHYWFPLAEFLQKEDIKVVVVNPHHVNKTKELEDNSQTKNDYKDAKVIADLVRNGKYSEPQLPMDVYADLRIYMNVREKVMVNLGQVERRIQNWLDRFFPEYSQVFKDWSGKASLIALAEFPTPQEVVSLGVSAILTRWKQDVKRAVGIKRAEKLVKVASSSIGITQGRTAAKVEMKALLEQYELLTRQMEEIMHQVERLLERIPGSAEMLSIPGVGITTLAGFLAETGELSNYDHGQQIIRLAGFNLRENSSGKKKGKSTISKRGRARLRALAYRAIMPMVAKNPEFQALHRYYTTRTVNPLKKKQSLIALCGKLFRVLHTLGTKKIPYNAQDVLGPVRQAQLQRAV

SEQ ID NO: 254387 - protein, 375 aa, unidentified
MEHHSEAFVALDTAKLRNAVAIADAGRNGEIRYLGEIDNTEAETRKLVAKLASKHARLTFCYEAGPTGYGLYRLIKSIGHDCIVVAPSLIPSKPGDRVKTNRRDAVNLVKLLRAGELTAVWVPDARHEAMRDLVRARDAAVKDYRIKRQNVSSLLLRLGRHYPGKKTWGRTHINWLTGLKLEHREQRIAFEEMLLAVRQVRERIERLEQAMREAVADWTLAPVIEAVQAMRGIDMVGAIAFLAELGDLSRFENPRQLMAYLGLTPSERSTGESVKRGGITKAGNTRARRLLIEAAWSYRFPPRVSKDMQTRIGAAPRTAREIAWKAQMRLCGRFRTLTRKGKRPTIVVTAIARELSAFIWAINREVVGSHATANQ

SEQ ID NO: 254388 - protein, 374 aa, unidentified
MNNTITYVAMDTHKKQHKIALNYPCQEEVVEFTINNTVRDIKKMVNKIQKHAPGKVEFCYEAGVCGFTLKRRIEQLGCRCGVIAPSLVPRKPGERVKTDRRDAKKLLVMLKAGLLTEVHAPDEHQEAARELTRLRETARDNLKRIRHQLIKFLTRHGYVYREGRHWTQKHISWLRTIEFAESTLTNVFESYFNEMIYCIGRLENLDKEVGHLAGSREYKEIVGLLCCYHGIDTLTAITIITEIFEFGRFESPRHLMSYLGLTPSEDSSGEKQKKGSITKAGNKRIRRLLNEASWHYRHIYVPSAALKKRRKGQPQWAIEIADAAGRRLSKRHRYLVNKGKMPCKANIAVARELAGFIWFTITQYQARNNIKNVA

SEQ ID NO: 254389 - protein, 346 aa, unidentified
MPMKIAVLGIDLGKNSCSVVGLDDVGAVIKRRRMRRQSIIAFTRSLPACVVAMEACCGAHHLGRLLRSQGHTVRLMSPEYVRPYVKAQKNDDRDAEAIAEAATRPTMRFVELKSEEQLDMQTLHRARDRLVGERTALINQLRAILLERGSTVPQGRRRLEQYLTTMSDPEGEASLSPRMHRLIEDMRAEWLELDRRIATFDNEFAACARNDADARRLATIPGIGVLNATALIAAIGNGQTFARGRDLAAWLGLVPRQVTTGGKPRLVGITKRGNKYLRKLIIHGARSALPVLASNATPLGEWLRALMKRVHKNAAVVALANKLARIAWAVLRRGEEFDAAAIRAAA

SEQ ID NO: 254390 - protein, 347 aa, unidentified
MNFYKRPHKYYCGVDLHSRTMYICVVGQDGAVLLHRSLRCDPVRFLLAIAPFRKDLVVAVECVYSWYWLADLCAREGISFVLGHALYMKAIHGAKAKSDRIDSGKTAVLLRGGLMPVAYAYPADMRATRDLMRRRLLFVRQRGSLLAHIQITHHQYNVDPPGKRITYRSNREGLGEGFEDSSVRHSIAADLALADHYEVIIGELELAVLRQARIHDPNALALLTSVPGIGKVLALTVLYEIHDISRFPSVRDFASYSRLVKCERSSAGKSLGSGGNKIGNAYLKWAFSEAAVLFIAKSEQGRTVLTRLERKYGKPKALSVLAHKLGRAVYYMLARKQAFDPQRFATS

SEQ ID NO: 254391 - protein, 430 aa, unidentified
MTTHTYSTSPRAIIASHNQKISQNKAVQPLVVDLSDQSIIKELNGKRPLGLDLATKKYRLCYQDDLGKMINVELRKNELRKMLRETPGKYHLCIEGCSGASYWERFARENGHKVKVVPGYVTRKLGWNQPKDDFNDAYNLYNALFNPLVPSCQTRTEDELAISALISQKEALLKSLNEQVNKTRSFLIETGEYDCVIKGGGSAVQAIELYISNHIHAASEHKRSIRCLEGFKRMILSLTKEIDEINETLSEYGQTNKQVKLLLTIPGVGIETAVPIAIGAKNIERFESARQFQAYWGYHPTHGGSGGEIEMGKMSSNGDRSLKRTLYESALSLNHQGRYKDEPRSEWIYTKVTQNKAAFKKGMIVIGAKILRTAYGVLKTGKPYNPAIDNSLGRIKTKIHKRSNPKYKEQNINAVLQNKYEQELTLAALG

SEQ ID NO: 254392 - protein, 354 aa, unidentified
MFSMTANNPHITGGVDTHQDTHHAAALDHNGRILGDHPFPATPTGYQQLTAWLTSFGTITAIGIEGTGSYGAGLTRHLTTCHLKTIEVDRPDRRTRRAKGKSDPIDAINAARAVLSGQATGTPKTRTGPVEAIRALRQTRAGAVKARTAALNQLRNLITTAPDTLRTTLTGRHGTALLTTCLALPLDEQHLHDPATATTAALHALAGRIHALNTEITLADKRLRPLVTTTAPTLIALPGVGPEVAGQLLTTAGDNPHRLHSEAALARLCGAAPIPASSGRTDRHRLHRGGDRQANRALYTITLSRMRHDQKTRDYVQRRTQQGLTKKEIIRCLKRYIVREIYTALTTDFTTLTT

SEQ ID NO: 254393 - protein, 410 aa, unidentified
MLFVGDDWAEDHHDIEIVDGAGRRLARRRLSEGVVGLEVLHALIADHLGDDAEPESVMVGIETDRGPWVQALVAAGYTVYAVNPLQAARYRERHGTSGAKSDPGDAHVLAELVRLDRAHHRPVAGDSDLAEHVKVTARVHQSLIWSRQRQTNTLRSMLREYYPAALATFDELAGRDALAILAAAPSPAEGRGLTVRRVERLLKAAGRQRNLTSTAERIVTGLSSEQLEARPAVVSAYSGSVGALVAVIGELVRQTEKLAEQVEAGFGRHPDAEIYLSQPGLGSILAARVLAEFGDDPNRYADAKSRKNYAGTSPITKTSGKSRAVLARHARNRRLADALYQQAFCALTSSPGARACYDAHRARGATHHQALRALGNRLVGILHGCLRHHTTYDEATAWPQLRTQPDTVAA

SEQ ID NO: 254394 - protein, 433 aa, unidentified
MRVLYERVAGIDVHKDMIKVAIRSPGEKPWARAIEILEFRTFYGVLQEVARLLRRRGVTHVVMEASGIYTEPVYHALREQDFTEVAVINPAHARALKGHKTDAKDCARLAELFECGLLRGSYIPPAEQKEVRDLTRYRMKTVQARTSEIQRLGKALESAGIKLGSVASGITGDSATAMIQALIDGERRGPVLADLAQGRMRTAGKLADLSMALSGRFTGHHALLCRLHQDRIAGFDAAVAGLDEQIAAKVTRWQREGRLLASVPGFGDVVSAAWLAEIGPAPHRWFASCGKLASWVTLCPGNNISARKRKHGRTGDAGTYIKPVLIQAAWNAIRAKGRLQARYHRLVRRFGGEKNPAAKKKAITAIAHTLLKIAYQVLKSGQPYTDLGADFYTRRQSPQQKQAYLERQLQKLYPGRTVTITISPPEAALPPGA

SEQ ID NO: 254395 - protein, 428 aa, unidentified
MTHSEIKSAEFAAYIGIDWADQKHDICLQEAGSNRIESQQIEHKPDSISNWVSELRRRFQGKPIAIALEQKRGGLLYSLMHYEFIVLYPVNPHALASYREAFTTSGAKDDPVDAGLLLEMIGLHRDKLHPWIPDDPLTRELSMLVEYRRRLVDDRTYLTNRLQALLKQYFPQALDWAGELDTLRALDFLAQWPQLEAIQKATPDQLRNFYRQHYRLGEKLPQRLSEISTAQPLTRDKAVINASIPMVQALLEPLRGLIAGIETFDQQIEACYQQHPDKEIFNSLPGAGEVLAPRLLAAFGADRARYQSAEEIQCFSGIAPVTVRSGKTKFVRRRLACPKFVRQSFHEFANSSIKWSRWARAYYDQQRHRGNKHHEAIRSLAYKWTRIIYRCWQDHEPYDESVYIAKLELHGSPLVKLIPTAAEQAVSS

SEQ ID NO: 254396 - protein, 411 aa, unidentified
MEKVYDKCCGIDVHKKLIVACFKNGNKQEIRDFGATTRELLKLADWLKEGGCEMVAMESTASYWKPLYNILEVSDLNAMVVNAHHMKAVPGRKTDVKDAEWIADLLQHGLLQASYIPAKDQRELRELVRYRKSLVGERSRELNRLQKMLEGANIKLSGTVRDINGMSARNILEFILTGENFDEAKYDEMYKKKIIAHNLKASKEQIIDDLNGVMTPLQRRMMKELLTHLDELNAHIKNLDDEIDNFMKPDEKQAVSVIEDVTGIGHTSAQEIISVIGIDMSRFPTDSHIASWSGLCPGDNESAGKRKSGKTRKGNSLLRSTLVICAHAAIRNKSSYFYAQFMRISAHRGKKRAYVAVAHSMLIAIYHILKDGVVFKDLGSEYYNQFNKERKINAYLKKLKALGWEAPIVAV

SEQ ID NO: 254397 - protein, 313 aa, unidentified
MPTIGIDMSKDTFHAAFDDTEVIIFKNTVPGIKGFIQEMGARSYSKAETLIGTEATGVYHLLLAENLRVGGWNIKVINPLVTYRMFKSNLRHAKTDRKDAIAIRKTLLTGAGYLYTDTPEILALKTLVQEREVLCRMRAETKQRVVAHRLKATAAGLILHDSFSGPIKILSYEIRGLERQLANYAPDTQTLLRSIPGIGQVSAAALVAYIGDIHRFSSAEKLTAYLGLDCRVHESGVSIHGKGYLTKRGNRYLRHVLFNAAFIAKRRNPDLKKYLVKKMSEGKHYFSALCAVERKLVHLVYAVWSRGTPFESR

SEQ ID NO: 254398 - protein, 343 aa, unidentified
MQINSVGIDLGKTTFHLVALGENGKVLLRKKFTQKQLITFAAKMQTSLIGMEACSGAHFLGRVLREQGHDVKLIPAQFVKPFVKSNKNDFLDAEAIAEAVDRQNMRFVPIKTDDQLDLQAMHRVRDRLVARRTSVINQLRAFLLERGMVFAKTPFKLKQAMPEILENAEANLTPRMRNLVSLLWSEWKDLEQQIVAMNLEVEQIASSDPACQRLRQIPGIGPLVATAIVAAIGNGAAFHKGREFSSWLGLVPRQHSTGGKARLFGISKRGNNYLRKLLVHGARSAVLRVKRDRSPFGPWLNALERRSPVKVVITAAANKLARIAWAVLSSGQDYRAVPDARTA

SEQ ID NO: 254399 - protein, 416 aa, unidentified
MTTFKGILRMEVVYRCCCGIDVHKKMIAACLNNGGKRELREFGTTTGEIKVLANWLTEAGCEMIAMESTGVFWKPLYNLFELLGLDAIVVNASHMKALPGRKTDVKDAEWIADLLRHGLLKASYIPDREQRELREIARYRKSLIEERSREVCRLQKVLEGANIKLDSVVKDINGKSARKLLDRIIANEAPDSEEVAQMIHGRLLPKLDQLMQSLEGITTPLQRRLIAQIVDHIDDMTKRIANMDDLIKGYMEKYETAIAAVDELPGIARRSAEVIIAEIGTDMGRFPSAAHLCSWAGVCPGNNKSAGKRSHGKTTKGNKALKSILTQCAKAAKNCKDSYFSAQYQRIAARRGKNRATIAVAHSMLIAIYHVLKYGIAFKDLGSDYYDSFNREHKIKGYLKRLQALGWSPDLVSITA

SEQ ID NO: 254400 - protein, 343 aa, unidentified
MQTITTIGLDIAKSVFQVHGVDADGHVVIRRQLKRRYVLAFFQKLPPCLIGIEACASSHHWSREFKALGHTVRLMPPAYVKPYVKRQKNDATDAEAICEAVTRANMRFVPTKTPEQQSCLMLHRTRHLFIRQQTAVINAIRAHLAELGIVAPVGRKGVEELLDVVADRSDKRVPEVARACIAALGAQLRRLKEQILEFDRMIMAWHRSNEASKRLDAVPGIGPMLATALVAGVADPKAFRSGRNFSAWIGLVPKQHSSGGKDRLGSISKQGDRYLRGLFVAGALSVIRYAKIHGTRHRPWLTALLTRKPTKVAAIALANKLARMAWAMMARGERYRQPVALAA

SEQ ID NO: 254401 - protein, 379 aa, unidentified
MIVIGADTHKRTHALAAVDEGTGRVRGQRQIEAEEQGYLAAVRWARGLDDERVWAIEDCRHVSRAFEQALIAAGERVVRVPPHRMGASRRGEREPGKSDQIDALAIARAVVKDGLERFPVAHLDERAMEIRLLSDHRKDLVAERTRVQNRLRWHLLELCPELERSLKRGSLAAARQLERIDRRLRRIGGGVRVRVAREQVAQLRVLNRQVDALERELLVLIQTHRPQLLAETGCGALTAALLIGRTAGAARFASDASFARQTGTAPIPCSSGQRNRHRLDRGGDRQLNHALHVIAITRARHDPDTKAYLARKEAEGKGKKGALRCLKRHLARRFHHLLSLPAETPQSDPSTGAAVHPAPPRPGDITIVSAAPAPMRCIS

SEQ ID NO: 254402 - protein, 424 aa, unidentified
MKNTAARKRKQIPEGYLVVGVDPHKKRHAAVAITQDFTTQAKFKFDNNREGLEMMLDRTRAEMVKSGCRGAMFAIETGGHYWRNIAYYLDERGIPFRFINQYTLKRRREGKDLNRRKNDYRDSEVAAQLLCTGEFVESVIPQGVYAELRTSHNAYHRLVKERTRITNLMKGLLDALFPEFTHVFKDPGGLTALSVLSTCPIPRVMAAMTEDEFVATIEARHKGRRLMRKKLRALHYSARRSIGIHAGACSVSSEIAFLVDKLELIRQQIRIMEGTLVKLVDETEEGKYLLSIRGLNYIAVAGLLAELGCFKLYRSAKQMIKMAGSNPTESESAGKRRSKTPMSKQGRPLLRYCAWTAVIPMLRFNPDFRAWAKQRRERPAHANPLSGREVVGAALNRLLRLAFAMAKNQTYYQDTRPALIPVAV

SEQ ID NO: 254403 - protein, 406 aa, unidentified
MMNAVGIDVSKGKSTVTIRRPGDEVILPPCNVRHTRSGIDALISEIKSLDGETKVCMECTGRYYEPMATWLTDAGLFVSTVNPVLIKDFGDNSLRAPKTDKADSKKIARYTLDRWAKLKQYGRMDETRNQLKTMNRQFGFYMDQKTSMKNNLIALLDQTFPGANDFFDSPVRSDGSQKWVDFVYTYWHVDCVTGRSLDAFTEHYRNWCSRRGYNFSAAKAKTIYDVSKDLIAVFPKDDVTKMIIHQAVDLLNAASKTVETLRAKMDETASTLPEYPIVMDMNGVGPTLGPQLMAEIGDVMRFEKRGSLTAFAGVDPGKNESGQYAQKSVHTSKKGSPHLRKTLFQIMDGLIQRSPVGDAVYDFMDKKRAQGKPYYVYMTAGANKFLRIYYGRVKEYLESLETNESE

SEQ ID NO: 254404 - protein, 429 aa, unidentified
MNYNTQNAKIASITEKTLIIGIDVGSETHYARAFSWRNYEYSKKPFAFSNDEAGFAAFKEWMDDIAEKHGMEVIIPGMEPTGHYWLNLGAYLQEQGMKPVHVNPHHVKKSKELDDNNPSKNDRKDPKTIAGLVNEGRFSYPYIPTGIYAEIRNLSNLRIQTQEEITRIKNRMARWFSIYFPEIKDVYRNPDAVSGLMVIKQAPLPCDIRELGVEGVNKIWRDARLKGAGLKRATTLVTEAEHSIGNTEAPRSARKEIRNLLEDYEGYKKRMDELMEEIEKTLSEIPYIDKLMEITGIGIKTVSCFIAEVGDIGRFDNPKQVQKLAGYAIVADSSGKHNGESRISHRGRKRLRYALYEAAISVIGKNKEFKEIHSYYRTREKNPLKKMQSVIAVACKLIRIFYTILTKGVDYDGRKMLNDIVRPEIQPAA

SEQ ID NO: 254405 - protein, 433 aa, unidentified
MQDVEDEPLFAERVAGIDIAKAGIEVTIRVPSDTRPGRRQQETRSFGTTRRELLALADWLRSWGVTKAGMEATGDYWKPVYFVLESQGLDCELYHAAQVKALPGRPKTDRADSVWLARITERGSLSSSFVPPEPIRRLRTHTRYRRHLTQARTAEKQRVEKLLEDGHLKLSSVISDIHGVSGRAMLEAIIAGERNPKVLAQLARGTMRGKIARLEEALDCSFLTEEHAAVLSMMLSLIDCYTAQIDELTAKIEVLAGPWLHQIEQLDAVHGTGRISAQDVIAEIGVDMTVFPTAAHLVSWARWCPQVRQSGGKRKGSNASGRGNPYLSAALGEISISAGRTQSFLGARYRRLVKRMPKKKALVATGNSVLTIFHALLSDPAVTYQDLGAEYYEQRMNIRRQARNHVRGLERLGYHVSIQAINPDTGELLTATA

SEQ ID NO: 254406 - protein, 320 aa, unidentified
MIQKSVGIDVSKDTLVVCLSSPEKQRYQCANTLSGIEELIRWLESQKIEKSCPIVVESTSSYHWLLCLCLREQELDVRLINPIITKKYQRSSVRNAKTDRVDAERLAEIGQLEPDLPRFFDSREQLSQKRCQSLIQKLETVKQELGRAYRDAEESFARIGIEMDLECVENALKQIEESLQVLKRMIEAQADNMARELAQNIRGLSLYQASVLLTAVGGRTFGNREQFIAFFGLDISRRQSGTWQGREKLSKRGNPYYRKILFQLGWSLQRNNEMYHSYYQQIRDRGKHYFTAILATARKFLRFLFSFLHQNHFFSLDASL

SEQ ID NO: 254407 - protein, 338 aa, unidentified
MVLYAGIDLHSNNNVVVVQDSDDNVVGRQRLPNDLSTVCDWLEPYREELAGVVVESTYNWYWLVDGLMERGYTLHLANTVAIQQYDGLKYRDDTSDARWLAKLLRLGQLPEGHIYPRTERAIRDLLRKRSQLVRQATMNLLSIQNLFARNRGQGLSANRVKQLTADAVSAVFEDANVALAIQSNVRVLDCLREQISVVEQAVHGQVKLRRGYQKLLTVPGIGKILALTIMLETGDINRFPTVGNYVSYSRLVGSSYVSNRKRKGAGNTKNGNAYLCWAFIEAANFAIRHSERIRRYYQRKLARTKRIVALKAVAHKLGRACYHMIKEEVAFDLRRAFG

SEQ ID NO: 254408 - protein, 428 aa, unidentified
MRYFGLDVHLDFCEVAVTESGKVSQLGRIASTPEAIREFAGGLSGEDQVALEASSGAMTIARLLRAGAVGRVVVCNAADTRAISHARVKCDRFDAAMLARLLAAGMLTEVWVADDGTLALRRRVARRAALVRARTRAKNEVHAVLARCLIGRPPMSDVFGRAGRMWLAEQRMPLEEAETVHGCLRQVDFLSSEIAALDQRIAQQTLQMPGFLRLLTIPGVDVGTAAAVLAAIGDVSRFNSPGQLVAYLGLDPKIRQSGSEPARYGHISKRGDPQARSVLVEAAWVAIRSPGPLRAFGERVRARRGAQIAAVAVARKLVVICWHLLTKEQDYAFQRPSLTRQKTRRLELAAGAPRRPRRPAGASLTPTRQQRAAEHELQHQAELAYRRLIADWQATAPDRTPSRNPTARTDQMHGGARCGIAVSPDRCP

SEQ ID NO: 254409 - protein, 319 aa, unidentified
MEKVTHGRIIGIDVSRDWLDIHCLPDGQRHRIPNTDNGHVAVSDLAHDQRAVVCFEATGGQEWRLWSYLQDAGVEARQVPPAQVKAFARSLGTRAKTDRIDAELIARFLVFRPEAGRTLPAEHLRLLRALTTRRAQVVEMRKRLLAQIRAHRKSGTAELFEDIDVELKERLDVAITELESRISELLGRYRHLADTARILRSVPGIGPVASSTLIAELPELGALTGEEAAALTGLAPVAQDSGTLRGKRAIAGGRRALRHVMFQAALVASHHNPTLKAFADRLRKAGKPHKVIVTAVARKLVIIANALCKSRREWEHRHP

SEQ ID NO: 254410 - protein, 404 aa, unidentified
MSNIERVVIGGVDTHKDVHVAAVIDERGKILDVGHFETTNAGYGQLLEWLRGHGQLLRVGVEGTGSYGAGLFKHLAGEGVEVVEVNRQNRQNRRRRGKSDPVDAEAAARAALNGEATGAPKSQDGVVESIRSLRVAFTSARDARTRVALQIRDLLVNAPHALRAEIEPLSTERRVARCARFRPGDPANPREATKLSLRSLSRRYESLTEEMSELAAVLDRLTLAANPALRAARGVGPDVAAILLVAAGDNPERLHSESAFAAMCGVSPVQASSGKTVRHRLNRSGNRQANNALWRIAVVRIAHDEETRAYAARRTAEGKTRREIIRCLKRHIAREIFAHLTRPQVVPVGTELRAERNAAKISLTTASTELGTYPLRISRLERGLDHDREFAEQYQAWLTQKIAA

SEQ ID NO: 254411 - protein, 421 aa, unidentified
MQVLYERCAGVDIGKDVIAVAVRLPGDGPDGRKTIKRMFETFYGVLRECARWLTDHGVTHVAMEATGIYSMPVYHALIEHGQFEKVLVCNAGHVRNVPGRKTDLSDAEWLAHLLECGLLRGSFIPSAEIKAARDVIRYRTKLTESRTSELSRLGNVLQDAGIKADSVASSITTKSVRAMVEALIDGERRPTVLAELARGRMRSKIPDLQRALEGRFDDHHALMCRLHLEHLDHLDAMIAKLDSQVEQMMRPFQPQRELIVSIPGFGVRASAAIVSEIGADPAAWFPSAEQLASWAGLCPGNHESAGKRRHGRRRKGNQHLQPVLVECAWAAVRTDGYLREFYRRQVRKFGGFRSPAAKQKAIVAVAHKLIVILWHVLATGRPYQDLGADYFTTRIDPEKERRRLVAKLEAQGFKVTLEPAA

SEQ ID NO: 254412 - protein, 363 aa, unidentified
MTVTSMPQTTWPGQSEQQPAEDVVLGVDTHKDVHVAAVITVLGALRAHQEFPATAAGYLQLLSWARSFGILHRAGVECTGSYGAALARFLSRENVQVIEVNQPDRATRRRRGKTDAVDAEAAARAVLSGRADVTPKTGEGPAADMRVLRLAKESAVKARTQAKNQLKAVLLGIDPELRESLSRLSNSALIAHCAELPSNGSASVFTLRLLARRIQQLTVEVKELTRRVNRAVRTCHPQLLDIIGVGPDSAAALLIAAGDNPERLASEASFAALCGVSPVEQSSGKTRRRRLNRGGNRQANAALYRIVVTRIRRDARTCAYVERRTKQGMSKREIIRCLKRYVAREIYRQIQPATTSVAASSTT

SEQ ID NO: 254413 - protein, 391 aa, unidentified
MIYVGIDVAKDKHDCFITNSNGEVLFKAFTISNNQDGFNVLYQRIESVMEDVTKVKVGLEATGHYNYNLLGYLIDKGLATYVINPLHSNLYRKSLSLRLTKTDKVDARTIAYMLMSDVNLKSYSDTSYHNEELKSLTRYRFDKVKERAKLKTSVSRLVCILFPELEKLVPTLHMASVYALLSEFPGAKHIAGAHLTRLTNLLSDASKGRYGKDTAITFREAARASIGSNMPAKSLELKHTIQLILELGSEIEEIENEIKIIMDEINSPILSIPGINYRMGAMIIAEIGDFSRFDSPDKILAYAGFSPSTYQSGQLDSAYSHMEKRGSKYLRYALYNAAKYVCHWDSTFAGYLAKKRAEGKHYNVAISHSVKKLVRVIYHLVKSNQQYIKVA

SEQ ID NO: 254414 - protein, 413 aa, unidentified
MCLEDRPVLEPNAAGIDVGAREMFVAVPPGRDENPVRVFATFTEDLERLTDWLEQCGVTTVALESTGVYWIPLFEILEQRGIRPCLVNARHMKNVPGRRTDWHECQWLQFLHSVGLLRAAFRPGQDICAVRTLLRHRNELVSAASQHMQHMHKALTQMNLQIHHVISDITGLTGRAIVDAILAGERDGAELAKLRDPHIKADTETIRKSLEGNWRPEHLFTLRQSRDLYRIYQQQIVNCDLEIEKMLQQFEPRTDPAERPLPPDRKRNRAGSKRRKKNGHPHPEFDLRTETYKLFGVDVTQIPGLEENALPLFSEVGRDMSRWPNAAHFVSWLALCPDNDISGGKLLWRGARNVKNRAGHIFRLAAFSLHHSLTPLGNYLRRMKTKLGPEAATMATAHKIAVIFYTMVKNQVE

SEQ ID NO: 254415 - protein, 356 aa, unidentified
MKNTKVSFSGQDLYIGIDVHKNNWSVTIIFMGIIIKTFSMNPDPKELMKYLQKNYPGGIYHTVYEAGFCGFWIDRILREAGINNIVVNPADVPTSNKEKRRKTDRIDSKKLAKELSVNNLEAIYIPSEKSEAIRSLSRLRTQLVKDQTRLKNRIKSLLYFSGAKFPGNDELKHWSAKFIKQLSEQEFVYKEKKITLDLLLESLKQNREKLVKVVKELRVVVREDKKTNKIIGHLLTVPGVGFITAVTLYTEIMEIKRFVKLDKLIAYIGLAPDTSSSGEHEDVLGITQRQQGYLRSLLIEAAWIAIRKDPALTACYGKLNQRMSSQRAIIRIAKKLVSRIMYVWNNQQDYVFSVVS

SEQ ID NO: 254416 - protein, 402 aa, unidentified
MKNAVGIDVSKGKSVVSVIRPYGEVVCSPFELKHTASDISSLIALIKSIEGESRIVMEHTGRYYEVLANQLSNASLFVSAVNPKLIKDFDNESLRKVKSDKADSVKIARYALDKWNLLKQYNGMDKLRNQLKIMNRQFGFYMKHKTAMKNNLIGILDQTYPGVNTCFDSPARSDGSQKWVDFASTYWHVDCVRKMSLNAFVDHYQKWCRRRKYNFSQSKAEEIYGKAKELVPVLPKDNITKLIIRQAVDQLNSASATVENLRNLMNETAAKLPEYPVVMQMKGVGPSLGPQLMAEIGDVTRFTHRNAITAFAGVDPGVNESGSHAQKSVPTSKRGSAQLRKTLFQVMDALIKTMPQDDPVYKFIDKKRSQGKPYYVYMTAGANKFLRIYYGRVKEYLATLQP

SEQ ID NO: 254417 - protein, 328 aa, unidentified
MSKGILYAGVDVGQEELWVAIGGHKPHAFPHTGSGVKRLWNWVHSTNSEAILHFCMEATGVYSLQLATRLFAYPDTQISIVNPAQISSFAKAQLRRSKTDRIDALVILAFAQSQHPESWRPEPEALQKLSNLVNQAEALRDSLRRWDNRAHTQAYVPDLPKLVRKSTSILQKAIRRELIKIDKSIQELCEDEPVLRSQVQLLCTIPGVAKQSAVRLLAYGKTALTDYSARALVAHAGLAPKHRQSGISILGKSHLAKEGDKRFRCVLYMPTLVGIIHNPILKNFYQRLLARGKPKMVALVACMKKLLLIVRAILIKQSPFRPAIQDIA

SEQ ID NO: 254418 - protein, 345 aa, unidentified
MAEPRAASHYRLCVGVDSAAASFDASWLRADGQLTSAQTFPQTTAGFAAFQQQLETAGVRPAQTLLVLEATGSSWVALATSVHAAGYAVAIVNPAQAHHYAKSSPRRNTTDARDAQLLARFAAERRPDPWTPPPMVYHEVRQRLVARDGRLEMRQQARNQLHALEQWPVQVVEVHQHMLQVITTLDQHIRSLEAAIAQVVADGAWAHSAAHVQSVPGMGLVTAAWLLVSTVNFTTCTTPEAAAHYAGLTPLERQSGTSIRGRPRIGHGGNERLRTALYMATLSAARYNPMIKSFYTRLRDAGKPPKVARCAAARKLLHLAFAVVTKRQDFAVSYQKPPSLAWDEA

SEQ ID NO: 254419 - protein, 326 aa, unidentified
MSNILGIDVSKDKLDLVLLSEEDKYHKVIRNDLSGFKELDQWLISRHIDRVHVCLEATGQYGDEVSEYLYERGHDVSVVNPTRIKRYGESKLHRNKTDKADADLIAEFCLKEKPALWEPLNPDLKHLRALVRRLTDLQANYRQEGNRLTSGEKDDWVIRDISVHLEYLKASIEATEAEIQNFTNQTPGLKAKQELLVSIPGVGKKTSARLLAEIGEINRFENAPQLAAYAGLNPKGFSSGSSVHKKTRISKQGRSELRACLYMPAIVAMTHNPVVRALKERLQKKQLPTMAIIAACMRKLLHIVYGVLKSQMPFDPDYDRQFNFSS

SEQ ID NO: 254420 - protein, 312 aa, unidentified
MYYIGIDVSKKVLSVFNGKKDLKFINKEGLKSFKKYLKKKYNFSDLIIIFESTGIYSQYLKEFCAENSIKAYMVNPKKSHNFARALDIRPKTDKIDAQIIYQFHKLIEAKDIKVPEIDQQAKALASYLTSYEFAVKQRVALSNHLESLRDKQLIALIKKELIRAKRLEDKIFNDIKEYIRQNQNLREDYQRLLTISGVGEKTALALLTLFKTYQGTNRAQITALVGLDPTRRESGTSVKGKVKISKNGKGIYRKIPYLPTICATVHNRKIRIFYQRLLAHHKPKKLAIIASMRKILLIAHAMYRDKTEYVAT

SEQ ID NO: 254421 - protein, 488 aa, unidentified
MKLRKEQPQQKQKKTAPSAHGTESAGWHQMNRKQRREMARKIQADDLSLQVVHPHAAGIDIGNESHYVAVPSTRDEQPVRRFGCTTAELKAMAAWLKQCGIRTVALQSTGVYWIPVYDILEAAGLEVYLVNARETKNLPGSKTDVQESQWLMKLHTYGLLRNSFRPSQEIRSMRSYWRQRQDLVRSAVRHIQRMQKALTQMNIQLANVLSDISGKSGQAIIHAILEGERDPYELAALCNYNVKASEEEIARSLEGNWQADLLFLLQQEQAGYEFCQKQMAACDAQLQHYLAQREDRSAGASLPEEKRKRREHRNKKNHPQFDVREQLFRTAGTDLTQIDGIDVLTAMTVISEAGWDMSKWPSEDHFVSWLRLSPDNRVSGDRVIGKGRLPTNNRLNVVLRMAASTLRQSDSYLGAQFRRLKRRLDAPVATKAMAAKLARLIYRMLRYGMRFVDQGAEVYEAAHHQREIYYLKQKAASLGFQIIEATAS

SEQ ID NO: 254422 - protein, 430 aa, unidentified
MKSNTQNAKIEAITEKTLVLGIDVGSETHYVRAFDYRGIEYSKKPFKFSNTEVGFATFKEWILDLKERHEKDKVVPGMEPTGHYWFNLGKFLQDNEMKPVLVNPHHVKKSKELDDNNPTKNDRKDPKVIAGLVREGRYMIPYLPDGVYADLRTASNIRFQLQAELTRIQNRISRWFNIYFPEYKTVYGKPDAKSGMLILKAAPLPEDILTLGIDGVNQIWRDAKLRAVGKARAKTLIEAAEHSIGSKEGTVSARMEIRMLLEDYESKNMRLQEVMVLIEELVKEIPMAEKLLEIKGVGIRTVSGFLAEVGDISRFNNPKELQKLAGLPLVENSSGKHKGKTTISRRGRKRLRYLLFEVAMSLVAKNPEFRELHNYYTTRRLNPLKKMQSLMAIAAKLIRVFYAMLTKGVDYDPKKMISDIKRPTVYLQAA

SEQ ID NO: 254423 - protein, 339 aa, unidentified
MERQYVGIDLHRRSTTIYRMAEDGEVLGTERILSQPFELAQAMAAAGPKPEVVLESTYGWYWAADVLRELGAHVHLAHALGNNWGNRRVKNDERDARDLAAMLRLGRLAEGWIAPPEIRELRELVRYRHSLTRHRTSAKAQIHGVMAKNGILPVVAELWGPIGQAQLDALELPEAYALRLRSLRELLAHIEREITKVDAQLHHRLKDDPGYRALVRLPGVGKVLGAVFFAEIGDISRFDSAKKLCSWAGLTPKHRESDTVVHRGSITKQGSGLVRWAAIEAVGNYRAKGNEQLRADYRRIAERRGKYKARVAVARKLLTLVFYALRDGEVRCLDTPAAA

SEQ ID NO: 254424 - protein, 424 aa, unidentified
MIDVESGAGKEAMDIVVERCAGLDVHKDTVVACVRTPGKGGGREQTTRTFKTMTIDLMALRDWLVAMGVTRVGMESTGVYWKPVFYVLEDATECWLLNARHLRNVPGRKTDVQDAEWICQLVEHGLVRPSFVPPKPIRELRDLTRYRKAQIDERGREAQRLDKVLQDAGIKLSSVATDILGKSGRDMLAALISGTVDPQVLAELARGRLRTKIPLLRQALEGRFVSRHRLIVEKILAKLDFLDETIADLSAEIDALIAPFAGEVDLLDTITGVDRRAAECIIAEIGVEMARFGSSARLASWAGRCPGHHESAGKHKSGRSRPGSKWLAATLAQCAEAAGRSKGTYLGAQFQRLRGRRGHPKARKAVEHSILVAAYHVLDRHVGYQDLGADWFLRRRPEAHARRLAHQIEALGFRVTIEPTEQAA

SEQ ID NO: 254425 - protein, 323 aa, unidentified
MGQIHGTDAKGNCVLRKRLNREKVAPFLATLLPCLIGIEASTGAHYWARLFENMGHTVKMMAPQFVKPYIKSNKNDLNDACGIAEAVTRPDMRFVPIKRIEQQDILLSHRARELAVKQRTAQANQIRGLLAEYGVILPKGIRYLKKITETLEQNHDKLTVKSQIIFARLYEQFKIYDEQVKTYDKEIENAALQSVQCRERMKIEGVGPLTASATVATIGDAKLFKNGREVSAWLGLVPKQHSSGNTVRLSGMSKRGDRYVRTLLIHGARAALKNCDKKTDRRSIWIANKKHRSGYNVAAVALANKNARIIWAMLSTGECYRTA

SEQ ID NO: 254426 - protein, 426 aa, unidentified
MNEVEDSRLKEFRQLKKEIRGSREHLIVGIDVAKERHHAFFGTATGKTLLKRLIFDNTIDGFRKLRVQVEAIQVAQSLSKVVFGLEPTANYHKPLGEYLIQCGRMVVLVSGVAVKRNRELLDGRWDKHDTKDAANIADLISQGKCLFYEYPEMWLRDLRSLLTLKRKLKKQEHSYRVRIRNQLLAQYFPELDRYSGRPEVEAIVRWCLDPSRIAGLENDQFMRLVAPGRKTLAQHHRLHTIQKLAVDSIGCTMGEGAVFEAQVMVDGLRHLRETIKSTDDQIREICRQFPEYGYLLTIPGFGPDVSSKVLGALGNPHRFQNRKQVLKMAGLDLSADRSGKGSQTAIPIISKQGKADLRYALYQAALVASTQNIDFIRYYTQQLQGREKEQGIKTKRKVKLSAKLLIIAWTIMKKQEPFDPRYFNQV

SEQ ID NO: 254427 - protein, 345 aa, unidentified
MKIVGCDLHTRYQQIAMLDAKTGELVERRLEHESGEARAFYAGLDGPVRVGIEATGHTRWFERMLGELGQELWIGDAAQIRASVVRKQKTDARDAAHLLDLLLSDRFPRIWRPSLEERDLRQLVWHRQKLVWMRNAVGNQLHALAMGEGVCRKKKLFTKKGRVELEGLKLGPWASYRRQELLTMMDQLDASLKELDQGVAKQAEQNQAASLLMTHPGVGPVTSLAFVLTLGPVERFGRSKQVVSYLGLNPREHSSGGRQRLGAISKQGNPMMRSLLVEAGHTAARLDSELRQDYQRLKLRRGSGVAKVAIARKLAVRMYWMLRSPASYAQLVRMQGSPRGTLVGQ

SEQ ID NO: 254428 - protein, 418 aa, unidentified
MKIVYPICCGVDVHKTFLVATIIKTEGIQPKYSKKRFSTFNNSILQFKQWLIDNNCFDVCMESTGKYWVPIYNLLEDKIRVTVASPKWVRAVKGNKDDAKDSKWIGDLFRLGLVPGSYIPEKPIRILREYTRYRSKLVSCKSSEKNRFQNSFTVCNVALDSVVSDMFGKSAALITDYLIKTDSFDPEYCKSLLQRSLKKKGDIVIESIAGYEIAPAQKQRMLIVRSHLEFIEKAIDVLDSKLDELVKPYEDFISLLCTIPGVDRRSAITIISEIGVDISQFSNSMRLCCWAGLTPGNNESAGKKKSVRITRAGVYLKPALVQVAHAAVKSKDSPYYSNKYERISKRRGKKRAIIAIARMILTAIFYMLQNGEVWNPTDLFKVDMPPALQEKQKQKAIQNALKLLVREGVIQPPESPAA

SEQ ID NO: 254429 - protein, 358 aa, unidentified
MQRNKISFKGQRIFIGIDVHKRNWDVAIAPSVGNVKRHTQKASSKELFDFLKRHYPDGDYLAVYESGFSGYSTYYALNEVGIECMVIHAADVPTTQYEEVMKTDRIDSVKLVRSLKAGLLRGIYIREKENIDDRSVVRIRKTIQKQLSGYKTRVKHLLYCNGVSFPERFEKPGSHWSMAFIKWLKEDVTLLSSTRNSLDLLIRQVETIRMTLLEATKMVRSLSQTERYKSKFDLLMTVPGIGVTVSMCILTEVYDVRRFHNEKQFAAYLGLIPTCHSSGDKVAHGEKTFRGNKLLGPMIVEAAWISVFKDAGLASLYLRYKERMKPQEAIVRIARKLSNIIFAVLKNEKEYVPYQTGK

SEQ ID NO: 254430 - protein, 355 aa, unidentified
MSRDVKYIGMDVHKEATVIAVLNGSGKLMMESIVETKASSLLQFIHGLQGELHVTWEEGTWAAWLYDLLKPHAHQVLVCDPRRNAFLKEGNKSDKIDARKLADLLRTGMVRPVYHGEHGLRTLRELGRSYQTISKDLTRVMNRIKAIYRGWSIACAGTQVYAPRYREEWLHKIEQVGVRRRAELLYEQLDGLQALRRTLRPELLAESRKHKASKLLRQIPCIGPIRAARLLGLMQTPHRFRSKRQLWTYSGLGIETHDSAQYRYVHGELQRCKKPQQIRGLNRNHNHEMKEIFKGAANRASCGVGPLRDFYVALLDKGMKPEMARLTLARKIAAIALTLWKKEDRFDAEQLKTQA

SEQ ID NO: 254431 - protein, 401 aa, unidentified
MKVSGLDVHKDTIFCAIYDGKKYGKVTEFATFSENMREMAHMLRERGVKKIAMESTGIYWIPVWNILEEAGFDLMLVNPFLIKQMPGRKSDVKDAQWIAKLLHKGMLRGSMIPCKTIRQLRTYSRRFVKMQGMITRVNQEMERILEMCNIRITSLMSNNHGVSIQKVIEKIIAGQDTVEELACCIHGRTLNAKGELVRLSLDGKVEEHHRFTLSLAHEQYKLHLKHIDSLEMKMEALCDEHYTREMELLMSIPGVGKQAAMQIISETGGDMQAFADSGKLTGWAGLRPRNDESAGKFKSKAITKGNKYLRRIIVQCAWAASRTKGSHYKSKFEQLCVRKSRKKALIAIARKLLTVVWHVLQENEPFNAQLLPVYDPKKIESKMKYHRRELEKLEVIGFSTT

SEQ ID NO: 254432 - protein, 346 aa, unidentified
MAYYVGLDVSVKETSVCVMDDKGGVVARTDISTDPDLITNFISNHAPNVERVVHESGILAIWLTRELETRGVPIICIDARLAHKALSGRINKSDQGDAEGLAQLARTGWFTQVHIRSEASERVRVLIGARERLIRMRKDLEGHVRGVLKVFGVCMKPVEKGKLRKSFRDQLVAAADTDPAIEMMSETFIPLHKTLCIARDALDEEVRIMARESDLARRLMTVPGVGPIVALAYIATLDDETRFRKAIDVGAFLGLTPKRHQSGEMDWSGKISKCGDRDMRRLLYAAASTLISCTRKPSRLKEWATKLAERKGHKKAAVAVSRKIAVILHCLWRNETVFEPGMEGPS

SEQ ID NO: 254433 - protein, 409 aa, unidentified
MRFCVGLDWASREHAVCAIDDKGAIKAHFTVEHSAEGMAKLAAQLRKLAAPEELAIAIERPTGLVVDTLVEGGFKVVPIHPNVVKASRPRYSAAQGKSDLGDAYLLADLLRTDGHRFRVLTPQSDETKALRGLVRLRDDLVGQRVGMANQLRNLLEQFWPGAAAIFADVDSPIALEFLERYPTPQAAVGLGEKRLAAFLARHAYCGRRSAAELLERLRGAPVGHNGDLEAEAKGECVRALVAVLKPLVLQVQVLTAAVEHAVTAHPDGLVVTSLFRSGRVCAAQILAELGDDRARFTSAEHLAAEAGVAPITRESGKRRAVGFRWACNKRLRAALTCLADASRHTSPWAAALYQSAKARGCDHPHAMRIVARAWCRVLWACWQKRVAYDPGKHAAALKFTPRIVGKEAA

SEQ ID NO: 254434 - protein, 392 aa, unidentified
MSNDVFVGLDWATQAHAVCVIDAAGTVLDRFDVSHDREGLAELMRRLSRWGARVRIAIERPSGLIVDALVEAGHQVFPIHPNAVKASRPRYRSHGAKSDASDAYLLADLLRTDGHRWSALAQQSDAIRALRALVRSRDDLVAARIAATNQLSSTLHGFWPGAAFLQRYPSPSSARRLTAAQLQRFCQSQHYSGRRSGAELLARLHAAAQGHAGAQTEQALASVVLSLVAVLEPIVVQIAQLTRQIERFMHSLPDGLLMMSFPRAGQLCAAQILAELGDVRERFPNPDRLAAEAGAVPVTYQSGKTRSVAFRWACNHRLRKAITCLADNSRHANDWARGIYQAARARGCDHTHAIRILARAWLRVIWRAWTDRKPYDPALHRAAMQHVAAHGG

SEQ ID NO: 254435 - protein, 342 aa, unidentified
MYYIGLDVHKKTISYCVKDASGRVHREGKLGATRCELDDWMRTLPQPWTVAMEATIFTGWIYDQLHPHAAQVKVAHPLMLRAIAAAKKKNDRVDASKIADCLRCDFLPECHMASTEIRDRRRTLRYRCLLVRQMVQTKNRISGLLMETGVTYNKQRLHKVGYFRELLASNEEVNESIRPLLRLSRDTIARLQKTERALVSSLQRDPLLSERIKRLRTVPGVGPITALTWALEMGEISRFRSIRQAISYCGLCSDERSSAEKSIRTPISKQRNKNIQFVLIEAAKLAPRQDHDLALLYEREKQKGNANRATLAVARKMVAYLLAVDRGQRDFVPADDCRCDAA

SEQ ID NO: 254436 - protein, 317 aa, unidentified
MSNPESFVGIDVAKGWLDVAWLTGETLRIDHAEKAIAGLVERLRSQPPALVVMEATGGLETGVASALAAAGLAVAVVNPRQVRDYAKACGRLAKTDRIDALILAAFAAAIRPQVRELPDEHTRALGDLLARRRQLVEMRVQEKLRLQRASNVQRASLREHIVWLDERIGRLDIELTHALRSSPAWRDKDDLLKPIPGVGSLTRATMLALLPELGTLSRRQIAALVGVAPFNRDSGQHQGGRVIWGGRAQVRRTLYMAAVAAMRCNPVIRSFYQHLRSQGKPAKVALTACMRKLLVTMNAMLKHHSAWSNRLDTQHSC

SEQ ID NO: 254437 - protein, 368 aa, unidentified
MKKASTVTAKQSRNISQQKLTIGLDLGDRNSWYCVVDEAGQIQLEQRVRTSAKALQEVFGAMPRSRIALEIGTHSPWISRLLSEWGHEVIVANARKVRLIGESRKKDDRLDAQALARLARIDPELLYPVKHRSAQAQADLAVIRARAGLVRARTGLVNTARGLAKSYGQRLRGCNVRNMNAEKAESLSAELQTVLAPLLAAIESLSERIVEYNERIESLAQESYPQVALLKQIKGVGTLIALTFLLTLEDPHRFRKSRDVGGYLGLQPGRRKSGQSEPQMHISKEGDPYLRTLLVQGAQHILGPFGIDCDLRRWGLKLAERGGRNGKKRAIVATARKLAVLLHHLWVSGEVYEPLHNSSGMTVAAAAA

SEQ ID NO: 254438 - protein, 428 aa, unidentified
MSHDPKDVPFQQQFKLFAGFDWASDHHDVVAVDPDGQVVLELTIDDTAEGWAVLHEKLAKRVGQDISAVAVSVETCNGPAVERLLEMGCAVYPINPKAAQRYRERKSPMGAKCDRLDAWSFGDALRTDGHGWRRLNPDDPLTQELRILCRDEVQLIQQRTAFVCQLKQALHEYYPAALEAFDNWVAPSSWAFVDRFPTPQVLVKVGKRRWEKFLHTHRLARPERYAHRMEVFARADQFCGKQAVTNAKSRLAVALVAQLRVLETQLQDYRKAIESLFGRHPDNDIFGSLPGAAEKLAPRLLSEFGQNRDRFPKVESIQCYAGTAPVTRQSGKSRWVYYRRGCNKSLRAAVHLWADQSRHQCAWAEAYYRRKREQGQSHACALRCLGQRWLKILWKMWQTGTPYDEALHMRNQVRHGSWVIQLGQGDTC

SEQ ID NO: 254439 - protein, 394 aa, unidentified
MVFAIDVAKVDMVAAVVAGDGRVVRTVAWKNPTENGLVLELLAGLVRAGLLVEAVMESSGTYGDVLRHQLVAGGVAVYRVSGKRTHDAAEVYDGVPSLHDAKSAAIISKLHVDGASRRWEPLSDEKRGLKAAIATMDLFRQHNQRLIHSLESSLAGYWPEVTELLELGSATLLALLARIGGPKDVTREILAARKLMLGMSHRLMSEEKIEAVLISAQSSVGLPMLGQERSALMTLASEAHRALKEFKRAKAEVERLSENTVAKVLAPATGKTTAAVLVADVGDPRDFPCARAYLKAFGFNLREKSSGMLKGRLSITKRGASRARQYLWLAVFRWIQRDPVTRAWYDSKIKRDGGKRAKGVVALMRKFAKALFHVARGAVFDSTKLFDISRLQLA

SEQ ID NO: 254440 - protein, 340 aa, unidentified
MEHIAAVDLHSDNGYYGVIEPDGKRVYQKRLPNDLSIVLRELAPYRETIRCIVIESTYNWYWLGDGLMEQGYRVKLANPAKFEKYNDLKYSDDKSDTFFLTEMERLNILPTGHLYPREERGIRDLLRRRMLLVQQKTSHILSFQSLISRQTGGSISSNELRGLETEDVEKLLAGQERHVVFAGQNTIAVIGFLQERIRLLEKTVLASARLRSEYEKLQSIPGIGKILALVIMYETGAIGRFKAAGNYVSYCRCVKSKHLSNGKKKGSGNRKNGNKYLSWAYVEAANYSRRFCEEAKRYYQRKLAKGNSAIATKALAAKLSRAAYFIMRDQVEFDVARMFG

SEQ ID NO: 254441 - protein, 350 aa, unidentified
MIIIGCDYHPGFQQIAFVDTETGDCGEQRLAHSEGAEKFYRDLAAQGKKVRVGMEASGHARWFERLLAEVNFELWIGDATEIARKRERKQKTDRQDAQHILQLLMENRFPKIWVPSGENRDLRQLLWHRHRMVQARTRIMNQLQAVALNEGLRCKKKLWREKGRQQLEAFRLAPWASRRREDLLQLLDRLNPTISDLTQVIEQEVEKCPEARRLRTHPGVGALTALAFVLIIGRTERFQCGKQIAAYLGLVPLEDSSGNRRRLGHITKQGSSILRFLLVEAAQVTARSIPEWRNKYVHLTMRRGRKIAKVAMARRLAIALYWMWRKGWDYEQLRKFGSHAGQPGNRDGVK

SEQ ID NO: 254442 - protein, 379 aa, unidentified
MTTNIDTGDVCCTALELSKTSWVCAFAAPGDSQAIVHKIKAGDVDRLIGILNSSKAKAEHRLGRPLHIVLCYEVGYDGFWLARFLIACGIRTIVFDPASFLMPRRGRRAKTDRIDAEGMTRTLRTWLSGDREVARDVQIPSVEQEDAKRIERERKYLIEKRTSIVGRIKGLLALHGIWLTGKRIGKGLRERLDTMRTGDGRPLAPFLRRDIERMLRHYDFVSQQIEEVVADRKKALADRSGRFPQAEKVQLLATLGAVGETTATVLVAEVYHRSFETRRHVASFVGLAPSPYNSGDTDRDRGISKAGTKLARQTLVELAWFWLRYQPNSKLSLWWHERFGNMGMRGRKVGIVALARKLAIALWRFVEQGVVPEGATLKA

SEQ ID NO: 254443 - protein, 347 aa, unidentified
MSKQMQNKSASTISVMAFCGIDVGAKTLVVALQRADQEGFQQRQFSNLASGHKQLIAWLQKSAIKTRVSLEATSTYSLDLALALDAAPNIEVAVLNPKRVHQFAKTLRRSKTDKADAIVLAEYSLRMKFVAWQSPRSSALELKSISRYIAALRQEHTRLGNRLHAARATHTTPLCVIRDLKLTMDRTQRRILLMTRGAITLIRQNAELQAKFESLIGIKGIAQTSAIQLLGELAGLDPSMTVRQWVALSGLDPEHRESGTSVHPRSHISRHGNRHLRRALYMPALSGARFDPHFRAFYQQLQNRQKTKLQALMAVARKLLHAIFGIFKTATPYDGAKLFPNLQLITS

SEQ ID NO: 254444 - protein, 321 aa, unidentified
MSKLTFDATIHSSQVDREFDNDKKDYKKLIDWTYKNSDLPKENIIFVFEHTGLYSHGLSVYLASKNIPFLLVPGLEIKKSMGMVRGKSDKADARMIAKYGYRMRDEITPTVLSCEEEQSIKHLLSLRQRLVKQRAGFKASLKEQKRVLVKNQNKTLLSTQVKMISYLTKQIKEVEKEMMDVLKSNQSMLNNYKLITSIKGIGKQTALFMIAYTANFTKFKNHRKFASYSGIAPFQNQSGTSIRGKTKVSNLANKKIKSLLDLCAKSSIQHNPEMKQYYEKRVANGKNKMSTINVIRNKLVSRMFAVVNRNQPYVDTMKYAA

SEQ ID NO: 254445 - protein, 472 aa, unidentified
MTVVGLDVHKRVVEAVVLRAEDGRILHRERFECTREELVRFATKRLGPNARVALEATTNTWSIVELLRPYTGELVVSNPMRTRAIAEAKVKTDKVDALVLAQLLRADFLPRVWQPDGMTQARRRLTARRASLVSDRTRVKNRIHAVLHQRLMEPPVSDLFGTKGMRWLQMLELDAAGRLAIDSELRLLRQIEIEMTAVDEALAQDGYDDPRVRLLMTLPGVDVAVAQTLLATLGDIQRFKDPDAAASYMGLVPSTRQSAEHCYHGPITKQGKGQARWMLVQAAQHLSAHPGPLGVFFRRLAKKKNRNVAVVATARKLVTIAWHMLKNNEPYRYAIPRSTETKLSRMRVKATGERLRPGLPKGQPRPKAYGSGVRTRTVPALDTIYEREGLPPIAPLSDGELRMLRQQKVLKHVAQTSRPQRLPRRAAAPEPPDVPGAVSPRCPGPRPSAGRAPAAPRRAKSTQTPSPGRRLT

SEQ ID NO: 254446 - protein, 449 aa, unidentified
MTTRTVGIDLGVRGPHVASIVDERARLVGPPIRFRLTRADLERLVGRIRLGLPQDAKVTVVMEPTGMAWFPVTQWLIRCGFSVIRVKGQRVKALRRYLSEHAKSDVIDSHVLGSIPAFGRKGLDGLFLPSARQQALNRLTRQRFRYQTQIAATKTRLLDLIRWAQPALEQALFKSMTTVSLAVLKRYFNPFRVQRVGAKRLASFIRKNVAGTHPVQGEFADQLAERLIEAARATIDLYGRDTVDFDRLQLEVRQEIALLEFHRGQIRKLDQEIESLYAELHPDDNLRTIPGIGELLGPSLLGGLHSWRRFGGQRRLRGYCGLFPRRKESGGVEHPAQRITKGGSNRLKRDLTIAADAARKVDPSLARVYYSMMVDKGKHHRQAICAVATRLLNRIHAVLKEGRPYILRDLDGNPISIAEAKAIIEERFQVPESVRLSRRRSVVSLAATT

SEQ ID NO: 254447 - protein, 346 aa, unidentified
MLHAGLDLSRRRLDVCLLSDDGELIAQTAAPPDADGLRGLVARVERHRQPVRAVIESMNGARFVHDTLEELGWEVLVADAQKVKGLAPLACKTDRIDAQVLALLSQRDLVPTIWLPDPGIRRERELARFRLHLVRHRTTLKNRIHATLITFGHPCPVSDLFGYAGRQLLDRLAIPDPWRRNVDASLELIDDLELQIARLTVELRRRGADHRYIPLLVTAPGFGWINAFTVASEIGDIERFASPAKLCGYTGLCPRVIQSGASDRRGPISKHGPRYLRWGLFEAALNACKHPVYAERYQRTKRRLGRQRGPKVAQIELSRKLTEAIWHMLTRNQPFAPAGAAYRLAA

SEQ ID NO: 254448 - protein, 314 aa, unidentified
MTPHCIGVDVSKATLDVHVRPEGTAHRVPNTAAGVRKLVALCARLAPERMVAEATGGLERPLVDALYAAGLPVVVAGPDRVRHFAKALGVRAKTDPVVAAVLALYAERVRPDVRPGPTPDARALSALAARRRQLTAMLAAEKNRLGAAAVALRADLRLHVRWLERRIARLDAQIAAAIAADATQAAASERLQTVPGVGPVVAHMLAAELPELGRLGRRQVAALVGLAPYPRDSGVLRGTRAIWGGRAVVRTVLYLAAMSGVRCNPTLRTFYQRLVAAGKPRKAALTAVAHKLLTILNTMARAGTSWAPPTPAPA

SEQ ID NO: 254449 - protein, 374 aa, unidentified
MPFDINHDVEDLEKLDKKLQKFSKEDLKIVLEQTGTYHLPILTYLLDKEYCVIAENALKIKKYLDRSLRKAKTDKKDSLKLAEYACDNWYKLKVNFIEEEKYKELRFLSRQYFSLNSMKVQQKVDFSDLTDMLFPGYYQLLEECNFVVGLKIFEKFSDPKIIRKKKLETFLNDVEKIAQKIGQQRAGRNLAIKVYELAKKSVPSCPSNSSTQLILNKRVVALINLIETTNEIIAKMNEIAKNMDEYKEVRNMKGVGDRLAPLLIAEIGDIRRFKNAGSLIAYAGIDSPPYQSGKYEATNRHISKRGNKYLRKTGFEVMQSIKSFCRVDCEVYDYIVKKETEGKCKKSAKIAGLNKFLRQYYGMLKKKYIELGTW

SEQ ID NO: 254450 - protein, 502 aa, unidentified
MNNSAAGENIAGGRPASARSRLLEGNRKTVNCRLPGEPEALAATSNRTTPLEGCNISSVDSRAKGRKKQKIKRAAMNSPEQGSGSWLEKRGFGGLDWASQKHNAVVVDPLGKVIEDFEIEHSALGWKKFREIMQPYGAIPFAIETSQGAAVEQLLEAGMEVYPLNPKSAQSYRERKAPSGVKNDRLDAWSFADACRIDGHGWKALRPEDALVKELRLLCRDEVVLIEQRTSFINQLRHALAEYYPTALEAFKDWNSVGAWMFVQRFPTPQLLKQAGKRRWEKFLHSRHLWRTESGPHRMELFAHATELSGSVAMANAKSHLALSLVSMLFALEKQLGIYRQRIEELFQRHPDHDLFGSLPGAGPKIAPRLLSEIGDDRDRFGEEPQALQCLAGTAPVTRQTGKPRCKPPRWPVHQRWACDKHLRHAMHLFAEQTLTRCFWAEIYYRHHRQKGRSHADSLRRLAQRWLKIIFRMWMDRKPYDAMLHNQNQLKHGSWVLQINPT

SEQ ID NO: 254451 - protein, 454 aa, unidentified
MSRHTTKPASFETLPIVNPNAAGLDIGSDEILACVPIDRAAQPVRKFGTFTPDLIALADWLIACHIETVAMESTGVYWIPVYEILEARGLKPQVVNARHLKNVPGRKSDWQDCQWIQRLHTVGLLAGSFRPEAEMCALRAYLRHRATLLEHRAAHIQHMQKALQQMNVLLTQVLSDITGETGLAIIRAIVAGDRDPVQLAQLRNPRCKSSEEEIAKALTGHYRAEHVFALKQALALFDFYTQQLRECDTEIERQFKAIKPVTRDDLPPLDSEDKRDSHSKNAPSYDARTLLYQITGVDLVAISGLNAVTVQTIVSEIGTDMTCWPSEKHFCSWLGLAPHNDISGGRVLRSHTLKNRNRAGQAFRLAAQSVSRSENAFGAFYRRMKARLGPKQAIVATAHKIARTFYHMLTHHESFQAMDAAEYEKRFRDREISNLRRRATKLGLSLVEASVAST

SEQ ID NO: 254452 - protein, 353 aa, unidentified
MTYGAIDLHKKESQVRIVTDGGDVIDRRISTRRESFTQLFGGQPRMRVLLEASTESEWVACHLERLGHEAIVADPNYAPMYGGRSRRIKTDQRDVAALTTACAHGTYRPIHRRSPARRAIQAQLNVRDELVHTRGRAISMVRAMTRAEGLRIRSGSPETFLRRLAAVELSRSLAATVEPLCQLMACVNDQLRVADLRVRNLVTQDPAIARLTTFPTIGPVTASAYVAALDDVRRFRRAGQVANYLGLVPREYSSGERQRRGHILHSAHPRVQALLVQAAWRVWLSRRDETAALRTWARLLARRRSTPIAIVALARRIARILFAMWRDEREYHGTRCAERATGRAPASMDAVVS

SEQ ID NO: 254453 - protein, 347 aa, unidentified
MRYFAGLDVSLEETTVCVVDDGGLIVREARAASEPEALVAFFRGCGLVMERVGLEACSLTAWLHQGLTEAGIAAICIEARQAKAAMGAMPNKTDRNDARGIAQIVRTGWYRAVHVKNPSCRSWRALLTARRMVLNKRRDVENGVRALLREAGLKVGTPSRKNFAARVGELVADDPVLAGLARSLLSVIDVMTQEVDRLTKRVLDEVRIEPTCRRLMTVQGVGPLTALAFRATIDRPDRFRRSRDVGAHLGLTPRRYQSGETDVQGRISRCGDELARTALYEAAHSLLIRSTKWSVLRAWGMNVAKRRGMARARVAVARKLAVILHRVWSDGSEFRWGKQVVTTTAAA

SEQ ID NO: 254454 - protein, 320 aa, unidentified
MMAQNEVVVVGIDVAKDKVDACIRSLSQRQTFPSTAEGQRALIRWLRKHKVGKAVMEASGGYEREWAKALRNAKIEVRIVDPKRVRSFAQSAGRLAKNDAIDAEMIAWFAETFDEARGQAYDAAREELVQIVNARQALLEQQTQMQNRCEHTVPIPVRKMHERLLKAIALEVTKLEAVIAALTKSSPHFAETAEIIESVPGLGKITSAGLIAAMPELGQVSNEAISALLGVAPYDDDSGKRQGERQIKGGRRKVRNLFYMACMGAATQHNPVLKTFYRRLIAKGKKPKVALVACMRKLIVILNTMIARREKWDASRYAVS

SEQ ID NO: 254455 - protein, 360 aa, unidentified
MTTYYIGADVHSNSTELAIEKRNKIVARYSVPTTIPAISNILDSLQGKKHLVLEEGPMAGWLYRNLCRKVDKLVVADPRRNKLITSDGDKDDKIDAVKLASLLRGGYLRTVYHSDNDQHAELKHWASLYHDRVRDAVRNINKIRARCRMHGVRIPRLVLREPAHRLKWLFEMNHPVLAKQLKMLWIGYDATAKQARIAKCQLSTLGKKYDIIKLWGRLPGIGLIRATTLFAYLDTPWRFKQKNKLWKYCGVGLQRTASGTDKKGRPKPARLKLPWAVNRTLKNAVLGAAISAINQNNNVFKDYYERMVRDGIITSNARHAVARKMLTVMWGMWKTNGRFNERLLALLPESSRPTAPALSR

SEQ ID NO: 254456 - protein, 353 aa, unidentified
MKSDKYMGMDVHQAMTVVAVLNADGKVILETMVPTEAAAIIRLVQNLSAPLRVTFEETTQAEWLYEVVRAYVTEVIVCDPRRNKLLGEGSKADKVDARKLADLLRTGMLRSVYHGHEATRKLKELVRAYETLSIDTQRTMGRIKAIFRGRGIRTPGRGVYQPKQREQWLEMLTEPGIHQRAAWLFEQLDQLRTLRRKAKQTVLTEGREHRAIGLLKTIPQLGPIRAAFIVATVDTPHRFRTKRQLWSYSGLGVVTHMSAEYEMREGRAVRSRKPIATRGLNPNCNHRLKETFISAATGGIRTEPYRSYLSRLQKGGMRAEMARLTLARKIGAIALRIWKKGETFDPKKLNWTT

SEQ ID NO: 254457 - protein, 356 aa, unidentified
MPSKPEQYPYVVVGVDTHKDVHVAAVLSPLGALLGTMSFPTTRDGYLGLVEWATGFGVVRRAGVEGTGSYGAALARVLRQAGIDVIEINRPDRAARRRRGKTDAVDAEAAARSVLAGQASVIPKTGEGPVEAIRVLKLAKDSAVKARVQAINQIHAVLVNAEAAMREQLSSLSNRRLVEACARLDPAVHDGATAVVVYALTRLAQRIQFLMQEIREVQRRLTAAVKATAPRLLEVSGIGPDCAATLLVAAGDNPHRLASEASFAALCGVSPVEASSGKVQRHRLNRGGHRQANAALFRAVLTRLRWDTRTREYLQRRTTEGLSKREIIRCLKRYLARTVYKVICTAIPNPTTAATT

SEQ ID NO: 254458 - protein, 371 aa, unidentified
MKKSSMFIGLDVHKDSIEIAIAEAGCDGEVRSYGGIDGTLDALDKVIRKLVSKGCNLHFVYEAGPCGYDVYRHLTAQGFDCVVVAPSKIPRQSGNRIKNDRRDAQMLARLHRAGELTAVYVPFAEDEAMRDLTRAREDAKSVEKKAKQRILAFLLRHGHRYSGKSSWSRAHFRWISILKMPHPAQQIVLQESLDALAECTRRVDRLTEQIQTLSPQWRLFPVTQALQSMRGVSLIVATTTIAEIGDLTRFGRPAELMSYLGLVPSEHSSGQKTRRGSITKTGNGHVRRVLVEAAWAYRLPARVSRKLLIRQEGLSQEVCAISWKAQLRLCARYKRFTANGKSHQLVVTAIARELCAFMWAIAHEVQGPVKM

SEQ ID NO: 254459 - protein, 360 aa, unidentified
MEKVKESIVKNKPIYVGLEDSKRTWRLCVRIEGRIVHEVSMPTVYENLRNYLLSRYPGCRIQLIYEAGFSGFWLHDLLEGDGIDCIVTPPNKVTQEKDSRIKNDRIDARRLSKILENRDYRSCFIPDTELREDRQISRTLAMTQKDITRTMNRIRRLFDFHGLELLRDKRNWTVSDYKKTRQMVLGDSLKFSLDRLLDELDRLCESKKQLKKKLQELSKKTRYANTFGHFESCPGIGWLTAIRLVLEWGEDLNRFQTGKHMASYVGLTASEYSTGETVRRGHITGQGNELVRSWLIQCAWIAIRKDPVLLEKFNAVWKNTGSKKKAIVATARKLAVRLRYLAVNDEDYELGLVESMVPAA

SEQ ID NO: 254460 - protein, 342 aa, unidentified
MVTVGIDPHKHVHIAVAVRGDGRPIGTPLTVKNDALLIITLLKWIRSITDGTATWAIEDGRGFARRLADGLLLAGQEVVWVPSRLTAAHRKLHAATGAKSDPVDATAAAHAAIATPDLDRHRIDEHVRELRVLVDYRADLIKRRTMVINQLKAQLHVWLDHTPQDLTRAKNLAMVTTLTSTAQLSPHVRRALAGMTAEIAALNRQIRDLDTTIRQLVSPLAPTLLQVTGISYNSAAVLIAEIGDITRFPSSARLARYTGCAPIPVYSAGQERHRLHRGGNRRLNSVLYTTAIVQKRFSPAAQQRTRGARRILQRHLIDVIHRAMTADQATWQHHITRHHNAA

SEQ ID NO: 254461 - protein, 382 aa, unidentified
MRPLGRGKRAGAGGQVGRGNAVGVDPHKHTLTASVIDERGGELGTRSFRVSGVGHRDMEAWAVSFGAVVRWGVEGAGGLGRHTAMYLVGRGHDVRDVCPTRTAERARRRRQGKTDALDSVRIARETQADPDIAVAFKRAGPEAALDANAEVMGLWHGARRSILKSRQHLLNESEALLVALPLGLRETLPDTKDVRTRLNALARRDRTQAWDPSTALRLRLLEDHAAAIGALDAKDKEATKELGKLIERVGSTLGGLCGLAEKSVAELLVEAGDPRRFASEGGFARFNGTAPLPASSGEGDGRPVRHRLNRGGNRRVNAVLHRMAVTQLRCEPRARKVFDDARQRGHTKKEAMRILKRHLSDVVYRRMVRDLKPDHEVSAEAA

SEQ ID NO: 254462 - protein, 353 aa, unidentified
MITIGVDAHKRVHVALALDEAGREVGRWQGPNSPVGWRAVAEWALGLGADQQWGIEGAWGYGRGLAQHLVAAGETVYEVNARWTASGRRRARRPGKNDRLDARAVALLVRQEAPTLPQVQAEDETAVLDLLTTEREQALSEATRLRNQIHALLVQLDPEYQSHLPVIKSPASLAALETYVPPDDSPLQQERAAAVRRLAERLRLALTQAQELASRIRDSAAEGFSPLTRLCGVDLLTAGTLAGVLGPGRRFTTDAQLAAYAGVAPLEASSAGLVRHRLNRGGNRRLNAILYRIALTQAHHSSEARAYLDRRVAEGKTRREAIRALKRFIIRAIWRLWQECRSVSSTSLLVRAA

SEQ ID NO: 254463 - protein, 447 aa, unidentified
MKKVFIGIDVGKFKNSISIIDIEGNPIIKKGLSIENDYYGFARLEEQIDLIINNYGFTYDDCIAGVESTGHYWFNLRDYLKDIGIETVMIKTDSVKHRRALEEGQKGKNDTLDARVIASCLRNGNYVYIRENERELRALQKLTRMRNDISDELVALKNKIHRCIDICNPVFFKIFENLNSKTGVALIKLYPSPEDIINVDLDNIKRELGEIVDKPNMRMVSLYREECEIWGRIIKEPSYAEKVEMVAYIDKFLLQNKSKEHLDKQIKEIAKNIIPLYSEFEQIKGIPLIQLISVLSEIGDIRNFKNTRAILAFLGLSLKGNASGKYIGERRINKAGSRIVRKHLFNIMDTLVKHNEYFRIAYCYYKSYNHKNPTKKRSMQIAVMCKFVRVMYGMLKHNTNFDYKEMLKGYYFGDCNMKVFKEEFEGEKRTKKIENYKLAYSIFVNYS

SEQ ID NO: 254464 - protein, 365 aa, unidentified
MNAIHYIGLDVHKKTISFCVKTADGQIVEEGRLQAERTVLRRWAAGRKQAWHGAMEATLFSAWIYDTLKPYAQQLSMGHPAKMKAITAGKNKSDQIDARTIADLLRCNLLPVCYVLPPQLRDLRRLLRYRNLVVQQSVRMQNKVAGLLMESGTPFNKQKLHQKKYFSDLMKSLEEVPESVKDLLRMSRGSMEMFQSTQKQLVKRLLSEPALEQRVERLMRIRAVGPITALTWALEIADPHRFASIADAVSYCGLSAAFRSSAGKQQRGPISKQRNAWLQPVLIEAAKLAPLWNPQLAAVHARALERGHANRATLQVARKLVAYLLAVDKSGQPFQVRTPPPPASAKARKKSARKSKKAVALAPAA

SEQ ID NO: 254465 - protein, 322 aa, unidentified
MAKHTTICAGIDTGKRKLDVAIEGRREQLQVKNTPEGHATLLAWLRQHRVRRIGIEASGGYEQPVVVELRRKRFVVVVFQPAQVRAYAKFHSRRAKNDKIDAALIAVCTAAVRKIHAAPDPRLLSFAEQLTMIDQIGEDIARLKNRIESCRNVAINKLWHEDIARLEQRESAELKALVASIRKYPDLAERLALINSVDGVGLPTAVAILVRLPEIGRVTREQAVALAGLAPYDDDSGDQVGVRHIEGGRKRLRRALYTASLAASFRGNPQLIKLYQRLTAAGKEHKRALVACARKMLIFVNAVVARGTPWCGEPPMRSFPVS

SEQ ID NO: 254466 - protein, 320 aa, unidentified
MSASSVVVGIDVAKAHVDVAVLGAQFDAQRFDNEAEAHSALVAALKPLDAALVVMEATGGYETALACALQAAGLPVAVVNPKQARDFAKSMGRLAKTDSIDARMLAELAAVLVRRDDLARFLRPVADEQQRWLAALVTRRRQLLTMLNAERQRLQITPRGLHPSLQAIIAAIQAQLDDIEGQMVGHVRQHFAELDRLLQSASGIGPVASATLIAELPELGRLNRREIAALVGVAPMANDSGSSRGRRRVQGGRFEIRRVLYMAALTASRRNPAIKTFYARLLAAGKLPKVALVACMRKLLTILNAMVRTRRPWNKSLHGA

SEQ ID NO: 254467 - protein, 377 aa, unidentified
MTKVRFIGLDVHADTIAVAVAEPSGEVRALGLIPNRPEAIRKLVKKLAPAEQLRVCYEAGPTGYVIYWQLTGLGVRCEVVAPTLVPVKAGDRVKTDRRDAAKLARSYRAGDLTPVWVPDAAHEALRDLVRAREAAKKDQLRARHRLGKFLLRHGRRPSIRLTPWTQGHLAWVKRDVHFEQPAQEATLLDYVHEVDHVADRIERLERAIDDAVTAAPKPMRAVIDALQALRGIAKVSAVTVVAEVGELSRFARAPQLMGYSGMGACEHSSGARTRRGRITKTGNAHLRRIVVEAAWAYRHRPAVGGALRKRQATLSEEVKAIAWKAQHRLCARYRKLLGRGKCQQQVVTAVGRELLGFIWAIAVAVEAEQRTPKSVAA

SEQ ID NO: 254468 - protein, 347 aa, unidentified
MRFYTRQHRYYCGIDLHARTMYVVVIDQAGQVLVERNMKTNAEEWLKLIEPYRSDVVVAVECIFTWYWLADLCTAEKIPFVLGHALYMKAIHGGKAKDDKIDAHKIAAPLRGGMMPQAYVYPAAMRSTRDLMRRRLHLVRKRGQLLAHILNTNSQCNLPEFGGRINYKANRTGVAERFEDPCVRKSIEVDLDLIAHYDKLVRDLDLHIVRTVKSDDADTFYRLQSIPGVGKILALTICYEIHDIDRFPSVQGFASYSRLVKCSRESAGKRHGTGGSKIGNVHLKWAFSEAAVGFLAKSPEGRKLVERLRRKHGKAKAISILAHKLGRAVYYMLTRQKAFDMQRFANC

SEQ ID NO: 254469 - protein, 315 aa, unidentified
MKPALAQNVGVDIAKDTLDVAILPAGESFRLANDPGGHRALIKRLGRFEISRIVFEATGAYHRLFERALAEAGLPFVKVNPRRARRFAEATGKLAKTDRCDALMLARMGAALELEPCLPASKIAQSMKELVSARDALVKDRVAALNRKAVALDPLIKRQLAQRLRQIDRQIQAIDNRLRTLRGSDPDLTLRVDILTSIPGFAEPTANTLVVEAPELGRLNNSQAGSLVGLAPIASDSGQTNRRRSIRGGRPRARRALYMPALSAIRFNPEFKAKYQAMITAGKPPKVAIVAIMRKLFILANALIRDQRKWTPAAP

SEQ ID NO: 254470 - protein, 320 aa, unidentified
MQKIALGLDISKLTIDAYFNGQDDFIRVMNHQAGIEKLIERIKNYQQQSKEIHACCEYTGVYYFPMASALHDSGIKISVINPLSIKLYAEYRLRRTKTDKQDAKLIADYCEKENPPLWKPLSEKRNTLKVLSRRIEQLNVLLNMESNRKDVSDKVIKSGINRIIEAIKTEIESCKIAIQNLIDSDKELSHNQQLLQTISGVGKTTAAWLLSVLVDIDKFENSKKLISYLGLSPVIKDSGTSVRQAKISKMGDKKVRKALYYPARVACLRTKLWRPWFEQKIKQGKHPKQIYVLMMCKIVKYAYAVIKTGQPFDENRHKPA

SEQ ID NO: 254471 - protein, 396 aa, unidentified
MLYLGIDIGKNNHVASLINEKGNIIFKAFSFSNTTDGGESLIAKLNNFITSVNDVEIGMEATGHYWLSIYSFLAQKGFIIHVVNPIQTDGWRKGIEIRKRKTDIIDSVLIADLIRYGDFLETSLADENTMSLRNLSRFRNYLISSIGDLKRKTICVLDQVFPEYQFVFSDVFGQTSKEILLHFSTPSDFESISSEKLDKVLSEITMKKFATNKIKQLSSVAKQSFGISFCLDSFTLQLKLLIEQINFIENQVKDVEEQIGILLGKINSPITTIPGIGNVTAATILGEIGDISKFSNPSKLVAYAGIDASVSQSGEYQSTNNKMSKRGSPYLRKALFSAALVASNCDPVFKAFYQKKRAEGKHHLTAIGAVARKLCYTIHAILKNNCPYEVRLPNNE

SEQ ID NO: 254472 - protein, 422 aa, unidentified
MLEETQETEEIIQRVAALDVGKAELTCCVRVPGQGSSGRRAQEVRTYKTMTRSLLVLVDRLAELGVTRVVMEATSDYWRGAFYLLEAHGFEAWLVNARDVKHLPGRPKTDTLDAVWLCKLAERQMLRPSFVPPRPTRQLRQVTRYRADLVAARTAEKQRVEKLLEDAQIKLSVVASDIFGVSGRAMLTALIAGERDPKRLAQLARARLRAKLSLLEEAFSGFFTDQHAFLLGKMLARVDALDADLAELDAKLAELIAPLAGAVDRLDEIPGVGQTAAHLLIAEIGTDMTRFPTAGHLVSWAKFAPGVKESAGKRKGRGSTGHGNPYLARVLGEAAVAASKTDTFLGERYRRIARRRGKRRAIVAVGRSILVIVWHLLSDPSARFQDLGAGFYDTRINAEHAKRNHIRQLEALGYKVTLQPAA

SEQ ID NO: 254473 - protein, 423 aa, unidentified
MEMMHERVAGLDVHKATIVACVRVGTGRKVTRECRTFDTTTDGLLALLAWLVECRCSHVAMEATGVYWMPVWKILSEGDFVLIVANAAHIKNVPGRKSDLNDAMWIADLLACGLIKSSFVPEEDVQELRSLLRTRKQLGREQTRHVQRIQKTLAEANIKLDSVLSDIMGATGRRIIEAMIAGVRNPRQLVALASAQIKATPKQLYDALHGRLTDHHRFLLKLHLRQWDGLDATIREIDLEVEARIARMDKEVSAGAAPFRDLIRLLCTIPGVSTLSARTILSEIGRDMSRFPTAGHMVAWAGLCPGQNESAGKRKPARLRKGAPWLKTMLVQCAWAAKRKKDSYYKAQFFRLQSRRGPQKAICAVAASILTAIYHILRDGTEHQDLGANHFDRRSTEGKARRLVAQLTSLGFEVQLQRTAEAA

SEQ ID NO: 254474 - protein, 394 aa, unidentified
MILVGIDIGKNKHTFSIIDKNSEEILLSPSDFSNNLKGFLFLIQKLSSYTKSELLIGMEDTGHYHFALLKYLLDRRYTVALINPTTTDLTRKLQGGITKNDPLDSLTICDVISSNHRNKPYRVTTLNRFDLYEQKQLTRHHHNLKEELNTYKNRLQKCIDIVFPEFNSLFHSKYGIVYMNILKAFSSAKAIANADIRSIRKCFEFKGQGKRISLSAEQLKLTAKSSIGIPSVAEEIQIRHLVSQIELLEKQLSEIDKRIEEFFLKNNSPILTIPGISHFSGTSIISELGDICNYTKASQIIKFAGVAPYHYESSQFTAQHTAITKKGSKYLRKTLYQIILPVISNNEVFYAYYTKKLNEGKGHRCAQGHCIRKLLRVIYHLLCTRQPFNPKLLV

SEQ ID NO: 254475 - protein, 458 aa, unidentified
MYRELQPFREALSHELKASLFPAVAGVDPNKLLETYLDRLTMYTGVDVADQTFTTLALDASREILGSLEGCPNEPAGFERFIAWARDLRDRHGLRIVAVAGETTGIYYWALWDFLGEQADVARVLYNPRTTEHMGEVLSKKVRNEWVDAMLLAEQLRLGSTPEVLLQADADLLTARYYSRAARDLAQQINRKKNQLRALLRAYCVPVCQVFPGAKLHHPAVYALLQGHLFPDEFVQASAETLATILTDHCQDAFGLAEAQQLVAASRLAVTRPIGRDAIRSLVHAHIEDITTFQERKAFYLKTGYALIKDRPETKLLRTVKGAGVSNTLALVSEVGDVHRFASGEHLASFLGLTTSKHISGTTLFQSTRITKQGSPNGRYAAVNVAQHLTQLVPRYQNMYQRIKDRKPQRKGHFIALVAVARDFVSNVLYDMWRNNRPFFVEVSAYRSYRQKRTGSNE

SEQ ID NO: 254476 - protein, 342 aa, unidentified
MDKIEACGIEVSAQELVVAMSGKKGEAVLRRFANTPVGHRQLLQALTRGGKRVRACLEATGVYGLDVALFLSAQAGIELMVANPRAVRHFAQARMQRSKNDRLDAVMLREFAMRMEFTAWTRPEQSTLALWAIARRLQALTRLCTAEKNRQHAAGVSQAMPACVRASVARTLRLLQREIQKLRETARQCIAGDARLQRRYQLLRTVPGIGEISAIQILAELALLPTDRDVRQWVAYAGLDPREYSSGSSVKKYTRISKVGNRHLRCALYMPALVASRCEPHLQGFYEHLVAVGKKKRQALTAVARKMLHAIFGMFRSDRPYDGNRVFPLPASGLALQAPKIA

SEQ ID NO: 254477 - protein, 375 aa, unidentified
MKEKLRFLGLDVHAETIAVAIAEPDGEVRSLGTIPNRLESIRKLIKKLGPAEKLRACYEAGPTGYVVYWQLAELGVKCDVVAPTLVPVKAGDRVKTDRRDAEKLARSHRSGDLTAVWVPDEGSEALRDLVRTREAAKQDQLRARHRLSKFLLRSGQRPPTGIRPWTRPYLIWVAQLRFPQMAQEATRLDYLHEVEHMRERVERLERAITEAVKLASPALQQVINDLQALRGIADISAVTIAAELGQVSRFDGARQLMGYCGAVPSEDSSGKRTRRGSITKTGNAHLRRIVVEAAWSYHRPPCIWYGLRKRQESISEEVKEIAWKAQHRLHKRYMRLAAAGKDKRKITTAVARELLGFIWAIGTRAETTVRQRIAA

SEQ ID NO: 254478 - protein, 419 aa, unidentified
MRVHRNCCGLDVHKKIIAACLIREDGEGNSVAEKRLFGSMTRELHELAHWLCASQVTAVAMEATGVYWMPVWNVLEQYGLQLLLINPEHYKAVRGKKTDLKDGTRIAELLQDGRLEGSYVPPVAIRVLRDLTRYRTKLVQYQSAIANRIQRLLEQGNIKLASVASDALGVSAMAMLRALAQGETDAARMADMAKKQLRKKIPQLQLALEGCLLPHHRWLLSEMIEDLDHVGAKISRIEETIEQQMRPFQNAVDRWLTVPGVKHRLAWTLVAEVGPTVEAFPSAADLVSWAGVCPGNNQTAGKRKSGTTRAGNPFLRRALCEAAWAASKKKGTYLQAQFRRLAALRGPKRALVAVASSILTAGYYILQRATTYQELGPDYFDKRNTVRATHRLVKRLEALGHRVILEPHFSNNPIQASSS

SEQ ID NO: 254479 - protein, 335 aa, unidentified
MDNVTTVGIDLAKNVFSVHGVNGAGRPVLCRSVRRDQRHRLIAQLAPCLIGMEACSGAHDWARRFQAHGHTVRLMAPKFVAPYRKSGKNDGNDAEAICEAVARPSMRFVPIKSVEQQSVLCLHRVRQGFVEERTATINRIRGLLAEFGHVLPQSAAELRRQLPALLELLPLPVAHALRELHAHVGVLDQQVLSYEREIEQLARGDERNARVRQLNGIGPLSASAIVASVGDAHEFENGRQFAAWLGLVPRQYSTGGKTRLGHITRHGDAYLRTLLIMGARSVLQSAARRRDRVSRWALSVRQRRGYHRACVAIAAKNARIVWALLAGNQPLQLAE

SEQ ID NO: 254480 - protein, 468 aa, unidentified
MADRREAEKRRALEGLPVVRADVAGMDLGSERHWVCARTADGAGREIADFGATTPELLRMAQWLKDRHVQSVAMESTGVYWIAPHEVLEAAGLEILLVDTRQLARVPGRDKKTDPTDCQWIQRLHSCGLLRGSFRPREAVCMLRTLVRDKSNLVAESGDWVRRMQKSLDQMNVRVHRAVSDLDGVTGMAILRAIAEGERDARELAKLRDRRCRNSEEEIAEQLSGHWREDHLFSLQQALQMYDAIQQRIADYNREILRKLGAMQREEFGEQPAPQVKNPHKAKAIRKRGEEPIREALYRMSGVDLTSIDAIGVETVQVVLSEYGPDLSRFPTEKEFVSHVTLAPRRPMSGGKPVRRKKRNTASTRVAAALRMAALSLRNSGTALGAYYRKIARRIGGDVAVFATARKLATLIYRLLRWGQPYVDEGAEAFETRYQEMRITVLKAEAKQLGYELVQNHPAPSTEEEVTD

SEQ ID NO: 254481 - protein, 331 aa, unidentified
MKNYQLAVGIDVSKKTLDVFIHNHSKHRVFDNTRSGYLSLEKWVGKFSENEKPILYCFEHTGNYSLKLAIFMQTNGLDYVQENPIVIKRSSGLVRTKSDRVDAQMIARYAWLHREELECSSIRDEALLELGRLLSLRDQLVRNRTGLMGTLEELTGLLSSPSTDISCKSLKHTIAYLSKQILKLEKQIDQLLKREEELGKNYKLLTSLKGVGRILACQLIYHTCNFARFSSWRQFSSYCGTAPFEHSSGTSVFKRAKSHPMSDRKMKSLLSMASVSAIQHDGELREYYQRKVAEGKPKMVALNNVRNKLLSRAFAVIKRGTPYVDLCKYTA

SEQ ID NO: 254482 - protein, 384 aa, unidentified
MIDQPSTGAAVRDQANTLFISLELSKARWMLTVSAPGAEKISRHSVSGGNAEALLEVIARLQASAAKRRSAAVPVVVIQEAGLDGFWIHRLLTGRGITSHVVDPASIAVNRRHRRAKTDALDGETLLRTLMAWSRGERQVCSMVQPPTPEAEDRRRLARERGRLIKERIQHSNRIKGLLASQGVSAYEPLRQDRRARLDALTTGDGRPIPERLRAEIVREIERLELVLSQIAAVERERDALLAEAAAADRDAVPAALLRLRGIGPELASLLWLEGLFRRFGNRRQLAAYAGLAPSPWQSGGLEREQGIAKSGNPRLRHAMIELAWFWTRHQPGSALSRWFAERVGAARGRVRRIAIVALARKLLVALWRYVTDGIVPQGAVFKA

SEQ ID NO: 254483 - protein, 346 aa, unidentified
MDITTIGIDLAKSVFQLHGIDSSGKVLIKKQIKRAQMAEYFVSLKPCLVGMEACGSAHHWARKLESFGHTVKLMPPQYVKPYVKTNKNDAADAEAICEAVTRPNMHFVPIKSTVQQAILSLHRIRQGYVKARTAQANQIRGLLAEFGLEIPQGIGYISKRVPDIIEDASNELPGILRIEILSLLEHLNELDTRADNCEKKIVAWHKQSETSKKLEAIPGIGPLTATALIASIGDAKNFKNGRQVAAWIGLVPRQHSSGGKQNLLGISKRGDIYLRTLLIHGARSVIYRSGQKENPTDTQGWLNQLTQRRNKNVAAVALANKNARIVWALLNHNRDYQDNHKMLVAA

SEQ ID NO: 254484 - protein, 354 aa, unidentified
MQYIAFDSHKRYTYAVVEEKEKGRVMEKRIEHRRGEIGAFLSQCEVGSPVALETIGSWYWIVDEIEAAGMLPRLVNARKAKMMIASSKKTDRLDAKGLNTLQRTGTLPTVWIPSSELRDIRELYRTRMVLTQMVIRLKNRILSCFSKYGISFDETSDAFNIKGRASLEAALEILPTQTCFAVKELLRQLDLLQEAVKEFEARMLQVQSNDPEIKLLQTIPGVGPILSYVIAYETGDIHRFPSASCFASYAGTTPSVHASGGKVRYGHTASSVNHYLHWAFIEAANVISMRHEVLRFRHTARLYERLRQAKGHDIAVGAVARHLAEATYWILTTKTAYREPNQNKQVVVVSSKEG

SEQ ID NO: 254485 - protein, 363 aa, unidentified
MGSLALERSDVIVGVDTHKDQHVAVAIDGLGGLVGEPLFIDATNDGYAELLAWALARGPVHVFAVEGCGSYGIGLARFLRRHGHPPVEVARPPRAGERRLSGKSDSIDAEHAARSVLAGKGIVTPKLADGQVEAIRLIKIARDTAVKSHTTAIITLKAVLVTAGQDLRDSLEPLSDFKLLTACAELDGTGDLADPDTAMRHTLAALAHRWFDLHAEIKIHSKALKALTTAAAPQMLEAFGVGLDIAAQMLITAGDNNDRVRNEAAFAKICGVCPIPAGSGKTNGRHRLNRGGNRQANAALYRAVIVRMRWHEPTIAYVARRTAEGLTKKDIIRCLKRYLARELYQLLPEPSAASAPTKLRAAA

SEQ ID NO: 254486 - protein, 448 aa, unidentified
MKIGYLGIDVSKGYADFALLSASKKVLEDSFQLDDTQAGHVKLLTLLERFKAKHDLVGIFAALESTGGYENNWLALLKNEGPGAGVRMARLNPFGVKHDSHAGLERTVTDATSARRIAIYLINHPEKANWEEPGYDVMDSLRSMYKFIRTKIKQKVQLQNQFEKLLYTAFPEMLSYMKEQLPKWLLMALEQYPTAAAMRGASMEDLVKIAHINEDKAKALSHKAEQSIAWADNRALRKLISTYALDLLRLITQIEELKKDLEKQKEITREIEILESFQGIGRYSAIGLMIEIEDVQRFASTKKISSFFGVHPKFKQSGDKVIGVRISKQGSSEVRAILYMVAKSALVYNPHIRQIYDRFKSQGMAHNEAMGVIMHKILRIIYGMLKSGSGYQPAYDLEKQQKAIEFINQKRQQSKKNGRNRYQQMDNEAPISKRQLRKRKEQSSSPSS

SEQ ID NO: 254487 - protein, 316 aa, unidentified
MTETTTYVGIDVSKARLDVAMVPSGDSFSVPNDDDGIEKLVTALEPLKPSLVLLEATGGLERRVLARLVTRKLSAMAINPRNVRDFGRSLGKLAKTDKLDAVILARFAQAVRPEWRPMADDQTQQLQAHLTRRRQLVEMITAEKNRLLSTDHAEVRRQIKAHIAWLEKELNINEYDLDQAVKQTPAWREKADLLKSVPGVGRVTATTFLALLPELGALSRRQIAALVGVAPFNRDSGTLRGRRTVWGGRATVRAALYMAALVGTRFNPALKAMYRRLVAAGKPKKVALVACMRKLLTTLNAIIRDGRAWTLAENTP

SEQ ID NO: 254488 - protein, 401 aa, unidentified
MRVGIDAHKMKCTTVMFDGDSVTGSFDFQTTRQGVYEFMKKVPEGSIAVIESSTTGKVLSRMLSGKYEVHMVAPPERKVSIKTDRRDAERIVMEDMLNYLRRCYIPSQYIENIRFVVTQQIQIGRRIARVKNQVHALLEMNMIQHELDDMADIFGVKGLNKLSKIQLPRHDMIALARYLEELKMYVSHHRQLDTEIARIAASDNDVQLLMTIPGINCFTAVAIKSRIGEVSRFATKKYLCSYAGVVPKANNSGEYISEHNHVKQGDIVLKYALTCAVRGAVLANKNSSIKLFYRKISKKGVSPQKAQIAAARKMACTVWKVLSSKQPYTEQDDHMTKRKMKIMSSKAMRIIPTSVMPSKVSELVRNLADDIDILGKYHEDSGYIIGKDLSNKNRLKEDILR

SEQ ID NO: 254489 - protein, 459 aa, unidentified
MNRKQRREMQRKIQSQDLNLEVVHPNAAGIDIGNEVHYVAVPPNRSSEAVRRFGCTTAELRAMADWLKQCRIQTVAMQSTGVYWIAVFDILEEAGLEVYLVNARETKNLPGRKSDVQESQWLMKLHTYGLLRNSFRPPQEIRTLRTYWRQRGDLVRAAGRHIQRMQKALTQMNIQLANVLSDISGKSGQAIIKAILQGERDGGELATLCDRRVQASQEEVAGSLEGNWQDDLLFVLQQEQDGYEFCQKQMAECDRHLEQCLQQRADRSQGASLPVEKRKERRKKKKGNKPQFDLRAGLFRMAGTDLTLMDSIDVMTAMTILSEVGWDMSKWKTEDHFVSWLRLCPDNRISGDKIIGKGRLPTNNRVTIALKMAASTLRTSQTYLGAQFRRLRTKLGSPVAIKAMAAKLARLVYRMLRFGMKYVDQGAEFYEAQHRKLQISHLKRKATQLGFQIIEASAA

SEQ ID NO: 254490 - protein, 342 aa, unidentified
MESAVTIGLDLGKSVFQVHGVDAGGAVVVQRRLTRGKLLGFFAKLPVCLVGMEACAAAHHWGRELQKLGHRVRLMPPRYVKPYVKRQKNDAADAEAICEAVTRPNMRFVEIKTCEQQGILVLHRVRLILTRQRVQLSNAIRGHMAEYGLVAPVGRNGLERLIAIIDDPDDVRVPAVARASLMPLVRQLGIVSDQVLENDRLVRASARSTEVGRRLMEMPGVGPVLASAMVATVTDPAAFKSGRNLAAWIGLVPRQNSSGGKEKLGGITKQGDRYLRQLLVAGALAVIRYARRHGTKRPWLVRLLSRRTPKIAAVALANKMARMIWAMMVTGERYREPIVAAA

SEQ ID NO: 254491 - protein, 370 aa, unidentified
MEEGIKFFVGLDVHKDTIAVAVAETGRAPARLVGSIAHDVNQLLKRLARYGEPAQVHVVYEAGPTGYGLQRALARRGYQAQVIAPSLIPKRAGSRVKTDRRDSLRLAELSPAGELRAVWIPDPADEAIRDLARAREDAVNARTQVRQQLKGFLLRHDVRYARRTSGSKTYYRWLATLNFGETGVQTAFTAYWQAVSAADERVGRLTTALVGSIAGWRFASIVAALQALRGIDQINAIGLVAEIGDIGRFAHPRQLMSYLGLVPTEASTGERVVRGSITKTGNAHARRLLTEAAWNYRFQPRIGMRAQRRAEDLPQAIRDVAWKAQLRLSGRFRRLHTRGVHLNKVCTAVARELAGFVWAVARARSELPQS

SEQ ID NO: 254492 - protein, 396 aa, unidentified
MKDCNQLTFKLNNKKVTNMKTVLQSKDNAFNPVLYMAFELSAKKWKLAFGNGQRTRMKTIAAGDWSVLLAEIERAKAKLNCPADARVVSCYEAGRDGFWIHRALQAEGIENYVVDSASIEVSRRKRQVKTDRIDAGALLRLLMRYLSGEKVALHPVRVPTVAEEDQRRLSRERERLLKERGAHSARIKSLLVAHGIRLARLSELPQLLPTAKAAVIGYALPADLKAELEREYERYVLVDRQVKALEQLQHERAASADSAAIQMIQQLRNLKGVGWQSSWGLSTEFFSWRQFKNAKQVGACAGLTPTPYDSGDSTREQGISKAGNKRIRKLMVELAWLWLRYQPLSALSQWFEQRFGHGGKRMRRIGIVALARKLLIALWRYLEHGVLPEGAVLKAV

SEQ ID NO: 254493 - protein, 324 aa, unidentified
MAKPTTICAGIDTGKRKLDIALNGSSEQLQIDNTPEGYKALLGWLRRHRVKRIGIEASGGYEQAVVAELRHQRLVVVVFQPAQVRAYAKFHLLRAKNDKIDAALIAACTAAVKKIHAPPDARLLPFAEHLTMIDQIGEDIARLKNRIETCRNPRFRQIWKADIAGLEKREKIELKALVAAIRQHRDLAERLDLIDSVVGIGLPTAVAILVRLPEIGRITREQAAALAGVAPYDDDSGEQVGIRHIDGGRQRLRRALYTAALPASLRWNPQLIALYNRLIAAGKEHKRALIACARKLLIFANTVVARGTPWHRERAPIVVITAVP

SEQ ID NO: 254494 - protein, 448 aa, unidentified
MSKIKSKKGQIKRISQLQVINPMVAGIDVSDTEMMVAYPLGHDQLEVRSFGCFTRDLHLISQCLKSHNITSVAMESTGVYWIALFLLLQEYGFEVYLVNAKHVKNVTGRKDDESDAEWIQKLHSCGLLKASFQPDNLTRTLRSMVRHRKNLIRSSSNFINRMLKALELMNIKLHTVISDINGKTGMRIIESILAGERDPEILADLRDGRIKASREEIIKSLEGYWTTEHLFELRQCYQLYCNHKLMIEECDQEIEKQLIEQIASRNNGVIPKIESVKRKRPVKRSANYNLTAYLKEILSVDVTEVCGISEISALTILSEIGTDMTKWKTEHHFTSWLGLAPNTKISGGKIISSRIMKKKHNAGQAFRMAANSLYHSKSSLGDYYRRIKSKAGAKKAVVATARKLAIIYYKMVINKEKFNPKALEGYQQKYKQKKINQLKKKIALLEAA

SEQ ID NO: 254495 - protein, 402 aa, unidentified
MNAVGIDVSKGKSMVAIMRPFGEIVSAPFEIKHTASDINSLVELINSVEGESRIVMEHTGRYYEVLAHQLSEANLFVSAINPKLIKDFDNDSLRKVKSDKADAVKIARYALDKWQNLKQYSVMDELRNQLKTMNRQFSFYMKHKTAMKNNLIGILDQTYPGVNTYFDSPARSDGSQKWVDFASTYWHVDCVRKMSLNAFIDHYQNWCKRKKYNFSQSKAEEIYGKAKELVPVLPKDVITKLIIKQAVDQLNSASTTVESLRTLMNETASKLPEYPVVMAMKGVGTSLGPQLMAEIGDVSRFTHKSAITAFAGVDPGVNESGSYEQKSVPTSKRGSSDLRKTLFQVMDVLIKTHPQDDPVYQFLDKKRAQGKPYYVYMTAGANKFLRIYYGRVKEYLSSLPES

SEQ ID NO: 254496 - protein, 337 aa, unidentified
MSEISILAIDLAKGSFQVCGVKAGGAVVFNKSVSRPRLYQLLGEQVHCIVAMEACATSHHWGRVAQSHGHEVRLIPAAYVKPFVRRQKNDRADAEAIAEAASRPSMRFVAVKSAEKQGRAVAFRTHQCFVRQRTQLINALRGHLAEFGLAAPKGPASLKRLEQALAHPDVDLPTAVREMGLLYLGQIDRLTDLIEQLADELERASRTDNELRRLCTVPGIGPVTAGAIAAFAPELSTFDSGRNFAAWLGLVPRQRSTGGKARLGAVSKMRQCDIRKLLIVGTMSLIRWVVRKGGSANRWLASLVARKPRIVAAVVLANKMARMIWAMTTKGENYRMA

SEQ ID NO: 254497 - protein, 402 aa, unidentified
MVMNAVGIDVSKGKSTVAVIQPFGVVIAEPFDVFHTDSSLKELVRFIKSLSGETKVVMEYTGTYYEPVANALHNAGIFVSVVNPLLIDDYDTNRVRKVKTDKLDALKIASYALDKWIKLRKYEPAETVRKTLQIMNRQCIKLNKILVMQKNSFIALLDCCFPNANTLFTSPHRVSDGHEKWVDFVMKFPHVDSVAKLPLSVFRTKYQSWCKKEHYNYSESKAEQIHAYARTIVSTLPMTDAVRKMVSEAAKLLNSTLEALGTLHSEMDALASQLPEYETVMNLYGVGKVFCSQLIAEIGDVTRLKSNKSLTALAGIDPPPNQSGKDDPKSRRISKRGSPALRRTLFLIMTIYLQHQPADEPVYQFLDKKQAEGKPYKVYMIAAAHKFLRIYYARVKEVMPKE

SEQ ID NO: 254498 - protein, 382 aa, unidentified
MPDGIRWVGLDVHARESTLAIFDQATGEVTTKRVVGRPHELLPWLRGVERPARMVYEAGPTGYGLARRALAEGVELGVCAPGKTERPPADRIKTDKRDAIRLARLLAAGELTLVTIPSVEREQLRDLVRCREDIRVDLARARHRIGGFLLRREIYWEGTGEAWTRRHRSWLTSVRFSDHASRATLGDYLHAHDVLIARRDQVETDLAKLALSAPCAPTVARLRCLRGIDTLTAVGLCAEIGEWERFDHPDQLSAYLGIVPSEHTTGQQRRLGSITKAGSTHARRLLVEAAHHYRRGPAVGEALERRQRGQAPEIINISWRAQRRLNARWRQLRDTRRKPGGVVAVAIARELAAYCWEIATCPTTSPAPTPTPTTRKRLTNSR

SEQ ID NO: 254499 - protein, 350 aa, unidentified
MKGDSFGNFVLLTIKTKVMKKVQFFVGIDVSKATLDVFIHGLNLYFVVENSLQGFVCLLEKVITGTKCKKEDLFFCFENTGKYSRMLSVFLQSENIQFTMESALQIKKSLGITRGKNDRIDAKRIAHYAYEKRESLVPTILPGAKIDQIRSLISLREKLIKHRTAYKNGISDLHDCYEDGESELIKEVQQRLINNLNDEITRVEQKIENIIESDESISKNYKLILSIRGVGRILGFYLIGYTANFTSFANARAFACFAGIAPFSYSSGTVKGTPRVHPFANKMLKALLNLAAMAAIKYPGEYLQYFNKRVNELGKNKMSTLNIIRNKIVYRVFAVVQRQTPYVDLLKFAA

SEQ ID NO: 254500 - protein, 362 aa, unidentified
MIVIGADTHKRNHTLVALDGVTGAVRGELQIAASDQGALAALRFASGLDQERVWAIEDCRHVSARLEAALLAAGERVIRVPAGMTDQARKFSRVAGKSDPIDARAVALVAVRDGVESFPQAFCDEDAMEIRLLCDYRDQLVAERTRMICRLRWHLVTLAPDLEAGLAQASLKGPRVCARLTRQLARLPRSPRLRIAKRLLKRITEIGHEERELLAELERLIDAHAPQLAAQPGCGTVTAAIIIGHTAGAQRFPTDGHFARHTGTAPIPASSGNTQRHRLHRGGDRQLNRAIHIIALSRARTDPATRAYLHRKHTEGKTKLEAIRCLKRHLARRIYHQLYTAETRSPRPELIDHQNPEIPIFT

SEQ ID NO: 254501 - protein, 408 aa, unidentified
MNTLYVGIDVSSKSNVVYLMLPNGDKHSNFSVANSHEGSTLLVKKIYSALTSHSLDTVLIGLEATSVYGDNLVYFLREDATLAPFNRKIHVLNPKQVKKFHDTYNDLPKNDYVDSFVIADCLRFGRINKEVYMGDYRYKALQNLTRARFFAVQNLVKEKQRFMNVLFKKYSTMTQEKVFSDAFSTTALAVYDEFESAEALANMDLHELTDFIIEKGKNRFPDPDAVAKAIQKAARSSYRLPKTVNDSVNQVLSISITSMKALESQIKEFDKAIIALMELLPNVLISIPGIGPVYSAGIMAEIGDINRFDNQASLTKYAGLAWKQHQSGGFEAEVTRLIPSGNRFLKYYLCEAAFSLVRCDKEYSDFYHLKYKEVNRCQHKRALALTARKFVRLVFRLLKDNRLYCPAK

SEQ ID NO: 254502 - protein, 458 aa, unidentified
MHKKESPRNRTENTAVLKQINHNAAGADIGSDAVWISVGEHAAEQPVRKFGTTTAQLRASAEWMVSAGVETVAIEATGVYWVPAYEIYEEHGLNPILISSRAIRTFNGMKKSDFVDCKWIQLLHTFGILQPSVRVESLMIELRGYMRHRKTLTEQCSEQIQRMQKALTLMNVRLDQAVSDITGVTGMSILGAIVKGERDPKKLAELRKPGCAKSEAEIAEALTGHYRDEQLFCLNHSIQQWDFFQGQMAECDKKIETVLRKMPLKSEPTEVKATRKARKNQVRFDGKTLLEEKLGIDLTQIRGLDVLTVLTVISECGVDLSRFPTSKHFKSWLGLCPGTKKSGHRVLSSRSRRTTNRAATALRVAAQSLLRSDSELGAVGRSLRGRIGPEKTVTAVAGKLADRIYLSLKSGRVMQDRGSEYHDLKYRERSISSLTKRARRLGLQLVPIPENTPTPSVK

SEQ ID NO: 254503 - protein, 337 aa, unidentified
MKYSGIDLHSNNSVVTVTDEEDRVVAEKRLPNDLAKILGLLMPWREEMAGVVVESTFNWYWLVDGLQAAGFKVHLANTTAIKKYAGLKHSGDETDARHLAHLLRLGILPTGSILPPAQRAVRDLARKRMQLVRSRTTHILAIENITARQHGARISSNQVKRLTAETVDQMALPEDVALAIKTNVAVITTLSAQIDLLEKRLQERIGERAEYGLLTSVPGIGQVLATTILLETGPIERFAAAGNFASYARCVDSVRTSNGKKKGEGNTRNGNKYLAWAFVEAANFALRYCAEAKRFYERKRAKTNNVVAIKALAHKLARACFHILNERKPFDVTRCFA

SEQ ID NO: 254504 - protein, 343 aa, unidentified
MKKITLVGIDTAKQVFHLVGMDEHNGLSYRRKVSRKRFLSTMAQLPVCQVVMEACGASHHWGRRIRAQGHEVRLIAPQHVTAYRVGNKNDYRDAEALIAAALSPSMKFVGIKTVGQQAEQAEHRVRSRLLSQRNAAANGLRGLLGEYGMAFAKGHKALREGARAFAGSDQARELGLVGLVNDVLDEIAALDERMEAYKRRIEQRVRLDPVSRQLQRELNGIGPLSCSALRVKVADARAFGNGRNFAAYLGFAPRHRGTGGKVTLGKLSRGHDRYLRQLLIHGARAVVSRVGDKQDEQSRWLRGLIERRGFNIACVALAHKNARQAWAILARQPHGQLKAATGQ

SEQ ID NO: 254505 - protein, 407 aa, unidentified
MSINCGIDWAEVHHDVALVDENGTVVARKRIDTGTAGLTALLEVIAESGGAPGTTPIAIETDKNLLVVALVEAGFTVYPINPRAVARYRERHGQAGGKSDPGDAAILANILRTDRAMHRPMPAISEHGRAIKALARQHQEAIWALYQTISRLRSVLLEFYPGALQAFPNLKHRAAVAVLSAAPTPESGRALTRRKVVALLHHSGRRNDPNLVERILRELKTPALRQPPQVEEALGHAVTGLLAVIASMQQSVDSLENALGREFDSHPLAPILRSAPGLGPILAARVLAEVGDDPARFATANGLRAFAGTAPITRASGRSHYVKARKVRNKRLGDACHWWAFVTLTKSAGARAHYDKRRAAGDHHNAALRNLANKLLGRMWWCLQHNEPWDDHAAWPDHQITSQPAAA

SEQ ID NO: 254506 - protein, 425 aa, unidentified
MRVTKVVEVIKAEQVMDVSVDVHKEELYALARTPGKEYAEQFANTTPRIRKVIKDYQIIAADHGFQQIRIVCEPTGVYDRKLLRAARQLGALTSYVNAEAVAKFRVVQNNDNNKTDTSDPGVILTMAEHGHTIKHRMLPNEYLNLRKLGSLLDDEEVMVVRIRGHINNVRLELFCDWKFDKDFMYGNTGKALVAKYGANPYKIVKSGFTRFSSVMKRAVPCIRKTSIERLWAQAESSVLNEQPEGYIAILEQRLRDLYEDFWRHKSRKNGIEAEMIAILHELREDDPSIPPPTPDLISEKNFARLLGETGSLNDFQSEAKIMRYAGLNLCMRKSGQYQGKYKISKKGRPLLRKILSQIVLQLVRKNALYGDYYHEKKNRQSLPGAKIMTIVMRQYLRKFYGWYRSKQEFNKERFFTCEHEYEMAA

SEQ ID NO: 254507 - protein, 463 aa, unidentified
MSKPIIIGVDVSKGYADFLGLNSDREFVLDLFQLDDNKSGHTQLEEQLLALKREHKPDRILFVVESSGGLEDNWLRTVKSEPLSNFVEGYRLNPKVTHHEYRVQHRNSISDRVSSATIAHHVAKNLADFTPNEVVVNPAFAPARNLIRHIVSLNEDCTGQKNALLQILYQYLPSLLPHLPDRWPAYFLNLLINYSTKKSIQTSAKQGFKKLSHVPKGKSEAIYDALLNGIDVKETPEAISMVIRSKARQILALHKEITEAETILCQVAPIAKKDIELLCSITGMGKVPATIILCYIEDVDRFENAKSIAAFFGVQPRVKVSGDGKVKIGMSKQGNPIVRRTLFLLAFRTISRVPYLKSIYAKSRQKGMCHNAALGVLMHKLIRIIYGMLKSGTAFDPGVDQLNQVDPREEQTAPQLKQPVKPNSKRRFQSKNQKAPISRRQRRERKKDQESQATTQAENTGSS

SEQ ID NO: 254508 - protein, 434 aa, unidentified
MSGREAVQPEVKFVAFVGIDWADQKHAWCLQAAGSTQRESGELEHRPETVEAWVGELCRRFGPGPIAVAVEQVKGALVCMLRKYEYLHLFPVPSTMSAAMRKALYPSGAKDDPRDADLLLDLLLQHRDRLRHLQPDNEGTRRVQNLVEERRKLVDEKTAQLNRLIGYLKIYFPQMLEWFGRLDTKLVCEFLERWPSLEELKKVSTAELRKFFRQRQGRHHELTEDRIHGIAQAMPAIQDRAVIEAKGAVVQVIVQLLRSLLEGIANLDRKIAEAAEAHPDFFIFQSLPGAGAALAPRLLAALGSQRDRYDSADEVQKHSGIAPVTETSGKKKWVHFRWACATFLRQSFHEWAGHSIAQSVWARAYYQQQRERGNDHHAAVRALAFKWIRIVFCCWQDRVAYDENKYLAALARRGSPLSSVLATIATPLCNPCGS

SEQ ID NO: 254509 - protein, 400 aa, unidentified
MRKTSGLDVHKDTVFCGIYDGKRQSEVKEFSTTTVSIYSLGEHLQMQGVQEVAIESTGIYWIPVWNILEEMGFSLMLVNPYLIKQMPGRKSDVKDAQWIATLLHKGLVRGSLIPCQRIRELRTYSRKYIKLQQKQASVMQELERTLEMCGIRITSLVSNISSVSVRHIIEQTIEGEDDPLELVKHIHGRIIKRQGRDKVIESLTGFVMPHHRFVLEQALEEYDLLIMQSDRSLSKMKELCQLHYAQEFELLQTMPGISEISAMIIIAETGADMKAFENSGKFTGWTGLRPRNDESAGKFKSTATTKGNKYLRAILVQVAWAASRTKNSCFKEKFNKLSIRKPRKKALIAIARKIGVVIYCILDKKEPYNPSLLIVPQTEKVKNQVIYHKKELERLEKILN

SEQ ID NO: 254510 - protein, 337 aa, unidentified
MNYCGIDLHSNNCVVIVSDENDRIVYQKRLPNELAQITAALEPYRRELAGVVVESTYNWYWLVDGLMDTDYRVHLAHPAAIRKYDGLKHSGDFADAAYLAQLLRLGLLPEGYVYPREERSARDLARKRMQLVRYRTAQILSIEGILMRQTGSTINGEAVKRLTAGQVDEFAFTPDVALAVEANRAVSQALGQQIEALEKRLRERVILRAEYHLLRTVPGIGDTLATTIMLETGSISRFAQVGNFSSYCRCVDSLRESNGRKKGEGNTRNGNKYLAWAFVEAANFAMRYCPQARSFYDRKKSRTNRVLAIKALAHKLARACYHMLRDQKPFDVHLCFG

SEQ ID NO: 254511 - protein, 372 aa, unidentified
MKQNIIYVGLDVDDTQYHGSALDKNTGEIITFKCRPTLKGLLNQLDRIHKCFPESAFKLCYEASYIGYTLQRDLVEKGYHCDVVAPTSIPSPRGKQVKTDRIDAAQLVQFYANDLLTLVTIPEPEQEQDRDLIRSRQKLLAQQTELRKHIQALLRRNGRHYKVETQNITHWTLHHYCWLDRTIEASSGSLKVNLELLVRQLKSVNSTLLEYGQQIEALAKTPRYEQLVQALTCYKGIKNLFALTMITEIGDIKRFPHPRQLVSWIGMDIREYSSGGKHNRFGITKHGNRYLRTAFVEANQRGYRTARISKDLKARRKNTAPELINIADRCLRRLNKKGNRLLLAGKHPNKVKVACAREMVGFVWESLNKAAA

SEQ ID NO: 254512 - protein, 459 aa, unidentified
MGNARARKIPAQLIEDEQYQLRHERVAGIDIAKAKADVCTRLPPARDGGRRTSRVEEVPAQARDILDLAARLAADGVELVVMESTSDYWRIWFYLLEAAGLSVQLVNSSHARQLAGRPKTDRLDAQWIARLAEMGLLRPSFVPPPEIRALRDLTRTRLQLVRDRTREWQRLEKLLEGALVKLSSVVYSLAGTKTARDILEAIAGGERNPKTLAALASGRVRAGRRAVERSLEGMALGAHHPLLIRAHLDHVALLDRTVAAVEDEIDAALAAIPAAWGADAGGETGPGAGQGPDAAALPAADRLAEIPGVTRKLAAAIIAETGLDMTRFPTVGHLVSWAGLAPAARQSGPRSRKPGKGQGDAYLKGYCTQAATGAAATDTFLGERLRRLSRRLGGNRARCAVGRSILVIVWHLLADPSARFTDLGAGWHDARADRDRKIRAHLRQLQALGLDVTINPAAA

SEQ ID NO: 254513 - protein, 340 aa, unidentified
MNKFTKKKVFIGIDISKDQLDLVLLKEEHFGTYEDKKVPNSFNGFDGIVKWLEKKKINLEDCLFCMEHTGTYGLLLFAWLSQMGIDFVVEPGLKIKRSLGITRGKNDKLDARRIADYAILNKAKLEPFIMPSSLLIQIKQLLTYRDQLTRISTSLKNSLKSHSQYQRVSGLKSITEEIKGQIHDLRQRINSIEKQVVSLIESDEELKKNYKLATSVKGIGFVIATFMIVTTNNFTGFENGRKYACYSGIAPFEHTSGTSIKGKTRVSNLANKKIKALLSNGANSASSWDPELKAYYKRKTEEGKDHKLIINAICCKLVNRVFAVVKRQAPYVITYQQKIA

SEQ ID NO: 254514 - protein, 319 aa, unidentified
MFVGVDVAKAELVVAVRPSGAQWTVANDEPGRRTLVARLTAERPQVQLLVLEATGGYELPAVAALVAAGLPVVVVNPRQVRDFARATGQVAKTDRLDAAVLALFAERVQPPVRALPDAATHALEALVARRRQLVEMLGAEENRLAMARGRGPSARPITASLQQTIAFLRRQLAATDREIGTMIRTSPVWRARDDVLQSVPGIGPVVARTLLATLPELGTLNRRAIAKLAGVAPLNRDSGTWRGQRTIHGGRARVRAAVYMAALVASRHNPVLRAFYHRLLAAGKPKKLALVACMRKLLTILNTMLRTQQPWAPNIALDA

SEQ ID NO: 254515 - protein, 410 aa, unidentified
MELYCGIDWATDHHDVAVVDDDGRVVASGRVGNDAAGFTQLLTLLAEAGDSREHPIPVAIETDHGLWVAALRETGRVIYPINPLVASRYRTRYAVSGAKSDATDAVLLANILRIDRDAHRPLPADTELAQTIRVLARAQQDAVWTRQHIGNQIRDLLNDFYPAAIVAFAELPDGGLARADARAILAAAPTPAQAAQLTPARLRRLLVKAGRRRNLDRDIDRLRAVFADTYLHQPPMVENAMGIQLTALLRQFDAACTATEELAEAAIAHFEQHPDAEIITSFPGLGNLAGARVLAEIGDDRSRFADARGLKAFAGSAPITRASGKKTIVLHRHIKNRRLAAVGPIWALSALRHSPGARRHYDARRAAGDWNHQAQRHLFNRLLGQLHHCLHTGQLYDEHKAFPPPLPHAA

SEQ ID NO: 254516 - protein, 368 aa, unidentified
MVQRSRFLGLDVHKDTIAAAICEETGRPQSYGTIANDPAAIRKLVRAVGGGTAIRLVAAYEAGPTGFVLQRQLARLRVECLVAAPSLMPRPAGERVKTDRRDALLLARLLRSGDLTPVWIPDETHEALRDLVRARADAKVDLLRARHRLAKFLLRKGLAPPVRTQLGSIKYQAWLKPLRFPSPNEETVFQDYGGAVDQAVQRVRRLESELRRAAEHSPHLHLIAALQCLRGIAFLTAVTIVAEAGDLRRFKGARQFMAYTGLVPSEHSSGDAVHRGPITKTGNALLRHVLGEAAHHARHRPGVAGNLRQRQAGVPRQLIDLAWNAQQRLHLRYRHLSARLGRPRALTAVARELAGFVWALGQLPAAVA

SEQ ID NO: 254517 - protein, 347 aa, unidentified
MQISTIGLDLAKNVFQVHGVDAAGDVVLRRKLRRGEVLIFFSRLSPCLVGMEACTSSHHWARELAGLGHTVRLIPPSYVKPYVRRGKNDAADAAAICEAVARPTMRFVPVKSTDQQAVLVLHRSRDLLVKQRTMLINALRCHLAEFGIVAAQKRTGLAQLVAMVKDDADEGLPILARRALEPLISQLEQTQFGIARLDKEIEAWHKSNPASLRLGTIPGIGPIIASAIAATMLDPTNFRSGREFAAWLGLVPKQNSSGGKERLGRISRQGNRYVRRLLVIGATAVLRYGRTKVPGNRWLQALLGRKPARLVTVALANKMARTAWAVLAHKEDYRDGGARLLDGTVAA

SEQ ID NO: 254518 - protein, 369 aa, unidentified
MNTTTFVGLDVHARSIKAVALDAMTGEVRSATFAYDAAAVAEWVGSLDPAAKCVYESGVTGFDLQKKLTALGVDCVVGAVSKMIKPSADRKRKNDRNDAEFLARMLSVGNVVEVCVPDDECEAARDLVRALDDAREDLKRCKQRLSKFLMRHGYAFSETTPTGRRKGNWTAAHWAWIRSIEFPEKADDEVLAYYIDTVRQAMENKKRLEKLVEAEASKPRWKKRVDSLRCLKGVDAMTAADIVFEAGEFSRFKNARSFAAWLGLTPSEHSSGESARQGGITKAGNKHLRRVLVEAAWHYISASPHPKDLAKGQAPDPAARRHAAKGIRRLVKRREEMLGRGVHKNKANVATARELACWCWAVGRMVENG

SEQ ID NO: 254519 - protein, 339 aa, unidentified
MQVTTIGLDLAKNVFQIHGIYEDGEVAFNRALRRAQVLPFFEKLAPCLVGIEACGTSHHWARELIKLGHNVKLISPAYVKPYVKRGKSDAADAEAICEAVTRPTMRFVEVKTTEQQAILAVHRTRDLIVRQRTQTINMLRAQLSEFGIVLPQGVYHALQFAKDCLNGEQADLPEVAGDVVFELCDQLLFLHSKILRCSRQMTQIAKLEKRVALLRTIPGVGPITASAIVATVGSGKQFNNGREFAAWLGLTPLNKSSGGKERLGHISKMGDQYIRRLLVLGMISRIRSIRAKPEKFDPWFTDILSRKPSRVAAVAMANKTARMIWAVLTRNEPYKVRTV

SEQ ID NO: 254520 - protein, 408 aa, unidentified
MKTLHGRCAGLDVHKVEIVACLRLAKKAKVVREVRRFPTTTHGLLELVEWLEGAECTHVAMEATGVYWKPVWHILEGKFALILANAAHVKAVPGRKSDVNDATWLADLLAHGLIRASFVPPEPIQELRDLTRTRKQLSREIVQHVQRIQAVLEEANVKLSSVITDILGPSGRRILKALIAGETDAQKLAALGSERLRCGQAMLCEALTGRVREHHRFLLAQHLKTIEQLEQSVIEFDVRIEDALAPVRDIANRLNEVPGLGRIAIETIIAEIGTDMTPFPTAGHLVAWAGLVPRLDESAGKRRSTRIKNGAPWLKPALVQASWAAARKKNTYLQAQFLRLKARRGPKKALIAVAASILTIVFHMLRDGTCYQDLGPEYFAPRNPAKLAARLASRIRNLGYYVEISAAA

SEQ ID NO: 254521 - protein, 370 aa, unidentified
MRKSTLFVGLDDSKDSIQVAVAEGTPGGEVREYGSIPNTPEDLVKLVRRLGRPKDLHFVYEAGPCGYGMYRTLLSLGADCLVAAPSKTPRRPGDRIKNDRRDALTLAKLHRAGELTRVWVPDTETEAMRDLTRAREDAKYAQTRARQRLFAFLLRHGRRFPGGTTWSARHFRWLRDQSFAHPAQQICMEEYLQAIEETTRRVGRLDEQIQELVPAWSMQPVVSALSAHRGVNLLTASTLIAELGDLTRFDRPRTLMAFVGLVPSLSASGLERHTGSITKTGNAHARRCLIESAWAFRHPARRSDHLQRRLEGQTEEVQALAWKAQVRLCGRYRRLRARGKQHNKVITAIARELIAFLWATARTVNAPLPA

SEQ ID NO: 254522 - protein, 413 aa, unidentified
MEGRWFVGVDWATEAHQVCALDADGGLLGERSVAHSGTGLAELCDWLLEIGKGEAAAVHVSIEVPHGAVVETLLERGFTVFAINPKQLDRFRDRFTVAGAKDDRRDARVLADSLRTDALCFRRLVADHPVVIELREWSRMADDLQQERTRLSNRLREQLRRYYPQYLTLTNDVDAPWFLDLWAVAPTPAQAAKVRTAQIASVLKRHRIRKLEAPAVLTHLRRTALIVAPGTIAAATAHIRTLSARLRLTHQQLKECHTQLDALCARLDADTETPAGENREQRDGAILRSLPGVGRIVLATLLAEASQPLAQRDYHALRALSGVAPVTRQSGKRCVVVMRKACHGRLRTAVYHWARVASQLDPPTKARYAALRARGHSHGRALRSVADRLLGIACAMLRTHTLYDAAHSQKAVA

SEQ ID NO: 254523 - protein, 409 aa, unidentified
MLFVGDDWAEDHHDVELQDPAGRRLARARLPEGVVGIARLHELVAAQLGEDDGPEQVVVGIETDRGPWVQALLAAGYQVFPVNPRQVARYRERHGTSGAKSDAGDAHTLADMVRTDRHQLRAAAGDSDLAEAIKLLARAHQTLIWDRHRHLLRLRAALVEFFPAALAAFPNLAAADALELLQAAPDPTSAARLSRARIAAALTRASRRGVPAKAAQIQQALRAEQLPQPETVVAAYAATVGAAVAVIGTLNAQIEALAGQVEANFGEHRDAAIYRSQPGLGGVLGARVLGEFGDDPGRYRDARARRNYAGSSPVTKQSGKKKVVVARFVRNDRLADPLHQQAFCALTASLGARAYYDQLRARGTGHHAALRQLSNRLVGILHGCLKTRTLYSEETAWSHRTSDAATAAA

SEQ ID NO: 254524 - protein, 336 aa, unidentified
MQVMHERCAGLDVHKKSVYGCVLWFDENGMKQKQIRRFGTMTSELLRLGDWLAQHQVTHVAMEATGVYWRPVWTVLDGHLELMLVNPQHVKALPGRKTDVQDCEWLADLLQHGLLRGSFVPPTPIQDLRDLTRYRVELTQAQNRAANRIQKVLEQANIKLSSVASDTLGVSGQRMIEAIIAGEQDADQLADLAQKRLRQRIPELQQALSGRVRPHHRFLLKEHLDEWKGLAERIRRIEQEIDRLMAPFEHAVTLWRTIPGINRVTACSLVAEIGVDMKQFPSADHLASWAGVCPGQNESAGKRKPATTRNGNRWLRRTLCQAAWAASHKKIGRAHV

SEQ ID NO: 254525 - protein, 355 aa, unidentified
MQRATKLLPKITIGVDVGDRKSVTCEINAAGEVVKRDGVATAAVAIERYFAGRERCRVVMEVGTHSPWLSRQIQAYGHEVIVANGSEVYGRRRRKKRNDRMDAEFLARQGRADTSLLHLIRHWGEEAHIHLERIRARDQLVQTRSKLVNHVRGAVKSAGGRISKCATEAFPKRAVWQIPEDLRSALTPLLSVIDDLSARIREYDDKIEELIRTSYPEALRLQQIQGVGPLTALAFVLLIDDPKRFSRIRDVGAFLGLVPRLDDSSDSEPQLRITKAGDALGRRLLVSSAHYILGPFGPDCDLRRHGAKIAARGGKNAKKRAVVAVARKLSVLLLRLWISEAAYDPQRTLKRQRTA

SEQ ID NO: 254526 - protein, 404 aa, unidentified
MIYVGIDWAEAHHDVCAVDEAGELVMRMRIADGLDGVAQLHAALAERAATATEVVIGIETDRGLLVQALVAAGYELYAINPFGLSRYRERHVTSGAKSDAGDAKALADLVRTDRRNHRRMAGDSELAEAVKVLARTHQSLIWARQRQVNAMRNALREFYPGAIEAFGTDLDSSDALAVLAIAPTPEEARTLSVPRIVRALRAGGRERFLERRARVIHDTLRRPQLGGSPVVSGGYGESVRSMARIVASLAGEIARLEDELKARFEQHPDAEILRSLPGLGLILSARVLGEFGDDPTRYTDVRSRRCYAGSAPITKASGTKLVVLARFARNRRLADACYLWAFSAISRSAGARRYYDRQRACGRSHHQALRALSNRLVGILHGCLHHRCLYSEEIGWGSQPAAAA

SEQ ID NO: 254527 - protein, 403 aa, unidentified
MNSVGIDISKGRSTVAVMRPFGEVVISPFEVRHTDSELSELARQLKSLDGETRVVMEATGNYHAPVAKLLHDAGLYVSVINAKLVHGYGNNDLRRVKTDKKDAVKLANYGLDRWLTLPRYVPEEDTRLLLKNCYRQYRQYSKVQTILKNNLISLLDTVFPNANRLFSSPIRVDGSEKWVDFVAEFWHCRCVSEKSQKAFTNKYQRWCRKHGYNFSEAKAHTIHAEACGHIDVIPKSETTKLLVEQAVAQLRATSAALAALKHEMQALASMLPEYPVVMDMFGVGPTLGPQLIAEIGDVRRFYSKKALVAYAGLDAPPNDSGDVTGRHKSMSKVGASSLRRTLFLVMSVYLQTAPLDEPVCQFMDRKRAEGKLYRVYMMASANKFLRIYYATVKAYLESLEHTA

SEQ ID NO: 254528 - protein, 347 aa, unidentified
MRFYTRQHKHSCGIDLHARTMYLCVLDPTGAVLLHRNIPCDPTSFLQAIAPYRDDLVVAVECIFTWYWLADLCARETIPFVLGHALYMKAIHGGKAKNDKIDALKIATLLRGGMIPMAYVYPRDMRSTRDLLRRRLYLVRKRGQLLAHIQNTHHQYNLPGPSRKILYKVNRDGLAERFTDPAVRRSIAIDLELVDHLDRLIRDLELDLVRTVKVHDPQTFFRLKSLPGIGKILSMTLLYEIHDIARFPRVQDFASYARLVKCARQSSGKILGTGGSKIGNVHLKWAFSEAAVLFLRANPRAQAFLQKLRRQHGKAKALSILAHKLGRAVYFMLQRETVFDMHKFLAA

SEQ ID NO: 254529 - protein, 337 aa, unidentified
MDIKVIGLDLAKNVFQVAGLDASGRTVLRRQLRRAEVLRFFANTQPALVGMEACGGAHIWARESAKLGHSVKMMNPKYVKAYVKTNKNDRADAAAIAEAATRASVPTVPVKQVWQQDLQSVHRVRSQLMRERVAVGNQIRGLLTEYGLVAAKGVTQLKRALPQILEDAENALSPLIRQLLAQRYAHLRALEAQIADYDRMITRAAHEDERCSALLEVPGIGVMGATALVAQVNDARHMKNGRELAARQGLVPRHFGTGGTERMGGISKRGDGYIRTLFIHGARAVLRTAPRKTDRLSRWALEVSKRRGPNVAAVAVANKMARIAWVILARGERYQPQ

SEQ ID NO: 254530 - protein, 385 aa, unidentified
MKPNSQMTLDKYFRQCVGIDISKDKFTACLYMYDMASDAGCCTESIDFPNNRTGFNQMVKWSRKESQKGFPLVYLMEPTGSYYEPLAYHLHKIGQTLYVVLPNKARKFCEYEGIKTKTDAMDARCLALMGCKNRKLRPWEPPLPIYRELRQLTRLRADLVKMQTQMLNHIESIDHMEDVAPEVRKSYEKLLDTIEKLLEKNEKDIAAKLAQDKELETKVKRIATAKGIRVGTVTCIVAETQGFHLISNRKQLTSFAGLDVKARQSGKDDPRHHITKKGNAHIRAALYMPALSAAHCNRQMAQAYGRICAKHPDVKMIGVTAIMRKMLLLVYSLWKSGEEYDETRDNTHTPRKKEPQPTNSPEDCLKPNAEPPDWNAADKEGNPPF

SEQ ID NO: 254531 - protein, 462 aa, unidentified
MTIPRNQSHRTPEIPSATPLPAIRPLVAGLDVGSSAHWVCGPGRADRTPNVRVFGTTTDQLQALADWLADQGVESLAMESTSVYWIPIYELLESRGIEVVLVNARQLHNVPGRKTDVSDCQWLQLLHSCGLLRGSFRPGEAITRLRALQRQLANLVAERTRCVQWMQKALDHMNVQVHRAVTDLTGVTGLAIVRAIVGGERDPARLALHRDRRCGKSAAEIARYLTGTWRDEHLFNLASALRLFDTLETEIAAYAAQLLTEVAALHPPERQADPVPPHPNPAKERAIKARGEQVARTTLWRFAGVDLTRVDGISAGTAQVVLTEVGPNLAAFPSEDQFVSWLRRCPRTPISGGKPLKKRRNGLGANRIAGVLRMAATSLQRSKTALGASFRRIARHKGGAVAVFATARQLARLIYRMLRYGHDYVDIGEQAYDHRFQTRRLAALTETARTLGYTLVPKLAAG

SEQ ID NO: 254532 - protein, 338 aa, unidentified
MKLYAGIDLHSNNSMLSIIDEEDRVHYQKRLPNELERILLVLASFKECLVGVVVESTYNWYWLVDGLMQAGYEVHLAHPAALVQYQGLKHSADEHDARWLAHLLRLGILHEGYIYPRESRAVRDLMRRRMQLVQTRSAQITCVQTQFARSTASSPSSDAIKRMEPEEVEQLLQDANVGSGVRANLAVIGTLNVQIKRLEHEILGQVKLAAQFAPLLSIDGIGRILALAIMLESGAMERFAKDGHFSSSARCVQSQRLSNDKKKGEGNRKSGNKYLAWAFVEAAHFAVRYNPRIRRFYERKAAKTNKVVAIKAVAHKLARAAYHVMRERVAFDEQRAFA

SEQ ID NO: 254533 - protein, 358 aa, unidentified
MADNVTEATVVGGVDTHKDLHVAAVVDQNNKVLGTQYFSATRQGYRQMLVWMTSFGALKRIGVECTGSYGSGLLRYFQNAGLEVLEVTAPDRMERRKRGKSDTIDAECADHAAFSGIRTVTPKIRDGIIESLRVLKTCRKTAISTRRVALQIIYSNIISAPDELREQLRNMTRMQLIRTLGSYRPDASEYHNVTNVYRIALKSLARRYVELHDEIADLDVIIAAIVDELAPELIKRNSIGYESASQLLITAGDNPQRLRSESGFAALCGVSPVPISSGKTNRYRLNRGGDRAANSALHIIAIGRLRTDAKTKEYIARRVAEGHTKMEAIRCLKRYISREVYTLLRNQNRQVNSIQIMT

SEQ ID NO: 254534 - protein, 359 aa, unidentified
MKEYIAFDSHKHYTLAEREEKATGRTRQCRISHYPGAIRKYLGTCEPGTPVAVEATGNWYWIVDEIERASLHPLLVHPRKAKLMMGMINKTDKLDVHGLNRLQRNGTLPTVWVPPGELRDLRELTRTRMFISHHRTRLKNRILATLSKYGLLIVGYSDAYGKKAREELNGLIAELPAQTRYVTEMLLEQLDFVERQLQKQEERLKALVKITPEMGLLMSLPGIGVILSAVIALEIGDVSRFPSAEHLASYAGTTPRVHASGGKIRYGTLRPDVNRYLQWAFVEAANSVAVNHTRRPWRHVSQLYRRVRDRRDHGKAIGAVARHLAEAAFYVLSENEAYRDRGLKMACPEQSRRGRTREA

SEQ ID NO: 254535 - protein, 318 aa, unidentified
MSAASSLFCGIDVSKDHLDVALLPSGERWRVGNDAAGFELLLGRLRELSPTLIVLEATGGYEARVAAALAHAGFAVVVANPRQVRHFAKATGQLAKTDRIDAHVLALFAERVRPEPRALPDEEAALLDALLTRRRQIQDMITAEKNRLPLAPGPVQKRIEQHIRWLARQLDAVERDIERRIKESPLWRMKDDLLQSVPGVGPVVSRTLIAQLPELGTLSRKEIAALVGVAPLARDSGNFRGRRVVWGGRAPVRSALYMSALVASRRNPVIRAFYLRLVAAGKPRKVALTACMRKLLTILNAMARTQTPWNPALPEYSC

SEQ ID NO: 254536 - protein, 384 aa, unidentified
MQAPTIDTPTAGHSGTIFVAIELSQKSWLVTLHSPARDKISRHKLEGGDHAGLLALIARERDRASRAAGGVPVVASCYEAGYDGFWLHRLLLAAGITNYVFDPSSIAVDQRARRVKTDRIDGERMLRTLMAYLRGEPRVVRIVRVPTSEQEDARRASRERGRLTKEQTAHTTRIKALLRLLGMAVGNPRRRDWLSWLAKQRDWQDQAMPPQILAEIKREHARLMLGREQLDALAQAPADLTPVAAQMAQRSELLLRLKSLGPAFATTLTSEVFYKDFRNRREVASYFGLTPSPWQSGGIDRDQGISKAGNPRARCAAIEMAWLWLRHQPNSKLTQEYRRRTLDASKRSKRVAIVALARKLIVALWRYLTTGLVPEGATLKTAEV

SEQ ID NO: 254537 - protein, 346 aa, unidentified
MNQIIRIGMDTSKHFFQLHGVDAAERPVLRRKLRRNEVLAFFAKLPPTIIGMEACGAGHYWARELRKLGHEVKLIAPQHVKAYVKRNKNDGRDAEGLCEAMSRPTMQFVPVKSEEQQAALMLAGVRQQLMTRRTQLGNAIRGYAAEFGLISAKGLDKVEPLLADIAQDESLPELAREMFAVHGREYARLQLELKRVDARLMVWHRGNDDSRRLAKIPGIGLIGATALVMKAPDPRLFPSGRHFAAWIGLTPKDHSTAGKTRIGKITRAGDEMLRSVLVAGATAVIQQAKKGRGHPSPWLLALLVRKSPKLAAVAFANKTARIAWKLLTTGESYDGARMPVASALAA

SEQ ID NO: 254538 - protein, 325 aa, unidentified
MSQVTLGIDVSKDKLDVALLAGDKVRFYQVPNNPSGYARLGQWLHSAQARDLHACLEATGQYGEGIATYLFAQGYAVSVVNPARIKAYATSKLRRFKSDKGDAELIAVYCQKESPALWSPPEGGLRELQYLVRHLDDLKSMRQQERNRLQSGVSSQRVRDDLEAHLVFLDEQIDRLTRDIKKHLDQHPDLKEQKDLLKSIPGIGELTAAVLLGEIGDLRSFESPRQLAAYAGLAPQQHDSGISVHRRPRLAKTGNPHLRKALYMPAVVARKHNPLMAALSDRMLKTGHCAMAIIGAIMRKLLHLAYGVIKTRKPFDPLHAQSVSA

SEQ ID NO: 254539 - protein, 413 aa, unidentified
MPDSIFKTTGTHLRDVLSSHDLGEILYASIDVAKYYHSAMVVNFFGDVIIPKFDFPYNNHGINFLRKKLKTAQEQTQAKKLFLGLESTGHYHENLVASLVASGYDVQVIRPIDSKNERDNVHAKTDAIDLAAIAKVIISSKGTRSHMPDTIYYNLQRASRTHRQLTWQETRTKNIITFIVDKTFTGLWNPEDSIFSDKWGKASLLFIENYPTPQQATKLGVKRLASFFRKHDTKLGMDTAKRIIQLAKITPARSLEEMESDIKALKAHIQVLRTLMSTISEQKKQMVKFLIQTPGTYLLSVPGIGIVYASDFTAEVGDVHRFAYAKQVISLAGTAPRKHQSGEVDKPNLPTSHKGKNLLRVTVNQIALSLNSHCPEYHHYYSKKHYQYSDTPVTHQAKPEQLRQTGSSSLPLP

SEQ ID NO: 254540 - protein, 346 aa, unidentified
MVLIGCDFHPSWQQVSWLDMETGETGEQKLVHAGGEAKQFYEQLAAPVLIGMETTGNSQWFIELVEDLGHEIWIGDAAQIRASYVRKQKTDKRDAAHILKLMVEGRFPRLWTPDREQRDLRQLVLHRHKLVMIRSRVKNELQHLSLNKGMQRKRRLWSQAGQKLLRELPLKKWAACRREDLLGLLTMLDEQIGKLDGAVQHAAEENPQSKLLMTQPGVGPNTALAFVLTLGDVGRFPRGKQVASYLGLIPREESSGGRQKLGAITKQGNRMLRALLVEAAQVAVVHDPGLRKQYRHRCHQKPKAVAKVAVARKLAVRLYWMLRTNVAYPEIVRIESSSGLPLVGAS

SEQ ID NO: 254541 - protein, 413 aa, unidentified
MKKDFIQFDQVVERGAGMDVHKEIIVVTIRGKGIKTQTKSFKTFTSSLTKLQEWLKKYGITHLAMESTGVYWKPVFNVLGDDFTIILVNARHVRNVPGHKTDKKDSKWLAKLLLSGLLKGSFIPEKEIRDLRDLVRTKTQLTREISSAKNRFIKFMESANIKLSSVLTNVFCVSGQKIISEILKGDYKPERLLYHVHGRVKAPREDIIEALRGKLDDHYRFMMKTMLEHIANTEGVIAQIDEQIQQKTEKHKEFLDLLETIPGVGRDGAVCIIAEIGTDMEAFVSHKHLASWAGMCPGNNESAGKNKSGRITYGNAFLRAFLVQMAWGAARTKNTYLSSKYKSLVGRRGKKRAVIAVGHKILIAAYFIIKNKVGYNELGEDYLSNFRKDKLVEYYKKQLEKLEPNVDFDNEAA

SEQ ID NO: 254542 - protein, 346 aa, unidentified
MTIVEDKRAITGGVDTHADMHVAAALDPIGGLLGVQEFPATTAGYAGLLGWLGGFGTVALVGIEGTGSYGAGLARHMAAAGVQVVEVDRSDRQDRRRQGKSDPLDAVSAARAAQSGRAAGAPKGRDGAVEAIRALMVARRSARNERTQAINQARSLIVTGPDDLRARFARHTPAQLVTGLAALRPRPGDVPGYATRIALRELGRRAQFLDAQIVYLDELIVPLVTARAPSLLALYGVGADTAALLLIAAGDHPERLRSEAAWAHLCAVAPIPASSGKVRRHRLNPGGNREANHALWRIVITRMSAHPATRAYVDRRSKEGLSKKEIIRCLKRYAAREVYRHLRAGG

SEQ ID NO: 254543 - protein, 354 aa, unidentified
MLIIGCDFHTRYQQIAMAREGTAELLLERRLDHESGEAHAFYRNLQSSHEPVLVGIEATGPIHWFERLLAELGHELWIGDSAKIRAQEVRKQKTDERDAALILDLLLAKRFPKIWVPTPAERDLRQLLWHRHKLVRLRTMMGNQLHFLAMSQGLCRKGKLFTKKGRAELVSLGLAPWARRRREELLQLLDQLDSPIAELDRAVLEEAKRRDDAVLLMTHPGIGPVTSLAFVLAVGPVTRFHGSRKLVSYFGLNPTEESSGGRRRLGAISKQGNIMVRWLLIETVHHAVRQDPELKQDYQRLKFRRGHAVAKVAIARKLAVRMYWMLRSGADYARLVRRQGSPGATLVDASPSLG

SEQ ID NO: 254544 - protein, 364 aa, unidentified
MTRLHYVGIDVHKETMDVLVYREGEQHVFLERTIPNRDKTVKKVFGKLLEEGSVIACYEAGCMGFVLQRLLEGMGVSSIVVAPGKVPKRSGDRVKTDRRDARDLAQQLRAQTLEAIHIPSGEDEAVRDYLRAREDVRIELKKTKQRIHRFLLRHGYVYESSRYWTLQHDRWLRGLEFERLMLKESFDEYYFMMKELTERLRGMDKRIEEIALSGAYAERVQRLRCLKGIEYLTALWIVCEVGDFRRFRNAEAFMGYLGLVPREFSSGERRRQGGITKTGNTHLRNLLIESSWHYRYKSAPSKRLTARREGQPAEIIGYADKAMRRLQGKFIHLILKGKTPQAAVTAVARELAGFVWGMMVGQIA

SEQ ID NO: 254545 - protein, 317 aa, unidentified
MAMQAGRLIVGADVAKAELVIHHDSSDEVIKLKNSKADIKRWLKQQPLNTAIAVEATNVYHLDLVELAHGLGFSVYVVDGFQLSNYRKIVGGRVKTDPSDARLLSRFLRNEGEDLRPWSPPPAVYGKLQSLLRRRAALVSARTAMTQSWANETLLKAAFEAFVTSIDRLDLLMQKKMKEVLREAGLHEQVARCQAVEGIGFLTATALVMAFVRGEFKSSDSYIAFLGMDLRVSDSGQKAGRRRLTKRGCSEIRRLLHNAAMAASKSTAWKGIYEQHRNSGKATTQALVILARKLARVAFALMKNQDEYVTKASKPAC

SEQ ID NO: 254546 - protein, 339 aa, unidentified
MAQVTTLGIDIAKNVVFVHGVDAHGHVVVTKRLARPKVLPFVAQLPPCLIGMEASGGAHYWAREFTQLGHTVKLMPPQFVKPYVQSQKNDPNDAAGICEAVERPRMRSVPVKSVPQQDMQALHRIRERQIKARTALLNQIRGLLMEYGIVIPQRASQVRHKVPYILEDAENGLTATAREWLQALAEELRALDQRIAATDQQIERLFVADEACQRLAQLAGIGPLTATALVAAVGDATDFKNGRQCAAWLGLVPRQHSTGGKTTLLGMTKRGNRSLRTLLIHGARAVLRVVDRKTDPRSRWLQGVKARRGKHCASVAQANKTARIAWALLAKGDHDRQAA

SEQ ID NO: 254547 - protein, 423 aa, unidentified
MPGTVIIMEKEREVVCGADIHKHFLLATILCKSGQKFQDRFDTNFEGLLNFRQWLLDHGCQRLAVESTANYWQPIYFVVGKDVEFVLANAYQIKHIPGRKTDVLDSEWIAELCLKDLISPSRIFSEAERDLRAVTRTRESYVKTRTQTKNRIHQELESACIKLSSVLSDIFGKSGIHIIRGILKGLSIDDILDSIPSKKLKAKREEIQDAIQANISPVQVDLIGLLLDSVDFLNREIESIDKQIQALISKRQGDLKIVMSIPGMGFTSASTILAEIGNFKDFKNGEKLAAYCGLVPSVYQSAGKLITGHITKHGSPHVRRMLIEVAHAISRTKADSKLKRFYFRIKSRHGAKVAVVALARKVLCILHHLIVNREMFEDENSSKSKREKPRRSSSSTELIIEDAIQILVRAGYLVQKRSEKEGG

SEQ ID NO: 254548 - protein, 361 aa, unidentified
MKKVSKQTQHMEATQGKPAMTMGLDMGDRFSHYCLLNEEGDVIEEGRMQSTEAALRRHLASEPRMRIALECGTHSPWVSRLLSELGHQPIVANARKIPSITGSESKNDRNDAEKLARFAAYDPRLLSPLEHRSPERQLDLNLIHARSTLVRARTMIVNALRGLVKSAGGRLPACSTESLPARVEDAIPPALSVVATPLIQQIALLTAQIAGMDKQVEKLAVKYPEIVLLRTAPGVGPIVAAAYVLTLDRPDAASNRSAGAFLGLRPGQSQSGDSDPQKRISKTGDRCLRSLLVQSAQYILGRFGPDSELRRWGLKLAASGGKRGKKRAIVAVARKLAVVLHSMWRSGQRFQPFPQPAAVAA

SEQ ID NO: 254549 - protein, 422 aa, unidentified
MKKRRYKATNVKRVNWERIGAQTEGQRIIFGVDVAKEDFFAVLMNADHSVIETLKWAHPQQTRELVAHLLDDLKGAQLEVAMEPSGTYGDALRGYLSERGVSVYQVSPKRVHDVAEVYDGVPSLHDAKAAYLIGRLHLQGVSKPWPALSEARRDQQALVAELDLFASERQRNLNRLEAALSRHWPELGHILDFKLISVLTLIGEYGSAQEVAAHRSEAQQLLQRIGRSQLDADKVQHVLNSSATTLGIPCTEGERYFLQMLGRELMRSHRRVQAIEHRIAHAVAADPLLKHMATVIGKTTSVVLGATVGSPVEYPNPHSYLKALGLNLKERSSGKHKGQLRITKRGPGQARRYLYFAALRWLYRDRVIGAWYQNKVKRDGNRKGKAIVAIMRKLVLALWHVAQGEVFDSRKLFNTQTLGLAA

SEQ ID NO: 254550 - protein, 342 aa, unidentified
MKVTAVGIDLAKNVFVIHGVDERGKVVVRKQLKRGEVAKFFANLGPCLIGMEACASAHYWARKLAGFGHTVKLMAPQFVKPYVKTNKNDARDAEAICEAVQRPNMRFVAVKTAEQQAVLALHRARQGLVKARTAQANQLRGLLAEFGVVIAQGMAQLPKRVPEILEDGENGLPAQARQLFAGLWEHLQELGRRVAQLERAIVLWHRQSEPSRRLEKIAGIGPITASALVASIGEARTLRSARQAAAWVGLVPRQHSSGGKERLLGISKRGDVYLRTLLIHGARSVVRRVQAQADQGNGWLKALLSRRNKNVAAVALANKNVRIAWALLAKNRDYQADYASSA

SEQ ID NO: 254551 - protein, 352 aa, unidentified
MRRPKEQVAEGEDLFVGIDLHKIRWHVTIRTFDVELFSASIPGTWEALHRVLARYPGHPLQAVYEAGYFGFRLHDRLVAHNIPCIVTPPSLVPQEYGNRVKTDRRDSSKLARLLAKGMLKRVWVPSEEELYHRQVIRRRRQLVRDRVRTQSRIKAELSFFGIRLEEPRGRWTLIYFETLQSIRFGNRWMQESFNRLLEQYEFLSAQIDKQTQLLRELSETELYQERVKILQSTPGVGLISAMELLLELQDVSRFRRAEQLAAYVGLTPSQYSSADKVRMGRITGIGKNTLRAILVEASWKLITKDQVMREKYERIKIRSGGKRAIVAIARTLLLRMRRMLLDGRAYALPLAA

SEQ ID NO: 254552 - protein, 341 aa, unidentified
MQPTTIGLDLAKHVFQVHGVDDHAQVVMRKRLRRSELLVFFQALPPCLVGMEACGTAHYWARKLAGFGHTVRLMPATYVKPYVKRGKSDALDAEAICEAVTRPTMRFVPTKSAEQQSILMLHRTRDLLVRQRTMLVNSLRGHLAEFGIIAPQGAWRLPELQAAAMRTPSDQLPDLAWECVELIVAQLEDLQKRVVAVERSLLAWHRASEVSQRLETIPGIGLITATAIAATVTDPAAFGSGRQLAAWIGLVPRQSGTGGRVQLGHISKRGDRYLRRLLILGATAVVRYARGKPEKAAWINALLARRPARVVTVAVANKLARIVWAVLSRGESFQRPQPAAA

SEQ ID NO: 254553 - protein, 348 aa, unidentified
MAHFVGLDVSVKETSVCVVDDAGKVIMEQKVPTEPADIIALLTSLGVSFSRIGIEAGPLSQWLVNALTTVDLPVICVETRHMKALLTAQQINKTDRNDARGIAQMMRVGLFKPVHVKTLVAQEQRMLLTSRKLLQRKLLDLESDLRGTLRNFGLKVGVVSGSRYEARVRELVAGFPRLAAIAEPLLNVRRVMRQQLAVLHKMLLDTVRGDPVCRRLMTAPGVGAVVALTYRATVDQPQRFVHSRAVGAHIGLTPKRYQSGEIDYDGRVSKCGDALLRTMLYEAAQVLLTQSRKWSWLKAWGVRVAQRRGMRRAIVVVARRLAVVLHRMWVDGSEFRWNKASAAVPTAA

SEQ ID NO: 254554 - protein, 320 aa, unidentified
MSETAIVVGIDVAKAHVDVAIVGAPVAAARFANDDQGHVALLEVLSPLMPALVVMEATGGYEAPLACALQAAGLAVAVVNPRQARDFARSFGQLAKTDRIDAAGLAEFARALLGRADLNRYLKPIETAEQQDLVALVNRRRQLLSMLGMEEQRLSVARPAVRRSIQRLVKAIRQQLEEVDGSMERHVATHFADLAALLRSAAGIGPVTSATLIADLPELGHLTRRQVSALVGVAPFACDSGLTRGRRRIRGGRFELRRTLYMATLAAITHNPLIRAHYQRLVTAGKLRKVALVACMRKMISILNAMARTRTPFNTDFKNA

SEQ ID NO: 254555 - protein, 375 aa, unidentified
MNNNNTLYVGLDVHKESITVAYAINSEPVELMGKIGTSPTDIQNLCKRLRSKSSQVSIVYEAGPCGYGLYRRLVKSGFDCMVCAPSLIPKKPGERVKTDRRDAIRLVRSLRAGDLSAVYVPGIEDEAFRDLARAWASARDDLQHARQRLKSFLLVHGGHYVGRADWGPAHRRWLSKYSFESPWRQLAFDEHRRTIEDRQAQCERLESALKEAVTEWRLYPVVEALQAMRGIQFITAVGLISELGDLTRFEHPRQLMSWFGITPSEYSSGGSRHQGSITKAGNSYARKLLVEAAWSYRHPARISPAIQKRQENLPRPVIDRAWDAQLRLCKRYRKLQAKGKNVNITIVAVARELAGFIWDMGRIAMSVAQQPQCHK

SEQ ID NO: 254556 - protein, 345 aa, unidentified
MKITTVGIDLAKNVFQVHAVDERGTVVLRKQLRRDQMTAFFANLPPSVIGMEACGSAHHWARTLKSFGHDARLMSPQFVKPYVKSNKNDVADAEAICEAVARPNMRFVPVKSIEQQAVLSLHRVRQGFVKARTAQANQIRSLLGEFGLIMPAGISHIAKRVPSLLEDASNPLPASFRQLIARLTEHLKDLDILVGEFEAQIKAWHRSCELSMRLEKIPGIGPLGASALVASIADANSFANGRQLSAWLGLVPRQHSSGGKPALLGISKRGNVYLRTLLIHGARSAILAAQRKTVNTNVWLAGLLGRRHPNVAAVALANKNVRTVWALLAHGREFRPNYVAQPLAA

SEQ ID NO: 254557 - protein, 335 aa, unidentified
MRFYNQQHKFYCGIDLQGKTKVHQNLKTDPELLFDIVFPFLEDVVICVECMFSWYWVADFCVEHMFPFVLGHALYMKAIHGGKTKNDKIDSYKIAKLLRGGTLPMAYPYPAEMRATRDLLRRRTYMVRQCGLLLGHIQNTNTQYNLPAFGKKICRKYNRDGVSERFDEPAVKASVDADLAMIDAFNKQIKQLEWQIEKAARQHNYHDLYLLRSIPGVGQVLALVILYEVQDIKRFSSVQRFSSYSRLIRPEKESDGKWAGKSNKKIGNAHLKWEIKDAAMLFLRESDQAKKHVERLAAKYNKGKALGIFTHKLGRTVYFMLKNKKAFDMKQFFSH

SEQ ID NO: 254558 - protein, 355 aa, unidentified
MNQEKYIGMDVHQATISVAVMDGSGKLIMECILETKAATILEFIAGLRGTLSVTFEEGTPAAWLHDLLKPHVSHLVVCDPRRNALLKDGSKSDRIDARKLAELLHGNKLHAVYHGEHGVRTLKELGRSYLTITKDLTRVMSRIKALYRSWAIPCSGTTVYAVRHRAEWLAKIPEPGVRLRAERLYQQLDLLQPVRQEARRELLVESHKHHAVKLLRQIPSIGPIRAALLVALLQTPHRFRTKRQLWAYSGFAVETHDSGEYRFVRGKPARNRERITVRGLNHNHNHDLKNLFKGAAISASTQPGPLCDFYVALVEKGMRPTMARLTLARKMAAITLTIWKKGVEFDAKQLHRQAA

SEQ ID NO: 254559 - protein, 396 aa, unidentified
MLYVGIDVAKRSHEVVVLDDAGEVRGKSFGIANSRTGMRKLIDRVDRANPEGQAVVFGLEATSHYWLGLYSHLREEGREVVALNPLQTSAYRKLQIRPVKNDRRDAWCIAEVLRLEPIVRTAQANDVVLGLRHLSRLRTELVDQIADQKRRVISVLDQIFPEFESVFGDVFGTTAAALLEAHPTPEEIAALDLAQLTSLLRQHSHGRFGQAKAEQLQEAARSSFGVTLALDALTAQLQILLAQIGFLGDQVTELEERIAAYLDQVPQHLTSIPGVGPVLAAAILGEIGDIRRFKNGSALVAYAGIDPIVYQTGEFRARSTRISKRGSRYLRRAVWQAAQGAARHDPVLKEVYERKRLAGKHHTVAVGAVANKLVHIIYAVLRDNQPYVPIRRESAS

SEQ ID NO: 254560 - protein, 534 aa, unidentified
MGRRRQGRAARGPVHLRKARSPLAEEVARVGAGRFGILAVDSSKPRFAVLLSDFAGNVLMEMQVVENTAPALAGLVERLKALCQSHRLKDLVVGIERTGRYHVPIQQALRPLWRVEMVDPAAAQGLRQAADPGNKTEGTDLPAITRAIQVGLGTREADLPPVWLDWRQVNRAREDDVRMRATLRQRIQERIEALMPGFTRPFKDLWRAPIPLALAEHYGSAARLLEAGDESLLAWLRTQGHRPCRQRVEQVLGWARTASMPDPGADVRHALLGRDLEHERFLGTEILRKECDLAAHLVQTPVVLLLAMPGIHVVAGSGYGAELGPIEHYINPHKITGRAGVYPSRYQSDEVDYPDGPLVGHRNARLRDALMEVAYCLMTSNGYFQAWAELRRKKGWPHKKILVALANTFSRISYRVLAGRQAFDHPCARRRDTILAKLYDFAQTHHLTPEAARDLLLRAAAWLPVELRTEEAQALRRQLPRRPRRRRGSGPEHISTILPEVIEHLVSGIPLREERRQRENPGGFAGLLDRRSGR

SEQ ID NO: 254561 - protein, 391 aa, unidentified
MFYIGIDIAKKNHEASIIDSSGKSLSKSISFPNSTKGIEKFNNFIAEFGVTTNNCIIGMEATGHYWISLFSYIVDLGFTCYVINPIQSDAFRKMYVRQTKNDSVDSFIIAQIMRFGEFSISNFSDENTFALRNLTRYRFALVDECSDWKRKLVAILDQVFPEYSSLFSNIYGVASKELLSKYPLPEDMLSIPAEKLGNLLYECSKGRLGINKAEEIQSRARESFGIKFAKRSFSFQIKQIISQISFLEEQLKEIEIEISCLLEDICPVITTITGIGSVLGASIVSEIGNISRFERANQLVAYAGLDTRIKQSGDFSATNTKLSKRGSPYLRRSIWLAATVAAFKDPALSIYYQGLRARGKAHGTAIGAVARKLTNIIFAVLRDQKPYTPNI

SEQ ID NO: 254562 - protein, 344 aa, unidentified
MHIASIGIDLGKTTFHLVALGERSKVLVRKKFSRTQLLAHTANLQPSLIGLEACSGAHFLGAALREQGHEVRLIPAQFVKPYRKSNKNDFIDAEAIAEAVTKQNMRFVPIKSQEQLDVQAMHRVRDRLVQRRTALINEIRGFLLERGITFPAQPIHLRQNLPTVVEDCEQNLTPRLRWLLDRLWQEWKQTEIDIETVTDEIERISNQDERCRRLRQIPGFGPLVSTAMVAAIGNGAAFRRGRDFAAWIGVVPRQYSTGGKQKLFGMSKRGNIYLRRMLIHGARAVLFRVKYDTGGLGQWVHRLSQRAPRNKVVVAIANKLARIAWAVLSSGKDYRHQPLQRAAA

SEQ ID NO: 254563 - protein, 390 aa, unidentified
MTALKQAISEPAAIRTDLGVIVVSLELSRSSWLITSLSPGAGEKLSRHVTPAGDLGRLLELLERLRERARSWTGRRYRIVAIQEAGLDGFWLHRALEAAGVESHVVDAASVAVSRRRRRAKTDRIDGEALIRTLMAYLRKEPRVCSMVRPPSPEAEDRRRLGRERRTLIAERTAETNRIKGLLFAQGVFDFSPLGRDRRRRLERLVTGDGRPLPEQLKGQIARGLDRLELIGAQIAAVEAERDRMLAVAAEAHAAAPGAMLTRLKGIGSELAAVIWTEALYKSFDNRRQLAAYAGLAASPWRSGKIDHEQGVSKSGNPRLRASLIQLAWGWLRHQPNSALSRWFVQRCAQAKGKDSRKKAIVALARKLLVALWKYVTTGLLPDGAELKRA

SEQ ID NO: 254564 - protein, 383 aa, unidentified
MATRQDYDGFAEQLAAIGRRIIVGFEATGNYHRTLAHRLLTAGFELRLISSVALARTREALHNGWDKNDPKDAQVILHMLRIGATQRYVDPLAAGINDLQELSKTHETISRMKTQTWHRILTHYLPLYFPEIARFAGNSRSDWFLALIERFPTPASITALDAGAFSAAAWPLIGRKVSKARLINDIYETACASVALPVPEESAAITMFRMVIAQGRSLIQQRDEIERLAHDRLAEHVDYQLLRNIPGIGPINALTILAEAGDLRRFNHHRQFLKFCGLDLATCQSGTFRGRTKLSKYGNARLRRTFWMAAQVAARQRDNSFRDKLGRYTAGHADDADRRRKAMTALTAKMARVAHAVVKTGTEYRPFLERSDARWKDPSLQVP

SEQ ID NO: 254565 - protein, 309 aa, unidentified
MDAQYVGIDVSKSRLDVCVRPGGEAFVVARDDKGLVELVERLRVIAPRLIAVEATGGYETVVAAAIGGAGLPLVVVNPAQVRHYAQALGKRAKTDPIDAEVIARFAEATRPEPRALPDEATQALAELVTRRRQIIGMMVAERQRATRLPRRLRKSCERVVRMLEKELAALDIDIDTTVRGSPAWRATEDLLASVPGVGSITARALIAELPELGRLDRRSAASLVGLAPFTRQSGQWRGKAFIGGGRRSVRAALFVATMAAVRHNPAIRAFRHRLLAAGKPKMVAMIACMRKLLTILNAIVRDQKPWQHA

SEQ ID NO: 254566 - protein, 342 aa, unidentified
MQIAVLGNDLGKNSCSVVGLDTTGRVVLKRRLHRDGVLKLAASMPSCVMAMEACCGAHHLGRILRDHGHEVRLMSPNYVRPYVKAQKNDDRDAEAIAEAATRPTMRFVELKSETQLDMQSLHRARDRLAGERTALINQLRAILLERGIIMPQGRRKLELHLEALLAGETIALSARTRLLVDDLRIEWSALDRRIEAFDADFAAQARTDETARLLTTIPGIGPLNATALAAAIGNAQTFQRGRDLAAWLGLVPKQMTTGGKPKLLGISKRGNGYLRKMLIHGARAALPSLSKGETPLGGWLRGLLARAHVNTVVVGLAAKLARIVCAVLRSGQKFEVTTATVA

SEQ ID NO: 254567 - protein, 311 aa, unidentified
MEIYVGIDIAKLTFDLCSGPQKQNQQFENNTKGIRQAARMLAGLRPKLVVMEATGGYETPLAAELYAVGLPVAIVNPRRIRDFARARGQLAKTDKIDAEVIATFAAKMQPPTQEHVDHTSRLMKALVARRHQLIRTRTAENNRMEHALDKVITASLGRIIKAIDREIENVERLIREQLDRMPELKAKAQILDSTPGIGETTAAMLVTEVPELGRLNRRQIAMLIGVAPINRDSGTFRGKRMTGAGRRDVRSRLYMPTLVAIRHNNVIRRFYQHLLSKGKPKMTAIIACMRKLITILNTIVAKNETWNPNLA

SEQ ID NO: 254568 - protein, 376 aa, unidentified
MEHDSTVYVGLDVHKESITVAYAVGMGEAELLGKIGTTKTDIDHLCKRLQSKARHVHVVYEAGPSGYGLYRDLTHEGFECMVCAPSLIPKKPGERVKTDRRDALKLVRSLRAGDLSAVDVPDVEDEAFRDLARAWAAAKADLRQAHQRLKSFLLAHGVRYTGNANWGPAHRRWVSTFAFPNHWQQLAFDECRRTIEDRLAQCDRLEAILHEAVVDWRFHPAVLALQAMRGVQFITAVGMLSELGDLSRFEHPPQLMAWLGVTPSEHSSGDRRCQGSITKTGNSYARKLLVEAAWSYRYPARVSPDIQRRHEGIPKPIIDRAWDAQLRLCRRYRKLAARGKNVNIVVVAVSRELAGFIWDISRLAMSLAIPRHAQAA

SEQ ID NO: 254569 - protein, 447 aa, unidentified
MQNRNVKMEVVNSNAAGIDVGSRSHFAAIGQGSGDIREFGVYNEDLKQLTKWFSDNEIKTVAMESTGTYWQHLYITLQAAGFQVILCNGKFTKNIKGKKTDVKDAQWIQKLHTIGLLTGSFLPDEATEQLRTYCRHRTNLLQQAADTTRKMQKYLRLLNLRLDVVVKDIAGLTGLTIIDAICKGEKSPEKLAGLRHSNCKKSEEEIAKALQSNGRKDYLFGLKQEYQLYVNFQEKMKECDMEIEKLLNEQINSDDEKRQHFIDKKVYKKINKNTPKNLDINLLSYQYFGGVDLLAIEGVSHATALALMSEVGNGIHKFETAKQFASWLRLAPNNKISGGKMLSSRIPKGSNRLKIALRNAANAIGNLKDTALSNFFKRIAFRKGRPAAISATARKLAVIIWNMIVKGIPYKSENDYEFLDQKRKRKVQEMKKLIHKFDIKINDLESV

SEQ ID NO: 254570 - protein, 390 aa, unidentified
MKTVLSVDVAKNKSMIMLMNSDGEILIDTKEIKHNLEDFEKAKEEIKEISPENLTVFMESTGTYHLPVERYFKENGFNTLVINSLTTKNNYDTIRKTKTDKKDCYRLAKLFFVNEVEYHELSKKDLYANLKAMTRQYFYLLQQNVSCKNRYKRLLNICFPELEKIFKSTRIYDDTALNFIKEFPHAEIVKEKRIDALYNNLYKTNGRNLNFYKRLSETIKIASANSYPGVDKEHKDVKNLSDMAKIVQNNNNVINELRDKMIETAKKSPYYEIINSFYGIGEILTAEILGELGDITRFDSPKQLIAFCGLDPTIKQSGKSINVKGAISKRGNKYARYILFNCSQMVVKLGASNYPEHPVYIYYQNKKAEGKHYYESLTACLLYTSDAADD

SEQ ID NO: 254571 - protein, 341 aa, unidentified
MWIIGCDFHPRVQQIAFVNTEGGECGQRRLEHRGEAEQFYRSLAGQAVRVGMETGGSSRWFERLLGELGQELWIGDAAKIRAAETRKQKTDARDAEHLRQLLCSGQFEKMRIWIPPAENRDLRQLLWHRHRLVQMRTRVKNQLRSLATSEGMERKPGLWSQAGQKQFQALELAPWAQRRRQDNLELLSELLHRTDPLDQEAAQQAAQHPEAVRLMTHPGVGPITALAFVLVIGDPARFPNSKKLASYLGLIPREDSSGGKQRLGHISKQGNAPLRGLLVEAAHVAVRHEAHWKRDYRRLAMRKNRSIAAVAVARKLAVRLWWMWRRGVDYAQLSASGSHAG

SEQ ID NO: 254572 - protein, 409 aa, unidentified
MSRAVGLDAHLEFCEIAICEAGKVRSVGRVPSTPEGLQALADSLLDSDRVVLEMTGSAWEIVRILEPHVAGVVVVSPGDTGIAHARAKTDRLDARTLARLLWAGELDPIWMPDERTRVLRRRLSRREQLVRSRTRAKNEVHAVLMRRLIGRCPHSDMFGKAGRNWLRSLELPVEECETIEAAMRQIEFLDAEVAEVERLIARDIMWSADTRILLSVPGVNLICAATFLAAIGDIRRFSTSRKLVAYLGLDPKVRQSGSEPARTGRISKQGSPQARWALVEATHSVVRQPGPMRAFHQRIRARRGYNIATVAAARKLACLFWCLLTRDEHYAHAQPSLTAKKLRKLELIAGAKRRDPSAAGIHSNYQAMRHAERQLAEQAEASYTRMVQDWQAAAPRKAGASATPEHAYR

SEQ ID NO: 254573 - protein, 351 aa, unidentified
MPHTSTVHAVTAIGIDMGKNTLHMVGLDSHGAIVLREKVSRVRIASRLANLSPCLIGIEAGMATHYVARELAALGHDVKQVPSSYAKPFRQGHKNDFRDAHAVAEAVQRPTTRFVPAKTNEQLDLQALHRVRSRLVSERTALINQIRGFLLERGIIVRQGLRFLRQLLPDILAKRTDVLSPRMIRIVVDLAGDWRQLDERIETVTDEIEVLAKSDDSCRRLMTVPGIGPIISSAMVAAIGGGAAFARGRDFSAWLGLVPKQMSTGDRTILGRISKRGNAYLRMLFMQAARVILLRPANWPKHGFGCWLVHAAQRLHPNVLAAALANKLARIAWTVLTQERSYEARVTKAVA

SEQ ID NO: 254574 - protein, 360 aa, unidentified
MQYVGIDLGATKSSVCVLDEDGAVLDQCEVATSELGEYLKRYKGRVVMESCTQSRRVAELAQAAGHRVVVVPGSFVRQLGVGARGIKTDARDAEVLARASLRNPNLPSVRPCCDRSRDHRRLLKARQQLVRTRTRCVASIKTYLRGELIVVRGRALPSTFCQIVKDLLLARPDGIPLDISIQLDHLTDLQKHIDKLNASIDEIVQQDQVCRRLMTVPGVGPVVSLAFASTVDETSQFPTAEHLVSYLALVPGENTTGGKIRRTGVINAGPDLLRSVLIQAAWSTWRTQPDSPLVQWARRVADRRGKKVAVIALARKLAAIMYAMWKHETTYQPLRAAALPIAAPPAGAATRPVAAAPATT

SEQ ID NO: 254575 - protein, 402 aa, unidentified
MNCVGIDVSKGKSMIAVMRPFGEVVVSPFEVRHTANELSELAGLLKSLDGETRVVMESTGNYHAPVAWLLHDAGLYVSVVNAMLVHDYGNNSLRRAKTDKKDAVKLANYGLDHWLTLPRYIPEEDTRLMLKICYRQYQQYSKVQTMLKNNLISLLDTTFPDANRLFTSPPRADGSEKWVDFVATFWHCECVCGLSEKAFTAKYQKWCKKHGYNFSEDKALDIYASACGHFGVMPKTDTTKLLVEQAISQLQTTSSALAALKQEMQSLAASLPEYPVVMGMFGVGPTLGPQLIAEIGDVRRFHSKKALVAFAGIDAPPYQSGQIDVRSRSISKRGSASLRRTLFLVMSVILQCAPIDEPVYQFMDKKRSEGKPYRVYMMASANKFLRIYYASVKAYLESLEHD

SEQ ID NO: 254576 - protein, 449 aa, unidentified
MSNHKGNPTGIPVIHEHAAGIDIGSRFHVVAVGADRCEDPVQTFQAFTGDLQRMADWLVARGIETVAMESTGVYWVPVYEMLESRGIEVILANAREARAVPGRKTDVNDAQWLQRLHACGLLRASFRPGRAIAALRVYLRLRERHLDYAAAHIQHMQKALTFMNIQLHHVVADVTGVTGMKIIRAIVDGQRDPKILAQMRDVRCKASTETVCAALVGNYQPEHVFALAQALALYDFYQARVDECDAKIQQALAGLNAKKVQPSTPLPMARHRTTQPNAIKFDVRAALYQLVGVDLTQIHGIGPYLALRLIAECGTDLSRWRSAKHFTSWLTLSPGCKISGGKVLSSHTRKTTNRVAANLRLAAVTVGRTNTALGAFYRRLSARIGKAKAVTATARKIAILFYNTMRFGMDYKDPGATHYEHKYRERVIKQLHRRAKEFGFTLQETVSVS

SEQ ID NO: 254577 - protein, 433 aa, unidentified
MRSRAYRATMVKRVNWEALGSGHDGQAVQLGMDIGKEEVLAVLRWDDGHFERPWLVKNPEETAELIDLLKRVEMGRVLRLAMEPTGTYGDVLRQAIADAGWRLDRVSTKASHDYAEVFDGVPSQHDGKDAAVVAELAALGKSREWPYESPSATDQEMAYWVDWMDAQQRQYVMWLGRLEGLIARHWPESRKWLTLSSGTLLRALHHYGSPAALGADREAAARLSRWGGPYLKAATIRGLIESARSTVGVRQGEIDLHRMQQYAGQALAARSEIARSKRRLEKLAHGNAVIQAQAEAVGMATACVLWVCLGPASAYHCGEAYRKAMGLNLAERSSGMYQGKLKISKRGFGQVRRWLYFAALRLTAQSPVSRWYRRKKAKDGERAKRAVIGVMRKLALALYAVGAEGATFQAGRLFPGRQLGQCRQRIQASVSRR

SEQ ID NO: 254578 - protein, 410 aa, unidentified
MRYYLGVDWADQTHAIWVVDEHGTKVAGRTVPHTAAGFSEWGRELDEWRAQGIELWAAIERPEGRVVDFLLDHGVVVYPVNPKALDRARDRFRPSAAKSDPFDARVLADFLRTDHGHLQALQPSSEVAQELKYLTEDYRRHVRQQTRLVNQLTATLKAYYPRALEVSELTTALARQFLLAYPTPAAVVALTEKQWQRWARAHRLSEARTQELWAVLQRPQLPVPDHVVRAKARLMLTLVEELTPVVAAVDQYREAIDAFFAGLPEGQWIRTLPIGKHGVTAPTLWALLGDTAGRWESFQHLQGHAGAVPVTIRSGQQRVVRFRFACNKAMRDIIDQVAFLSLRKCEWARAYYDQQRARGHDHHPALRALGAKWLKIIFVMWDRHIPYDEQHHLATMARHQLRQGAQKKIA

SEQ ID NO: 254579 - protein, 421 aa, unidentified
MSTSTLSKKLANVKPGTLFVGVDLGLDRNVAVVLSEHAKQLSRFGFPNDRDGYDYFYHRLETIQGQQQAAAVLVGMEPSNYIWKLLAADMEQQRLEYDYRLVNSYTVKKHREGDQLDRSKDDNRDAFTIGDLVRTGKYTETRLLHGPYAELRQYVTLYTRLGRNVRRQKNHVSNIVGQLFPELRRAFKDLSGQTALAMLCNHAAAVEVRKLSQEIFIAGVRADFHGQRLEVAKLRRAHTLAKRSVGLSDGAKALQLALQLHVETLRVLQQQLERVTKEMMDTFLALPESKYLLSMPGLSIITATTILAEIGDPSNYTSARQLIKLAGTQPAPNTSGRRTRSQTPMSHKGRSRLRTALFFAVLSLVRVDDAFAREYKHLQKREKNPLTKMQALGVLMNKLLRIMWALMRNRTFYVSGFQGTA

SEQ ID NO: 254580 - protein, 322 aa, unidentified
MAAYLGLDISKLTIDACLLDDRGEHVKKIANNPKGFEQLSRWLGNRKVIKSVHVCMEATGSYYEGVAEHLSDAGILVSVVNPSQIKAFSQTLLMRAKTDEVDAHLIADFCRKFEPAAWIAPTADERKLRGLVRFCGKLKETRASYLVQKETPNLVPAVLQSIAEVIENLDQQITKLESEIDEFIDKDSDLRRKRDLLCSIQGIGKTTAATILVEAPRLEEFTDSKATSAYAGLSPKTRTSGTSVRGSGAICKTGNARLRKALWWPAIAAMKHNPRIKALADRLDSRGKPNKKIIIAAMRKLLVLAYGVLKSGRPFDGALTPS

SEQ ID NO: 254581 - protein, 338 aa, unidentified
MNYVGIDHHRQYSHITLLDEKGEVVRSGRVANVRRELDGFLQGIRDVRAVIEAGRSSYTVVDVLDDLGIETTVAHPKDVRAIAKAKIKTDERDSYKLAHLLRTGYIPEVHKRSRENRYSQRVLRQRAFFVGKQTAVKNRLRALLAQQGEEIRLDVERVENLFTEKGMKILKGLALPEREAKLVGALLRTYADLEERIDETNAIIKQLYETMPSARLIQTVPGFGIFLAVLVAVEIEDIRRFEDVSQFHAYAGVIPSTHSSGERGWHGKIIKEGNRWLRWAAVEAVWPALRADFDIRSFYDRLKKRKGANSAKVATARRLLTIIYRMLKENRSYIPYKR

SEQ ID NO: 254582 - protein, 350 aa, unidentified
MDLYIGLDVSLASTAICVVSTQGKVVKETTVPSEPEDLVKVLNALAGRIVGVGLEAGPLSQWLYQQLTEAGFATVLMETRQVKGALKAMPIKTDRRDAEGIARLLQMGWFRPVHCKSLSAQEMRALLSSRKAIQQAASSLELSIRGVLRNFGLKMGQVAKGRFEQRVLELADSNPMLEAAANPILSARRALRQELAGVEKLLRDHAKSDPVCRQLMTMPGVGVLVALTYKAAIDDPGRFSSSRDVGPWVGLTPRREQSGERDIIGGITRAGDVGLRTALYQAATVMLNSARPNWLSAWAWAVAKRRGKKRATVALARRIGVILHRMWQDSTEFRFTRADAATAATAAAAT

SEQ ID NO: 254583 - protein, 351 aa, unidentified
MNYVGVDYHKKYSYMVVKNEDGCVEGRGTVNNTKEEVQQFLEPYRPGMAVVEATRNWGLIYDWLDEVLDDVTLAHPLKVKAIAEARIKTDKISADILADLLRADLLPKAYAPSKPTRDIKNILRQRMFFVRIQTMVKNRIYDILDRHPEVLSQIPEASDLFGAAGMKWLGQTTLSGEDNMLLSSELRLLKYLKEEITQSNGIVKKLAKKDARAGLLQSIPGIGPFFSVLILYEIDDISRFRGEKKLCAYAGIVPSTHASGGKVFHGRITKTGNKWLRWAAIEAAQTAVRSDSEFRVYYQRIKVRKGTNAAKVATARRLLTIVYRLLRQGRFYERRTTPQEKIIIPAALVTS

SEQ ID NO: 254584 - protein, 353 aa, unidentified
MKNQATQYVALDVHQATSVASVRDEQGRVILRATVATEGRALLALVGGLGGGVEVAFEEGTQAQWLHDLLAPKVARVVVCNVRGQSEKANKNDQLDADDLSERLRLGALVWHGSPAVGTLKELVRCYDNLVDDSTRVMLRLKAIYRGRAIATSGKSVYRPSQRKAWLAKLPSRGARTRAESLLTQLDTLTTLRHAARTAMIAEARRQPGWKTLRSIPFFGPVRVAMLLAIIGTPHRFRTRRQLWPYAGLAVVTRSSGEGEFVDGKLRRKHRAHLTGGLNANHNRMLKDVFKGAANAAAAKAGPLKDLFDRCVAGGVRPTMAKLTLARKLAAIVLRLWKKGELWDPEKLTLQPT

SEQ ID NO: 254585 - protein, 318 aa, unidentified
MQTQTNVRNIGADVAKDEIVVACSEGSFPVRKLANQRTALMAFLKSLPPGSLIGMESTGIYHELFANLVHKLGFMVFVLNPKDARHYAKGVGMRGKTDRVDAELIARMIAHEHTKLYAWIPPSPEQHEIAQLIKRRAKLSSLCQALGMSLKGVDGFSAELKALRKRFDQVIARIDQRVKELVDANPDRKQHVTHLRTIYGVGPVVSTALVNTLERVPLKSADAFVAFTGLDPRPDDSGQHRGKRRLSKRGPSELRRLLYLAALSATKTKTWRPLYEHYRVKGLSSTAVLVILARRIARTAWSMYTYKTEFDPGDSQKA

SEQ ID NO: 254586 - protein, 352 aa, unidentified
MLYIGLDVHSKWMTVTGFDPDTGEVIMHDRVPNDRESLEPLFGSLNGPIHGAMESGTNSWAVYRLLEPYFERLLIVDPASVWGREARRGAKTDRRDAMKLAIKLSRDELRGLYVPPREVQDNRSLTRAKVHASQRVTTLVNEIGSLLRSWGIIVDKSLLSKQGRKLVESAREQLPPESLLVLESLMELLDKSQEVENRFDAAIKESAKRDDAAKRLMTIPGVGPFTALLTSAEIGDINRFSSNAQLISYCGLAPTVSASADRLYYGKINKFCNRFLRYALILRGQQAGCFRTDNPFRRTYWRVLLKNHRNDAKVAVARQLTRTIYGMLKREQEWDPARFAHPEPSPPIAAGA

SEQ ID NO: 254587 - protein, 338 aa, unidentified
MAIVTVGIDLAKSVFAVHGVGVSGKPELVRPEVRRAKLLELIASLPPCLIGMEACSGSHHWAREFQKLGHTVRIMAPKFVSPYRMSGKHGKNDAADAAAICEAVTRPNMRFVPIKTIEQQSHLFIHRAQQGYVVERTALINRIRGLLSELGIVLPQSQKAFKQGVHAVLEDLPGHCNMVIGDMLSELSRLEERIAQNEKTISQLARNDEQAKNLMKLRGVGPITATAIVASIGSGHDFECGRQFSAWLGLVPRQHSSGGKAKLGRITKAGDSYLRTLLVLGAKSMLMTAANKEDAVSRWAMQLKERRGYWKAIVAIAAKNARMCWAALQLGENFKVPA

SEQ ID NO: 254588 - protein, 350 aa, unidentified
MRYAQINSKYVCGIDLHVRQMYACVMNEKGEILFHRNMRTDFDQFKKKMQPFLPYLSVGVESTFMYYWLADACKDEGIPFYLGHAYYMKTIHGGKTKTDRLDCRKIADLMRTNYYPLAYAYPKEMRGTRDLLRRRHRHSRLRAECYRHIQSLFHQQGLSVNPKDIKNVKTRRDLVKSNLDQDIYPNAQTDLDMIDFLDPVIKHLEQQIRAKAKYHDRASLNILLSVPGIGDIFSLIILYEVHNINRFESHQLFCSYARLVKCERSSAGKYSKGGNQKIGNPYLKWAIADIIIHASHKSQLIGDYYQKLQSRFGKRKAKSVISHKFGIAIYYMLKNKQVFDEKRFVQSNMK

SEQ ID NO: 254589 - protein, 423 aa, unidentified
MTKLSSTPAGAVLVAIDMAKNRQEVLIERPEGGRRRRMTVLATKADYDGLAEQLAAIGRPIVVGFEATGNYHRTLAHRLLTAGFEMRLISSVALARTREALHNGWDKNDPKDAQVILHMLRIGATQRYVDPLVAGINDLQELSKTHEAISRMKTQTWHRILTHYLPLYFPEIARFAGNSRSDWFLALIERFPTPASITALDREAFSAAAWPLIGRKVSKARLINDVYETACASTALPVTEDSAAVTMFRMVIAQGRSLIQQRDEIERLAHARLAEHVDYQLLRKIPGIGPINALTILAEAGDLRRFGHHRQFLKFCGLDLATCQSGTFRGRTKLSKYGNARLRRTFWMAAQVAARQRDNSFRDKLGRYTAGHADDADRRRKAMTALTAKMARVAHAVVKTGTEYRPFLERPDTRWKDPSLLVP

SEQ ID NO: 254590 - protein, 346 aa, unidentified
MENIALDVHKHYTWARVENREGQQLYASRLVHSRGSIKNFIQRWTPGSSVAVETVGNWYWVVDEIEAGGGKPQLVNARLAKLMIGNVNKSDKLDAKGLNMLQRTGTLPTVWIPPSGVRDARELPRTRMVFSRQRTQLKNRVHATLSKYGYSVDEVSDAFGKRGRQIIEELSSKLPPHTKQALDHVLDQLDEIIENLKAIEANMINVFAPCPQTIWLQSLPGVGQILAVVIWTEIGSIERFNRAEQLASYSGLVAREHSSGGKFHYGAVRRDVNVYLKWAFVEAANSAILNRERCDYQHISRLYQRIKPRRGHNRAKVAVARHLAEASFWMLKKGESYREPVLSTQR

SEQ ID NO: 254591 - protein, 386 aa, unidentified
MEKANDLSRSSTVLEPNSTLIAVIEMSLSSWLVAGIVPGLARHPLKKLDADPEALLLLLHRWREEAAKYGHGIARMAIAFEAGRDGFWLARWVRARGVEAFVIHSTSVAVPREHRRAKTDRLDTEHLKRAFLGWLRGEPNHCQMAAIPSLDEEDARRPNRERENLVNQQTSIVNRMKACLIRLGVRNFKPTLRHASERLEMVRTPEGAPLPPNTLAEMRRDMARLRVVREQIREIEAARSQRLQVSESRAQAMVKLLTRIIGVGIETADMLVHEILSRQLRDRRAVARYAGLTGAPDESGKRRREKGLARAGNARVRRGMIQLAWRFLLFQKDSALAQWFRARTAEARGGTRKTLIVALARKLLIAFWRLTMTGEMPVGIKLRPVV

SEQ ID NO: 254592 - protein, 412 aa, unidentified
MLFVGDDWAEDHHDIEVQDESGRRLARARLPEGIAGLSRLHELIAEHLTDDDVDAETGFVAQNVMIGIETDRGTWVSALVAAGYQVFPLNPVQVARYRERHGASGAKSDRGDAHVLAEIMRLDRAHHRAMAGDSSELEGLKLVARSHQAFIWDRTRHFQRLRSALREFFPAALEAFPDLMASEALELLERAPDPARAARLSRSKITAALIRAHRRDPEIKAEAIQAVLRAPALRQDPAIEAAYAVIVASAVRLIAQLNTQIVELQAVVAEGFGRHPDAEIVTGQPGLGPVLGARVLTEFGDDRTRYADAKARKNYAGTSPITRASGTRRVVLARYARNKHLADATHQWAFCALTASPGARAYYDSIRARGAGHHAALRQLGNRLVGILHGCLKSRTPYSEDTAWPQLNATAA

SEQ ID NO: 254593 - protein, 406 aa, unidentified
MLFVGDDWAEDHHDVEIQDETGRRLAKARLPEGISGMARLHGLVGRFLPEDGDAAGVKIGIETDRGPWVAALVASGYQVYAINALQSARARQSQGVSGAKSDAGDAHVLADLVRTHSHQLPTVAGDSEHAGAVKVLTRMHQTLIWDRTRQVLRLRSSLREFFPAALEAYEDLAFPDVLELLTKAPEPNSAARLTRAQITAALTRAHRRDREAKTTAIMAALAAEHLTQPPLIAAAYGATVRALAALIRTSNEQITALQGQVEACFGQHPDAEIYLSQPGLGLVLGARVLAEFGDDPTRYDGARARKNYAGTSPITRASGKKKVVLARYVRNNRLADALHQQAFSALSGSPGARAYYDALRDRDISYNAALRQLGNRLVGILHGCIKTHTPYDEATAWNQHTQLAAA

SEQ ID NO: 254594 - protein, 332 aa, unidentified
MNLVSTLGIDLAKNTFSLHGVDSNGEVVLRRSLSRAKLSELVAQLPPCLIGMEACSGAHEWARRFAASGHTVRLMAAKFVTPYRKSGKNDGNDAEAICEAVARPNMRFVPVKSIEQQSDLTLHRVRQGFVEERTATLNRLRGLLAEFGHVLPVRAVEVQRRVPLLLDKLPTRVAVCARDLLEHAAQLAAKTQEYEHQIRAHVRSNALACRAQARMGIGPITASALVATVGNARDFKNGRQFAAWLGLVPRQYSTGGKARLGHITKRGDAYLRTLLVMGARAVLQRAASLTDPLSVWALALRERRGYHRACVAIAAKNARVAWALLSKEPAVA

SEQ ID NO: 254595 - protein, 360 aa, unidentified
MKGYVASKVEQEYVGRQFVGIDLHRERSVVVRTTDAGEVLEAVQIPNTPLALSAVISRAGEHPEVVLESTYGWYWAVDTLQDFGAQVHLAHPLGVKAFEYRRVKNDLRDATDLADLLRLGRLPESWIAPPPTRELRELVRHRAKLVALRSHCKAQVHAVLAKCGVLVPMSDLFGLAGTALLDSLDLPKPYAARIASLRRVMDALDFEIEVFDKLARGRLATDPGYRAVQTIPGIGPVLGAVLVAEIGDVHRFTSADKLTCWAGLTPLHRESDTKVRRGRITKQGSRLVRWAVVESVKMLPARTRIGGFRNQVAARRGKNIGAVAAARRQLEYVYYALRDGHVRALENPTPSTADQEQQVA

SEQ ID NO: 254596 - protein, 420 aa, unidentified
MKVVYQTCCGIDVHKSFLVATIIKTTSGVQPSYQKKRFSTFNNSILEFKQWLLDNSCRDVCMESTGKYWIPVFNLLEDELNVTIANPKWVKAVKGNKDDTKDSKWIGDLFRLGLVPGSYIPCKPIRILREFTRYRYKLTSCRSSEKNRFQNALTVCNVALDSVVSDIFGKSATSVIDYLLKQPDNSINHEEISSRLLRSLKKKSESVIESIEGYQMTDAQKYRMRLVHAHMDYITSTISDIDSMIDSLVEPYENAVQLLCTIPGVDRSSAITILSEIGTDMTQFSNSKRLCCWAGLTPGNNESAGKKKSVRITRAGVYLKPALVQVAHAAVKSNKSPYYKAKYERIMKRRGKKRAIIAVARMILTAVYHMLSTGEAWNPTDLYKIDMPKPLKNKQKEKAVKQAMKLLIAEGIIKEPLLAS

SEQ ID NO: 254597 - protein, 404 aa, unidentified
MPAICGIDWADGWNDVRVADLETGELLVERRFAHDEAGICALIACLLEQRVERVAIERPDGLLVGRLVAAGIAVVAIHPNQVKAARDRFRPAGGKSDRFDSFVLCELARTDSHRFPALPRLGDETRALKALSRAREDLVVARCALANQLRAQLQAFWPGAAEIFADVDSKIALAFIERYPSPADARGLGPKRLAGFLARHSYCGRRPVDELLARLRDAPIAIVGDAEHEARRQTVTALIAALKPLVDQIACLTSEIRGAVHQHPDGPIFLSFFRDPKTAVTAAGLLAEIGDDRSRYPTNAALAADAGQAPVAVESGKHRAASFRWACDKRLRTHIGVLADSSRHWHPWANDVYTRARARGQDHPHAIRTLGRAWTRILWRCWQNSTPYDPTKHRNLNRLQAAKG

SEQ ID NO: 254598 - protein, 313 aa, unidentified
MNNPEINVGIDTGKHQLDIYIRPLGEYFTVSNDAKGVKEAIKRIATHQPARIIIEATGRLETAFVCAAAKANLPVVIANTYHVHNFAVSTGKRAKTDKLDAKMIAHYGEALKPRLSDIKPDNIQQISDLLVRRAQLIDMRTMEKNRLSILPKTLHRSIKKIINTLQKEVDHIEGTLDELMQETVQWQELKDILLSVKGVGKVLAYTLMSDLPELGQLNRKEIAALVGVAPMNRESGAYKGKRKIKGGRHRIRTVLFMSMLSAIQSNAKFKGIYTGMVAAGKPKKVAIVACMRRLITILNTMVKNNTAWDEKLV

SEQ ID NO: 254599 - protein, 384 aa, unidentified
MTEHHHRVGGIDSHKDSIHAAVIDEVGHHVADREFPTTQAGYRRAVAWLIEHGPLTAVGVEGTSSYGVGITAAIAAAGIRVVEVNRTRPAERRRQGKTDRLDAYRAARSVQSGEATTDPKSATIEPLRALNVARRSAVKAQQVALRQIGAVLINAPAHLRDRYRDLSDAKLVTALAAVRPEQHTDPGLADTLHSLRSLARRHRTLGEEIADIEARMRARATAANPALMAVKGVGPVVGAQLLITAGDNPDRLRSSASFAALCGTAPIPVSSGRTDRHRLSRGGDRQANAALHHIVKVRLSCDPATRAYRDAHLAKGWTIKAVFRALKRAVAREIFQALTGHCAVPDYSDLRPARRAKNLTLTAAAEHLGVWPSRIGLRDEIRTA

SEQ ID NO: 254600 - protein, 434 aa, unidentified
MNKPQGGNLQPPKAKSKRRRRNKGMCLEDRPVLEPNAAGIDVGAREMFVAVPPGRDENPVRVFATFTEDLERLTDWLEQCGVTTVALESTGVYWIPLFEILEQRGIRPCLVNARHMKNVPGRRTDWHECQWLQFLHSVGLLRAAFRPGQDICAVRTILRHRNELVSAASQHVQHMHKALTQMNLQIHHVISDITGVTGLAIVDAILAGQRDGAELAKLRDPHIKADAETIRKSLEGNWRPEHLFTLGQSRDLYRIYQQQIVNCDLEIEKMLQEFAPRTDPVERPLPPDRKRNRAGSKRRKKNGHPHPQFDLRTETYKLFGVDVTQIPGLEENALPLFSEVGRDMSQWPSAAHFVSWLALCPDNDISGGKLLWRGARRVKNRAGHLFRMAAYSLHRSLTPLGNCLRRMKAKLGPKAATMATAHTCTACASCSCSA

SEQ ID NO: 254601 - protein, 324 aa, unidentified
MHFIGIDMSKDTFHVAFDDQTVKVFPNISSGVATFIETLILTGAKKETTTIGVEATGVYHLLLAETLRCKGWCLKVINPLITSRMIKTNSLRRVKTDRTDALAIRKCLLTGAGYEYTDTPEILALKALVQERQTLCGLRATLKQRQHAHSYKARVTKLKLHDSFSKTIITITKEITVLEKKMDNYAKPTQQLLRTIPGVGKTSAAALVAYVSDINRFASAKKLTAYIGIDCRVQQSGTSIHGKGYISKRGNSYLRTLLFNAAFIAQRRNPILRAYFEKKKKEGKHYFSALCAVERKLIHLIYGVWKRETPFEAKWNQPNTTKSS

SEQ ID NO: 254602 - protein, 385 aa, unidentified
MAPPARPRVVIGLDVGKSAHWACIVTREGELLASRPIPNRENAIDGLYAQYPGALVVVDQVRNIGSLALSRAKLAGMPRAYLPGLAAHGASRLFAGDAKTDERDAMVIAKTALGIPDALLAVADRPPEVEAARSLAAQRDFLTCENTRSKNRLRSILLESCPEFEAQADLSDPATLKLMAAVGGPWSISEASPQSVGALTRGCRRAKVAALAGSVESSSRPHPAAVACEDRAVRLLARRISENDAEIGSLTSEISALLSADETYRCLLTVPGIGPRTASELVISIDIADFPSHDRLASYCGLAPRNRRSGTSISSVSASRQGNKRLKNLLIFSCNCLARSRNRWGEYYARCRDRGMPHGKALKAVARKRLKVIYAVMRDKVPYAA

SEQ ID NO: 254603 - protein, 341 aa, unidentified
MNRIVVGVDIAKRVFQLHSVEPETGEIVALQLKRAKFLEYFAIRSGCLIGMEACGGSQHWARELQKLGHEVKLMSARMVKPFVGGNKNDAADAKAIWTAVQQPGVRAVAVKTEEQQAVLALHRMREQLVKFRTAQINGLRGLLTEYGEVMPLGRAALRRDIVGVFERVSQRLPAIVIETLREQFARLNQLDEQIDQIENRLGLWLRTNAASQRIAQMPGIGLLGATAAIATMGDPTAFKSGREFAAWLGLVPRQCGTGGRVRLLGISKRGDTYLRTLLIHGARAILLRSKSPPEWLNEIAKRRPKNVAIVAMANKMARTIWALTAYGRTYQAEYVSRLGSA

SEQ ID NO: 254604 - protein, 341 aa, unidentified
MKQAITIGLDIAKHVFQAHGADAAGHVLFRKRLTRAKLLGFLAAQAPCVVAMEACAGSHYWGREISKLGHTVRLIPPAYVKPFVKRQKNDAADAEAICEAAQRPSMRFVPVKDEEQQANGVVFRARDLLVRQRTQCINALRGHLSEYGYVFRQGITHAATLIAHVEDPNSFLPESARVILRLLVDTFSALEAQIKELDAEINRRSRADPVAQRLMTIPGVGPIAATAITALVPAAGSFRAGRDFAAWLGLTPLQKSTGGKQKLGAISKRGERTIRRLLILGASAVIRQACRRGAPAGSWLAQMLPRKPKMLVTVALANKMARVVWALLVKGGVYRAPAVAA

SEQ ID NO: 254605 - protein, 370 aa, unidentified
MTERTTYFVGLDVHKDSIAVAHAEALRTEPPHYVGVIGTRQVDLDKLVRRLHSQASELVFAYEAGPCGYVLHRYLTAKGLDCRVVAPSLIPKRPGDKVKTDRRDAVEIARLLRSGDLVNVYVPRIEDEAIRDLCRARDASLVMLKEAKLRLKSFLLRLGLHYSGRADWTDAHRRYLAKIVCPTAPQQIVFQEFVHAVDEQVERLGRVEKEILDVIPTWRLYPLVEAFQALRGVQWIVATIIVTELGDITRFDNPRQLAAFVGLIPSEHSSGEKRRQGGITKAGNSRARRALIEGSWAYRHVAKVSPAIQKCLESLPKPIRDIGWKAQVRLCKRFRRLSSRGKNANVVVTAIARELLAYMWAIAKEVPISV

SEQ ID NO: 254606 - protein, 418 aa, unidentified
MADVMIGIDPHKSSHTAVAIGLSEEPLGELQVPACPSQVDQLLAWAAAWPERAWAVEGAAGLGQLLAQQLVAAGEQVLDVPPKLAARVRLLQAGDTNKNDPNDAFSVAVAALRSPAPRPVLAEDHAVVLKVWAKRHRDLARLRNQACCRLHAVLCDLVPGGVRKEISAAQAARILEQVRPSDAVAGARCELACEFLDDMRRLDAKLRDTKRKLAAAVRASGTSLTGLFGVGPVIAGTVIGDVRQVFRFGSRDHFAAYNGTAPVEVSSGGRQVYRLSLRGNRRLNHAIHMAAVTQLRHKHSQGRAYYDKKLAEGKTHKEALRCLKRRISDAIYAALVADARQAAAACPEGPGGQPGNHSVSRAASSHPKRRLFGQATPGPATTLRPATTEGLAPSQRNRALRHRAKNSLADLKKPATTT

SEQ ID NO: 254607 - protein, 389 aa, unidentified
MTCKKDVAVVRTIGIDTGKNTLHMIGLNEKGAIVLREKVSRDRIAARLVNIPPCLIGIEAGMATHYMSRDLLALGHEVKQVPPAYAKPFRQGHKNDFRDAHAVAEAVQRPSTRCVPIKTDDQLDLQALHRVRSRLIGDRTAVINQVRGFLLEHGIAVRQGPRSLRQQLPQILATRTDVLSPRMLRIIEDIVDDWRYLDDRIERVTDEIEGLARTDVLSPRMLRIIEDIVDDWRYLDDRIERVTDEIEGLARTDVNCGQLISVPGIGPIIASATVAAVGNGTAFAKGRDFAAWLGLVPKQMSTGDRTILGRITKRGNRYLRMLFVQGARAILLRPKSWAKYSFGPWLMAAARRLHRNILTIALANKLARIALTVLVQGRSYESRIVPAAA

SEQ ID NO: 254608 - protein, 438 aa, unidentified
MSNKVIFNLDELFISVGIDVGADFSWMSIALPNQQFVGKPYKILHNSIDSLTTAVSKIKEAEELYSLESRIFLESTGIYHYPLFCYLRDKGFNCSVINPIITKNSTNINIRKVHNDRFDSKKAALVGLKPDLKVSLMPSDLALNCRNLCREYYDLIDNRSAYVNKLQGELRIAFPQYLGIFSKVTINTSLTLLETYTSPSAFLKADKQEIIDIIKSTARFGLTYAQNKYNAIIQAATDANQFGYIIDSNIKRIRLYISFIRKYDEEINSILESLHELVDANEDSDFVKQIHLIETFKGAGFLSAVSIMGEIGDFSAFSKPKQLFAYFGLDPSVKQSGKFEGTKVQMSKRGSAIARRVIHTLTLQSISISRNREAKNPVLREYYLKKCDSKPKLVAMGAVSHKVCNMIFAILRDNKPFKIIAPQEHIQQYNAAKCDIAA

SEQ ID NO: 254609 - protein, 327 aa, unidentified
MAKPTMICAGIDTGKHKLDVAIDGSSEQLQVDNTPEGYKVLSDWLRRHRVKRIGIEASGGYEQAVVAELRRKRFVVVVFQPAQVRAYAKFHQQRAKNDKIDAALIAACTAAVRKIHAPPDARLLPFAEQLTMIDQIGEDIARLKNRLETCRNSRLRQIWKEDIARLEKRKRIELKALVAAIREHRDLAERLDLIYSVSGAGLPTAVAILVRMPEIGQLTREQAAALAGLAPYDDDSGERVGGRHIEGGRERLRRALYTAALPASFRWNPQLIALYKRLIAAGKEHKRALIACARKLLIFVNTVVARGIPWDHQRPPIASITAAPLAG

SEQ ID NO: 254610 - protein, 368 aa, unidentified
MKQQTSAATETRIKGNTIIDFTGKTLYVGIDVHQKDYQVAIVHEDICLGNHRMPADSKKLIWHLQSRYPGATLKCVYESSAWGFNLQRQLSAAGIDCIVVNAADVSTNDKERRRKTDQVDALKLARKHASHDLKAIHVPNKDDQKQRNLIRLRKRIVNDLNRSKNRLKSLLKYEGIEIPERFGKANWSNKFLLWVEEQANKDLLLQDVLLLMLEQIRGLRQLLLKTEKKVREMMSSEKYNKQSQLLVSIPGVGPITSALFLLEIGDIKRFSSFDRLNDFVGFCPDTDSSGETQKDTGITTRRHKQLRTALIEAAWVAKNTDPALLEAYVQLTKRMPGNKAIVRIARKLLRRMRAVLISEISYQKGIVS

SEQ ID NO: 254611 - protein, 428 aa, unidentified
MIASSATTQNCTFVAIDVAKLVHEVLVEPPTGRRQRWRIRNCQPDYETLRDRLRALETPVLIGFEATGNYHRPLAYYLGQCGFELRLIASLAVARTRDALYNSWDKNDPKDTQVLLHLLKTGVPQRYHDPLVHRMNDLQELAQTHYQISLRKVQVQHSIMTHYLPLYFPEAERYYTNSRAQWFTQLLHRFPCPAAITRYSPDAFEHEAWTVVGRKVNKRGFLADLYATASQSIGLAVAEDSEAIQMFRVMLAEHQHLCATRAAIEQQADQALQSHPDYQRLRTLPGVGPILALTILAEAGDLRRFPHHRQFLKFCGFDLSTQQSGQFRGMSRLSKHGNARLRYAFWMAANGAVRMRQNTFREKYARYIKADPESPDRKRKALCAVAAKVARVAHGLIKTGTDYRPYFEALPPSGALRSRRPSRQVLTS

SEQ ID NO: 254612 - protein, 404 aa, unidentified
MIFVGIDWSESHHDVCVMDADGKVLAKDRIPEGVQGVAQLHEMVAVHAEEPSDVVVGIELDRGLLVGALLAAGYAVHAINPLSVDRYRDRHRTSGAKSDPGDAKVLADLVRTDRHLHREVAGDSELAEAVKVLARAHQGLIWSRQRQLNQLRNALREFYPAALEAFGTDLASPEALAVLEVTPTPAEGRSLSTTKIAAALKRAGRRRRITERAEEIKQALATSQLEAPAVLARAYGDVVRSTVRIVAEMTAQIDALAAELEASFEEHPDAEILRSLPGLGVVLGARVLAEFGDDPDRYADPKARKNYAGTSPITKASGRSKVALARFARNRRLADALQMWAFCSLSCSPGARRYYDAHRARGHTHRRAIRSLANRWVGILHGCLWRRERYSEERAWPTLMEAAA

SEQ ID NO: 254613 - protein, 424 aa, unidentified
MKVTYQTCCGVDVHKSFLVATIVKTTGGIEPSYQKKRFSTFNNSILEFKQWLLDNDCHDVCMESTGKYWVPVFNLLEDDINVVIANPKWVKAVKGNKDDTKDSKWIGDLFRLGLVKGSYIPCKKVRILREYTRYRYKLVSCRSSEKNRYQNALTVCNVALDSVVSDIFGKSSTSIIDYLLEQSGTSINHEEIASKLLRSLKSKEDAVIESVEGYQMTDAQKYRMRLVRAHMDYITAEINDVDKMIQNMISSNPDFENAVQFLCTIPGVKRDSAITIISEIGTDMSQFSSSKRLCCWAGLTPGSNESAGKKKSVRITRAGIYLKPALVQCAHAAVKSDKSPYYKKKYDSLVKRRGKKRAIIAIARMILTAIYQMLSTGEQWNPSDLYKIDMPVALVEKQKAKAIKQAKKLLQQEGLLPPDEPLAS

SEQ ID NO: 254614 - protein, 325 aa, unidentified
MADSARAGVVVGIDVAKDRVQVAVRPGGPSWTAATTAGGLGQLAERLVAVAPRLIVLEATGGYEQPVVAALTAAGLPVSVVDPARVRHFARATGLLAKTDRLDALVLARFAEQLEPAVRPLPDAVQRELALLVQRRRQLLDMLAAEEQRLDQQALFPRSPITGSLAAHVAYLRQQLADTDQALTAHLTAHPRWDATHALVRSVPGVGPVTAATLLAEVPELGRLSRQQIAALVGVAPLARESGQWRGQRKIGGGRAAVRQVLYMATLTAVRCRRSPLRVFYQHLRARGKLFKVALVACMRRLLVILNAMVRDGQPWNPALCMART

SEQ ID NO: 254615 - protein, 326 aa, unidentified
MAMIGIDVSKQKLDCLWLKDLVADKVKSRVFDNTPSGHKAVLAWAQKQTGAALEAIHFIMEATGIYHEALAYVLYQAGAKVTVVNPAQVRSYAKSLGRRTKTDKKDSMVLARYGATQQHRLWQPEPEAVRTLKALIARINAVEKDIQRERNRLEKAQIARAVAAVITSIQTVLGQLEHEKARLEALIDQHIDQNPGLKRDRQLLESIPGVGPVISRSMMAVIRSRSFDCASQCAAYLGVVPVQHESGTSVHGRPQLSKAGDARLRAKLYMAAVACIQYNPDIKRHYERLVNNGKTKMSALCAAMRKLVHICFGVLKHQTPYQVQGQ

SEQ ID NO: 254616 - protein, 319 aa, unidentified
MGRNNIEFEQVIERGCGLDVHRDTVVATVMGKGIQTETRTFGTTTSSLKELGEWLERLHVTDGAMESTGIYWKPILHVLREYPINLIVVNARHIKNVPGRKTDKADSQWICKLLISGLLKGSFIPPENIQELRDLHRYKKKLVGTIASEKNRIIRILEDANVKLSSVVSDTSGVTATYLINGLIEGRKDLDNLISECYHRKLQASPEQIKEAINGRLTTHHAFILKSMQKHIASVEAQISEIDVEIEKYIKDFEKEIELLQTIPGVGKEGAIGIVAEIGVDMDVFPSEHHLASHSGMCPGNNESAGKKKVQEHDKGTNT

SEQ ID NO: 254617 - protein, 378 aa, unidentified
MKRILKIGMDVHTTNYTLCAMEPIIGEDDRVFATIKVTPDYKNILMFIENLKLKLGLNDEYDIQCGYEAGCLGYSLYNQLTAAGIKCVILAPTTMLTPQGVRIKTDMRDAYMIAQCLSYGGYHAVYIPTEDDDSVKEYLRMRNDHKLALKKIKQQINAFCIRHGFCYDGTKWTLSHLKWLKKLEITNGLHRETLDEYMASYEEQEAKIERYDKRIEEIAEQTRYHDKVKKLGCFLGIKTHTALSLIVETGDFERFAKGNQYASYLGLAPGENSSSDNIHRLGITKAGNSHLRQLLIEASGGICKGAVGHKSKELRARQNGNTAEVIAYADKANTRLRSRYYKFIRHGKKRNVAVAAIARELACFVWGMMTDNIEMKVA

SEQ ID NO: 254618 - protein, 316 aa, unidentified
MAGGWYIGIDVSKDSLEVAFGCDGEVRQVANADRAIMALAAELKELGPQLVVMEASGGYERMVAALLWEAELPVVVANPSQVRDFAKGLGQYAKTDRQDARIIARWAEVKHPPVRRLPDAQGRELSELLRRRRQLLEMLVAERQRLAQTVSKPIRKELNASIGSLQRRLERIEAEIEQRIRKSDLWNRTRELLESVPGVGKLTSFMLLAELPELGTSDRRRLASLVGVAPYPRDSGKWHRPRLTYGGRAAVRSALYMAALSAARCNPVLAPFYQRLLGRGAAKKQALVAVIRRLLGILNAIVRDRTPWRLPCADPV

SEQ ID NO: 254619 - protein, 315 aa, unidentified
MTRTEVFVGIDVSDKQLDLAFRPEGRFAAPNDEAGFAQVIERLSTVSPALVVLEATGGIEIPLAGALAAAGVPVVVVNPRQVRDFAKAAGKLAKTDVLDAQTLAHFAEVMRPEPRPLPDEQTQTLAAILTRRRQLVEMLTAEKNRLGRARKPVRKSLRAHIAWLERELAQTDSDLAHAIHESPVWREKDDLLQSTPGVGPVLTTTLLATLPELGTLTGKQIAVLVGVAPLNRDRGTWRGTRTVWGGRAQIRATLYMAAVVAARFNPVIRAFYQRLCAAGKAKKVALTACMRKLLMILKAMLKHRTPSRTELVQCA

SEQ ID NO: 254620 - protein, 318 aa, unidentified
MNIIGLDISKDTIDATLHKINGSIHYIKFKNNDDGLKQFRLWIKGNRIRKAYIGMEATGIYYEKAADMLSSYYIVYVINPLKIKDYGKSRFNRTKTDKADSNLIADYIKRHQDTLIPYQIPKNKALQKLINLKNQLQQQQKQIKNRLHSTEEDFIRNIHQDLIDTIQDKMEQVKIAISEQIKKQTDNNHYRNLQTIPSIGKDTASVLYAQLTEKHFKTANQFVSYAGLSPAIIQSGTSVRGRGRLSRYGNRRLKSTLYMPALCAYRFNAFPKLINNLKKAGKPKMVIIVAIMRKLAKLAYYIVKTGQPYDAERHRLNQ

SEQ ID NO: 254621 - protein, 369 aa, unidentified
MTSIIYVGLDVHTSNYTACCYSVSDDRTFAVVQMKPDYREILEYLNRINSQHGGKCKFVCGYEAGCLGYSLYHQLTRKGVDCVILAPSTMPITPGKKIKTDKRDAEKIARCLAYHSYSPVYIPDEEDNAVKEYIRMRDDGVAALKRVKQQIIALYTRNGKMFDGKNYWTKKHLDWLQGLEFAHPVLKETLQEYLVLYYTLSEKVDIYNTRIEELSHTQRYEEPVKKLCCLNGIGVHTAMCALVEVGDFHRFEKASNFASYLGLVPGEDSSSDRQRRTGITKAGNSHLRRLLIESAQCLSRGRIGQKSKALKARQKEVDPQIAAYSDRANERLKRKFHRIALHSKHNIAKTAAARELACFMWGMMTGNLA

SEQ ID NO: 254622 - protein, 386 aa, unidentified
MQASNVSTPIANNIGTIFVTIELSQKSWLVTMHSPERDRMSRHKVEGGDHAGLLALIDRIRERSARALGAVPAVVSCYEAGYDGFWLHRLLMAAGITNHVFDPASIAVDQRARRAKTDRIDGEQMLRTLMAHCRGEPRVVRIVRVPGAEQEDVRRDTRERDRLIKEQTAHTNRIKALLRLLGMAVGNPRRRDWLKWLAAQRDWQGQAVPPRIMAELAREHARLMLVRCQIEALTRAPAETEPTPAAAQMARRSDLLLRLKGLGPVFAATLTNEVLYKDFRNRREVAGYCGLAPSPWQSGGTDREQGISKAGNPRARSTSIELAWLWLRHQPDSTLTQWFRQRTVNASKRIRRIAIVALARKLIVALWRYLTTGLVPEHAVLKTAKA

SEQ ID NO: 254623 - protein, 345 aa, unidentified
MKYVGIDLHKKTISLCVVNQARQKLEQKRFHCAMPELIVEYVRKLGQFQAVVEATASYEWLVRLLEPLAERVLLAHPKKLRVIADSTRKSDKIDARVLADFLALDMIPQAYRPTPRQRQHRVLVRHRCYLQRRTTSIRNKIRHILGDYNADRADLFTEEGLAYLSAVPLSATDRFVVEQLLKEFAFQRGQLQELTKALKEFTAKAPAAEAEARALLASIPGVGPVTTEVVLSELADPKRFRSAKCAVAYAGMAPGQRESAGKKKELHIERNGSKMLRWVLVEAAWQLVRRTGRWRVTFEHLSGRIGRKKAIVAMARRLLGVMMALLKSGQPYRHAYEPAVAAGKT

SEQ ID NO: 254624 - protein, 449 aa, unidentified
MNNGNGVSRGDRNRNARLSRLRELVPVCNAIVGIDLADRKQMVVVTDHDSKVLARRTFRCRAWDLGVALDWASERAARAGFVGVTVACEPTGHRWRVLGQLASDRGLPFVCVQTLMTSWARRSEDLTFDKTDEKDAVLIARLTAQLRCYVPEPVDETWGRLRHLGARREQLIAESTSQVQQMRDLLECVWPAALDTAKQPFRSRTWAAAMTVIVERDDGDFDRTRRLGLGRFEQAVRREITRRGGQRPCLRIVRKLFAALADPAGVLAHRLGALERVQLLLADWREARRRLAETEARMTAVLDELHLTELATSITGLSALGAAAILAETGDVTRFATARALVKHAGLAPREKLSGTFVGRTKLTGQGRPGLRLAAWRAVWGAQRANPVYDARYTHLTSRDNNKLTPTQAQAVIAAAILRQLYAVITTGRKWDPMIATHGTKHHPMPMAA

SEQ ID NO: 254625 - protein, 317 aa, unidentified
MSPAQAFVGVDVAKHQLDVATRPAEDIWSTTNDEAGIEDLVKGLRALRPDLIVVEATGGYELSLVLALAAARLPFAVANPRQVRDFAKGTGHLEKTDKIDAKVLAHFAEVVRPAPRPLPSEATQRVNALVVRRRQLVGMLTAEENRRATAPTEVRGEIEDHIGWLKKRLSDLEGELRQAIKANPDWREEDRILRSAKGVGPALSTSLVGGVPELGNLNRRQIAKLVGTAPLARDSGKFKGKRMIWGGRSAVRAVLYMAALVAARHNPVIRSFYQRLLAAGKLKKVALVACMRKLLTILNAMVRDGKPWQDQAIPQLS

SEQ ID NO: 254626 - protein, 343 aa, unidentified
MEAKRYIGIDLHRNCFTACLRLENGREYLKQWKLEDMAKFTSKLRPTDEVAVEVTGNTRLFHDAVAPHVERVVAVNPSQFKVITHSVKKTDPHDARNLALYLAKDLLPEVRMKDKTQAQIASLTQTRDTMVKLRTALKNKVNNLCSAHGVNLHKESLASEKGLRAVVEMHFDQLVNLELKIIVDQIRSLNKSIAELEETIGREGQKLEGHKNLTSIKGIGGLSSGILLSIIGDIGDFADEGKLAAYFGIVPRVSNSNETERSGRITKRGTKLGRTTLIQCALIAQRYSPYLKTYYERMKSRRGTGKAIVALARKFLGIIYRTLKNKWVFADFPNFVLAEEVAA

SEQ ID NO: 254627 - protein, 348 aa, unidentified
MTVYIGVDFHARQQTISYLTTETGEIRQLELLHEDPAKVRAFYEQFAGQRIIVGFESSGYAAWFEELLEELGCEIWIGHATYIRQFAKRRQKNDRRDADLILELLVSGDFPRIHRYSRSTRQMLQQLRYRQRLVKMRTMVVNMLLFTASSRGHSFRTQLQSKRGQARLGQLPLPEPLAQQRDELLSLLTQLDQKITTIERWLEQQTAEDVAVQRLRTHPGIGLLTSICVRYTLEDVGRFATTRKVSAFAGFDPMEDRSDERRRMGAISKQGSRWLRFYLVEAGQVAMRKDADLARVYQRISRRGGHAKAKVAVARRLLVRAFIMLRDEIDYAEFLRRGVAARSSRGSA

SEQ ID NO: 254628 - protein, 388 aa, unidentified
MKAQIVDTLPPVAADHDPVRCLLAIELSKKSWIVAITTALSDKISRYTLDGCDWKGLLELMERVRTRVAREVGRPVEMISCYEAGYDGFWLHRLLERQGVRSHVIDPASVQVDRRARRAKTDHIDAKRLLRSLMAYLRGEPKVWSVLRVPSVAEEDERRLHRERDRLIAERGQHVNRIKGLCAIHGIYAYEPMRRDRMLRLEQLHTGDGRELPPRLKAEIARELQRLELILGMLKEIEAERDAIALTENVSAHTNAKKIQNLVKLKAIGAEIATVLTGEVFYRPFNNRHQVASYVGLTPSPFQSGSKCRDQGISKAGNPKARSTMIELAWLWLRHQPDSPLSVWFRERVGILKGRIRRITIVAVARKLLIALWRYLETGMVPTGAVLN

SEQ ID NO: 254629 - protein, 342 aa, unidentified
MYYIGLDVHKKTISYCVKDAAGKIHQEGKIGSTRCELDAWIKTLPQPRMMAMEATIFTGWIYDHLLPHAEKVKVAHPLMLRAIAAAKRKNDRMDASKIADCLRCDFLPECYMTSTEIRDRRRTLRYRGLLVKQMVQMKNRVSGLLMEAGVSYNKQRLHKVGYFTELMSSNEEIDCVRPLLKLSREAITRSQKLDYALVSSLERDPLLVERLERLRTVPGVGPITALTWALEIGDVARFESIKQAISYCGLCGAEKSSADKVIRTPISKQRNKYIQQMLIEAAKLAPRQSQELALIYEKEKQRGNSNRATLAVARKMVAWLVAVERRKQDFVPAEKFGGTRAA

SEQ ID NO: 254630 - protein, 320 aa, unidentified
MTAPTERFVGIDVSKAALDVHLRPDGTARRFDNTPDGISALVAWVAGLAPTLVVLEATGGYESAAVAALSLQGLPVSLVNPERARDFAGALGRRAKTDELDADVLAQFAERVRPPVRPLAGAGAQELQALVARRNQLIEMRTMESNRLATAARPVRRSIEAILRVLEKEIGKADGELAKAIEASPVWRAKDELLQSIPGIGPVTSRTLLADLPELGTLTREQVAALVGVAPVNRDSGRWSGKRFIAGGRAAVRRVLYLGSLAARQGNAVLAAFAERLEKAGKAPKVIRIALARKLVIIANAVLRDQKPWRNLAENGAAAA

SEQ ID NO: 254631 - protein, 423 aa, unidentified
MEVLHECVAGLDVHKDSVVGCVRTVSGDKTTREHRTFDATTDGLLALLEWLTSCRCELVAMEATGVYWMPVWRILSDGAFKLIVVNAAHIKAVPGRKTDMKDSTWLADLAAFGLLKASFVPDEEQHELRALMRTRKQLVREQTRHVQRIQKTLTEANIKLDSVISDIMGRNGRRMIEVMITGVRDPRKLAALADQRLKATPKQLYDALHGRLTDHHRFLLQLHLGQWDTLDATIKGVDREVATRVFRMDTEVTAAKANFSDLIDQLVTIPGVSRLSALTILSEIGTDMSRFATAGHLVAWAGMCPGQNESAGKRKRTRLRKGAPWLKTMLVQCAWAAKRKKDSYYKAQFFRLQSRRGPQKAICAVAASLLTAIYHMLKDGTIHQDLGSGYFDQRPPEIKVKRLVNQIAKLGFEVTLQPIAKAA

SEQ ID NO: 254632 - protein, 410 aa, unidentified
MEVLHAHCAGLDVHKDSVVACARHMVEGKITTAVKTFKTTTQDLMALSEWLSAQGCTHIAMEATGVYWKPVWHILSDGEFELILANAAHVKNVPGRKTDVNDATWLADLMAHGMIKASFVPDEPTQQMRDLLRTRKQMVRERSSHIQRIQKTLEDANIKLDSVVTNILGLSGRRIIEALIAGQTMPQALATLAHRRIHASADELEAALRGRVTKHHRFLLKLHLDQIDAFDATIVRIDEEVSANVEPFRVAIEMLSAIPGVGELSATVIVSEIGTDMTRFETAGHLISWAGLCPKNDQSAGKRRSTRMNKGAPWLKSTLIQCAWAASRKNNSYLQAQYLRIRSRRGAKKAVCAVAASILTAIYHMLKNGALYQDLGASYFDNRAKDKQALRLVSRLKSLGFEVQIKPLAA

SEQ ID NO: 254633 - protein, 410 aa, unidentified
MEVLYERVAGLDIGKKTLTVCVRTPAPGGGRRTQTRTFSTMTRSLQVMRDWLLESGVTNAAMESTSTYWKGAFYCLEEVLEVWLINAAHIKAISRRKTDVKDSEWIAQLLECGLLRPSFVPPPDIRRLRMLTRYRVQLMADRTREITRLELMLEDASIKVSSVAASLTSVSARAMLAALISGEDDPRVLAELAKGKMRRKIPALTEALTGHFDAGHAQLARSMLSRISSVEAALAELNVVLAQAFAPFAHQLELLQTIPGVGEKVAQVIIAETGGDMSRFPTPDHLASWAGVSPGTRESAGKRYPVRPPHGNKWLAAMLVEAAGSVGRMKGANYLAAQHARLTSRRGMARAQVAVGHSILVSAYWMLTRDEPYRDLGPEWLARRNDEGHARRLIAELERLGHTVVLDPVA

SEQ ID NO: 254634 - protein, 350 aa, unidentified
MDATTVAVDLAKDVFEIAVANRAGRIIERKRLTRRQFERFVDTLPAGVEVIMEGCGTAHYWGRRCRARDVSVRLLPVQYVRPYVRRNKTDRTDTEALLEANRCGGIQPVAVKTVEQQAIQALHRVRTQWQATRTARINVMRGVLREFGLPIGVGARTALARIPVLLEDAAVELPGLVRHAVWLLLEEVRALDARIAAIDHELATIAREHPVALRLQQVPGVGVLTSTALVASVGHIHAFRRGRQFASWLGLTPRESSTGGRRYLGGISKRGDVYLRCLLTHGARAVLLTAQRTVGRTPQRATAFQRRAASVAVRRGHNKAAIAVANKLARMIWAVWHHDVDFRVESRVAA

SEQ ID NO: 254635 - protein, 416 aa, unidentified
MEYARKLPAAAPGGVTAGIDWASTDHAVCVVGAAGGAVARFTVEHTAAGLAELVRRLRGAGAAEAAIERGDGPVVGALLEAGVTVVVITPNQVKNLRSRYGSAGNKDDRFDAFVLADTLRTDRARLRPLEPDSPATVSLRSAVRARRDLVAHRVAVCNQLRAHLQGCFPGAVGLFADLDSPVSLAFLARFDCQDRADWLSPRRMAAWLKAQGYCGRQSPEALHRKLAAAPRGAAGDDGAAQAHVTRALLAVLVTLVTQVKALEAQIAEQLSMHADAHIFVSLPRSGTVRAARLLAEIGDCRARFPTPESLICAAGVAPSTRQSGKTRVVTFRWSADKQLRDAVCDFAGDSRRASPWAARLYDNAVARGKDHPHAVRIVARAWLYVIWHCWQDNSAYDPARHKALQRILAEEKTSAA

SEQ ID NO: 254636 - protein, 406 aa, unidentified
MKVYIGIDWSTQKHDIVYLNEEGGIILYQTIPNTADGFEAFEEQRAKLGVGVEDCLVGIETEHNLFLDFLSTHRYSQIYVIPPSMVKDGRGRFGANKANTDRSDAHLIADMLRTDRARLHTWHSDSLLTQQIAALSSLEHFLTRTILQTTNRLRMVLWRYYPNAAGVFSSLENQISLEFICAFPTPEAAAELTFEQFKAFAQVHRYRRPAKLAGCFARLKKSQPEAKQQTVLAYQSEAVRLARLALQAVQDKAATLKEIQELFVEHPDYLVFSSLPGAGAILAPALLAKFGDDRQRYPSPQVLQCVAGTCPVTRASGKHRYVTFRYACDHEFRWIVQQWAKSSIDASVWANTYFQSVRPQCDSLSHAYRRLANRWLEIAWRLWQDRIPYDEERHLRQHALRVRPPN

SEQ ID NO: 254637 - protein, 409 aa, unidentified
MCIIGLDIHRAFAEAVAWEDGRLRRLGRVDMRRDLLEAFAAKLAPSDIVVIEATGNASSAAAVVAPHVKKVVIANPKQVRIIAYAKIKTDTIDAGVLAQLYASGFLPEVWIPDEPTQALRRQVTRRNQIVRQRSRLKNVIQSILHSHLIPSCPHADLCGAKGRSWLGEQIVPEDERLAIDRHLREFDRLGDDLQVIERDLARSALDDEGVKRLMTIPGVDMTVALAMKAAIGDVSRFDEPQKLVSYLGLNPSVRQSGPGPAYHGRITKQGRGHARGMLVEAAWAAARAPGPLRAFFLRVRARRGQHVAAVATARKLAVVIWHLLTKGESYAWARPSLHAKKLRDMELKAGGKAARGQKGTAHAYNIKSHRDEERRWVEQAEGAYARFVAGWNPRGPKKVRTDAANEVRR

SEQ ID NO: 254638 - protein, 313 aa, unidentified
MNQDSAYIGIDVSKGTLDVFVTTTGEVQQFLNTQTDIQRLAKHLKPLSPALVVLEATGGFERLVAAELFAAGLPVVIVNPRQVRNFAKATGLLAKTDALDAQVIAEFAQAVKPAIRDIPDEHTHELADLLARRRQLIDMIVAEECRLKQAKFKTLQRGIKAHLVWLKKRLKNTDSDLHQTILASPIWKANYDLLCEVKGVGEVLALSLLAMLPELGRVNRKQVAALVGVAPYNCDSGQFKGRRRIWGGRAELRRVLFMAAVSSKTHNPVIKEFYLRLLSTGKAKKVALVACMRKLLTILNAMIRDQKHFGEMT

SEQ ID NO: 254639 - protein, 336 aa, unidentified
MKKYIGLDAHSSTCSFCVMNEAGKIIDTAQIVTNGRLLVDYLRSISGIKELTFEECELSSWLHKILRKEVDKVLVCNPVENRQYKKAKTDKLDAMNLAKLLRGNFLKEVYHDGSDKEKLRDLMSGYQDLVEDAVRIKNRYKSLFRKEGKRRSGKALYSDENFLEELDREDFKFIGKHCFDLLGSMEKSRISYVKEIKKLSKKHKEIRYLKTLTGISDIHAAKIVAQVIDPHRFSTKYKYYSYCGLVRHRQISGGKVYGDKKIWGNRVLKCVYKMAAESVLRGNSKLRKYYDHLRDKGTGHKNAKNAVARKIAAISLAMLKKGEKYREEMITNDLVK

SEQ ID NO: 254640 - protein, 422 aa, unidentified
MLGIGIDFAEEFHLVALGRPGEGVVEVVRVDHTPAALEALVTRIGVLEPDPAEVRVVLETNHGALVERLLDAGYVVVPVNPDLVARRRGPARKKDDATDARIACLLALDRHASLRPLIPHGELAAELRAIARDDERAARDERRLLNRLRTDLIATFPAALAIAGDDLGAPTMLRLLARWPTVGELTGAGRDELVAFARSAHHGWPERFADRVETALESEQFVARDYLVRAKAATIRLAADQLLLLGAQRRAWERRMGEILLGAPRRGRAHEPRADELDERFPGGEIYLSFPGLGDRLAARVAAEIGDHPEMFASPNGLQCYAGKAPVTRRSGKSEFVVSTRLACNGHLRDAVQQWAFCSLLYSGWAREFYDGQLAKGKRHHAALRALGNRWLEVLWHCLIRGVRYDEATHVANRNRPLQRAA

SEQ ID NO: 254641 - protein, 419 aa, unidentified
MAVPEGSDPQPVRKFGSFTADLHRVAQWLKTCCIESVVMQATGVYWVALHQVPEDYGFQVHVANARHTKTLPGRKTDVLECQWLQKLHTFGLLNNSFRPATEIRVLRTYLRQRESLVASASKCIQHMQKTLTQMNVQLANVISDISGATGLAILRAIVAGERDPDKLACRKNGLIRATQAQIAQSLEGDWREELLFVLEQSLELYNTYLSKIAQCDQRIETHLKSMEPKLTTDSPPLSERPSSRKQEPRFNLRNHLRRVTGVDLTQVDGLNVQTVQTIISEVGVDMSRWKTEKHFASWLGLCPDNRVSGGKILKRGTRQVVNRAATAFRLAAWSLIRSQTALGANFRRLRSRLGAPKAVTAMAHKLARLVYRILKFGADYVDSGMQAYESRYRQQQMKWLTKQAAALNLQLVPSSGVTA

SEQ ID NO: 254642 - protein, 341 aa, unidentified
MKNLFIGVDFSKEKVDVAIVFADGLTETAPRVFNEFKTTVSGYKQLVKWVEKNSYGIDPSLWLFCGENTGDYSKGLCNFLYGKGYDMWLENAKSIKDASSLRRLKSDRADASMIAEYAMRNHDRAIMYEPLSESLAQLRELFLYRQMVVRHRCSFQVRRGEKKLTMEKSPIKTMISQSGRHIVSELNKEVEKIDKRIAEFIKSDEELTEVFTIVTSVPGIGTQNAVCLMVYTDNFRRFNYDSRKIACYYGIAPFGKDSGTSVHSDPHVHYMANRQIKAMLTQAALAAVKFNPVMARYYMRLVERGKKKQVALNNVKNKLVHLVTAMVRNRKTFTPEYKISA

SEQ ID NO: 254643 - protein, 385 aa, unidentified
MATPTARYIEQDSLSRPTLYLAFELGKNTWKLGFTVGVAQQPRERMIPAGALDMLQQEITRAKQRFGLPEDAHVVSCYEAGRDGFWLHRSLVAHGVENFVIDSASIEVNRRQRRAKTDRLDVHKLLTMLLRHMAGEKKVWSVVRIPSVDEEDRRQLHREMRTAKQDRTRVVNRIKGLLAGHGVQLALEGDVDAQLDQARQWNGSPLPSALLSRLKRAWQQVGFLTAQIQTLEAERRTLLRHRDDPVIAQVRQLFTLRGIGVNSAWLYVMEFFAWRDFQTPKQIGALAGLTPTPYQSGQSRRELGIAKAGNRHIRAMAIEIAWAWRRFQPASALSQWYERRFGAGSTRLRKLGIVALARKLLIALWRFVKTGVLPEGAVLKTAVLG

SEQ ID NO: 254644 - protein, 354 aa, unidentified
MTNEEEILTAGIDTHSDTHHVAVINQYGKRVADKEFLAVASGYQKIIEFVQQFGPLAAVGVEGTGCYGAELTRQLMKAGITVIEVNRPNRKNRRQQGKSDPLDAYSAAEAVLSARATAEPKSRNNYVESIRALRVARSSALKSRTQTINQICGLLTSATDETRSKYRTLHGRKLARALMNSRPGTDVSDPVTATRYALRLLGSRYESLTLEILDIDRHLNELLKANAPDLLAIYGAGTEVAGQLLITAGDNPERIRTEAALAALTGTAPLPASSGKTNRHRLSRGGDRAANSAIHRIVLVRMRHHEATKAYVLRRTEEGLSKREIIRCLKRYVVREIHRVLVRHIPRAQTAIAA

SEQ ID NO: 254645 - protein, 348 aa, unidentified
MTLVGCDLHSRKQQVAVLVTDTGEVLEQELLHEGDAVERFYRALPRPVTVGIEATGYTLWFHAVMQKLGHTLLVGEAAKIRAMVVRKTKTDRRDAQHLLDLLKHERFPTVWMSDPTTRDLRALIAHRVRLVRMRTMVKNGLHAIALNQRVALGPSLWTKRGLAQLRALSLPPHTANRRADSLELLTWLTTHIDQLDAQIAEAAAADARAQRLLTHPGVGPLTALITVLVLGPAARFPTSKHVGLAPAIHSSADKYHLGKITKQGNALLRWILGQAAPLAARADGELRRAYFAVLHRRGRPKAKVALARKLLVRLYIMLRDQIDYEEFRRRGRVRRPRIAVNPVSATTM

SEQ ID NO: 254646 - protein, 469 aa, unidentified
MIMFVLGCDVSRGYVDITVVNERGELALPPSQADASAQGESRIFRQISALRKNYPQETVIAVMENTGGYEANIAQCFRQHGVPVSVLNPKNIHSFRQLELHHAITDPSSARDIALFALQHLDAIKTEVEGTSERALKRLAHILDALSRDMTRLKNRLDNLLFTVRPELLSLTRGDKPRWLLQLLLQYPIPQKLARGRMSRVTRIPGITPDKARNLISLAKSSRGADNHPDFAPLIVYLATRLLQAMDQEKTLRKELEQRFNRIHPSCPLPTIKGVSSYGAAIILAHIGNVHRFHSAKALVAFFGLDPLVRESGDLQHRRHISKRGPGMVRRVLYMQCLSMCSDPDHPIGRFYARLTKQGKPHYYAITACMRKLTVILYAMLRSGNAFDPNYEDSSKALKQSERDRGRKKLRVAKHARTSLALDVPISTREAKRRKRIIALQNKKREGPHVSCDTSAGSCPKNLNEVTFP

SEQ ID NO: 254647 - protein, 388 aa, unidentified
MQDVAHRPVAATTIGSDLCAIFISLELSRSTWLVTSLSPGHGEKMSKHSVKAGDIAALLARFSKLRTKACARTGKSLPIVVIQEAGLDGFWIHRVLLSEGIESHVVDAASVATSRRRRRAKTDRIDGETLLRALLAYKRGEPRVCSMVRAPTPEDEDRRRICRERKVLIMERVQHVNRIKGLLFSQGVSGYEPLHRDRRAQLDALQTGDGRRLPQHLKAQIGRELDRLELVLEQIKAVEAERDALLNAEQTKVSAPPPMLLALHGVGPEFASVLWSEGLSRHFDNRRQVAAYAGLAPTPWQSGSINREQGISQSGNPRLRTTMIQLAWLWIRHQPVSALTLWFKDRNERTGGRRRKTTIVALARKLLVALWKFVSAGVVIEGAMMRPA

SEQ ID NO: 254648 - protein, 427 aa, unidentified
MKTEDIRLEEFRNLKKEVRGSVRHLLVGIDIAKEKHNAFFGSATGKTCLKRFVFDNNREGFEKLLAETDALKQKYGLSQTVFGLEPTANYHKPLGEYLIYRDHEVVLVAGSAVRKNRELLDGRWDKHDVKDAANVADLIAQGKFLYYENPGIEVRELRGLLSLKRKLKKQAQGLQLRIRNNVLAQYFPEMDRYYATGEKDNLAIVSSCLSPAVIGGMEYNEFFKAVVSRKNGVRQHRHLYRIWQLAGDSIGCAAEEGAACEAAVLVGLLRQTRQAIEHVEQEILKLCYMFSEYEFVISIPGFGPDITAKVLAYIGDQYRFETASQVLKMAGFDLCASRSGKPSEKAVPVISKKGKADLRYALYQAAHIASIRSAHFKQYFAQKIRGREREKGIKTKLKVKLAAKLLVIAWTLMKNKEPFNPEYVKID

SEQ ID NO: 254649 - protein, 367 aa, unidentified
MKHSINWVGIDDHADKLTICLLVGEQKSAAKEWEVAPTEQGLRQLVRWLKGLEGQIRCIYEAGPCGYELYRLLMNKKMECAVAAPSLTPRKPGERIKTNRRDARKLAELHRAGLLTIITVPDRQQESVRDLLRARDDARKNVMSARHRLSKFLLRHGRRFREATSWGTKHWQWIRSIIMPEPYEQVVLIESIAALEARQGELRRLDQLVAEAAKESAYATLVAHLCVLRGIDILSAMTILTELGDLRRFGSARQMMAAVGLVPSEYSTGDKTRRFSITKTGNAHVRHVLLQAAWHYRHAASGSAVRKRRIDQSSALIEIAKKADDRLHRKYWRLTSRGKRSTVAVTAVARELAGFVWAVGQQLPAPH

SEQ ID NO: 254650 - protein, 338 aa, unidentified
MTAIGVDTHKASLAACAVDERGAALAEMTFANHRAGHAALAAWATGLDPAAVIGIEGSATYGAALARFLDAAGQAVREVPPHLTRRERIGTRRPGKSDPGDALAIARVTLREPSLPPVRRADATRELQLLVEAREDLVAEMTRTRNRLHADLLVLLPGTTGSLVGPRALSTLARRLRRCSGLQAELARQRLRDLRRLTAAADRLETRIATRVAGHPLLEIPGVGALIAAKLLGEVGDVGRFRSDDAFAALAGVAPIPASSGQVQRMRLNRGGNRQLNRALYLAALVQLRHHPPAQAFVARKRAEGKSRREAIRCLKRHLARVVFRAMQLGAEGLAVAA

SEQ ID NO: 254651 - protein, 456 aa, unidentified
MKQKTTSQSSRTLPIVGEVEPNAAGLDVGARKVYVAVPADRDAQPVRSFDTFTEDLERMADWLLECGITSVAMESTGVYWIPVFDILERKGLRVCLVNAHHVKHVPGRKSDVQDCQWLQYLHSVGLLRGSFHPEDQVRALRAIMRHRDSLIEMAAAHTQHMHKALTQMNLQIHHVLSDITGVSGLAMIDAILKGERNPQVLAGLRDGRVQASEEIIRKSLVGNYRREHLFTLEQSLKAFRQYQALITACDQELAQYVKDFPSRMDGDQPPLAKEPNKHRPRKNELRLELRSELYRLFGTDLTAVPGISTLTWFTLLTELGPEIGKFPSSPAFTSWLCLCPNNRQSGQRILSTQTRRSKNRINHALRVAAQTLHHSNSSLGAFYRRLRARLGAPKAITATAHKLARILFHLITTRQPYDESVFALADQQQQQRHERYLRKQAEAMGFSLVRTEVQPA

SEQ ID NO: 254652 - protein, 422 aa, unidentified
MRAVGLDVHLDFCEVAIVEGGEVRSAGRIETKPEQIELFAGSLGPADRVALEVTGNAWEIARILEPHVAQVVVVSPSDTGIRQARAKTDRLDARTLARLLAAGSLDAVWMPDQRTWVMRRRLARRDQLVRARTRTKNEIHAVLMRRLIGRAPVSDLFGVKGRRWLAGLELPLEERETVDGAIRQIEFLDAEIAEVERLIALDALTSPEIRRLMSVPGVNVIVAATFLAAIGDIGRFQSPRKLVGYLGLDPRVRQSGSGPATHGRISKQGSVRARHVLVEASWSTVRQPGPTRAFYQRVRARRGHQVAVVAAARKLACLFWCLLTREEDYAYQQPSLTKKKLRRLELTAGAPSQKGAKTGLWAANAAMREAERELASQAEVAYQRTVRDWHTVQAAKAGASATPGRASQQPSKGKAARQTTSP

SEQ ID NO: 254653 - protein, 412 aa, unidentified
MEVLHSRCCGLDVHKKSISACVMIREHGRLEKLERRFGTFTGELEDMAAWLAEHKVTHVVMEATGVYWKPVWNVLEGRFDLMLVNPQHIKALTGKKCDRRDASHLTELLQHGLLQGSFIPSAAIRRLRDLTRNRARTVQAVARIKSRVQKVLEEANVKLGSVATDVLGVSGRLMLNGLVAGKQDPEELADLAVGVLRKKRDQLVQALSGKVGDHHRLMLGKLLRALKTREVEIAEDETDIRTRIEPFRKAVLAWMQLPGIDEVTAWSLVAEMGADMAPFDTAEQAASWACVCPGNHESASKQGDKRTRKGNPWLRSTICEAAWGASRTKKSYFHALYIRTCARRGPKRALMAVAHSMIVVGFYLIKHDLKFNDLGADFFDRRNREQATRRAVKRLNALGYSVHLEQAASAPA

SEQ ID NO: 254654 - protein, 463 aa, unidentified
MMKKRKLASKAEKPRREKVDWKTLEIVHPDAAGIDIGGREHWVAISPDRDEDPVRRFDCFTADLEQMAKWLVEKGVCSVAMQSTGVYWMPVYEVLEQSGLEVYLVNARHTKNLPGRKSDVQECQWLLKLHTFGLLNNSFQPTDEIRVARTMWRHRSSLVAQAGGAIQRMQKTLTEMNVQIHNVLSDLSGVSGMAILKAILKGERDPWQLAAFANPAVKASPADIAKSLHGNWREELLLVLRHEMELYQTYQDKIAECDHQLRKHLQSLASRVDLQAQPLGARPKGKKAPRGNTPKFDLRSELYRITGIDWSQVNGIDVQIAQTVITEVGVDLSSFPSERHFASWLGLCPMNEQSGGKILNRRTPKVVNRATVAFRLAAQGLLRSQSYLGAQYRRLRTRLGAPKAITAMARKLACLFYRLLRHGQPYVDKGAQYYERRYREQQIRSLTKRAHKLGLQLVEPKPA

SEQ ID NO: 254655 - protein, 373 aa, unidentified
MQASTVVTPTAGHCGTIFVAIELSQKTWLVTLHSPERDRISRHKLAGGDHGGLLALIEQVRARAAGKLGAVPAVTSCYQAGYDGFWLHRLLEADGIRNFVFDAASIAVEQRARRAKTDRIDGELLLRTLMAHLRGEPRVVRIVRVPSLAEEDARRASRERDRLITEQTAHTNRIKALLRLQGMAVGNPRRGDWLAWLQRQRDRQGQSLSPQLLAEVTREHVRLMLVRQQLAALEQAQAARTLPLPAPMAERQDRLLRIKAIGTTFGANFRNRREVASYCGLTPSPWKSGSIDREQGISKAGNHRARHKAIELAWLWLRHQPDSALSQWFRTRTASAGKRAKRIAIVALARKLIVALWRYLTTGLVPEQATMKA

SEQ ID NO: 254656 - protein, 367 aa, unidentified
MKKVSIAATKQRKNISQRKLTIGLDLGDRDSWYCVVDEAGQIQLEQRVRTNAKALQEVFGTMPRSRIALEIGTHSPWISRLLSELGHEVIVANARKVRLIGESRKKDDRMDAQTLARLARIDPQLLYPVKHRSAKAQADLTLIRARAGLVRARTALVNTARGLAKSYGERLRGCNVRNLNAEKAEGLSPELQRALEPLLACIESVSEQIREYNERIEDLAQESYPQTALLKQVKGVGTLIALTYLLTLEDPHRFQKSRDVGCYLGLQPGRRNSGKSEPQMHISKEGDPYLRTLLVQGAQHILGPFGIDCDLRRWGLRLAERGGKSGKKRAIVATARKLAVLLHHLWVSGEAYEPLHNSSKTTVAAAA

SEQ ID NO: 254657 - protein, 343 aa, unidentified
MQGVTTVGLDIAKSVFQVHGVDARGNVVVRRQLRRRQVLPFFKKLPSCLVGVEACATSHHWSRQLRALGHTVRLMPPAYVKPYLKRQKNDAADAEAICEGVTRPNMRFVETKTPEQQSCLMLHRTRHLFIRQQTAVINAIRAHLAEFGMVAPVGRNGVEELLDVVADPNDDRVPEVARECLAGLGAQLRMLKAQILEFDRCIVAWHRSNETSKRLDEIPGVGPALATALVASVADPRVFRSGRDFSAWVGLVPKQNSSGGKEKLGSITKRGDRYLRSLFTAGALAVIRYAKIHGTKHRPWLTSLLARRPTKVAAIALANKIARMALAMMARAERYKEPVALAA

SEQ ID NO: 254658 - protein, 459 aa, unidentified
MARNQKKKKHRSVKMLHKIEPDSAGIDIGATEIYVAVPEDRSSTPVRHFETFTDDLHDAAKWLKSCKIKTIAMESTGVYWIPVFQILEAYGFEVFLVNARHVKNVPGRKTDVQDCQWLQYLHSVGLLRGSFRPTQDVCAIRSLLRHRDSMVKMSATHIKHIHKALTQMNLQIHNVIRDITGLTGLAIVDAIIAGERNPKKLAALKHGRIQAPDSVIIKSLKGDYLPEHLFTLNQALQAYRYYREMINLCDTEIQSYLQKFESRIDPIQKLPPSPRIKKKKPTGNEPNFDIRSQLYRILGTDLTQIDGISVLTAHTIFAEIGPDLTKFPTVNHFCSWLGLCPNNKISGGRILSSRTRPGSNRAAQALRLAARSLWKSQSYLGHYYRRMRARHGSPKAITATAHKLARIVFYLIKTGKTYDETVFADQEALHKQRLEEKLKKHAKFLGFQLVAVDKEAFVI

SEQ ID NO: 254659 - protein, 420 aa, unidentified
MPDVVADLSPARLIGVDWATEEHAVCVLDGNGRKLSSFTIPHSRDGFEKLVKKLASLGAPGESPVAVERPDGRLVDCLLEAGHPVVPVSPNAINAWRESEIVSGAKSDPGDAEVIAEYQRLRQHKLRVLEPFSDETRALRAVVRARDDLGGQRVAAHNQLEACLDAFWPGAKAIFADVTSEIALAFLERYPTPASARCLGEKRLSAFLTKHGYCGRRPAVELLRRLRDAPEGIGDGPEAEARRDAVLGFVRVTRALNAAVKNLNRSVVAHLGEHPDAQIFTSLPRSGQVNAAQMLAEWGDCRRAYDGSEAVAALAGLAPVTKKSGKHEAVHFRWACNTRFRVAVTTFADNSRHASPWAADIYRRAIARGCDHPHAVRILARAWVRVIYRCWVDGKPYDPATHGGAVRLAEASKEVKNLAA

SEQ ID NO: 254660 - protein, 370 aa, unidentified
MVVIGADTHKRSHTVAAVEAASGRMLAERTVPAQRRSFETLLTWARAHGSERVWAIEDCRHVSGALERFLLARGETVVRVAPTLTVRERSTARERGKSDAIDAVAIARAALREGLDTLPVAQLAGPELDVRLLVDHRERLVAHRTALSNDLRWHLHDLWPETVIPPRALIARGWQTRVAARLARAEQTARVRIARDELRRVRELTRTINDLHAELAALVAALAPRLIAERGCGVLTAAKLLGEIADVTRFATDAKLARTAGSAPIPASSGRTQRHRLDHGGNRQLNCALHRLAVTKGRLDPESAAYLARRQAEGKTRREALRCLKRHLARRVWHLLQPDPETTIPTRTPIRPGRILTIHCNTPTGRLDLT

SEQ ID NO: 254661 - protein, 337 aa, unidentified
MENYACFVGIDVSKAKLDVTLLLSPIIPDLPQQHFIVSNDKKGIGQIFKELVRKKIELSTVLFCFEDTGVYSMPLSCFLSDQRLDYWMVPAIEIKRSKGISRGKSDKADARDIAFYAATHLHKLKLSSIAPENLLKLKILFTERQKVLKALTILESTLESAGFVSKNVMISVTKINAASIRQLKKSLQLLDKEMQDIIASDDVLSRQNELIQSLPGLGPMTTTYLIIVTKAFQSFDNWRQLACYAGVAPFEYSSGSSIKGRTKVHPMADKKLKSLLNMCAMNAKKYDTEMKLYFERKVAEGKNKMLVLNSIRCKLLARIFAIIKRNSPYVDVLKFAA

SEQ ID NO: 254662 - protein, 422 aa, unidentified
MSKNLFCGCDTAVNTFTTWLLLDDGTEPVKSFSLDNNQVGAQALVDKLISLAKEHCVTNILIGTEATSMYDWHLLEFLSESVISRQFNLKLYRFNAKWIKNFKKSLAPRGKTDPVDSFAIAERLRVGRLPREYTPDFQYQPLRRLTRFRYHLMQSMAREKNFFLSNLFLKASSYNEVKPFRSPFTATSLATIEEFFSVDELANTSVDDLLEFVKKQGKDHFADAKEVVAKLKRVSRESYRLRPELKPVVNLVLASCLNNIRCYKETIKRVDDVIKEQMKAFRTTLDSVPGLGPVYCAGLIAEIGDIRRFDSQGSLAQFAGLTWPRYQSGKFEAEESYLAKTGNEYLRYYLVEAADSVRRHNAIYSEFYQKKYAEATKHHHKRALVLTARKLVRLVYALLSRQELYQPEKCSLTEFSKIGSNF

SEQ ID NO: 254663 - protein, 402 aa, unidentified
MADKVAGIDVHKKVLMVVVIDARAPELKPERQRFTTMPSELHRLSTWLKAKGVEEVVMESTAQYWRSVWLELEPHMRLHLAQAFSNRAPRGRKHDFKGAERLVRRLIAKELILSFVPDGEQRIWRNLTRMKLQLVRDRVRLQSQIECLLEEMRIKLSVVVSGLRILHALSNGETNAKCLASLGDDRLRCTEEQLVEALTGSSHPMHRQMLALQLERLRLLDEQTVQLNSLIAQAMTPHQDTVIRLAEVPGLGIDSAQQVIAEVGVTASTFPSAAEFTSWVGTCPGKEESAEENSSSRSAKGNKYLRRVLNQAAHAAARSKGTHFQAVFRRLLPRLGYQSAVWAIAHRLCRLIWKILHEGIRYIEQGIESEPQLLMNRAQNLAKQLRKFGYRIQITPPNTAPA

SEQ ID NO: 254664 - protein, 404 aa, unidentified
MYYVGIDVAKEKHYVCILDDTKEIAVKPFWIYSDILGLRNLVKRLAELSLNNDDFVIGVESTGAFSENLYEYITDADYKVILLNSYQTAKYRDFSTMKKIKNDSIDALVIAELLASDKYKESYISNDDYQSLKVLGRLKKSLADKIKTIKREISTVMATVNPEITKVFPNIFSKTALVTIKAYPTAVDIQKATPKKLTKLFRHIKGNNFNEDKAKFLIELSKSSIYAGRAHESRALMIRTNIRILELLCQEKDEIELQINNLLYNKIEVIDSSIENIRTIPGVSDKTISAVLGECGDIKRFESAKAFIGYLGLYPTQYQSGNSLSVGRLAKRGIPIAKHALYMAAVSSIRHNHELNKVFHDKVSAGKSKKEALIIISKKLATIIYSIFKYNKPYQAKRVFLPTR

SEQ ID NO: 254665 - protein, 471 aa, unidentified
MVCFNPSTKLIRVRPAELIVAMPQGMSTRRKFVSYFAPLVGLGEDEECVSREVGTDMQVVHERCCGLDVHKKTVVACILITLANGEVQRHIRTFSTMTAGLLALSDWLESLTVTVIAMESTGIYWRPVFNLLEDGRTVILVNAQHMKAIPGRKTDIKDSEWLADLLRHGLLKASFIPPAPIRELRDLTRYRKSLVQERAREVNRVQKVLETANIKLSSVATDVLGKSGRDMLSALIEGTTDVEILAELARGKLRKQLPQLQQALDGRVQAHHRLLLKHLLAHIIFLEETLEQLQQEIEQHLCPFEETMTLLMSIPGIAALAAAAILAEIGDDMTRFPSAKHLASWAGVCPGNKQSGGKRLSGKTTQGNATLRAMLAEVVWVLSHMKDNYLSAQYHRLARRLGKKKAVVAVSHSLLVIIYHVLSTKQPYSDLGADYFEQRDSARLTQRSVRQLEALGYTVTLVPKEAAQRIG

SEQ ID NO: 254666 - protein, 343 aa, unidentified
MQAVTTIGLDIAKSVFQVHGIDVEGNVIIRRQLKRRYVLAFFEKLPPCLIGIEACATSHHWSRQLKALGHSVRLMPPAYVKPYVKRQKNDAADAEAICEAVTRANMRFVETKTPEQQSCLMLHRTRHLFIRQQTSVINAIRAHLAEFGIVAPVGRKGVEQLLAVVTDARDQRVPELARACVAALGAQLRSLKAQILEFDRRILAWHRSNETSKRLDEIPGIGPALATALVASVADAKAFRSGRNFSAWIGLVPKQHSSGGKDKLGSISKQGDRYLRSLFTAGALAVIRYAKIHGTKHRPWLTALLARRPTKVAAIALANKIARMAWAMMARGERYKEPVALAA

SEQ ID NO: 254667 - protein, 341 aa, unidentified
MESVTLIGIDLGKHSFHVHGQDHRGKALLRKKFSRKQLIEFLANFPPCTIVMEACAGAHFMARQLAGFGHEAKLISPQFVRPFVKSNKNDFIDAEAICEAACRPSMRFVTPKNESQQTLSALHRVRESLVRDRVKASNQIHGFLLEFGISLPVGRAAIKRLPSVLAEEHLPARLMMVLERLQVHFKYLDEQITDIEKDLARQLAENDLGQRLMTVPGIGPITASVLAAEVGDAKHYRCGRDFAAAVGLVPRQHSTGGRNNLLGISKRGDKDLRRLLVQCARAYMQQLERQRGRLAEWVRSMLTRRHSNVVACALANKLARTAWAIAAHHTEFEMKEAVIAK

SEQ ID NO: 254668 - protein, 345 aa, unidentified
MKITTAGMDLAKNVIQVHGVDARGNAVLRKSLKRSHVLSFFVNVAPCLIGMEACGSAHHWARKLEKLGHTVKLMAPQFVKPYVKTNKNDAADAEAICEAVSRPNMRFVPIKNGEQQAVLALHRARQGFVRARTAQGNQIRGLLTEYGIVIPQGICHITKRLPGILEDGESDLPGMFRQLLQRLGEHLKELDRQVGEVELQIQLWHRQHDASCKLAQVPGIGPITASALVASIGDAKSFENGRQLAAWLGLVPRQHSSGGKSTLLGISKRGDTYLRMLLIHGARAVIRVAEHKVGYAESWLARLIGRRHPNVAAVALANKNARVVWALLRHDRIYQPGYQLLNSAA

SEQ ID NO: 254669 - protein, 373 aa, unidentified
MSDYSAFVGLDVHKDTIAVAVADAGRTGEVRFWGEIANTPDAVAGMLRKLGGRHPLMHFVYEAGPCGYGLHRQIIATQHHCEVVSPAQTPRKPGDRIKTDRRDAIILARLSRAGELTSVWVPDTIHEAMRDLIRLRQAMVKDLRAARQRTKSFLLRHGRVFKGTSWKRSHRIWLGNQSFAHPAQQIAFQSYLNAVDQAQARRDEVDVQIRLFAADWSMAPVVEALQALRGVAFITAVTVVCEVGDIRRFAKPRQLMAFLGLVPGERSSGETRRQGGITKAGNVLARAVLIEAAWSYRTPAKIGAQMMLRQEGIPQAAKDIGWKAQVCLCGRYRRLMARGKKSALAVTAVARELVGFIWAIAHITEPTGAEGAA

SEQ ID NO: 254670 - protein, 400 aa, unidentified
MKFVGWDWASTSHDVTVLDDQGRVLERWALRHTELALAETLARLARHGQPSEVPVIIERSAGLVVDRLLAAGHPVVPVHPTAFHAARPRWGAAGAKSDPGDSYKLADYLRTDGHRLRRLQPLDPGLRELQALVRLREDHVRARTAASNQLGALLDAHWPGPKAMFCKLASDIALAFLSDYPTPQAAARLGQARLAAFCRRHAYRGGKPPAELLARLRTAPIPPVGLAPGVLAQLIGAQVQLLRSLQATIGELETAIKQRVAQHPRAKLLGGLPGVGTINLAQLLAEVGPILDRVSTAEQAAAECGAAPVTRASGKTSGVYFRWAANPRARAALTAFAHNARMQSAWAGRLYADARARGKRNPHATRIVARAWLRVIWACWHTNTPYDPCSHLAEQRLAAA

SEQ ID NO: 254671 - protein, 413 aa, unidentified
MSFTPVTVLARVCAGIDWASIDHAVCILDADGAILDRFFVTHDAAGLRTLVRRLLKAGVDEVGIERGDGPVIDALLQAELTVLVIAPGQLKNLRSRYGSAGNKDDRFDAYVLADVVRTDRARLRPLVRDSAATSAMRTTVRARRDLVEHRVAAANQLRAHLQNVFPAAASLFAAIDTTISLKFLDRFTTQTQADWLSPKRLSAWLSSVGYSGHTDPAVLHAKLLAAPRGTTGTDAAVHAATTNAYVALLRVLNSQITALKDNLTAQLATHPDTHIYASLPRARTLRVARLLAEIGDSRGKFPTADSLAALAGVTPSTRQSGKVKAVTFRWGCNKQLRDALCDFAGDSRHDNPWAADLYNRAIARGHDHPHAVRILARAWAHIIWRCWHDNLSYDPTQHRALQNLLTNTANKAA

SEQ ID NO: 254672 - protein, 418 aa, unidentified
MTATRSIAPTLLVAIDISKHRHDVLIGIPGKTRRRRLTVLNTLEDFQRLSATLASYGLPVRIGFEATGNYHRALAHHLGRAGFELKLVSSIGLARTREALHNSWDKNDPKDAQVILHMLEIGAVQFFHDPLVVGTADIQELSKTHEIVSRSKTELWHRILTHYLPLYFPEAERFHRSSRTDWFLAFLEKYPSPHMVSAMSREAFIADAWEVVGRKVSKEQLLSDIYATAVDSVGLPVHADSDAVRMFRLVLAEGRSLVRQRDEIEARAVALLSDLSDYQLLTTIPGIGPINAMTILAEAGDLRRFRHHRQFLKFCGMDLATVQSGMFRGQSRISKYGNARLRRTLWMAGQTAVLKRTNSFRDKFERYISKDRHNAHLRRKAYTAIAAKMARTVHAVVNHGEPYRPFFEGVSPGGRTSL

SEQ ID NO: 254673 - protein, 350 aa, unidentified
MDQVSTIGLDTAKRIFQVPGVDEAGAVVLRRQLRRSEVLKFFAKLPRCVVGMEACGGAHYWGREIAALGHEVRLMPPTRVKPYVKWGRKSDKVDAAACCEAVTRPSMRFVPLKTVEQQAALMMHRARQLLVEQRTRLGNAIRGHMSEIGIIAAKGGAGLGALVAFIGNPEDQHLPAVVRTILVPLVEQWRSAGAQIAELDRQILAWHRNNADSQRLETIPQYGPILSSAMAATIGDAARFDNGRACAAWIGLVPTQNSSGGRERSGGISKTGDRYLRQLLVIAATGMVRRARAHPEDHPWFAGLLERMPPKKAAVALANKLARIGWAVLRHQTPYRARRPTAVAPALEAA

SEQ ID NO: 254674 - protein, 429 aa, unidentified
MSYRIAGIDVHKKMLAVVVSNVEVESEFQFERRMFGGNPEQLRLLAAWLLEQEAEEVVMESTAQYWKPVWGTLEKYWKPTREKREGAKQRSGTLHLAQAQSNRGRRGRKKDFVDAERLVKRLVARELTLSFAPDAEQRLWRAVTRKKYQLRRDLVRLNNQLESLLEETHIKLSSLVSDLLGVSSRRMLKALADGETDPAALAALAHQRLRATPEQLCDALGACTDLKPVYRRLLKMTLEQLQLLEQQIGQLDQELATLLHPHQDAVHRLAEVPGFGVDSAQQIIAEVGPTAATFPSEKCLSSWVGACPGDEESAGVNYSHQSPKGNRHMRRLLNQAANAAVKVKGSIFEVVYRRCVPRLGHNQAIGVIAHRQCRLIWLILHNGAIYDERGPAVTMQSKYKRTWRMIRQLRQLGYRIDPPNLQPSQAQAR

SEQ ID NO: 254675 - protein, 383 aa, unidentified
MKKNSIAKLQANKSQIRKMAAKQKLTVGLDLGDRTSRYCILDGAGNKVGEDQLPTTKVGLDSLFAKMAPSRIALEVGMHSPWVSRQLAALGHEVIVANPRKVRLITQSVKKNDRMDAEHLARLARVDPQLLAPIRHRGVEAQADLAVIRARAELVEARTKLINAARGLAKPMGERLKSCDADYVKESLADGLGEATQNVIRPLLKSVEDISQQIGVYDKKIREVEKRYAETELLKQVHGVGTLIALTYVLTLEDAERFEHSREVGPYLGLTRKQRDSGDRQPELGISKAGDELLRRLLVQAAHCILRDGAPDSDLKVWGMTKVQTGAKTGNGKKGSKRRKKKAAVAVARKLAVLLHKLWVTGEVYDPQYNRKAVEAGKGKAAA

SEQ ID NO: 254676 - protein, 365 aa, unidentified
MKQSTTFVGLDVHSTSITVAVLEPGARQPRISQIQNDTKSIRRTFQRLKRGTSLRCCYEAGPCGFELYRQLTAMGIHCEVIAPSLVPKKPGERIKTDRRDAAKLARLYRAGELTAIRVPTEDEEAVRDLIRARDDVRRDLMSARHRLSKFLIRHGRIYSQGAKWTQRHWHWIRDQAFDRRAELAVFEHYQLQVHLLLERLAALDKEIAAFAETPAYRDDVARLSCLRGISTLSAMTLIAELQDFRRFEHPRQLMAYVGIVPSERSSGQKRRLGAITKTGNTHARRILVEAAWSYRRRPARGPQARRLFEGQPPEVIALVQKSQTRLFGRYRHLVGKGKRSQVAVTAVARELCGFVWALMNHDHAA

SEQ ID NO: 254677 - protein, 366 aa, unidentified
MKKTSTVRVNGNMIFKGHNLTIGLDLGDRWSFYCVLDEAGQIIVEQKLPTTPEAMKQTFGKIPRSLIALETGTHSPWVSRLLTELGHKVIVAHAQKVQLITKSSRKDDRHDARTLARLARIDPELLGPVRHRSAKAQIHLTVIRARAELVSARTALVNAARGLVKSYGERLPKCGTYQVSEKLADGLSAELREVLVPLFKEIESLNERIKEYDERMEKIAKEVYPEVSLLKQVKGVGTQIALTYVLTIEDPYRFPKSREVGCFLGLRPGRRNSGESEPQKGISKEGDRYLRTMMVQGAHYILGPFGEDSDLRRWGLKLAERGGKNAKKRAVVAVARKLAVLLHRLWVGGEVYEPLRNSQKAIREVA

SEQ ID NO: 254678 - protein, 322 aa, unidentified
MTQENRFVGIDVSKAQLDSAVRPTGERWTSPNDEPGIAVTVKRITAMGSTLVVLEATGGMEIPLAGALTAAGIAVAVVNPRQVRDYAKATGRLAKTDRLDAEILARFAEAVRPEPRPLPDAASAELAALMGRRRQLIEMLTAEKNRLGSASRRVRQNIQVHINWLERQLSQLDRDLGDLIQNSPIWREKDDLLQSVPGVGPVLSLTLLANLPELGTLNRRQIAALVGVAPLSRDSGTLRGKRTVWGGRAVIRQVLYMSALIATRFNPVIRTFYQRLCKAGKAKKVALTACMRKLLTILNAMVKHKTPWRRTPQAQPAGTGKA

SEQ ID NO: 254679 - protein, 389 aa, unidentified
MKIYLGIDIAKLNHFAAALSSDGEIILELFKFTNDADGFQLLVSKLESFDKNSIIIGLESTAHYGDNLVRYLVAEFYQVCVLNPIKTCQMRKNNIRKTKTDKVDTYVIAKTLMMQDDLRFVSFYDLDMMDLKALGRFRQKTIKQRTRLKIQLTTYVDQVFPEIQYFFKSGLHQNAVYALLKEAPSPKEIASMHMTHLANLLKVNSHGHFTKEQAKELRVLAQKSVVANDSAISIQITQTIQQIELLDSQLEKIEAEMTDIMKFNDSVIMTIPGIGYINGGMILGEIGDIHRFSNPNKLLAFEGLDPSVYQSGNFQAKTTRMSKRGSRVLRYALVNAAWNVVRNNATFKAYYDAKRAEGRSHYNALGHCAGKLVRVIWKMLTDKVEFNLE

SEQ ID NO: 254680 - protein, 422 aa, unidentified
MVLKGVPMALKIVYQICCGIDVHKTFVVACIASTNKQGVTIYKRHRFSTFTQGLKELLQWLLDNHCKDVCMESTGKYWIPIYNVLEKDCNIVLAHPKYVKAIRGKKTDKKDAKWIADLFKHDLVAGSFMPPADIRQLRDLMRYRFKLTCFMSSEKNRLQNCLTVSNIQLASVVSDTFGKSSQRILDKILENPDDTSFDIEPLIHGSMKKKLPELELAIDGFITPEQAGKLKVIKKHFEDLESRKAELEKLILALASPYQQELDLILTAPSFKNKFTAIGIISEIGVSMEAFPSAKHLCSWAGLTPTNNESAGKKKSVRVSKAGCYIKPLLVQCANSVVKSEKHPEIRNRYLRLRKRRGHKKAIIAIARMLLTALYNMLKNKEPYNAELYRKSDALPVNREITIEQAILIAQFQGYKIKSAAE

SEQ ID NO: 254681 - protein, 326 aa, unidentified
MQGKESSEQKTKVKSSAGVDVCKSWLDAHVLPEGCSLRVANDARGHRQLKKWLTEYDVSLVAIEATGKWHRQVHRMLHGNGFRVAVVNPLRARLFAEAIGLLAKTDRLDARMLALLAVSLSPPARPPMAQAVEALQELIAGRAGAVAEQTALENQLAAANTTFLRRQLKGRIERIAKDIASLQTEIERRIGCDEALARRYAILLSIPGVGPITAATLIAGMTELGTCSAKQIAMLSGLAPVADQSGARDGQRAIRGGRAAVRRVLYLCALSAKRCNPAMSALYDRLITAGRPHKVALIAVARKLIVLANTLITQNRSWQSQPPIHA

SEQ ID NO: 254682 - protein, 422 aa, unidentified
MLGVGIDWAEAFHLVALGRPAEGVIEIRRVEHTPAAVNQLIAQIATLEPDPAEVRVVLETRHGLLVERLVDAGYTVLPVNPDLVARRRGPARKKDDAEDARIACLLALDRHASLRPLIPHGERAAELRAIARDDERAARDQRRLLNRLRQDLISTFPAALAIAGDDLGAPTMLRLLERWPTRDQLASASHQELVAFARAGRHGWPDRFADRIAQALAADHFTPRDYLVRAKADTIRLAATQLLAIDRQRRVWERRMGELLLGAPRHRRAHQPRKDEPGQALPGGKVYLSFPGLGDRLAARVAGEIGDHIDQYQSPNALACYAGKAPVTRRSGKSELVVATRLACNRYLADAVQQWAFCSLRCSGWAREFYDRQRARGKTHHAALRALGNRWLEVLWHCLMRGQLYDEATHIANRNRAQGKAA

SEQ ID NO: 254683 - protein, 354 aa, unidentified
MAVRVPSYPNLEAPMLHVGLDIHTTRISICVLDERGQVVHRSQVRGIEPMLTILKGLPDRFEVCYEASCGYGHYHDLLRPLAVRVVVAHPGQLRLIFRSKNKNDRNDAERLAKLLYLGETPTVHVPSPDVRAWRELINYRAHVIAKRTRAKNTVRALLRSAGVVPPKNPGLWTKKGLAWLRQLELPTASQRLRRDLLLSEIEILVAQVKRIELELNRQARRSPAVARLRTIPGVGARTAEAVAAFVDDPHRFGTAKAVGRYFGLVPCQDQSGDRNRLGHITREGPPVVRQLVAEAAWQAIRRSPSVRAFFERVQRDDPQRQKIALVATAHYLVRVMWSMLRHGTTWQEKRPPAA

SEQ ID NO: 254684 - protein, 354 aa, unidentified
MNPIIGCDAHRRYSLFAVLDTSTLSAEQTRFNHHPGAIREFLSDYPEGTPVAIETVGNYYWIVDEIEQAGCVPLLAHAAKAKVIMGNINKTDKLDAKGLATLVHLGSLPTVWLPPGEIRDERELHRTRMAFCKPRTAFKNRIHSTLAKYALNTSEHSDIFVGKGRAWLNRTLKKLPPETGRCLEQELNLLDITMEQITVLEERILERIQFTPDMQRLKTIPGVGNILAIVIEREIGTIDRFPNAGHLAAYAGVVPKVHSSGGKTRFGRMRKQANNYLKWSFIEAANVVVAHRHHPSWRQKKVTLVYERICRRKGHATAVGAVARHLAESTFWILKKGEDYVDPALRRQGSPKQA

SEQ ID NO: 254685 - protein, 354 aa, unidentified
MSQKLSAAIAAIGIDIGKNSFHIVGHDHRGAIVLRQKWSRGQVETRLANLPPCLIGMEACVGAHHLSRKLQMLGHDARLMPAKYVRPYSKGQKNDFRDAEAIAEAVQRPTMKFVATKTADQLDLQALHRVRDRLVGQRTGVINQIRAFLLERGIAVRQGLRSLRSELPGILATRTDVLLPRMLRIIEDLAGDWRRLDERIEGLSSEIETLARQDKACERLMTVPGIGPIISSAMVAAIGTGDVFSKGRDFGAWLGLVPKQISTGDRTILGKISRRGNRYLRALFVQAAWVVLVKVKCWERYGLKSWIEAAKKRLHHNVLAIALANKLARIAWAVLNKGRAFECVKTEETASLPA

SEQ ID NO: 254686 - protein, 346 aa, unidentified
MKILALDLGNYKSVACIYETTSLSHRFTKVVTTPKAIHDLLVEEEPDRVVIEICPLAGWVSDLVRALGIELEVASTTHDAWRWQNVKRKNDRQDGLKLAQLSALGQLTLVHVPEQGVRQWRALINYRQRLVSRRTKIQNHIRALLLRQAVAMGSGHRGWTRAGIAQLEGLAKPLNEVEREELWRGELGLELEGLKALAEPLRQVEQKLDELGAADAQVQLLRTIPGVGPRGAEALAAVIDKAQRFKRGKELGAYLGLVPKQIQSGESNRLGRITRQGNRLLRSLLVEISWSGLRYNSWMRSVYERVRRGSKARKKIAIVAVARRLLIRCWAMLRDGTTWRLANSGA

SEQ ID NO: 254687 - protein, 363 aa, unidentified
MIYSLGVDISKVDFSACLQSYQLDSQSYQVISRKTFKNKPSGFKACMSWLARHTRNKPAPVRLTMEATGVYYEAFALYVREHHGHIHLSVVLPSQSKRYIESRGLRSKTDKIDAYGLALMGAERKLDAWKGIDPFWRTLRVYTRTRADLLEQRTQLRNQLHALDHSGMDILKAEQALRECIQTINDQIDELTKLIEQQLRSRNDLRTQIGCLRSIPGIGTLSIACILAETNGFAAFSKISQLISFSGYDVKIKESGRWAGKPKLSKQGSKHIRRAMYMPATAITRRNEGPIVEFYHRLLATHNIKMKAHVAVQKKLLTYMYILWNRNEHFDPDIIRKQRKEHQKKVAPPESEATVDTSLVLSQ

SEQ ID NO: 254688 - protein, 371 aa, unidentified
MKQFIKYVGLDVHKETIAVGVAEPNAEEVRYFGQISNTPQSVEKLVNQLRKGGAHLSFCYEAGPCGYGIHRQLSDLGWDCQVVAPSLIPKKAGERVKTDRRDALSLARLHRAGELTAVWVPDGAQEALRDLTRAREDMKHLQRQAKQRLLAFLLRHGKRYDGKSKWTQAHTRWLEGVKFEQATQQIVFQEYVDTVVALSKRLDGLDGHLQRAAGESVFWPVIEALMALRGVNLLTAATIVAEIGELKRFASAPQLMAYLGVVPSEHSSGPKQTRGGITKTGNGHVRRVLVEAAWTYRHPARKTAVLQRRAERTAEVVQDIAWKAQKRLCARYRTLEARGKLKVQACTAIARELAGFIWAIGQVMPQPAAKA

SEQ ID NO: 254689 - protein, 422 aa, unidentified
MHHLNDRQYTAFIGIDWADTKHDICLQAADSEQREFDCIPHQVEHIEEWALSIQQRFGGSIAVALELSKGPIVYALQKYGFFVIFPINPATLAKYREAFTPSRAKDDPTDAELALDLLLRHPDRFKPLAPQSVEMRTLGALVEQRRLLVNDKIRITNRLRNALKQYYPQVLEWFVHIDTLLFCDFITRWPTLLQVKRARKNALEKFFHAHNMRRAHLLETRLQAIKLAAPLTLDEAVITPHKLLALVLTEQLRVTLQAIRRYDDAIAELAPQHPDYALFSPLPGAGPSLAPRLMVAFGEQRDRFASAADVQKYSGIAPVTERSGKKNWVHWRWQCPTFLRQTFTEWAAQTINKSYWAGAYYRQQRGRGCTHQAAVRALAFKWIRILYRCWQDRTPYNEATYLKALERRGSPLLNPPEMVEVA

SEQ ID NO: 254690 - protein, 343 aa, unidentified
MQITTIGLDLAKHVFQVHGIDADGHVVLRRRLRRAEVIAFFSSLPPCLVGMEACSTAHHWARELSALGHDVRLMPPTYVKPYVKRGKNDTADAEAICEAVTRPTMRFVPIKSAEQQSVLMLHRTRDLLIRQRTMLANSLRAHCAEFGLVVAQGMAKLAELLARIADESDNRIPSLARGCLLVLAQQLQELQLKIGEVERALHAWHRSSEVSRRLETIPGIGPITASALAVTVADPTLFCSGRHLAAWLGLVPRQNSSGGKARLGSISKQGDRYIRRLLISGAHAVLQHAKQDRPGSAAWATSLLQRRPFKLVAVALANKTARIAWAVLARGETYRSAPEARAV

SEQ ID NO: 254691 - protein, 348 aa, unidentified
MIVIGCDYHPSWQQVCWMDTLTGETGEQRLEHASGEAERFYRGLPGTALIGMESTGNCQWFVELLMTLEQEVWIGDAAKIRACEVRQQKHDRRDAALILKLLLEGRFPRIWVPSSQERDLRQLLIHRHKLVRMRVQVKNELQHLAMNQGITKGRKLWSKAGEKALCELPLQPWASRRREDLFKLREMLQAQIAPLEEAVRKAAEENEKARLLMTHPGVGPITALAFVLTLGDVSRFPRGKQVASYLGLIPREYSSGGHQRFGPISKQGNRFMRMLLVEAAQSAVRHDPQMRSEYLHRCYRRKKGIAKVAAARKLAVRLYWMLRTNTKYPEIVRVESSSRVPLAVPQAG

SEQ ID NO: 254692 - protein, 344 aa, unidentified
MSEVSIIGLDIAKHVFHAHGADERGRAILSKRISRGKLLDFFAAQPRCMVALEACGGAHHWARQLTQLGHKVRLIPPAYVKPFVKRQKNDAIDAEAICEAAQRPSMRFVAVKSEQQQAAGLVFRTRDLLVRQRTQLINAIRGHLTEYGWVAPKGPSHVAMLADLLEKEEMVNSLPEAARAMFRVMLDLLAGLNSKIADLDKEIARRAREDEVSRRLMTVPGIGPISATAIAALAPPAETFAKGRDFAAWLGLTPLQRSTGGKQKLGATSKMGERTLRRLLIIGSSAVVKQASKRGAPRGSWLEQMLARKPRMLVTVALANKMARIVWALLVKQENYRAPVAAKA

SEQ ID NO: 254693 - protein, 315 aa, unidentified
MTESESIKVSVGIDVSKSRLDIAIHETAESWCCSNDASGAAALVPKLRQLKATRIVLEATGGFETLVTAMLSAAGLPVIVVNPRQVRDFAKATGQLAKTDRLDARVLAHFAAVIEPPLRPTQSDQAQHLEALLARRRQIVEMLVAEKNRLANHRDHAVVKDLKTHIAWLERRLKASNDELQRVLKATPAWRERDDLLRSTPGVGPVLSLTLLAQLPELGQLNRREIAKLVGVAPFNWDSGKWRGSRHIWGGRAAVRAPLFMATLCALRINPTIKSFHQRLIKAGKAPKVAITACMRKLLTILNLMIKTQTPWRIA

SEQ ID NO: 254694 - protein, 369 aa, unidentified
MTSMPQSDVEGGDATADNVVVLGVDTHKDVHVAAVISMLGVFLASQSFPTTADGYEQMLAWARTFGTVRQAGVECTGSYSAALTRYLRAHHVSVIEINQPDKAARRKRGKTDAVDAESAARAVLSGRATSIAKTSDGPVEMMRMFKLAKTSALKARTQAINQLKAVLVTTEPALRESLAGLSRWMLIRRCAELDTTDPQDAVAAAIYTLRLLGQRILRLGEEIRELEQHITTAINTCAPALLHRRGIGHDSAAAHLLAAGDNPERLDTEASFAALCGTSPIEASSGKTQRRRLNRGGDRQANAALYRIVLTRLRCDPSTQEYLQRRLAQGKTRREVIRCLKRYVAREVYPLLRQVWTTPESTPSPLDKT

SEQ ID NO: 254695 - protein, 355 aa, unidentified
MSQEKYIGMDVHQATVSAAVRDRNGNLLMECILETKAETLLEFVQGLHGTLSLAFEEGTLAAWLHDLLKPHVNRVVVCDSRKAALLRDGNKSDRSDARNLSELLRTNQLKPVYHGEHGLRTLKELGRSYLTVSKEMTRTMNRIKSLYRSGAIPRPGTTVYAPRYRRQWLAKITEPGARMRAEHLYEQLDHLQPMRVRARREFLQESNKHDAVKRLRQIPSIGQIRAALLVALLQTPHRFRSKRQIWAYSGFAIETHDSGEYRYVRGKLQRNRERITVRGLNRNHNPDLKNIFKGAAISASSRPGPLQDFYETRVAMGMRPTMARLTLARKIAAITLTLWKKGANFDPQQLSRQAA

SEQ ID NO: 254696 - protein, 369 aa, unidentified
MPRIAERPLPVTGGVDTHADMHVAAVVDQVGRVLGTEAFPATAAGYRAARAWMSSQGELAKVGVEGTGSYGAGLARYLVACGVEVVEVIRPNRQARRQRGKSDAADAVAAALAALNGEAAGVPKSRDGAVESIRMLRVARCGAVKARTQAGNQLRDLIVTAPEQVRQQLAGLPRQRQVEAAARFRPRDLAGPCEGARAAMASVARRHQALTAEIARLDAALSDLIRHTAPQRLLARNGVATQVASALVVTAGDNPGRVRREASFAALCGASPVDASSGKQIRHRLNRGGDRQANSALWRIVITRMAHDPRTQAYLARRTAEGKTKKEIIRCLKRYVAREVYKALINPVRPAAKPPATEPEQDRLAQFLT

SEQ ID NO: 254697 - protein, 318 aa, unidentified
MPESLVVGIDIAKLTFDAAIGVAGHIETFPNEDSGHDALLAELAGQAVDLIVMEATGGLERDLACALQAAGFAVAVVNPRQARDFAKAMGHLAKTDRIDAKALAELAQVLSRHPERERFIRVLPTPEQQTLHALAARRRQLVTMHVAENHRLSSSHAAARKSIEAMIQAIRAQLDDVEADLARHIERDHADLAKLLASVRGVGPATTASLIADVPELGRLSRREISALIGVAPFNRDSGQMRGKRAIFGGRGQVRCALYMATLAAIRFNAVIKPFYVRLVAAGKPKKVAIVACMRKLITILNAMARTGIPWNESLHAS

SEQ ID NO: 254698 - protein, 397 aa, unidentified
MYIVGIDIAKRKHEAAVIDGEGTVIIKPFSFTNNCSGYNRLLAMLTKAKLPLDEVSFAMEATGHYWLALFTRLQKEGFRVQVINPVQTNSIRNFYIRQAKTDPRDALLIAEVIRFGHFSESTLHPENIYELRELCRGRHAIVSMQADVKRKVVALLDQVFPEYETAFTNMFGDTSMAILQTCPTPKELSEMPLEELCHLIEVSSHKRFRMAKAQELQALARNSFGFAMAGDVFSTMIRLYAKHLDFLKQQVREMDRKIAEIMDSLDTPITTITGIGPTLGAYILSEIGDISRFSSAAKLAAYAGIDPTMRQSGEYNGVRNRMSKRGSPYLRHAIWLAASSAVLHDPALKLYFQKKRDEGKPYMASVGHACRKMVSIIYAVMRDNKAYTPCIPNEISA

SEQ ID NO: 254699 - protein, 412 aa, unidentified
MEVLYPHCAGLDVHKNTVVACVRHTVDGTIKREVRTFKTTTKELLALSEWLAAEGCTHIAMEATGVYWKPVWHILSDGDFALVLANAAHVKNVPGRKTDVNDATWLADLLAHGLIRGSFVPDQQTQEMRDLLRTRKQLVRERSRHVQRLQKTLEDANIKLDSVISDVMGLSGRKMIEALIAGESDPEQLAQLAHRRIKATPEELCEALRGRVTRHHRFLLGVHLQQIDAIDAAINTIDQEIDAHVEPFRDTVLLLTTIPGVDELGACVILAEIGRDMSRFPTAGHLISWAGLCPRNDESAGKRRSTRMRKAAAWLKTTLVQCAWAAARKKASYLQAQFHRLRARRGAKKAIGAVAASILTAVYEMLKTGALYEDLGSHHFDRCGKRRQIHRLVSRLHNLGYAVQITPLPADA

SEQ ID NO: 254700 - protein, 352 aa, unidentified
MEKRMTIGMDLGDKKHVICVLDAAGSVVKREAITNSKAALGKFFKEYAGSLVVVETGTHSAWISRELESLGCEVLVGNARKLRAIWTSKNKSDVHDAEMLARLGRADRALLHPVHHRGPEAQQDLAVLKARDMLVATRTDLVNHVRGAVKGMGFRIAKCSTDAFAQRAKESMPKELLPALLQLLKQIEAMTVAIRKYDKQIARQVEKRHGDAEQLRQVPGVGPVTSLAFVLTLEESGRFKKSRSVGAYLGLTTRRDQSGETDKQLRITKAGDGFLRRLLVGCSHYILGVHGPDCELRRFGLKLAARGGKNAKRRAIVAVARKLGVLLHRLWVTGEKYDPEYMKSRMTREEAA

SEQ ID NO: 254701 - protein, 343 aa, unidentified
MGEVSTIGLDIAKSVFQVHGVDDTGAVVMRKRINRSKVLQFFDELSPCLVGLEACPSAHYWSRELQALGHTVKLMPPNYVKAYLKRSKNDANDAAAISEAVARPSMRFVPIKSEQQQSGLMLHRTRQLLVRQRTMLSNAIRGHMAELGIISAKGRNGTAELLQIIGDVADDRIPPVARFCLDLLARQYLSLSAEVASIDKRIHAWHRCCEESRRLEEIPGIGPIVATALVAEIGDWSTFRSGRNLAAWIGLVPKQHSTGGKERLGSITKQGNRYLRWLLVAGAMAVIRYARQHGTKRAWLTRIMDRRPTKVAAVALANKIARMAWAIMVHGERYREPKLLLAA

SEQ ID NO: 254702 - protein, 355 aa, unidentified
MSQTPNTAIAVIGIDIGKNSFHVVGHDARGAIVLRQKWSRGQVEARLANIPPCLIGMEACVGAHHLSRKLASLGHDARLMPAKYVRPYSKGQKNDFNDAEAIAEAVQRPTMKFVATKTAEQLDLQALHRVRERLVSQRTGIINQIRAFMLERGIAVRQGIGFLRMELPTILATRTDALSPRMLRVIEELAGDWRWLDQRIDGLSGEIEALARQDQACSRLMTVPGIGPIISSAMVAAIGTGDVFSKGRDFGAWLGLVPKQISTGDRTILGKISRRGNRYLRVLFVQAAWVVLVRIKNWERYGLKSWIEAAKRRLHHNVLAIALANKLARIAWAVLAKGRGFELTRTGDAGVVQPA

SEQ ID NO: 254703 - protein, 340 aa, unidentified
MNVTTIGIDLAKSVFQLHGVDAEGEVVFRKKLRRSGVLDFLRDLPPCLIGLEACATAHFWARAIAALGHEVRLIPPAYVKPYVKRQKNDAADAEAICEAVTRPTMRFVPVKGAERQGVLMLHRSRDLLMRQRTMLLNAVRAHLAEFGLVTAQGPHRLRDLIQAIEAGDGPDLPAMARAALTSLANQLATLSDEIRRLEHQLIAWHRADETSRRLETIPGIGVITATALAASVPDPAVFRNGRQFAAFLGLVPRQNSSGGKLRLGRISKMGDGYLRRLLVVGATALVRRAGRNPTATGAWMRGLLARKPARLVTVALANKTARIAWAILAHGGTYRAPRIA

SEQ ID NO: 254704 - protein, 324 aa, unidentified
MLPTLGIDISKDSFHLELSINDKLRHRKFANRKEGFGELCVWLVKHKATQVHACLEATGPYSEALAIYLHQQGHTVSIVNPVQIKAFGQSELRRNKDDRPDAGLIRRFCEKQRPDPWTPPPVHLRELQALTRHLENLIETRQQQINRLEATNTKNVAKSLRKLVAHLDAEIKRTEQQIDDHVDRHPDLKQQSVLLESIPGVGKRTAAKLLAEITDISQYKSARQVAAYAGLTPRNNRSGTIRGKTRLSKTGNARVRKALFFPAIVAKRHNPIVRAFCERLSSYGKNKMQVIGAAMRKLIHIVFGVLKSGKYFDPNHELLLNSVS

SEQ ID NO: 254705 - protein, 340 aa, unidentified
MQKEKKCYLGIDVSKSWFDLSVITVVNHQKQGMLTERFHNTAAGLKTMDKWLKENKVPMDENSLLVIENTGVYHRLIWQYCSEHNLPLYIGNAAHIKWSLGITRGKDDKTDSKRLCDYCYKQAEDLKSTPALDSVLMQLKDLFTARTRLKSQGNSIKVYLNELKLSNNKEVQAFMEKAHRSAKEGIKKSLKAVEDQIHKILRDKPELKKNYELLLSVPGIGHVTAVYMICCTNNFAGNISGKQLASYCGVVPFRNRSGSSIKGKDKVHKMANKDLKKLLHLGARSAATHNKEYRQYYERRISEGKHDLSVINAIRNKIVLRAVAVIRNQKKYVNNYQDAA

SEQ ID NO: 254706 - protein, 458 aa, unidentified
MYRELIPLRQALSLELKANLPPDLPGLDLEHLLQAYLNQLTMYTGTDVADQTFSLFAVDAAGNELGHLLDVPNTPAGFEVAWAWLEDLRCQHHLRITLLAVETTGVYYWAWWDFLAGRPNLARVLYNPRTTDSMTDVLSKKVRNELVDAYALAEQARLGGTPEVILTEDPDLLSARFCSRAARDLAQQINRKKNQLRALLRAYNPALGQVFPEAKLHHPAVYALLQHYIFPDEFVTAGVDAITTILSQHCRTAFGPQHARQLVALCAQTLTHPIGRPPIHQRVQQLTRDILSDQQHQQDFLHTGYALIQHRSEAQLLQTTSGAGISNTLALVSEIGDFCRFPDGEHMASFLGLTTSKHISGTTLFQSKHITKQGSPNGRYAAINLAHHLTRYVPKYQQMYERIKNRKPPHKGHFVALVAVARDFVANVLYDMWRNQRPFFEQVEDYRAYRQAHPRSDD

SEQ ID NO: 254707 - protein, 339 aa, unidentified
MKLFVGIDLHGSNNVTVIRDETGHNHLKKRLKNELELVLNQLAPFKEQIVAIAIESTYNWYWLVDGLMDHGYPVKLANPAKIQQYNGIKHTNDMSDAAFLAELLRLNILPTGYICPKETRHLRDLLRKRLLINRQRVAHILSFQGTLQRNLPAFMKAQEIKKLEEGDLDGMFDNVHLSLSAKKSIAIIQFLSKELKEMEQVINQSTGKIDIHRDLLTVTGIGKTLAASITLETADISRFPAVGKYTSYCRLVNSNRISNGKKKGENNRKNGNKYLSWAYTEVAQFSRQWCPQAKRFYQRKLAKTNKMVAQRALAHKMARACYYVMKDHVPYDPVRAFGH

SEQ ID NO: 254708 - protein, 460 aa, unidentified
MSQRRKKQKRAGQGGGAVPSLSCIEPNAAGIDVGATEIFVAVPQDRDPSPVRSFETFTEDLQRLKNWLQQCGITTVAMESTGVYWIPLFQILEKAGMEVCLVNAQHVKHVPRRKSDVIDCQWLQYLHSVGLLRASFRPEQRICAIRSLLRHRDSLVQMAAAHVQHMQKALTQMNLQLHHVLSDITGQSGLAILDAILAGERNPAVLAQLRPARVQASEEIITKSLVGDYQREHLFTLRQSLQAYRYYPSLITACDQEIEEQLQNLDSRTPPDASPLPPERYPHRPRKNEFRFDMRSELYRIYGTDLTAIPSINALTGYTVLAEVGTDWSKFRNGDAFASWTCLCPQNKKSGGKILSAHTRRSASRVNRALRLAAQTLERSTSYLGAYYRKMRARHGAPAAITAAAHKLARIIFHLVTTREAYDESLFAAEEQRQRKRMENKLKRTAKQLGYQLIPLGQTA

SEQ ID NO: 254709 - protein, 355 aa, unidentified
MSQEKYIGMDVHQATISVAVMDGNGKLLMECLRETKAATILEFVQGLRGTLSLTFEEGTSAAWLHDLLKPHVSRLVVCDPRKAALLKEGNKSDRIDARKLAELLRTNQLKAVYHGEHGIRTLKELGRSYLTVSKDVTRAMNRIKSLYRSWAIPCPGTTVYAPSHRLEWLAKIVQPGVRVRAQHLYEQLDNLQPIRQQARRELLLESHKHPAVKLLRQIPSIGPIRAALLVALLQTPHRFRTKRQLWAYSGFAVETHDSGEYRYVRGKVQRNRERITVRGLNDNHNKDLKNLFKSAAISASTRPGPLHDFYVARVEKGMRPTMARLTLARKIAAITLTMWKKGVSFDPQQLSRQSV

SEQ ID NO: 254710 - protein, 412 aa, unidentified
MSNPLLVGVDVHRKTNTICLMNRDGQEVSQRFSTQNNRQGTAALAKAIDALATEEGCDAIQIAAEATGWYWWHFFQALDQDPFLSQRPLALYSFNPRITANFKKTYSDLDKTDPIDAFVIADRLRLGRDLPHPFSYDGPYMVARLLTRHRFHLIHNLVREKSYCLAHLYLKASEYTRLKPFSNIFGITSRAVIRDYPSIEEIAAIPFDQLVEVIDVKGKRRFADPEDNARKLQAVARDSYPLPSALHNPVNLILRQSLQDITHLERQIKRTETAIAQAMQSIPHTLDTIPGIGPVFSGGIISEIGRLQRFDFDQAKVANFAGLKWRKTQSADFQAEETRMTHKGNRYLRYYLCEAANSVRRRDAEYGAYYDRKYHEVRKHQHKRAIVLTARKLVRLVVRLLTTNQSFQPRRP

SEQ ID NO: 254711 - protein, 402 aa, unidentified
MNCVGIDVSKGKSMIAVMRPFGEVVVSPFEVRHTANELSELAGLLKSLDGETRVVMESTGNYHAPVAWLLHGAGFYVSVVNAMLVHDYGNNSLRRGKTDKKDAVKLANYGLDHWLTLPRYVPEEDTRLMLKTCYRQYQQYSKVQTMLKNNLISLLDTAFPDANRLFTSPPRADGSEKWVDFVATFWHCECVCGLSKKAFTAKYQKWCRKHGYNFSQDKALDIYASACGRFGVMPKTNTAKLLVEQAISQLQTTSAALAALKQEMQSLAASLPEYPVVMEMFGVGPTLGPQLIAEIGDVRRFHSKKALVAFAGIDAPPYQSGQIDVRSRSISKRGSASLRRTLFLVMGVLLQCAPMDEPVYQFMDKKRSEGKPYRVYMMASANKFLRIYYASVKAYLDSLEHD

SEQ ID NO: 254712 - protein, 331 aa, unidentified
MFPVGIDVSKNTLDLCMLYDGIKGRIKTRNIQNNRHSVENILRWLRLQHCSPEDVHVVMEATGVYHERLATELHDAGFRVSLANPHRSREFARGMGIMTKTDKVDAYMLACYAFLKKPHRWEPPAPEIRYLGALLRRRDVLLGDALREENRLEKYLSTDTPADIISSCRRMAQLLREEVSNIERQIKAHIKASPALRRDYTLLTSIKSVGPQLGMHMLVVLRSHNFVSAEQAAAFLGVVPIEKRSGTSVRRRPRMSKIGPPQLRAKLYMSALCGKIYNKRMRNIYDEMCLRGKPKMVAIGALMRKLVHWCYGVLKTGTVFNDESLKQVLST

SEQ ID NO: 254713 - protein, 434 aa, unidentified
MTLINFVAANQKYYAFNLLSVFIMVFWSVQYLLQHLLVQTQLSAQLLQPLILILQLPQPPQFRYARPGKFFLPVNGMDYLLPLRLTVRNVLTRRITMNIVFLGIDLAKNVFQLCGLNQAGKPVYTKRTGRKELLQTLANIPACLIGIEASTGAFYWQREFEKLGHKVKVISPQYVKPFVRGQKNDGNDAQAIAVALMQPTMQFVPPKSPEQQDIQALHRARRRIVNHRTATVCQIRGLLLDRGIPIGSAVSRARRAIPLIPEDAENGLSSRMRRTIAELYDLFNDLGRRIHFFDKEIETVFRQSEACQRIAKVKGIGPETATAVVAAIGKGTEFKNGRHFAAWQGLVPRQHSSGDRQVLMNMTKKGDKHLRTLFIHGARAVVRVATNNNDGHMNQWVNQLKERRGFNKTTVAVANKNARIIWSMLRNETEYQVV

SEQ ID NO: 254714 - protein, 343 aa, unidentified
MQAVTTIGLSIAKSVFQVHGVDAIGNVVIRRQLKRRYVLAFFQKLAPCVVGIEACATSQHWSRELKAFGHTVRLMPPAYVKPYVKRQKNDAADAEAICEAVTRANMRFVATKTPGQQSCLMLHRTRHLFVRQQTAVINAIRAHLAEFGVVAPVGRRGVAELLDVVVDSSDERVPEVARARVAALGAQLRMLKAQILEFDRQIMAWHRSNETSKRLDEIPGVGPALATALVAGVADPKAFRSGRNFSAWIGLVPKQHSSGGKDRLGGISKQGDRYLRSLFTAGALAVIRYARIHGTKHRPWLAALLARRPTKVAAIALANKIARIAWAMMTKGERYKEPAALAA

SEQ ID NO: 254715 - protein, 412 aa, unidentified
MQTVIERGCGLDVHQATVVACLLIVRKDGKVQKQMRTFGTTTRELVGLREWLLSEGCTQVALESTGVYWKPIYAILEGALEIVVANAQHIKKVPGRKTDVKDAEWIADLLCHGLLRSSFVPPKPIRELRDLMRYRRKLVESQAAERNRLLKVLETANIKLASVATDVFGMSGRLMLRALIAGKATPQEMAELAKGLLRKKIPELQLALEGKLEEHHRFLLELQLQRLEAAEKDLAALEQRIQQRLEPYAAQLALLDEIPGVDWTLAAVIIAELGVDMSVFGSVSQLASWAGVCPGNNESAGKRKSSRIPSGNVYLKSGLVEAANAAARAKGTYLRDKFFRLKARRGYKRAVVAVAHKILVAIYHMLSQQVSYNDLGDLYLDKLNKNHLTRNLVHRLERLGYAVTLTPQQKAA

SEQ ID NO: 254716 - protein, 385 aa, unidentified
MTQPASSITPVLDYGVTIIGALELSGKSWVLAVQLPGVKRHSKHVLGPSCEDLVALIERLKARSLSTGHKIERVILTHEAGRDGFWLARFLERCGVEVHVMQPSSIPVDRRARRAKTDAIDVEMLLRTLMAWLRGEPRVCSMVPIPREADEEARRAHREREDLLCERRSIVNKMDGILATLGVKGFKALRRDRREQLRLLHQPGGDAIPQLARARLERLLERLELVLQQIAKVEKVRDAVFDKPAPENEAERMIRSLAKLRSIGADFATLLVREAFVRDFQNRRAVAGYAGLGGTPFSSGSIEREQGIGKDGNRRLRTAMVELAWLWLRWQPGSGLSAWFRRRTEQAGSRTKKIMIVALARKLLVALWRYVRDGVIPEGAEMKAA

SEQ ID NO: 254717 - protein, 347 aa, unidentified
MLHAGLDLSRKKLDVCLLSDQGEHLDQFAVPPDVDSLRRLAGRIEEVHRQPVCAVIESMTGARIVHDTLEQQGWSVEIADAQKVKGLAPLACKTDKIDSKVLAVLSHRDLVPAIWLPDPSVREERELARFRLHLVKHKSALKCRIHSTLINFGKPCPVTDLFGLEGRRLLQRLQVPEPWRGNITASIELIDDLERQIVEINRRLKEGHAEHPYVPLLLTVPGIGWVLAFTIAAEIGKIERFPSPEKLAGYTGLCPRVNQSGEKDRRGPLTKHGPTYLRWALLEATMHALKHPAYAERYQRIKRRLGKQRGAKVAQVDIARRLAHAIWHMLSRKEKFAPRGAAFRLAA

SEQ ID NO: 254718 - protein, 491 aa, unidentified
MSHRRLVGIDLGIASAHTVRVLREDGSEVCRRRCWPRLDSLLEVEAAALAGAPPDLRLEVVIEPTGPAWLPIAVFFTGRGHTVYRVSSAKAADLRRFLSRHAKSNSIDAATLARLPLVDPGGLRPLRLPERDAASLDRRVRATDRLTRQAAEHKRRLKDLVRQLLPMTPLQGDLGKADLAVLERTGAHPRRLLAMGRARLSRLIFKASSGHLGEERAQAWLDAAHLALELYGDHPALAFDDRAAEVLTEVRLLHATEAELPGHESAREQAYRQVDPDQLARSLPGVAAIGGPALAALVGDAHRFPNGARFRSFTGLAPRASETGETDRKGQPMSKAGPRLLRTTLLRAADNARHLDPQLAHLYYVQVVERGACHLKALCVVAAHLGERAWTVLARGTPYEFRDVDGTLLTPEEAKALAGPWKVPDDVRQRRRSKKTSKQGGKAPHQVHQGHATRARGAQTRRPSPEPIVTSELTPIKQVLAALQDRINVPS

SEQ ID NO: 254719 - protein, 460 aa, unidentified
MAKHQRKKSPAEQQLPAQLHAVNLHAAGIDVGAEAHWVAVPVEADPQPVRVFLAHTASLHALAAWLTLCGITTVALESTGVYWIPLFELLETQGFEVILVDPGTMPKNGRPKTDVHDCQWLQRLHTLGLLSAAFRPDDPVVVLRSYLRLRLTLLADAARAIQHMQKALTQMNIKLQHVVSDITGVTGLRIITAILNGERDPLRLAVLRDWRCKEDEATIAQALHGTWRAEHLFALHQAVAAYEFCHQQIAECDAKIKAQLLTFEDHSQGECLPPRPRKRHRNRLSFETRPLLHRMTGVDLTKIEGIDETTALIVLGEIGLDMSRWPSEKHFTSWMGLCPRVRVSGGRVLSSRTRPTANRAAAALRLAAASLHHSQSALGAFFRRMKARLGTPKAITATAHKLARLIYAMLKHGTAYVAESMDTYEQKYRQRVVNNLSRRARDLGYDLVAKREAVTQVGLG

SEQ ID NO: 254720 - protein, 323 aa, unidentified
MIKIENSFTQVVGVDVAKGKLDFLLTDEKQPLSIKNTQDQIVSKLIARIKHPRSTIVVMEATGGYEGLLVTLLHQHEIALAVVNPRRVRDFAKGIGRDAKTDPIDAGVIAFYGEVVRPEAQLAKSDEEKKLKNLVERRRQLLDLIGQENNRLQHTIDQEIRGYIQESLETLKKQVKTIDQRLARCVKEDTVNARKVEILNSVKGLGPVSISTFLAELPELGKFNRGQIAKLVGVAPMNRDSGQVSGRRRTFGGRSYVRRVLYMATLAATRFNPRIKAFYQRLVAQGKPKKVALIAAMRKLLTILNTLVKNNVLWSEEPKKAGV

SEQ ID NO: 254721 - protein, 349 aa, unidentified
MGEVITIGVDIAKSVFQIHGVDADGTVVIRRRIGRARVLEFFADLPPCRVGMEACATAHQWARELTKLGHDTRLMPPIYVKAYVKRGKNDAADAAAICEAVTRPSMRFVPIKSVEQQSVLMLHRARDLLIRQRTQLTNALRAHLAELGLVAEKGREGLHQLAAVVTECGNERLPSDARFACQAIVTQLNAVQIEISGLDKRIAQTHRANADSKRLETIPGFGVILSTAVVATMTDPKAFKTGREFAAWIGLVPRQNSTGGKERLGSITKQGDRYLRRLLVVGATSVINSARARPYKYPWVIELLGRRPTKVVAVALANKMARIAWAVLAKGERYRAPTRSSNAVVPAAA

SEQ ID NO: 254722 - protein, 346 aa, unidentified
MVLIGCDFHPSWQQVSWMNRETGEAGDQKLVHEPGAVEKFYQQFPAGTWIGMEATGNCQWFVEMVTGLGHKVLVGDAAKIRASDSRQQKHDKRDARLLVQLLAEDRFPEIWVPSREQKDLRQLLIHRYTLVRIRAQVKNGLQHLAMNQGVMKKQKLWSKAGEKVLRELPLAPWASRRREDLFKVREMLNGQIDLLDQAVVEAAEKNEKARLLMTQPGVGPITSMAFVLTIGDVKRFQRDKQVASYLGLIPREYSSGGHQRLGSISKQGNTFLRMLLVEAAQGAVRCDPGFRNEYLHRCHSKPKGVAKVAAARKLAIRLYWMLRTNTGYPEVVRVESSSRVALVSES

SEQ ID NO: 254723 - protein, 435 aa, unidentified
MLVSSSSQAEYMAQIRGVDRERCLVVPVDVGKRSAMALVADHCHKVVVDPFTFELNETGVSLLLARADAYAEYVGASSVRFGVEAAGHYHRGLVTRLDVGGRDVVEVNPAIVKDARGRIGQRRVKTDVQDCLAMAEVLIDGLGHTPTQRSVAMATQAAWAGQRRRKASARGVLVRQIHAQVDLAFPHLTDCYSHGLDQPSLRIIMTHICDPARVVRLGPKRLRQYVINRGVRMWAPKADQVVEAARQALAVPEGQRRAAEEFVARDMALLAALEAEMAECERQLADILPHTPAGVLTSVPGIGVTSASYYAAALGDPHRFRNANAAYRYSGLSPTSYESAGKRSSRVQISREGSAALRYAIVTIGHGLRTHEPDFAAYYRRLTSSGKPPLVALIAVGHRAHRLVFSMMRNQTIYDPEQWVKSVEQGRAVKAALAT

SEQ ID NO: 254724 - protein, 341 aa, unidentified
MSIITVGIDLAKNVFAVHGVDDNGKAALVKPKVSREHLLPLIAQLPPCVIGMEACSGAHHWARQFRQYGHTVKLMAPKFVSPYRMSGKRGKNDAADAAAICEAVTRPQMRFVPVKEEHQQIILALHRTRNGFVEERTATYNRLRGLISEFGIVCPQKIANLRRALMDHLEDLPGYVNQCVGDLLAHADGLDARIAEYDRIIAKAARDDARSKRLMTLPGIGPNTASAILASIGAGHDFKNGRQVAAWIGLTPGQYSSGGTARLGRITKAGDKYLRSLLVMGAKAVLSGLGDKQDRFSRWARSLVERRGYWKAVVAIAAKNARLAWAVLKFGEDFRLKAASV

SEQ ID NO: 254725 - protein, 358 aa, unidentified
MNENTTLFVGLDLGDRHCHMVIVDRDGELIEESRVATTQTALRRKFSSLAPARVAMEVGAHSRWVSQLLQELGDEVLVADARKLRAIYTNPRKGDRVDAEILARLARLDPKLLSPIRHRSPRAQAHLAILRSRDALVRSRTLLINHVRGIAKSSGVRLPACSAPSFAAKVAGSIPEALQPALFPVLDTIASLSTQIRTYDRQVEALAQAEYPETQFLRPISGVGALTALGYILTLEDPARFRKSREVGPALGLVPRRDQSGEHDPQLHITKTGNAYLRRLLVGSAHYILGPFGPDCDLRRWGLRMAQRGGKNARKRAVVAVARKLAVLLHHLWKNQEAYEPFHQSRQDLQPADLSLAA

SEQ ID NO: 254726 - protein, 348 aa, unidentified
MAHSVTAFRDRLCVGVDLHKDQMTIAVLNPTTGQITYHTIACKCRRQIVEFFASLPRPHVVAIEAVGFYRWLWDLLEPIVDTLLLADAAQCRALAGRRIKTDRQDAGNVAELLAAGRLPIAWAPPSPIAALRDVTRHRHYLSRQHARCLHRVKSIMHQVNRPGPARMRAPQLIRYLKAQRDKLPPHLVSQIEMAIDEMILVERQLDTIAASLRQTLAEPRWAADADRLMTFPGVGVLIAAAVLAEVGDFDRFDDRDALTRYAGLDPRTFTSDTTVRTGAIAKQGSRELRWALVQAAWVAVRCDDSAKRVWLRIRKRAGGKRAIIAVARRLLLWMRAAHRKGAAYRQAT

SEQ ID NO: 254727 - protein, 341 aa, unidentified
MKKLFVGIDFSKEKIDVAIIFAEGLTETSMRVSNEFKNSVSGYKQLVKWVEESSNETEPSLWLFCGENTGDYSKPLCNFLYGRGFDMWLENAKSIKDASGIRRLKSDRADANMIAEYAMRNYDKAIIYEPLSESLSQLRELFLYRQMVVRHRCSFQVRRGEKRLNMEKSPVKTMISQSGRHIVTELNKEIEKIDKRIAELIDSDDELAQVFNIVTSIPGIGTQNAVCLMVYTDNFRRFNFDSRKIACYYGIAPFGRDSGTSVHTDPHVHYMANRQIKAMLSQAALSAARFNPVIASYYSRHIAKGKKRQIVLNNVKNKLVHIVTAMVRNKQLFDKDYKISA

SEQ ID NO: 254728 - protein, 355 aa, unidentified
MTSTKYIGMDVHKESISIAVMNAAGKLVMECVIETKASTILQFIHGLRGDLHVTFEEGTWAAWLYDLLKPHVTEVVVCNPRKNALLKDGSKSDRIDARKLAEQLYMNKIKSVYHGEHGLRTLKELARSYLTITKDLTRVMNRLKALYRSWGIPCAGNEVYAPRHRSEWLSKITEAGVRRRAEHYYQQLDVLRLLRQEVRRDLLAESRKHKAWKLLRLIPGIGPIRAALLVALIQTPHRFRTKRQLWTYSGLGLETHDSAQYRVVDGQLNRSKKSVTLRGLNKDHNHDLKDIFKGAATRVSSSSGPLRDFYEALLAKGRKPTMARLTLARKIAAITLIVWKKEVRFDANYLKPQAA

SEQ ID NO: 254729 - protein, 332 aa, unidentified
MQYLGIDLHKRDLVIAVEDERGPVGHPKRFPCRDETAIVTHVSALRPFRAVIEASASYRWLYDRISPLGEVILAHPLRLRASIARPAKTDKLDAALLARLLRMEQIPQAYAPPAAYQQLRELTRTRARLSRSATEAKNRLHWLLAGRNIHAPYRCPFGVRGRRWMRSLDLGWVGNLERDELIGRLEHFDQEQERLDRIIEGSATAFPQIEALRDIRGIGTYTALLIVAEIGEPERFRQPGQVASYAGLAARVYQSGAHDYHGHITRQGSPWLRWALVQAAIKAIGKDRRLANFYERVRKRSSRHIARVAVARKLAEICWIRLRRWHRERAAA

SEQ ID NO: 254730 - protein, 372 aa, unidentified
MKESTSATKTTKKDRFWVGMDDHAKTIVVAVVKAEETPPVARFTVSNDEKGQKELIKRLKELKGDVRCVYEAGPCGYGLQRRLSKAEIHCDVAAPSLTPRRPGKRVKTDRRDALKLAEMYRGGVLKMVTIPDVDREALRDLVRTREDAVGDLLQARNRLSKLLLRHGQYYREGNKWTKAHWRWIRGVKFEQAHSQAALDHYIKVVTTRMDELDAINKLAKAASEEHQEVISRYCALRGVDWLTALTIYAEYGDLRRYHRAPAFMDSLGLVPCEDSSGESQRRGSITKTGNAHARRVLVESAWHARHYPRVGATLRKRRQNLPPEVVRIAEQAEARLHRKFSRMIYRNKRSTVAAVAVARELAGFLWAIAQLP

SEQ ID NO: 254731 - protein, 343 aa, unidentified
MAIFVGLDVSLKMTSICIIDADGTLVWQGKVLSEPPALIMALWPYRDRIKLVGIEACPLSEWLYAALVESGIPTVCIETRHAQRFLSSRPNKTDKSDAHGIGEMMRLGHFRPVHVKSKASLMLRTILGARQNFVGHMIAVEQTIRGLLKVHGLKVGAVLRCAFAARIECLLADAPELRIAIAPLLETRNMMRKQQALLDRQMSQLARKDDVCKRLMTISGVGPIVSLAFKAAIDDPARFRSSKAVAAHLGLTPRIYQSGEIDRSGNISKCGDTAMRHALYEAANSHLRVSKKWSPLRAWGVKLAKRIGAKKACVAVARKLAIIMHRMRVDGTEFHFSKAPTTA

SEQ ID NO: 254732 - protein, 347 aa, unidentified
MRFYSQQHRHTCGVDLHGRNLYLCILDEQGQIRLHRKLRCDPKLFLEAIAPFRDDLVVGAECIFCWYWLADLCADEGIPFVLGHALYMKAIHGGKAKNDKIDSRKIAILLRSGAFPYAYVYPRQMRATRDLLRRRLHFARKRAELLTHVQNTFTQYNLPKPAGRLTPSAAREGLAELFDDLAVRASIRADLSLLDHYDDLIPQLEHTALHLARVHDPDTLRLLMSIHGVGKILGLTLLYEIGDITRFPSAQDFSSYGRLIKCTKESDGKPLGVSGAKIGNAHIKWAFSEAAVCFLLRNPPGQVYLNRLRKKHPKGKALSVLAAKLGRATYFMLKQQTTFDMNRFLSH

SEQ ID NO: 254733 - protein, 490 aa, unidentified
MNKKDKSIFTKQNQIIIRLFQQAKHPDKVLCVPIDYAKGTHMALFCNGSGKQLRKAFPVKNSPDGIVFLLDAVGKICRKFAIKREHVFFGGEACGTFADNFIYALRKEGFVVVGVHAADAKKERENMQASTDKLDLLGIAKMLLNRRGSFSATQTSRERALRSLTRHRNSLVEMRTATSNRIHGIVDRLFPGFLDEKCSGIPPFSKAALYLMENHFSSAQIAKRQDKALLRQLKTQGLQHAEDSLIKLKTHAKSVLEHPPELVAMLQVSLSSAVKLYRSLSENIEQIGYESAQQLAQTSGAMLTTMRGIGITLAAGVAAEIGPPKTQTSTRRLTSYAGIIPRVKQTGGPEKSARTGKVSRRSNHILKNFVVQCGNHLGQHGPAELKEDHQRRSANSQHADFGMARRYLRIGMRLMRNNECYIPSELRQINDENDLHQLRTYYLQLWPKILEKWKKAKAIETAFAEENPLGQWKRCIEAIYDIKLPVPKKH

SEQ ID NO: 254734 - protein, 395 aa, unidentified
MKNTKFPQIFIEYYIGIDVSKDFIHCYSRPDGVYKKVANNKKAIVNYIRTVLKDKKVACIVMEATGGYELYAAEAFAKAGYYVVVLNPKRARHLMSGMGINPKTDKVDAEVLAKIAQRFWGDEDVLSAYEPMSKEQKELQRAVNRYNQLTNDSVRCKNRLRKAQFNEDKVNAKSLKRQLKWLLKERKAYMQDIRLCIASDPQMARWDEILQSVPGIANVVSALLIAFLPELGKLNRERIASLAGLAPHPSDSGTKQGSREAKKGRQKIKWGWMPAIASAIKNNPVLKDFYQRLTARGKEKKVAMIASMRKLLVIVNQMIRNNQKWGENKVQKNDPQDNVQTVSAPVADELNNLLEHAIVEKPTVKKACVSKKQTSTVKSVAQRKTKKKTTPKTTR

SEQ ID NO: 254735 - protein, 403 aa, unidentified
MSPEHSIDIFLGLDVGKSEHHACALDRDGNKVFDKPLPQLESELAGVFHQLQKLGTVLVIVDQPNTIGALPIAVARDCGCEVGYLPGLAMRKAADLYPGRAKTDKRDAFIIADTARTMPHTLRAVDRNDEVLSALKMLSGFDDDIARDCTRTVNRLRSVLTQIYPSLERVFAGSTLTRTPILELLIHYKGPQGLKRAGYQRVLNWMIKHTRKDPTPLVDDIFTALKAQTVTVPGSDAAELVIPQLAANIQALKEQRNTIAEQVEEMLADFPLCEVLMSMPGVGIKTAAQILLAIGDGSDFASAGHLAAYAGIAPVTRRSGSSIRGEFPARSGNKRLKNALFYSAFAVIRSHEPSRQYYERKRAEGKRHNAAVICLARRRCNVIYAMLKNKEFFREIPPRPVAA

SEQ ID NO: 254736 - protein, 422 aa, unidentified
MADSTLCVGGDIHQDELHLRATDKTDGHEVGQPLTVKNNRPGADQAIAHLVQLLTQHGYTHLEFGLEATGLFWLPFYVYLQQSPALMPFQPTWVCFNPKLVAKFKEGVTLSEIKDDDHDALAVAERLRFGHLPVSYVASSEWLALRMLTRYRYRLSRQITQEKLRALTRVFLKASEWHRGQPFSDVWGATSATLLTEFTIAEIAAMSLTQLTDLMQEYARKQFDDPQATARQVQRTLQNSFPVTPDLDAALTVVLQVAWTHIRDLEKLMRRLDREIAQRMERLSNPLLSVQGLRPVITAGIIAEIADIHRFPDEPQLAKFVGLVWRKHASGQFVAEETRLAKTGNVYLRYYLIEGANLMRQHNLEYQAYYRRKFAEVPKHPHKRALVLTARKLVRLVFALLTKNQTYVRPQAVQSQEAAPVQ

SEQ ID NO: 254737 - protein, 316 aa, unidentified
MSTQEYWVGIDVSKNELDIHVRPAGQCLRLSNCPEGVEQLVGVVEPLAPQLIVLEATGGMESLAAVALSRVGLAVAVVNPRQVRDFAKATGQLAKTDRIDAGILAHFAQVIQPEVRPLPDEQAQLLGELVSRRHQIVEMIKAEKNRLPTMKGPMREHIQVHIDWLQLQLVELEQILREAIRQSPLWQEKVDLLKTVPGIGDVVSCTLVAFLPELGRLSGKKIASLVGLAPINRDSGKFRGKRTIWGGRARVRTALYMSAIVATRFNPVIKTFYDRLLQRGKPKKVALTACMHKLLLILNAITKSGQPWSNAIAEGP

SEQ ID NO: 254738 - protein, 443 aa, unidentified
MVLYDVEEIPDEEHEQVTGRVCAIDVAKESGKVCTRVPHESRPGRRVCKVWDVAATTRSVRELADHLAGEGIEVVTVESTSDYWRIFFYVLEARGLKVQLVNARDVKNVPGRPKTDKLDAVWLAKLTEKGLLRPSFVPPAEIRRLRDYTRTRTDLTQERTRYWSRLEKLLEDALIKVSSVASKIDGASVRDMVEALIAGERDPRVMAGLARGRLKAKHTALISALSGQFDEHHAELARILLDQIDGLSSQIDKLTARIEELVAGLPAAAAPASGGQAEQPALPAVERLMEVPGIALRGAQVILAEIGLDMGRFPTAGHLVSWAKLCPRTIQSGAKSSAAKSGKGNPYLKGILGEAAAAAAKTDTFLGERYRRIVKRRSKLKALVAVARSILVIIWHLLADPAARYRDLGPDYHASRIDQGRKARNHTRQLEALGYTVSLTPAA

SEQ ID NO: 254739 - protein, 364 aa, unidentified
MVELSHSSWLVGGVVPGIERQPRKKLEPSPERLLALLHHWRDEAVGAGSTITRIALAFEAGRDGFWLARWLEARGVEAHVIHASSLAVSREHRRAKTDRLDTELLKRGFLGWLRGERGHCSMARVPTIAEEDAKRPNRERDGLVGERTRIVNRIKSTLARLGIRNFKPTLRKAADRLATVHTPEGVPLPPNTLAELQRDMARLSFVVSQIREIEEARQKRLEHHETGPQAMVRLLARIVGVGVETADMLVHEVLSRPMRDRRAVARYAGLTGSPDESGARRREQGLARAGNARVRRGMIQLAWRFLMFQKESALTLWYRARTADSRRGTRKTMIVALARKLIIALWRFVTTGEPLEGVVLRPAM

SEQ ID NO: 254740 - protein, 404 aa, unidentified
MYSFGIDWSAEHHNLCVMNDKQRPLSQVKFPHSLEGFQQVEALRQQLDVSAKECWVAIETAHNLLVEFLVEQGYIVYVIPPHVTHAQRQRYHASQAHTDDSDAALLARLLWTDREYYQPLRSDTQLTQHLRAQMRLVEQLRRAIHRQHNQLRAILLRTYPQAVELFSALTAQISLQFLLAYPTAQAATALSLDEFRAFCQRHQYTHPQRIAQRYAHLIAPAPTAHPATVSAYQEQVPIWAELLLLQGQKHKAAQRCLSELFAQHPDADIFASLPGAGALLAPALLAKFGDRRERFPTAAVVQALAGTCPITEQSGKKTYIHFRHSCDKEFRRIAQHFAKASLHQSGWAMAYFQESLSRGHSTSHAYRCLANRWLAVIWKMWQTRQPYDEGYHLRQRATRQRSRA

SEQ ID NO: 254741 - protein, 326 aa, unidentified
MEHELHYIGIDTAKEKLDVDVLRPDGRHRTKKFANTTKGHDELVSWLKGHKIDHAHICIEATGTYMEPVAECLYDAGYIVSVINPALGKAFAQREGLRNKTDTVDARMLAEFCRQKRPAAWEAPHPLERALRALVVRHQALTDMHTQELNRTETAREVQRPSIDAHLLWLEAELKRLEKQIKDLTDDDPDMKHRRKLLESIPGIGEKTSAVLLAYIGLKDRFAHARQFAAFAGLTPRRYESGSSVRGASRMSKAGHVSLRRALYMPAMVATSKTEWGRAFRDRLAANGKKGKVILGAMMRKLAQVAYGVLKSGVPFDASRHNPVAA

SEQ ID NO: 254742 - protein, 396 aa, unidentified
MGTIGIDIGGRVHVAARCREGQARADRGVLRISQSRAGFTALDTWLEAGPEPVELVVMESSGHYWMPLAAHLKRRGVPVAVVNPLAARYFAKSRLGRTKSDPADARSLAEMAMRDTPPARDPLIGVELRQAARFAMTLVEEQAKVCQRLYRLVELGFPELRELFDDPTCRTARAVLRLAPTARQAARRQAETLANANKGHGQRRLGQTRAAWLRAAAADTIAVPELDAETAFEIGLLLDQYDLLEGQIETADRRVAGLLDGETARLLRTIPGVGPAIAATLMAEIGDIGRFTDFVQLLAYAGVHPAERSSGTKGVRPDTSWHMSKAGNSHLRAAAYRMAVVGIQHNPVIAAHYARKRAVGKSPMNALGHCMRKALSLVWGVWRSGRDFDASMGQSA

SEQ ID NO: 254743 - protein, 268 aa, unidentified
MSKLIIGIDISMNDFYACIKVRTEDNSIKIKGTRSFENTDQGFENFLSWSLKQKKDDEWSVRFVMEATGVYYENLAYYLHSQNQKVSVVLANKIKNYIKSLNVKTKTDKVDAKTIASFGIERELENWEPMSPMYKTLRDLCRELLSLKKEKQRAQSQLHALEKAHQKLHTVIKLKREQIAFLEKAIDVIRKDIKATVKKDPILENRIKKLETIPGLGYETVVILVCETNGFTLFKNIRQVVSYAGIDITHFFSTKLKNQEEKMRNIRI

SEQ ID NO: 254744 - protein, 407 aa, unidentified
MDLVHECCCGLDVHQDSVVACLRRQTGKHAQTEIRTFGTMTGHLRALRDWLVAAGAEAVAMELTGVYWKPVYNLLEEVLPVLLVNPRHFKQVPGRKTDVKDCEWLADLLAHGLLKASFIPPREQRELRELTRQRAQWVAEQARTANRIQKVLEDANTKLASVASDALGVSGRAMLDALCRGEDDPEALAELARGRLRHRLPELREALDGVVTGHHRYLLGQLLDHLLELARMVQNVSDRIAEYTRPFAAAAARLMTIPGIQQRTAEVLLAELGGHLNSFPSAQHLASWAGMCPGNLQTGGRRREAKTTKGSRWLRAALTQAAWAASRTKDAYLAAQYQHLARRRGKQEALVAVGHTILTIVYHVLTEGSEYRDLGADWFDRQDQARVKRQLTARLEALGYRVTIEAA

SEQ ID NO: 254745 - protein, 384 aa, unidentified
MIMSAERVNDCYVALELSQRTWLIGFLLPGTDKVQIMTVAGGDAEALLSALGRIESLAGTRLPAECTMVSMRVCYEAGYDSFWLARYLIDRGIDTTILDPSSFLVSRRGRRVKTDRIDVEAMVFTLKAYLLGDRSVCRPVRLPSVAEEDAKRLSRERTQLKKERTRHVNRIRALLVLHGIRSVPGLWGGRWKEALSNIRTGDGRELGRFIFRELCRQFERLDLVHSQLKSLEKERIQACETEGVINDSGKIRVLKQLDGIGEVGATQLVAEVYHRTFKNRKHLASYLGLSPSPYSSGEVHRDQGISKAGNKQARVMLVELAWCWLKYQPQSELTRWYRARFSGHGSRSGKVGIVALARKLAIAFWRFIEDGVVPEGATLAVATK

SEQ ID NO: 254746 - protein, 345 aa, unidentified
MESMYYIGLDVHKKTISYCVKDASGQVLQEGKIGATRGELDSWMKTLPQPWSVAMEATIFTGWIYDHLLPHAAQVKVAHPLMLRAIATAKKKNDRIDASKIADGLRCDFLPECHMAPTEIRDRRRILRYRHLLVRQMVQLKNRVSGLLMETGVSYNKQKLHKVGYFRELLSSNQEIHPNIRPLLKLSRDAIVRLQKTEYALVSSLQRDPLLADRIKRLRTVPGVGPITALTWALEMGEVSRFPSIKQAISYCGLCGDEKSSADKVIRTPLSKQRNKHIQRVLVEAAKLAPRENHELALVYETEKQKGNANRATLAVARKMVAYLLAVDRGKRDFVPAEDHRGAAA

SEQ ID NO: 254747 - protein, 426 aa, unidentified
MQQFNYKDKLDKSKLDSSYLIVGIDIAKQKQYARITDFNGNELGEKIIFTRDIFGLNQLLMQIKTIKIKYKKTSVLVAMEPTGIYWKNIYYGLRNLDGEIETVLVDVKDVINVRKLFYETVKTDTVDSIAIAKTAILKGYKQRLELSEKEQNIKDIVSFREKLIKDSVAIKNVVIGILDEVFPEYCKFYSNYFCKSSLILLDTIFCPKDISDIDLDHLYTEIKHKSKTCLSKKKLIQLKELANASIGIEASEGKKIQFKFNIGILKSILVEIDSTEKRISELLSEHEMVKKMMEIDGMNIVSAANIISEIGSFSKFNDYKRLISYCGFNLRISESGARKGKTIISKVGNSRLRSYLFRVILPMIKHNKEFSELHNYYKTRNNNPLKPMQSIVALICKLLRILWGMAKRNTSYNPQLAFKETFVAAA

SEQ ID NO: 254748 - protein, 374 aa, unidentified
MKQKTNLSNRKFIGVDLHTDQFTCCALSENDGVIWRQTFRLTPEALQEFYNLVDDQTVVSLEATSNSFKFKEVIEPYVGNVFIYDPHKLKLISMVGKKTDKVDAHKLAMYLKMQVLSGEKMLNPVYVPSQDIQDLRAWFTNYKLVLKEKQSIQNRIYSIFIQNLYQIEKKQMFTLKGKKVIMEMDLSANMRSELEYLYSIHDFLTAKIKDVKKKIALLGAPYIDRIKILTSIKGVSVFMAIAFIADFAVIERFKNAKHFTSYMRSAPRIESSNQITKIGKTNKHGRKLSISLITQSITHFKKGNPSIARWCESKKDHKSAGKIRMAVCRKVFSEMYHMLIKNQLHYHCDSENHELKLKQYASFLTKNGVVLNES

SEQ ID NO: 254749 - protein, 348 aa, unidentified
MITIGIDPHSRNHAAAALDERGAVLAQLTVGSGPRELDRLARWIAGMGPKRIVAIEGARGFGLALARSLLGAGETVLDVAPALTVAERRSARRPGKDDRGDAVAVARVAMRERGLPRVLPEESGTDLKLLVDARDQLVADATRTRNRLHALLVAIAPGYHEQVRDLTSSAALMIAKRLASRARGADRVRSTLACSAIARLRSLGAEIGTLEREITASLDQAAPANLLGICGVGPLVAAKILGEVRDVSRFPSPAAFASYSGTAPIPASSGTVIRHRLHRGGNRQLNRALHTVALTQARRDDRARAFLARKRAEGKTHREARRALKRHLAVAVYRALVMDAQDVLTSTT

SEQ ID NO: 254750 - protein, 428 aa, unidentified
MAVSVHTDPSNEHTDHALPYQWFVGIDWGSQTHQVCVLDRERHRVGERSVEHEGIALAECAAWLTTLAAGDVHRVAVAIEIPRGAIVELLVERGFHVFAINPKQLDRFRDRHTVAGAKDDRRDAFVLADSLRTDRPSFRQVHVEEPHLLMLRELSRTEEALLTEFRRATNQLREQLHRFYAPLLQLCPAADEPWLWDLLELAPMPAHAADLTEAQVAGVLKTHRIRRVSAGDVLKVVQAPALPVAPGTAEAASAHCALLLPCIRVLAAQLQTCARQVESLLTALGTVEAPTAPPSDVAIIRSLPGVGRKITAWLFAEAAQPLAERDYQILRTQGGVAPVTKQSGKRRQVVMRRGCNPRLRNALYHMAHCVAQRDAYFASVYAALKIKGQSHGRAIRSIGDRLLRMLVAMLRNHTLYDPSWRQPVRMER

SEQ ID NO: 254751 - protein, 318 aa, unidentified
MSAAENSKVSVGIDVSKNKLDIAVHESGAVWSSNNDSRDCPALAIKLKQLQATSIVLEATGGCETLVTAILAAAGLPVIVVNPRQVRDFAKATGQLAKTDRLDCCVLAHFAAAINPPVRPVKTEETQHLEALLGRRRQIVEMLTAEKNRLASNRDRAVSKDLQAHIAWLEQRLTSSDDELQRVLKNSPAWRERDQLLRSVPGVGPVLALTLLAQLPELGQLNRREIAKLVGVAPFNWDSGLWRGSRHIWGGRAEVRSTLFMATLSAIRFNPTIKPFYQRLIGAGKAPKVAIVACMRKLLTILNVMLKTQTSWRTVHSS

SEQ ID NO: 254752 - protein, 359 aa, unidentified
MKKSITPIGTPVGIDVHKRRCKVVEFHQGEIKVRKPMGNTQEDWLELLPELPPDAEIGLEVSTAGYFAMSVLEAAGWRERAHWVHTAGIDSNRRQKNDRLDAERLARKLAAHHVDPLPEAWFPPPAIRALRLRARQRCWLALLRTQAKNHVQSLLEMHGLQIPGSDPFGTAGQRWLAAQKLPPPLTESIPQTLRLLGLLEEEIHTSEQYLQAADKQFPELMLIRTIPGIGPILAPVIWSEIGTIERFRSAKALANGTGLVASFYDSGEVKTTGPITHQGSRWLRWAFVTAANVAIQGRNPFARRYHRLRRSKKANVAKAAIAHSLARCVYGVLKHGCPYREDRWGRKVGALEPETRAGA

SEQ ID NO: 254753 - protein, 433 aa, unidentified
MTPCSTAIESPIVAYVGLDWADQQHVVCWRAADSAEVHRRVVEQRPEPLQDWVAQLRQRFPDGLIAIALEQSRGPVIAALMHYDFLRLYPINPKSLARYREAFSSSGAKDDPSDAALLLDLLVKHRERFTPWVPDDALSRQLALRVEHRRKLVDLQTQLTHQLRSYLKLYFPQALDWIGELDRPQAGAFLQRWPTLEAVQQAQPPQLEEFYRHHHCRRPRLMQQRIEQIQQARPLTQDPALVEACSRMVLALVAQLQVLIATLEQWQAEISQLFAQHPDALLFASLPGAGVVFAPRLQAAFGSRRERFATAQDLLQFSGLAPVTQRSGKSRQVHRRWARPKFLHQSLLEFAALSLPRCSWARALYQQLRAGKHRHWAALRVVAYKWVRILFRCWKDRVPYDEQKYLGSLERRNPQLWKASQQPVPERRKNQIA

SEQ ID NO: 254754 - protein, 391 aa, unidentified
MIYIGIDVAKDKHDCFITNSDSEVLFKAFTIFNNLDGFNDLYQKIESVMDDVTKVKVGLEATGHYSYNLLGYLIDKGLPTYVINPLHTNLYRKSLSLRQTKTDKVDARTIASMLMSDVNLKSYSDTSYHNEELKSLTRYRFDKVKERAKLKTSVSRLVCILFPELEKLVPTLHMASVYALLSEFPSAKHVATAHLTRLTNLLSESSKGRYGKDTAITFRDSARASIGSNMPAKSLELKHTIKLIQELDSEIDEIENEIKIIMDEINSPILSIPGINYRMGAMIIAEIGDFNRFNSPDKILAYAGFSPSTYQSGQLDGAYAHMEKRGSRYLRYALYNSTKYVCHWDPTFAAYLAKKRAEGKHYNVAISHAVKKLVRVIYHLEKTKQQYIKAA

SEQ ID NO: 254755 - protein, 347 aa, unidentified
MDQQHYVGLDVSLEMTSICVIDQDGVVVWRGKCQSEPGTICEAVNAHAPALVRAGLETGQLSNWLTLSLRRRKLPVVCLDARHAKAALSLQINKTDSNDAFGLAQVVRTGWFREVAVKSMDAQTLRMLLMARQQLVSRRQDMANCIRGLLKTFGFTLKRGAGSVFLARVREVIADNPTLCVIIEPLLLAWSALREQAADLDHRVHLRAKNDAVARRLISIPSVGVIVALSYIAVIDDPARFKKSSTVGAYLGLTPRRYQSGSVDVAGHISKCGDGFLRGHLFEAANVLLSRHVRSSALQAWGLSLASRIGMRRAKVAVARKLAVIMHRVWLDEREFDWGVPPAPANA

SEQ ID NO: 254756 - protein, 483 aa, unidentified
MQQVELGQGRFDIASKKKKKKVQEKERIMSIRIIGIDLGVSAKHKAMILDPASNEFIGKKVIFRARPGELERLLQRARAGAPEDVEVVAIMEATGMAWYPVGVYLHRQGVTVYRVNGQKTKDLRQVLWKHAASDRIDSRVLAHLYQLAPDRLTAWWPVTGEQLALQRACRAYAYWREQDIALQNRLQAYDQWAWDGLGKVVPAVAQRWMRQHWYNPWQVQAAGAAHLVAAWQAASPQQPADTDWIARWLARAQEMTTLYGSEEMVGYEDLQAIMGHSLTLLDQYNQEQERLTREKIEPLYRRLYPDCPLTTIYGIGLQSAAIYRAFIQHIDRFSMVEKFRLWCGIVPGSKQSGEAEAKGLHITQAGPNLVKATLYFNAEVARQWDVQLAAIYHKQMVNYGKHHIQAVCACASHLANRIYAVLKQNRPYQLRDLDGKPITIEQSRELCKQFRVPDEVRQRNNKRFRRARAELKAEAQAQRQQRR

SEQ ID NO: 254757 - protein, 415 aa, unidentified
MQALYRCIAGMDVHRMLYVVTILVELADGTEEKHQRSFGGFKRDRRALVAWLVELGVELVVMESTGIYWKSIYSTLEKAGIPAHVVNARHVKNVPGRKTDLSDSEWLARLGRYGLVKPSFIPPEDLRELRVVSRYRDKVAQTLAGEKNRLHKVLDDAGIKLGAVVSDIHGVSAQAMIDGLIDGTPIEQLPDLAKGTLREKHELLELSLDGELTPRHLFVLKNIREHIRYLESELASLDAYLIDAMAPYADYWRFLQTLPGLDQISAAMILVEIGTDLKAFDNVQHFASWAALCPGNHESAGKRKTGRIRKGNHMIRHLLCEAANAARRTNSVFRSFYQSLVPRKGHKKAIVAVAHKLLRTIYMLFTRRQAYRDPGIDYQAMVVNRNAPRWIRALKKYGFWPKISTLNAPIAAPVH

SEQ ID NO: 254758 - protein, 386 aa, unidentified
MQHATTSPAPQRTCSRGDCPTLFVSLELSRSTWVATALAPGSSKMSKHTLVGGDGRKLLDLLARLKTTAEQRIAAPVKVVTIHEVGLDGFWIHRLLEANRIESHVVDPASIAVPRRHRRAKTDAIDGETLLRTLMAWQRGEPRVCAMAVPPSPSEEDRRRVSRERAKLLQERVRHTNRIRGLLFGQGITNYNPLHKNRRKNLEQLRTGDGRSVPAHLKSAILREIDRLELVLRQIGEVETERDEMLQLAEPSSPAALLMRLKGIGAEFATVLYLEGLFRRFENRRQLAAYAGLTPSPWKSGSIDQEQGISKAGNPRLRTTMVELAWMWVRYQPASALSCWFRQRVGSKRGRIRRISIVALARKLLIALARYVSYGEIPAGAVMNAG

SEQ ID NO: 254759 - protein, 464 aa, unidentified
MKRSDQRPKNKTPKINLDGLSMIEPNAAGIDIAHREHMCAVPADRCERPVRAFGTFTEDLEKMADWLAECGIKTVAMESTGVYWIPAFQILERRGFTVRLVNARHVKNVSGRKSDVLDCQWIQRLHSYGLLRDSFRPEDQMCVLRSYLRYRDELVSARSVHCQHMQKALQQMNVQLHQVLSDVTGVSGRRMIAAILAGERNVQKLAELVDCRVRASQATICKALHGDFRSEHLFLLQCAYDLHQIYEEKIALCDQRIVAQLAQLPDRVNLQEKPVPQGKPGRSARLDQVAGKDLRKELYRCTGVDLTAIEGIGVLTAQVVISEIGLDMSRWRTEKHFSSWLGLCPDQRISGGKVLSSRTRRVINRVADALRLAATTLHKSQTALGAYFRRMKARLGTPSAITATAHKLARLIYRLLKHGELYVRQGLEEYEEKHRQRVLKHLHKTAQNLGFQLTPNTPAASVVS

SEQ ID NO: 254760 - protein, 414 aa, unidentified
MPLARWAGRAIGLDVHRDFCVVAICEEGQVRSTGRVPSTPEGIGMLADSLSPSDRVALEVTGSCWEVARLLEPHVNRVVVVSPDDTGISAARAKTDRLDARALALLLWRGELDAVWMPDERCQILRRRLARREQLVRSRSRAKNEIQAVLQRRLKGKPPCTDLFGVKGREWLTSLVLPVEERESVDAGIRHIEFLDTDIGAVERLIAQQALAWPEIRRLMTVPGVNLICAASFIAAVGDPRRFITSSRMVAYLGLDPRVRQSGEAPARSGRISKRGSASARWALVEAAWTTVQQPGPMHAFYERTRARRGHGKAIVATARKLTVLFWCMLTREEDYAHQQPSLTKKKLRRLEITAGAPKYTPGARGVWSANDAVRDAERALALQAEASYKRMVQDQKAGGPSRKVGASVTPEHA

SEQ ID NO: 254761 - protein, 343 aa, unidentified
MQTITTIGLDIAKSVFQVHGVGADGQVVVRRQLKRRYVLAFFQKLSPCLIGIEACASAHHWSRELQALGHTVRLMPPAYVKPYVKRQKNDVADAEAICEAVSRPNMRFVPTKTPEQQSCLTLHRTRHLLMRQQTSVINAIRSHLAEFGIVAPVGRNGVEQLLGVVADAKDKRLPEIARACVAALGAQLRVLKVQILEFDRMITAWHRSSEVSKRLDQVPGVGPVLATALVASIADPKAFRSGRDFSAWIGLVPKQNSSGGKERLGNISKRGDRYLRSLFTTGALAVIRYAKIHGAGHRPWLTSLLARRPTKVAAIALANKLARMAWAIMTKGERYKEPVALAA

SEQ ID NO: 254762 - protein, 347 aa, unidentified
MRFAGIDVGAERHMVAVVDEESRVLCRSSPFGEDSSGYAHLFELLGPAEDCLVALEATGHYWRNLFVALLAKGYAVAVLNPLRTRRFAEEELQRTKTDAIDALGIARFAAQKRPAAAQLPDFATEELRELARLRERLSEDFASRLRQLHRAVDLGFPEFTRYVRTLESQLATTILSRYPTAASFQGVSVKKLARIIYDGSHKVGEKLARTLIEAAETSVGSHHSEPYRLRIKYFCEDLDVLRRRVKDLARDIERKLDDHEVGKLLTTIDGVGPLTAACLIAELGDPARFRSAGAIASYVGVAPRLRQSGKKRFSGSPTIPFGNARLRKALDGGSQRRPLQPVAASVL

SEQ ID NO: 254763 - protein, 352 aa, unidentified
MEQFIGCDAHKKFSVFVAVNEKGHAGEALRVVHDRQVYREFLARLPPHSSIAVEASGSYSWLVDEMERSGHRPKLCNPLEAKRRMGLTKKTDTLDARGLAILLRNGTLPEVWIPPSELRDQRELLRLRIFLVHLRTRVKNRIHGTLARHNMQVPGADLFGVAARRLLGVRLPELPEHSREAIEQELATLDFLETQIESAEQRLEAIMQVSVEADLLKTLPCVGPILSMVLMLEIGRVDRFPTAAHLASYAGLVPRVHSSGGHTRMGQVCGNVNRNLKWAFVETGNLIVINQRRLAGTHVVRLYQRIKRAKNHQKAVVAVARHLAEAAWWVLTRQEVYREPHGSRHVLSSTHG

SEQ ID NO: 254764 - protein, 387 aa, unidentified
MRVAAHRAEAPSAICVDLGAIFVSLELSRSKWLITSLSPGGGEKMSKHIVAGGDVAGMLSCFAELKRKAQARTGRCLPIIVIQEAGLDGFWIHRVLQAEGIESHVVDPASIATSRRRRRAKTDKLDGEALLRALLAYKRGEPRVCAMLRAPTPEEEDRRRIVRERKALTNERIRHVNRVKGLLFGQGVSGYEPLRSDRRKRLEELKTGDGRSLSPNLKAQISRELDRIELLLTHIKDVEEARDTMLESAQAVAPAPKLLLNLKGIGPEFAAVLWSEGLSRHFDNRRQVAAYAGLAPTPWQSGIVDHEQGVSKSGNPRLRSMLIELSWLWVRHQPQSALTIWFKERMKQNGGRFKKSTIVALARKLLIAIWKYVNAGVVIEGAALKAA

SEQ ID NO: 254765 - protein, 379 aa, unidentified
MQQHATYVGIDVHAKSLACKGVNINDGQEYSKVFKGPDKDCALIRWASQLPGPVYCAYESGCTGFDLARKLRAEDIDCDIIAVSSLARTSIEKRRKSDKIDACAIRREITNPVKKYSCVWVPSEEIEGARDLARLRVTATDEVKAAKLRISALLLKYGHVWQETTESGRPKAPWGKDHMAWIKSIDLDDPVSQQVLDGLLTLLDQRIQENRALREKIADLADTPRFKPYVDGLRGLKDVNVQTAFLAVAEIGDFRRFKSPRRLSSWLGTAPSESSSGNRRSPGPITKQGDGRLRRAPIECNAPMRLRQPHKKYLLKGRPVSGEVEAIAAKANRRLFERYLHMVDDLGKSPNAAKVAVASEMIKWIWVIGRQVDRELGLP

SEQ ID NO: 254766 - protein, 334 aa, unidentified
MQNVALIGIDLGKHSFHIHCQDKSGNALLRKKFTRTKLMQFLVTCPSSVVVMEACAGAHFMARRISDIGHDVKLISPQFVRPFVKSNKNDFIDAEAICEAASRPSMRFVQPRTETQQAMRALHRVRESLIRDKVKTTNQIHGFLLEFGISLPTGDAVIKRLSLVLAEHEIPEYLSRLLMKLHVHYLYLIEQITELESELNQSIKADATAQRIMTIPGVGPITASLLSSQLGDGKQFSCSRDFAASTGLVPRQYSTGGKSTLLGISKRGDKNLRRLLVQCARSFMMRLEHQQGRLAEWVRKQLDNKHSNIVACALANKLARIAWAITVLQKEYQA

SEQ ID NO: 254767 - protein, 322 aa, unidentified
MEHELHYIGIDTAKEKLDVDVLRPDGRHRTKKFANTTKGHDELVSWLKGHKIDHAHICIEATGTYMEPVAECLYDAGYIVSVINPALGKAFAQSEGLRNKTDTVDARMLAEFCRQKRPAAWEAPHPLERALRALVVRHQALTDMHTQELNRTETAREVQRPSIDAHLLWLEAELKRLEKQIKDDPDMKHRRKLLESIPGIGEKTSAVLLAYIGLKDRFAHARQFAAFAGLTPRRYESGSSVRGASRMSKAGHVSLRRALYMPAMVATSKTEWGRAFRDRLAANGKKGKVILGAMMRKLAQVAYGVLKSGVPFDASRHNPVAA

SEQ ID NO: 254768 - protein, 369 aa, unidentified
MNNGSIVVGLDVHKETVVAAVLPPDAERARETVTIENSPKAVERLVTRLAARGPVAFVYEAGPCGYEVQRQLTALGQPCAVVAPALTPVRPGDRVKTDRRDAEKLARLYRAGELTPIRIPTRAEEAARDVVRVREDVLADRLRARHRLGKFLLRQGRVYRETKAWGVAHRAWLHSQRFEWPALQQTFAAYLRALEDVEAHLAVLDQQVVDLAQQAPYRLLVQALRCLKGIDTLSAVTLAVEAQEFRRFPRARAFMSYTGAVSMERSSGGTVRRGSITKAGNAHLRRILVEAAWSARHGTGVSPALTARRKGCPAEVVRIAKKAQARLHRTFWRLTSRTKPAQVAVVAVARELAGFVWAIAHQVPEGGSA

SEQ ID NO: 254769 - protein, 347 aa, unidentified
MKILALDLGKYKTVGCDYAGESGAHRFRGSSTTPAALAQLVREVKPDRVVIEVCNIAGWVCDLLRGMGVEVQVANTSDDAWRWRKVKKKNDRCDALKAAQLSAVNQLREVHIPRIEVRQWRALIAFRQQLVKRRAKVKNHIRDLLVTEGQLLPRGAKCWTQLGVAHLEAMAKPLAAVGLHELWRGQLHIELRQLSEVQEEIARAEEKLDDIAAADPRIALLRTIPGVGPRLSEAIVALLDRPERFHKAGEVSAYIGMVPKQFDSGESERSGRITRHGSRLVRSLLVEVAWAGLRYNPWVRETYQRISGGKKSRKKIAIVAVGRRLLVRCWAMLRDGTSWRTPVAQTA

SEQ ID NO: 254770 - protein, 377 aa, unidentified
MKRIKFVGLDVHAETIAVAVAEQAGEIRSLGVIPNREDSVRKLVRKLGAVEELRFCYEAGPTGYALYWQLTRMGARCEVVAPTLVPVKAGDRVKTDRRDALKLARNYRAGELTAVWVPDAAHEALRDVVRAREAAKKDELRARHRLNKFLLRHGRRPAMGVKAWTMKYLEWVRREVHFEQKAQEATLLDYLHEVEHAALRIARLDGAIEEAAKGAPPQMRAVIEALQALRGVAHISAVTIVAELGELSRFGRARQLMGYGGIVASENSSGERTRRGNITKTGNAHLRRVVIEAAWAYRHRPAVGGGLRKRQENVSEEVKEIAWKAQQRLHERYRKLVAKGKNKGVVVTAVGRELLGFIWAIGIKVETAQKESLQRAA

SEQ ID NO: 254771 - protein, 456 aa, unidentified
MRRKEPGDNEARRALPMVHPNAAAIDVGARMHVAAVGADRTAEPVRSFGTFTTDLHRLVDWFAECGVETVVMESTSVYWIPVFELLEARGFEVFLVNAREAKHVPGRKTDVSDAQWLQRLHSHGLLRASFRPKGEIVELRAYLRQRERLLEYAASHIQHMQKALTEMNLQLHHVVADITGATGLRIIRTILAGERDPAVLAHLRDTRCHTSVETITKALTGNYRPEHLFALEQALALYEAYQEKASACDARIEAVLKQLSLRRGREVGSLPSPRRGMRRQPNGPGFDVRTALFALLGKDLTQINGLGPYLALKLVAECGDDLSAWPSAKHFTSWLCLAPGNKISGGKVLSSRTRRSGSRAAALLRLAAVTVGRTDTALGAFYRRLSARIGKVKAITATARKIAVLFYNALRHGMDYTDPGASAYEIRYRTRVIENLRRRAKAFGFILQPTAPAAVS

SEQ ID NO: 254772 - protein, 347 aa, unidentified
MSEHTPTTMGIDISDQWSTVCVLAGDGEVMEESRFRSTRAGLGRYLEHRAPMRVVLEVGTHSPWMSRQIEELGHEVFVANPRQLRLIYQSDRKCDAVDAEALARLGRVDPKLLRPIRHRAADTQLARAQLRVRDMLVAARTRFILSVRGMAKSMGEVIPRASAESFHVGVPGAVSAPVWQVVEPLVEAVGGLTAKIKGCDAALEELSLTRYPETAALRQISGVGPITALAFVTTIEDPHRFARNRSVGAYLGLCPRRDQSGASDPSLRITKAGDPYLRRLLVGCAHYILGPFGPDSDLRRWGLAYAGRGTNSKKRAVVAVARKLAVLLLSLWKSGETYEPTRHAAAA

SEQ ID NO: 254773 - protein, 311 aa, unidentified
MDTTVVVGIDVSKDRLDVHVLPSGESFSTPRDEQGVGALVQRLAPLGPYAIAMEATGGLETLVAATLNGANLPVIIVNPAQVRAFAQALGKRAKTDAIDAAVIARFVAATKPEIRPLPDADTALLAQLIARRRQIVQMMVAERQRTTQLPTRPLRRSAARLIKALQRELDVLDREIDTTIHGSPIWREKEELLQSVPGVGPVIARTLLAEMPELGALTRREIASLAGLAPWTRQSGRWRGKSFTGGGRASVRTALFMAALVGSRCNPILKAFRQRLDAAGKPKMVALIAVARKLLTILNAMLRDKSPWKTA

SEQ ID NO: 254774 - protein, 440 aa, unidentified
MVEVLHERCAGMDISKRDVKVCIRVPGGRGGRYRNEVTTFGSMTGQILKLRAFLLEQQVTLVVMESTGDYWKPFYYVLENAPFELLLVNPRHVRGLPGRKTDVSDAQWLADLGAHGLVRGSLVPPPPIRELRDLTRTHADLTRDRTREYNRLQSVLEDAGIKLTSVASKVNGVSCRLMLDALVAGERNPKTLAQLAKGSLREKRDELTQAMTGRFTAHHEFMVRLHLQVIDQLTAAIDDLSTRIEVVTGPFRAQLALLETIPGVSTQIAQVIIAETGGDMTKFPTAGHLASWAGICPGHNQSAEVTKKAKTRPGNTYLKGALGNAAMSGIQVHETFPQDRHHRLKPRIGGLRTIVALEHSILRSVWYMLTTNQPYRELGAGYHQRRHPQNEPPRVCRRLHLLGRMGSCQGDRGATRRSCENVLCGWSRRSGRSMRLSGLP

SEQ ID NO: 254775 - protein, 391 aa, unidentified
MPEDAPRPAQAAIRTDLGAIFVSMELSRRAWLITSLSPGAGEKMSKHAVPASDVSGLLRRFAELRRKAVARTGRDFPIIVIQEAGLDGFWIHRVLQSEGIESHVVDAASILTSRRGRRAKTDRIDGETLVRTLMAFKRGEPRVCSMARAPTPQEEDRRRVCRERRTLVGERVRHVNRIKGLLFAQGVFGYEPLRKGRRERLEDLRTGDGRPLPVHLKAQIIRELDRLEVVLEQLKTVEAERDALLKPANDEMPSPAAMLARLKGIGPETAAVLWSEGLFRRFDNRRQVAAYAGLAPTPWQSGSIDHEQGVSKAGNPRLRTTMVELAWLWLQNQPTSTLSLWFHERVRRLGGRMRKTIIVALARKLLIALWRYTTAGVVIEGAVMKATPATI

SEQ ID NO: 254776 - protein, 419 aa, unidentified
MKVVYPICCGVDVHKSFLVATLITTEGIVPTYRKKRFSTFNNSILDFKQWLIENNCFDVCMESTGKYYVPVYNLLEDAIRVTVANPKWVSAVKGNKDDAKDSKWIGDLFRLGLVPGSFIPDKRVRILREYTRYRYKLVSCKSSEKNRFQNAFTVCNVALDSVVSDMFGKSASAITDYLVNGDSFDPEYCVSLLQRSLKKKADAVVQSIEGFKMTEEQKNRIRFVKAHFDFAETMIGKIDQSIAALAAPFESAVALLCTIPGVDRNTAITIISETGADMTQFSSSKRLCSWAGLTPSNNQSAGKKKSVRISRAGVYLKPALVQAAHAAVKCKDSAYYRIKYERISKRRGKKRAIIAIARMMLTAVFHMLSSGEVFNPSDLFQIDIPQELRDKQRDRAIKQAVKLLVSQGIILPENLSLPA

SEQ ID NO: 254777 - protein, 462 aa, unidentified
MMNHGKAGGLSTSWVEEPLFQSVPCLPSHNKLIGSENPCQDGGLVGGQFLLLSCVDGKGGADMDDKERFGWFLGIDVSKETFDACCITKQGERVFSISTSMDRRGFEELIHQLSTVSVAQESVLVGMESTACYHLNLYSFLISLGYPAVVINPLLISNFVKLRLRKTKTDKKDAWVIAQFLLLNRDSLCQTVGSSELSDIRDLSRQRESLVDQMSSIKSDMKRLLTITFPELEHIAGIFTKSMLRLLCQYPSAASMRHAKRSKIARILIPGSYGKQTDTSVQRILKAAEASIGTASPAKEIILKQKVSLLIQLEEHLQELTTILIEHCQEKMRRDMNILTSMKGIGEKTAINFLIEMGGDIKQFESHKKLIAMAGIDPALYQSGKIDRKGKISKRGNRHLRRVIWLMTTKVIQFNERFKQYYLKRIKDGLPYKKAVLATAHKLIRVMFAMLRNKTLFDARMN

SEQ ID NO: 254778 - protein, 375 aa, unidentified
MKIIACDYHPSFQQIAMLDQNTGELSGRRWAHPGEAEAFYRGLQGPVRVGMEAIGNALWFERLLAERGHELWVGDAARIRASAVRPQKTDARDAAPLLPLMLQDGFPRIGVPSPAERDLRQLLLHRHKLVQMRTPVKNQLQHLALNQGVRRQHRLWSRAGLQFLEQLRLPSWTARRRQDLRALRQELERSVAELDQAVEAQALARPEARRLMSQPGVGPVVALAVVLTLGPVERFRCGKPVASYFGLIPRESSSGGRQRLGAISKPGSPFVRALLVQAVPAAVRHDSELRRQYLRLAQRKNRAVATVALARKLAVRWYGILRRGAQASPATGSMPGRPSHSLAEVPEPMRCVGPLASRRSQKQSWSRSRDRIDGW

SEQ ID NO: 254779 - protein, 362 aa, unidentified
MFRPHTLYIRIRIVRKVSEPAFAMKDQDVTDVIRRKQQTAMKYIGIDVSKATFVVAYSSDKGGEIRTFNNTTTGIKQFIGALPKDGSIHCVMEATGNYSALLLYMLNVAGITVSMENPLKIKNFARAMLSTVKTDKIDARLIALYGEKMNPQPFKIQGEAILRLRQKRTVIRQLTKQITAMSNLRGSLAYLPVPDKGATHTVDETVKFLKKKRDRLQAELTDLVKVEFSRQLALLTTIKGIGITLATALIITTGGFTYFQNAKQVSRYLGICPTYEQSGTSVNIRGHINRNGDAYTRGLLYVAAWTASRFNTKCGETYTRLRQNGKPGKLAMIAVANKLIRQAFAVVTHDKEYVDGFVSNRP

SEQ ID NO: 254780 - protein, 425 aa, unidentified
MSSSEVLSSPLDASGFAYVVGIDVGSQACVYTVLQPDKRIIVKPTEVANRDTGFVQVHGSLSHLAVAPQRILIGLEATSRYSENLYQFLAAQGYVLCLLHPRQTHQFAQQRGLRAKTDRLDAATIARVLLSGEARPGYVPDELIVTYRELERLHSQLTDDGARYQNQIQALLVVLFPEFVQVFADPCRRTALALLKRYPSAHALVEAGVEAVAATLREVAARRYGRKTAQQLVGLATQSSASGLATDARALSLKILCDQLQHTLTNLAQVEHELDQLLDRDTGITGLKSMPEFGRKTVAVLRAELGDVTRFQRVDQVVAYAGLDLEVKQSGKWKGQVKLSKRGSGRLRRVLYLAALRSICLPASAFGAYYQRLVARGLKARDALTAVMRKMLIVAYHLLRSNEIYDPTKVCAVAGPPPHTPSSGS

SEQ ID NO: 254781 - protein, 402 aa, unidentified
MTYDYVIGMDVGKYFHHACVLDIDGAQVLSKRINQNEKSLRTLFSTFSANDHKVLVVVDQPNNIGRLTVAVAQDIGIDVRYLPGLAMRQLSRIHAGNAKTDIRDAYIIAHAAKNLPESLRSVDRVEEAFLQLKVLNGIDEDLARSYTRLINQIRSALVGCYPQFEQALRGQIIHRKWVLHLLARYGGPTKIKRLGKAKAAAFARRYKARNPEPVIDAIFAAISEQTVAIAGAKYAEMGVAMSAKDALLKLEHRKQIEQEVIELINDIPHTQILLSMPGIGPKTAAQILMTAGDMSGFPTAGHLASYAGLSPRTNQSGTSIMSNSLNRAGNKKLKNALWQSSFASIRFHERSRQFYERKRREGKRHNAAVVALARRRLNVLYAMMSNHEYYRDPDQSQEVKAA

SEQ ID NO: 254782 - protein, 338 aa, unidentified
MALYCGIDLHSRDCWLAILDEKRKVVHESKVGNDLGALLEILEPYREDLEGVAVESTYNWYWLVDGLEEAGYQMHLVNTWAVKQWEGLKYTDDRHDARWLAHLLSLGILPVGWICPKEERSVRDLLRRRAFLVRKRTSFLLAMRGAFECRTGIRTTSSEVKQWTAEEVESYLDDEIEALGITCLLEPMQSLNGQIRIIEKEALARARLREEFGPLLTVWGIGKVLSLTMMYEVGDISRFKKVGNFASYCRLVKSTRLSAGKRKGSGNARNGNPYLSWAFSESAHFAVRYHPEAKKYFQRKRSKTNGIIAIRAVAHKLARAAYYVMKDQVAFEPEKTFG

SEQ ID NO: 254783 - protein, 413 aa, unidentified
MSIDPSAVPVRVTAGVDWARDDHAVCVVGDQGEVLDRFTVAHDAAGLKQMAARLLRAGVSQVGIERGDGPVVGALLAAALTVFVIPPGQIKNLRSRYGSAGNKDDRFDSYVLADVVRTDIRRLRPMACDSEQTTALRATVRARRDLVGHRVAAANQLRAHLQIVFPAAAALFADIDSAITLAFLSRFTTPEQADWLSPRRMAAWLKSVAYSGKTDPALLHARLTAAPRGVTGQHAAVHAQTTLALVAVLQTLNAQIRALSASIAGQLAAHPDAVIFTSLPRSGTVRAARLLAEIGDARGRFPTRDSLTCLAGVAPSTRQSGKVRAVTFRWGADKQLRDALCDFAADSRRASPWAADLYSKAIARGCDHPHAVRILARAWAHVIWRCWQDNIPYDPAAHNSLQALLSQHQPVAA

SEQ ID NO: 254784 - protein, 337 aa, unidentified
MVYGAIDLHMRYSQVRIIDAEGQLVRETRVATTPERLTAAFAARGPMRILLETGTESEWVAQVLEAAGHTVIVADPNFAPMYGDVRRHVKTDSRDVTALAEANRRGWYRPAHRTSAGQRERRQLLQARRQLVRMRTGTISVIRALLRQSGYRAGTGGSEAFGDRLTRLTLPAPLAATLAPLVRTLATLRTEIRACDAHVERVAATDPIVRRLQTVPGIGPVVAVTFRAFVDDVARFPSAAQLSAAIGLVPREASSGERRQRGRLTKAGPSDLRSLLVQAGWVCWQRCRRSPLRAWTDQLAARRGKRIAVVALARRLSRILYAIWRDDTVFEGSRVAA

SEQ ID NO: 254785 - protein, 316 aa, unidentified
METPQPFVGIDVSSQRLDVDSLPASHHFSESNTEDGIASLVLRLRKLNPQIVLLEATGGYEVPAAYALYEAGLPVVIMNPKALRHFAKAIGKLAKTDKLDAQVLALYAQSIRPPVRPLKDQEQLELANLMTRRRQLQGMIVMEENRRRTCTPKVRGNIDQHLAYLRQLLKDLDREIHDSIRRTPLWHENSEILQSFTGIGPKVSASLIANMPELGTLPGAKASALAGLAPMNRDSGQFRGKRKIQGGRPAVRQALYMAALVAAHHNPIIMDFYQRLRLAGKPAKVALTACMRKILVILNAMLKNRTYWNPQLPLAA

SEQ ID NO: 254786 - protein, 385 aa, unidentified
MQKLNDLSRSPSPLDPDGTLIAVIELSLSSWLVAGIVPGVERQPLKKLAVDESALLKLLHRWREEAAKAGHRIKRIAVAFEAGRDGFWLARWLSARDIEAHVIHASSVAVSREHRRAKTDRLDTELLKRSFLGWLRGERDHCKMVAIPTTQDEDAKRPNREHESLVGEQSRIVNRMKAALIRLGIRGFNPKLKKAAERLDGLRTPEGEPIPPNTLAELRRDMVRRRLVSDQIRQIEDARLERLKQAPSDGPHAMVRLLARVIGVGVETADMLVQEVLSRSMRDRRAVARYAGLTGSPDESGRKRREKGLSRSGNARVRRGMIQLAWRFLMFQKDSTLAQWFRARTESARGTRKTMIVALARKLLIALWRLVREGVVPDGVVLRPA

SEQ ID NO: 254787 - protein, 450 aa, unidentified
MAQRKASKGSKLHKARVSLVITHPNAAGIDIGSASHFVAVPPDRDDEPVREFPSFTTDLSAIADWLSACGVEVVAMESTGVYWIPLFELLESRGFKVLLVNARHVKNVSGRKSDVLDCQWLQQLMTYGLLSGAFRPEEQVCVLRSFMRQRSMLLKSQATHVQHMQKALTQMNIQLANVISDVVGETGQKILRAILAGERDGRVLAAMKNSRIHASDEEIAKSLQGNWRAEHLFALKQAVAGFDFVGSQLAEVDQEIERQLQDLEAHEGDPPPGKKRGKARNAPRFNLRSLLFKMCGVDLTRIDGIDVTTALAVISEIGTDMSRFPTEKNFTSWLGLCPGTRITGGKVMSGRTKRCANRAAQALRLAEAALRTSKSALGAYFRRMCSRMEKAKAVTAAAHKLARLIYTLLTKGQEYTDQGQEYYETRYRQRVVNHLSQRVAKLGMKMVPIE

SEQ ID NO: 254788 - protein, 341 aa, unidentified
MQPTTIGLDLAKNVFQVHAVSADGKVLVRRKLRRSEVRDFFAKQPPCLVGMEACASAHYWARELQRLGHRVRLMPATYVKAYAKRGKSDAIDAEAICEAVTRPTMRFVPAKSVDQQAIVMLHRTRDLLVRQRTMLANALRGHLAEFGVVGAKGFWRLEELVAMARTTPASQLPEMARECIETIVVQLEALAERISAVERSIQEWHRQNEASQRLETIPGIGVITATAMAAFVTDIGVFQSARQFAAWLGLTPKLSGTGGKVQLGRISKAGDRNLRRLLVLGATSLVHRARIEPAKLPWIAALLARRPPRVVTVAVANKLARIAWAVLSRAEVYRHNVVAAA

SEQ ID NO: 254789 - protein, 344 aa, unidentified
MQITTIGLDLAKNVFQVHGVDATDQVVVRKSLRRAQMLPFFAKLPACLVGIEACGTSHHWARELIKLGHEVRLMPPAYVKPYVKRGKTDAADAEAVCEAVTRPTMRFVPVKSPEQQAALSMHRTRDLLVKQRTQLINMIRGLLAEFGVDIPKGLERALLMARQIVDGKAPDVPLEAAKIVGTLSQQALDTHVRLREIDRDLAVWLRGNDVARRLTTIPGIGPVGATALAASVTDPHQFCSGRQFAAWLGLTPLQKSSGGKERLGRITKMGDKYLRKLLIVGMTSLVRRAKQNPGKIDPRLADLLARKPIRVATVAMANKTARVIWAIMARGEIYRTGHQPALAA

SEQ ID NO: 254790 - protein, 336 aa, unidentified
MIKYIGLDAHSSTCTFNVTDERGREVDNTTIESNGRLLVKYVRGVEGVKKLTFEECELSNWLYEILRPEVDELIVCNPVANGDYKKKKTDKMDARKLSNLLRGGFLVPVYHDGSKRERLRSLMSGYQDFIEEGVRLKNRYKSLFRKSGKKIKGEALYNDESFLEGLERRDFQFIGTQIYQLLEKMEEGRQEYVKEIVRCSKGFKEIKYLKSIPGIGSIQAAKIVSQVIDPERFSSKYKYYSYCGLVRHKRISDGRGYGSEKIWGNRILKCVYKMAGHSVLKGKSGLRNYYDTLRLKGIGHDNAYNAVCRKIAAISLSVWRKSEKYDDRLITGNLIK

SEQ ID NO: 254791 - protein, 306 aa, unidentified
MGGVGVDVSKPILDVAWSSGKERAFANSLTGWKALARGLSKDDRIVLEATGDYEQGVLDYLTQAGFWVCRVNARQARDFAKGMGLLAKTDRLDARMLAQMACVVGTLNRYVPPPPAQREIGQWITRRQQVVETLHRVRQRLAMLEDAQLRRWAQQELLAATRQLRRIEQGLRERLQALPVRSAFAHVKGAGVVLTTTLIGLVPELGRLSRRAIAKLIGVAPLNDDSGTRHGRRSVWGGRALVRAVLYMATLTAVRHEPPLRTMYQRLRANGKAKKVALVACMRKFLVILNARVREHYEQNPPAPAL

SEQ ID NO: 254792 - protein, 370 aa, unidentified
MLDTTTFVGLDVHARSIKAVSLDVMTGEVRCATFGYDAGAVAEWVRSVDPKAKCVYESGVTGFDLQKRLSGLGVGCVVGAVSKMIKPSADRRRKNDRNDAEFLARMLSVGNVVEVWVPDDECEAARDLTRALEDARDDLSRSKQRLSKFLLRHGLVFDERTPTGRRKGNWTRAHWSWIESIRFAEGADNDVLAYYVDAVRRAAEEKARLEGLVEAEARKPRWRKRVDSLRCLKGVDTASAADLVFEAGEFSRFRNARSFAAWVGLTPSEHSSGESDRRGAITKAGNKHLRKTLVEAAWHYLTCSGRPKDLAKGQAPDRGARRHAAKGVRRLVERREALLARGVHGNKANVATARELACWVWAVGLMAEEA

SEQ ID NO: 254793 - protein, 368 aa, unidentified
MKKNSTRPPSRKASGRPAAIGMDLGDKSSRYCVLDEEGEIVKEDSVGTTKKAMLQVFGSMPRCRIAIEVGTHSPWVSRLLKNLGFEVTVANSRSVPLISASTQKSDRRDAQMLARLVRVDPELLRPIRHRGEQAQTDLMRIKVRAALVEARTSLVNAARGLTKAAGERLPSCDADAMGEKQAEGLPLELQAGLRPLLQQVESLTEKIKACDAELKQIAEERYQETELLQQIKGVGPLIALTFVLTVEDPERFKKSRDVGCYVGLRPKRSESGEQQPQLGITKEGDIYLRKMLVQGAHYILGYHGPDTDLRRWGLKLAQRGGKNAKKRAIVAVARKLGILLHRLWVSGEVYEPLRNSNARQAAAQRAAA

SEQ ID NO: 254794 - protein, 388 aa, unidentified
MFFLGIDIGKNSHVASLIDDKKKVIFKAFSFSNSTEGANSLIKKLEPFCDSLDIAMEATGHYWINLFSFLLQKNFSVHLINPIQTDGWRNSTEIRKRKNDTIDSILIADLLRYGDFVESTLSNEDYLSLKNLTRFRSYLISSTGDLKRKTIALLDQVFPEYEKCFSDIFGKTSKEILLSFTTPQEFENISSSKLTKALENITLKKFAKKKIEELSEKAKTTIGIKFCLDSFSLQIKMLIEQIIFIETQVESIEEEISTIMSKLDSPITTIPGIGSVIGATILGELGDISRFSNASKVVAYAGLDSVVSQSGNYEAKSMSISKRGSSYLRKVLFQAALRAEFCDPVFSDYYQKKIAQEKHHLVATNAVARKLCYTIFAVLTKNEAYKIQ

SEQ ID NO: 254795 - protein, 376 aa, unidentified
MSKLQFVGLDVHAETIAVAVAEIGGEVRSLGVIPNRLESVRKLVHKLGPVQHLRTCYEAGPTGYVLYWQLTQMGVACEVIAPTLVPTKAGDRVKTDRRDAEKLARCHRAGELTAVWVPDAAHEALRDLVRAREAAKKDQLKARHRLGKFLLRHGQQRPEGVKAWTKKHREWIKGHVRFAEAALEATLADYVEEVDHVGTRIVKLEKAIDEAIRQAPPEIRAVIEALQALRGVAQTTAASIVSELGSLSRFPSPRQLMGYSGLVASEHSSGNRVQRGGITKTGNGHLRRVIMEAAWAYQHRPNVIGNLQRRQKNLALSEEVKTIAWKAQQRLHKRYRALDARGKNKNQIVTAVGRELLGFIWAIAVETEKKQMAKAA

SEQ ID NO: 254796 - protein, 364 aa, unidentified
MTIQYYAGLDVHKDSILISVFQNNEREPLFEKEVPGDGKRAAEVLLRLHQKGTVIACYESGCTGFTLQRYFLSKGIECLIAATSRIPRRPGDRVKTDKRDARNLAKLLRAGEITAVQSPSIDDEAARDYLRSRDDIKRELKRSRQRLLSFVLRHGYRYSTTSYWTLKHRKWLKELSFNHPLLQETFKVYYYHIEELEDKLILMDDKIQAIAQSDRYQKSINALRCFRGIDYLTALSLVCETGDYHRFPNAESFMSYLGLVPGEHSSGDKRMQGGITKTGNTHLRRLLIEASWHYRHKGPAGKRLTARRKGQPQEYIAYADKALRRLQKKFSKIVYRGKLKQVAATAVARELAGFVWGMMTENIE

SEQ ID NO: 254797 - protein, 349 aa, unidentified
MLIIGCDFHTRYQQIAMAKEETGELLLERRLDHQSGEAHAFYRSLQAPVRVGIEATGPIHWFEPLLAELGHELWIGDSARIRASDVRKQKTDQRDAALILDLLLAKRFPKIWVPTPTERDFRQLLVHRHKLVCLRTTLGNQLHALAMSQGLCRKKKLFTRKGRVELAGLTLGLWASRRRAELLKLLDQLESQIAELDHAVLEEAERREDAVLLMTHPGVGSVTSLAFVLTIGSVTRFCCSRKLVSYLGLNPSEESSGGRRRTGAISKQGNTMLRWLLVEAAQKAAQCDPALRQDYQRLKFRRGHAVAKVAIARKLAVRMYWILRSGAGYAPLVRMQGSPRGTLVHASTP

SEQ ID NO: 254798 - protein, 348 aa, unidentified
MALTIVEDTRAVTGGVDTHADMHVAAALDPVGGLLGVGEFPATAAGYARLLGWLGGFGTVCLAGIGGTGSYGAGLARHVTAAGIRVVEVDRSDRQDRRRQGKSDPLDAVSAARAAQSGRARGEPKGRDGAVEAIRALMVAKRSARSERTQTINQARALIVTGPDDLRARFARHTAAGLVSELAALRPRPGATVGYATRIALRELGRRAEFLDGQLGRLDELIVPLVTARAPALLALHGVGPDTAALLLIAAGDHPHRLRSEAAWAHLCAVAPIPASSGKRTRHRLNPGGNREANHALWRIVITRMSSHAPTRAYVERRTKEGLSKKEIIRCLKRYAARQVYRHLRPAG

SEQ ID NO: 254799 - protein, 353 aa, unidentified
MTDIVSHTDRIATIGMDLGKRSFHLIGMDARGKVIMRQQLSRGRLERHMANLQPCLVGVEACAGAHHIGRRLSAFGHNVRLIPGQYVKPFRKGQKNDYRDAEAIAEAVQRPTMRFVPIKSAEQLDLQALHRIRSRLVGHRTAVINQLRSFLLECGVIVPQGPARLREILPSVLAQRTDVLSPRIIRLIEELADDWRRLDDRVDAVTSEVHALARQDECCRRLTSVPGIGALTASAVVATIGNGAAFSKGRDFAAWLGLVPKQLSTGDRTILGRLSKRGNKYVRTLFIIGARAVLAKPGSWAKFGLQGWLAAAAKRLHHNVLAAALANKLARIAWSVLYHGRSFARDFEPQSVS

SEQ ID NO: 254800 - protein, 344 aa, unidentified
MQPQEYVGIDLHRRRSVIVRRSAEGETLEVTKVDNDDLLAFERAVTAAGEHPEVVLEACYGWYWATDLLEELGCKVHLAHPLGNNWGNRRVKNDTRDAEDLADLLRLGRLAEAWIAPPKVRELRELVRYRAKLVSLRTNCKLQVYAVLAKEGVYVPMTDLFGASGTELLETCHLATAYRIRVESLRDLIEVFDREITKLEGDLRQKLRGHAGYQAIQQIPGIGPLFASVFVAEIGDVTRFRSPAQLASWAGLTPKHRESDLTVHRGPITKQGSRLVRWAAVEAAQRQANGTKLRADFVRITSHHGDSAGARKIARVAVARRIVTLVYYGLRDGTIRSKAILEAA

SEQ ID NO: 254801 - protein, 482 aa, unidentified
MKPKSPLGTNKTNDHAMQGRWQEMNRRQRRETMRKIQSEDLSLEVIHRNAAGIDIGNESHYVAVPPSRDSQPVRCYGCTTGELKAMADWLKQCGIQTVAMQSTGVYWVAVYDILEQVGLEVYLVNARDTKNLPGRKSDVQESQWLMKLHTYGLLRNSFRPVQEIRTMRTYWRQRNDLVQSAGRHIQRIQKTLTQMNIQLANVLSDVSGVTGQAIIKAILEGERDPHKLAAFRDSRVKASEGQIARSLEGNWQPDLLFVLKQEQDGYEFCQKQMAECDQQLKQYLQNREDRSQGAALPEEQRKARRQKKKGNKPQFDLRAELFRLTGTDLTRIDSIDVMTATTIISEAGYDMSKWGTENHFVSWLRLCPDNRISGGKIIGKGRLPTNNRATVALRMAASTLRLSDTYLGAQFRRLRTKLGTPCAIKAMAAKLARLVYRMLRYGMKYLDRGAAFYDAEHRRLQIKHLKWKAANLGLQIVEAPAT

SEQ ID NO: 254802 - protein, 349 aa, unidentified
MIARPDAACFVGIDLHKDTLTACVLRGRDREVSYVKLACKCRDQIRSFFASLPQPSAVAIETVGFYRWLWTELEPLAGQLVLCDARGARALAGRRIKTDREDALNVALLLADGRLPLAWAPPENVQLLRNWTRHRNGLTRQHAKVLHHVKSTLNRLNFPGPVRLDAAALQRYLLAGVERFSADDVTMLWQHQRRLIEIEQDRAQSERRISEMMRAPEFARIREIIESVPGVGLVTAATVIAEIGDFSRFPDSKAIGRYAGLAPTVYASGNSSRLGHISKTGAPDLRWVLQQAAWTAIRCDAGFKKTWLRIAKTAGKKAAAVAIARKILVLMWTLQRKDEPYKSREPIAA

SEQ ID NO: 254803 - protein, 313 aa, unidentified
MSETFVGIDVSKASLDVAVRPSGESWVATNDEAGIGELVARLMKLGTTLVVVEATGGLEIALVAELAAAMPVAVVNPRQVRDFAKATGQLAKTDQIEAAVLARFGEAIRPEPRPLKDEETRHLAALVSRRRQLQSMIVAESNRLAAATKKLHKGIQKHIDWLRRELRLLERDLDDTIKSSPVWREKEDLMRGVKGIGSVSAATMLAEVPELGTLNRKQIAALVGVAPINRDSGTLRGKRAIWGGRATARAVLYMASLSALRSNPAFRAFYRRLLAAGKPKKVAITAVMRKLLVVLNAIVRDRLPWDPQRAVQA

SEQ ID NO: 254804 - protein, 351 aa, unidentified
MKKIVIGIDVAKEKLDASAIDVRNGQLGVVKLGYRQFENRPMGFRRMLVWARCLIKDVSLCEVLFCCETTGGYDRMLCDYMYANGADIWRESALQIKLKSGLRRGKDDKADSLIIAEYAMRHMDKAVIYQSPSSTIRELKALLLYRHKLTQEKTAKKVRMTQLKETAAKSKSMSFIVRDARKSINMLEKSIKECEKQIQEVFKSDESLQKNFTHLKSIKGVAIVNATAMIAYSNNFKNISTANKMATYYGVASFRKKSGTSIDKKDNVRQYSSSMLRAYLTQAAECTIEEHGIYHDYYMRKKAEGKPYGVILNNIKNKLIHLAFSLVENDMDYEENHEFIRLQKNKANENI

SEQ ID NO: 254805 - protein, 337 aa, unidentified
MKVTLIGIDLAKNIFQVCGVNQAGKRVFNRQVRRAKLMSLLIQHPDAVIAMEACGGSNYWGRELKNRGVKVMLIPPQHVKPFVKGNKTDRNDAFAITEAAKRPGLRCVEPRTLAQTDMIQVHRVLDRMIRQRTALINQLRGFLSEYGIVVSRGKERLLSAIPDLLEDADNGLTPSSRALYQAMYDDWRQMNASIDRIEKVLEGQANTDEAAQRLMQIRGVAKKISTATIAHAGNGNGYKNGRHFSANLGLVPREHSSGGKQKLGGITKRGNRYLRRLLIQGAWSVIKNADKSDDRMSRWARQLVERRGKHKAVVAVANKMARIMWSMLYHQTEYRAN

SEQ ID NO: 254806 - protein, 375 aa, unidentified
MMHVAVGQPTQEVKETPMNSVGLDVHKTRCVACVKTPEGRILEEFAFRNNPHGHEEVVTHLKAYPDVQVAIESTGNLWIPIYNRLEDEHIHTILTNPKKTRLIAEAKIKTDRLDARILADLLRANLLSASYVPPPEIRMQRSIIRERARLSRLRTIIKNRIHTLLDKHSIKTPYTDISGKHSLEWLSKLELLAGDRILLDVNLEQLNSLTRSIDRLTETIAISAVDNPEVKLLMGFTGIDYYSAMLLINEIGPIARFASPKKLVSYAGLAPSTHQSGNHTTHGHITKEGNSHIRWILVEAAQHASRHDPRLSHFYLRVMKRRGHNRAVVAVARKMLVTIYHVLNHHREYRGLRPELFENKIRRLRRITESSLQTE

SEQ ID NO: 254807 - protein, 346 aa, unidentified
MTTLPPRITAGVDTHLDVHVTAALDAHGALLDVASFETTAAGYTALLDWLRSFGDVELAGVEGTGSYGAGLARYLAACGVEVAEVIRPNRQARRQRGKSDSADAVAAALAALSGEASGVPKSRDGAAESIRAVRVARAGAVKARTQAGNQLRDLILTAPEQVRQQLAGLPRNRQVDVAARFRPHDLAGPAAGVRAAMASVARRHQALAAEIARLDAALEELVTHAAPAGFLAKRGVATVVAATLLATVGDNPGRVRREASFAALCGASPVDASSGKQIRHRLNRGGDRQANSALWTIAMTRLAHDPRTKAYAARRTTEGKTKKEIIRCLLSGQDGRDHRAVRRPAL

SEQ ID NO: 254808 - protein, 288 aa, unidentified
MAKRITVCAGIDTGKRKLDVAIDGNCELLQVENTAEGHKVLLEWLQRHKVKRIGIEASGGYEQPVVAALRRKRFVVIVFQPAQVRAYAKFHLQWAKNDKIDAALIAACTAAVKKIYPAPDPRLSPFAEQLTMIDQIGEDIMKLKNRIETCRNERIRAVWKEEVARLAKRERAELKALVAAIRQYPDLAERLELIYSVGGAGLPTAVAILVRMPEIGQLTREQVAALAGLAPYDDDSGDQVGARHIDGGRERLRRALNKPTTPLGRNSVTITNSAPSAYSHMLGNAAVK

SEQ ID NO: 254809 - protein, 334 aa, unidentified
MENIALIGIDLGKNSFHIHCQDRRGKAVYRKKFTRPKLIEFLATCPATTIAMEACGGSHFMARKLEELGHSPKLISPQFVRPFVKSNKNDFVDAEAICEAASRPSMRFVQPRTESQQAMRALHRVRESLVQDKVKTTNQMHAFLLEFGISVPRGAAVISRLSTILEDNSLPLYLSQLLLKLQQHYHYLVEQIKDLESQLKRKLDEDEVGQRLLSIPCVGTLTASTISTEIGDGKQYASSRDFAAATGLVPRQYSTGGRTTLLGISKRGNKKIRTLLVQCDRVFIQKLEHQSGKLADWVRDLLCRKSNFVVTCALANKLARIAWALTARQQTYVA

SEQ ID NO: 254810 - protein, 391 aa, unidentified
MSMYFVGIDISKYKHDCCIISAADQQIVSKFTVKNDKDGFEHLLTTLNSLSNPEDIKIGFESTAHYALNLELFLENAHHSFMEVNPVLIKEYKKSTTLRRTKTDSVDCESIARWLMTVEYKPHSKGFYHSYSLKSLTRLRDRLIRQRSFYLVKITNVLDHTFPEFKPFFNERLSKTAIYLLENYGSAEKMAHMNSASYDKLRCASRGKFSIQQFLRLKELAANTVGVNNSIFDIELNSLLTLYNSLCKEIKTLEAEITKLIEEVHPHYMSIPGIGPISAAVIYAEYGDISNFSNPGQMLAFAGIEPGINDSGTESHGGRMVKHGSSQLRYVLLNACLPLIRFDITFATYYAKKRAEGKKHRVAITHVAKKLIRVIYALERQDVDFNIQKLR

SEQ ID NO: 254811 - protein, 414 aa, unidentified
MDIVHDRCCGLDIHKKTVVACLIAPGPDGKPKKEIRSFGTMTGDLLGLADWLQRAGCTHVAMESTGVYWKPIYNVLEDRFNLLLANTKHLKMVPGRKTDVKDCAWIAELLRVGLVQPSFVPERAERESRELTRYRSSLVRERTAEINRLQKTLEGANIKLASVASEVMGKSGRAMLEALVAGTTDPTVLADLALGQLRRKIPELQRALVGRFGAHQCFLVVEQLAHIDELDERIQRVSQEIRERMRPFETEIALLDTIPGVNRWTAEVLLAEIGFDLSRFPSAGHLVSWAGLCPGNRESAGKRKSGRTRKGSPWLRVAVTESAHASGRGKTYLAAQLHRLIPRIGLKKAAIAVGHSILVIVYHVLTRHQPFQDLGALYFDHRHRASLEQRLIHRLEALGNTVTIERTQAPASAA

SEQ ID NO: 254812 - protein, 342 aa, unidentified
MKKVTIIGVDLAKNVFQLHGAAADGTVVFRKKLSRSQFRKFMAAQPACIVAMEACGSAHYWAREMARLGHEPKLIAPRYVKPFIKRQKNDAADAEAIVEAAQRPTMRFVVAKTEEQQSRAIVFRTREQMVNQRTELVNALRAHLYEFGHVAPQGIGHLSRLEEVVEDEHAKLPELVRDTCRDLLDQIWQLTGRIDALKKRIDALSRQAETSSRLQTMPGVGPIAALAIETFAPPMETFKCGRDFAAWLGLVPLQKSTGGKQRLGKTSKMGQRDIRRLLIVGAMAVLRWASRKGASEGSWLARMLGRKPRMLVAIALANKMARGIWAMLTKQEDYRNPAMVSA

SEQ ID NO: 254813 - protein, 316 aa, unidentified
MNSTECSVIGIDASKQRLDCCWGKTNSSFHMANTAQAIKAKLVALRQEREDIFLVVESTGKYHAVLFRVATELEIPIAIVNPKRIRDFAKALGQLAKTDCIDARIIARYALTVALEPTKAPSEELQNLRALVTRRTDLVRMVTQERNRLGDIDDPILTKSLRRHIKWLVGECKALEAQIKATLKSPEFASKLSMLRGFKGIGDLSAAALIAFLPELGTLTKSSIAALAGVAPFADDSGSSCKGNRRILGGRSSVRSALYMSALTAARWNPIIKSFYQSLRAAGKPFKVALVAVMRKIIIILNAMLRDNSNFRTVQA

SEQ ID NO: 254814 - protein, 350 aa, unidentified
MTTMPLRITAGVDTHLDVHVAAALDERGGLLGVESFETTLAGYRRLLGWLRRFGDVELAGVEGTGSYGAGLSRYLHGEGITVVEVDRPNRQRRRRRGKSDSQDAIAAARAAQSGDALGEAKTRDGNVEAMRVLRVARSSARKARTQALNQMRSLISTAPDDIRDELRHLNVYRLLERAAAYRPGTRRDLTSLTKLTLRMLARRAQALEAEVAELDAILQPLVAETAPQLIDRIGIGTDSASALLVAAGDNPARLRSEATFAHLCGASPLDASSGKQERHRLNRGGDRQANAALWRIVVTRMVCDPRTTRYIDRRIKEGRTKKEAFRCLKRFIAREVYNCLPRDQLALDSP

SEQ ID NO: 254815 - protein, 341 aa, unidentified
MKLHVLGIDLGKTVFHLVGLDSTGKVVIRKRCSRRQLLAFTANLQVQLIGMESCSGSHFLGRALRDQGHEVRLMPAQYVKPYVQTNKSDYIDAEAIAEAVQRPRMRFVPIKSEEQLDLQALHRVRERWVMRRTAVVNQIRSLLLERGFTLPKGRSYVEEALPRILEDAELPLSGSFRLLLAQLKLELEQLSARIDQLDAVILKRAKEDDACQRLTAIPGVGPVTATALIAAVGNGSAFQRGRDLAAWVGMVPSEHSSGGKQTLLGISKRGNSYLRRLFVQGARSVLQQRHRQAPGLSSWLAQLLARKHQNVVVVALANKVVRMAWAVLYKNESYRAPVLAT

SEQ ID NO: 254816 - protein, 381 aa, unidentified
MRQVCGLDVHKDSVFVCILNENGIIFQEKFGVLTPELEQLASVLQDHDVGEVCMESTSIYWMPVWRVLEPYVAELKLVNPYFIKQLPGKKSDVKDAEWIATCLLKDLIKGSYVPADIIQQLRQYDRRIFDLNAECVRKLCKLDAALQRCNIRISNYVSTTDGKGYKEVVRLISEGVTDPEVLIKAIHGRTINRAGRDVILASLTGVISGADVDIIRQLREEIDLAQRHRDECQSRMDAICQQHFPEQLKNLQTIPGIKGRSATAIIAEVGTDVSSFQDAAHLVSWCGLKPRNEESAGKIKARSITHGNRFLRKTLIECAWAAAKTQGCFLNKFSYYQTVVRKKNKMKVQVAIARKILTAVWYVMHDNVAYRDYTPDIAPAE

SEQ ID NO: 254817 - protein, 368 aa, unidentified
MNETTTRYLGLDAHAATVTVAVADQTGPPAVYATVANQPAAIRKLVASLGRSSRLVAAYEAGPTGYDLYRQLLALEVQTIVVAPSLTPTRPGDRVKTDARDALSLARLLRSGDLTPVWVPDREHEALRDLVRAREDAKVHLLRTRHHLSKFLLRHGTRPPVGCANWTLRHQAWLRSLRFERVAERLTFEDYLSAEQAARERVAHLEAAIRECITQSRLLPLVTALQCLRGIAFLSAVVIAVEVGDFRRFREAPSFMAYTGLVPSEHSSGQAHRRGHITHTGNAHLRHVLVQAAHNARYLPRGRVELLRKLAGCPPDLIELALRAQTRLHHRYWHLQRRLGSAKAVTAVARELAGFAWAVGCRMETVCG

SEQ ID NO: 254818 - protein, 428 aa, unidentified
MSYRIAGIDVHKKMLAVVVSDVEIESEYQFERRMFSSNPEQLRSLAAWLVEQKAEEIVMESTAQYWKPVWETLERYWKPLCEKREGARRRSGTLHLAQALSNRGRRGRKRDFVDAERLVKRLVARELTLSFVPDAEQRLWRTVTRKKYQLRRDLVRIHNQLEALLEEAHIKLSSLVSDLLGVSARRMLKALADGEINPAALAALAHERLRATPEQLCDALGACTELKPVYRRLLKMTLGHLQILEQQIGQLDQELATLLRPHQDAVERLAEVPGFAVDSAQQIIAEVGPAAATFPSEKCLSSWVGACPGEEESAGVNYSHRSPKGNRHMRRLLNQTANAAVKAKGSIFEIIYRRCVPRLGHNQAIGVIAHRQCRLIWLILHQGVRYEERGPAVTKRSRYQRTWRMIRQLRNLGYRIELPNPQASQAQA

SEQ ID NO: 254819 - protein, 386 aa, unidentified
MQKLNDLSRSLTALEPDGTLIAVIEMSLSSWLVAGIVPGVERQPLKKLAVDESALLKLLHRWREEAEKAGRRIERIVVAFEAGRDGFWLARWLRACGIEAYVIHASSIAVSREHRRAKTDRLDTELLKRSFLGWLRGERDHCKMVAIPTIKDEDAKRPNRERDSLIRERSRIVNRMKAAFVRLGIRGFNPKLKRAAGRLDGLRTPEGAPIPPNTSAELRRDMERRRLVSDQIRQIEEARLERIEQAPSDGPHAMVRLLARVIGVGIETADMLVHEVLSRNMRDRRAVARYAGLTGSPDESGRKRREKGLARSGNDRVRRGMIQLAWRFLLHQKDSALTRWFRARTENARGTRKPMIVALARKLLIALWRLVREGVVPDGVVLRPAQ

SEQ ID NO: 254820 - protein, 428 aa, unidentified
MDKRTKNLIQIRESRTLIVGVDIAKKTHWARMIDNQTGIETGAAFSFKNNTEGFSRLLGKMTRAREQIHAKGIVVAMEPSGHYWKPLAAYLIGLGITVVTVNPYHVKRQKELDDNSPTKNDRKDALIIAILTWGGRFSNCYLPTGVWAELRGYTAMRQQQKRKLNAPLNNLVAILDEYFPEYQEVFKILAGKASQHVLRHMPFPEDILRFTVEELARELKGATSNRVGEKKAALLLQKAMTSIGIKEGLAMARLRLSNCMEEIAFLQGQLARTEAAMADALLRTGMSQSLLGIKGVGVVIAASFLGEVGYLKRFENWRQVRKLAGYNLVENSSGERKGKTCISKRGRPGLRSTLYQASIVLVAHNPEFRELYHYLKTRPENPLKAKQALVAVACKLLRVMFTLARENRLYDPEKVMGAYRQQQLKIVA

SEQ ID NO: 254821 - protein, 364 aa, unidentified
MNKCHSNTELSSHEGTRCHFNGGTGAIKLGIDVHQDFYVVVMQEGGSNPKPPQRFQKAAFLHWAAKLRRGGAEVHAVYEACGFGFSLQRQLSALSIHCYVACPQKLDEHNKRVKTDGLDAKALCLKLDRFVQGNRDALARVRVPTEKEEQLRALHRQREQLVKVRKQLEAQGRSLLVNHGFEPVKSWWKLRTFAALDVPQWMRELLQNSQPILLALQQKIGALTIQLQSAAAPNQPRGLGLMTSVIIDREIGDWRRFSNRRQIASYTGLCPGEYSSGNTRLQSCVTKHGNPRLRAALLELAWPLVRFQPNYKPIVKWRATLAKGALATGAARKKAIVAVARQLAVDLWRIKTGRLRSEELGLIN

SEQ ID NO: 254822 - protein, 453 aa, unidentified
MSTQLSVLDPLAAFVDVGSEHMHVSIAGGPPEVFGAVTAELHRLRDWLRERGVRSVAMEATGVYWLPLYGVLEAAGLTVRMVNGKHTRNLPGRKSDMKDCQWGSTLHAHGLLPAGFVPPAQIRQLQDYLRLRQDHLTMAASHVQHMQKALERMNVKLHDVLSNVVGVSGLAVIEAILAGERDPEVLLGLCDAQIQKRKAARFREALRGTWAEEHVFALGQAVESWRHYQRQMQACDQRIKEVLDRLEASLTPAEGPGEKAAAGAGPVGGKRPGINAPQIEGLGGLLFRLCGSKDLTVLPSCTSYSVLQLIGEIGLDLSPWPSAKCFTAWLGLAPGSHQSGKRQRGLGRHRNRAGRLICVMARSLARSKDTALGGFYRRMAARRGGLVAIIATARKLAVLIWQAMVKGLHYVEEGLKRYEEKVLQTKHQTLKRLAKQLGVSLVPAPSELSPTQA

SEQ ID NO: 254823 - protein, 314 aa, unidentified
MNGVTTSPARFIGCDVGKKEIVVFDSLTRNVSSIANNREALARFAAGLDPDVLVICEATGGYEAMLLEALAAHGRPAHRADARKVKAFIRSFGTLGKNDSIDARALTRYGAERHLKLPRWKPADKDQSALARLVLTRLDLIKDRTAWSNRSKAPGSPAEIIAPLLAALNEQIRAVEARIKALLDACHTLRERVAVVRTIKGLGPTVAPELIALMPELGSLDRRRIASLAGLAPHPNQSGTRDGYRKVRGGRAAIKPLLLLPAMTAARHDPKLKPFYDRLIADGKKPIVALVAVMRKMIIIANARLRDAAPQQLS

SEQ ID NO: 254824 - protein, 347 aa, unidentified
MLYVGLDLSRKRLDWQALGPEGAVAGVGAVPPDRDGLGLLARRLGDAGQPIKAVIESMTGARFVHDQLELAGWDVRIADAVKARGIAPLACKTDRIDCWVLAELARLELVPEIWLPDPSVRAERERARFRLHLVKHRSSLKNRIHAILFQHGIPNASSDLFGAGGRQLLERLALPEPWASTVRASLALIDTLDEQIDACAQELRELGAEHRYIPLLLTCPGIGWALAYTIASEIGDISRFASPRKLVGYTGLCPRVDQSGERDRRGPLRKNGPNYLRWAYVEAAHTAARCHPPYTAIRERMQARHGKKRGTKIAAIEIARRLAEANWHMLTSNQPFTPAGAAASLAA

SEQ ID NO: 254825 - protein, 381 aa, unidentified
MSRQPAAPAAVLSALMKKQITEKSIEQGSGEGKCNRVLKLGLDMHYRQVTVAMQEEAGAIKAVGRMAHDGFGNWVEKKLKAGWEIYSCYEAGASGYWLHRDLEQMGVKNLVVAPKAMGQDKAQKTDRRDSAELVDQLDRYLGGNRKALSPVAIPSIEQEQKRALIRYHRQIMADRSRYEARGKGLLCAQGIEVQGKWWQPQAWKELKTHGRFQTWMQTQLQGWRSKLLSAEQEQQKLRKQIEALAPALLPKGVGAYSAVALEYELKGLARFKTARALSSYTGLCPGIHSSDGRGKEGSINRCGNAAVRWNLVEMVWRLLQWQPHYQVVRQLGAALVRSKRARKRLVVKAARQLAIDLWRLETGRVSAQELGLVMQPTSKAK

SEQ ID NO: 254826 - protein, 314 aa, unidentified
MDANGRLVCNERIRTDVRDIGHFFERIGTNDELKVVMEATGFYFWIYDVVKEREHDVIVVHPSAAKPLMKRTKNDKNDAYMLAKLLRSGSLESIYVPSSEVREPRELTRHRESLVRKKGDLKREVLAHLLQKGVKVPGEYHTNFTQKHIAWMRSMDDFVLNDRLDVPEAIAEKIVKVEGTIKERHGTDEEVELMRTIPGIGLVTASVIKAEIGDITRFSSSKDLAAYVGLTPMTYQSGEKEWGGHTRPGNNRIKHVLIEATLFHFHYCPDSKISRYYSGKKDSIGNKKAIVAGGRKLMEAIYFMLVRKQAFHAH

SEQ ID NO: 254827 - protein, 405 aa, unidentified
MFDTEDVGVFLGLDVGKSSHHGHGLTPAGKKVFDKQLPNSEPKLRAVFDKLTAKFGTVLVIVDQPASIGALPLTVARDAGCQVAYLPGLAMRRIADLYPGEAKTDAKDAAVIADAARTMPHTLRSLELTDEITAELTVLVGFDQDLAAEATRTSNRIRGLLTQFHPSLERVLGPRLDHQAVTWLLERYGSPAALRKAGRRRLVELIRPKAPRMAQRLIDDVFDALDEQTVVVPGTGTLDIVVPSLAASLAAVHTQRRALEAQINALLEAHPLSPVLTSMPGVGVRTAAVLLVTVGDGTSFPTAAHLASYAGLAPTTKSSGTSIHGEHAPRGGNRQLKRAMFLSAFACMNADPASRTYYDKQRARGKTHTQALLRLARQRISVLFAMLRDGTFYEPRIPEDVELAA

SEQ ID NO: 254828 - protein, 335 aa, unidentified
MDGQYVGIDLHRRRSLIVRKNGDGVTQATTRIANDPMRLAEVIGEAGSHPSVVVEATYGWYWAVDLLQELGCDVHLAAPSGLNWGQRRVKNDERDATDLIDLLCVGRLPEAWIAPPETRELRELVRYRFKLVGLRTGLKAQVHAVMAKNGVLPSRIDMFGPGGTAQLDALELPVAYTTRLESLRGLITTLDNEVSTMERQVHELLRGDAGYQAIQHLNGVGRVLAAMFCAEIGDVHRFRSAKALCSWAGMTPRHHESDTKVIRGRVTKQGSRLVRWAAVEAVAHMRGGPKLQVDYHRIAERRGVNKARVAVARKLLTLVYYGLRDGEIRALREAA

SEQ ID NO: 254829 - protein, 419 aa, unidentified
MSFKIFRKNCCGLDVHKTWIYACIGITDSFKRTEYKQARFSSFTKGLQELCLWLAKYNCIDVCMESTGKYWIPVFNVLEKAYVSVILSHPKYTKPQKGNKTDRKDAKWICDLFMCDMVKPSFIPPADIRHLRDLVRYRFKLICMITGEKNRAQNCLTVSNLKLDDVFSDVFGKSSRSITEYILEHPGDLFDVTPFVDRRCKTPIEEIQAAVDGAISPEQAVKLRQCLNHIDELEKHLEEIEQEILHLSDKYQAALDLIRTVPGFDKNPMTAIQVLSEIGGDMSVFPSAKHLVSWAGCCPRNDQSSRKIKSTRISRAGSYFKPVLVQIANALIKSKKHPEFTTRYRRIKARRGHKKAIIAICRMILTAIWHILTDLKPYTPEGFLESRPVNKEKVLTISQALNLIKQRGYIIKDDVGPVT

SEQ ID NO: 254830 - protein, 405 aa, unidentified
MICVGNDWASDHHDVCVMDEHGTTLATRRLPENAAGVTAMHDLLARFAHDPSEVVVGIETDHGMWVAALVAAGYQVYAINPLSVSRYRDRHHVGGTKSDKADAKTLADLVRTDRHNHRLVAADTVEVKAITVMARTHQNLVWARSAQQNVLRAQLGAYYPAAVDAFGGDLAHKDCLAVLRRAPTPRQGAALTVAAIRSALKQGGRQRNTDTRAREIQQALRGGGHLSAPEALTAASAATVTVTVNMLTTLNTQIDQLETSMAQSFRAHPDAEIYLSMPGVGDITGARMLGEFGDDPERYATAKSRRNYAGTSPRTIASGKGHVVLARHIRNTRLNAAAMAMAQSALTGSPGARVYYDSLRDQKKSHPQALRALANRLIGILHGCLKHRTLYNEHTAWNHRANLAA

SEQ ID NO: 254831 - protein, 401 aa, unidentified
MQQRLWAGIDAGKTAHHCMVVDADGQRVLSRRIDNDESALLELIRAVTSLAEGGHLTWAIDLNAGGAALLITLLLAHDQELLYIPGRTVHHAAGSYRGDGKTDAKDATIIADQARMRRDLHPLRRGDELVAELRILTSRRSDLSADRTRTINRLRERLGEYFPALERAFDYSNNQAALILLTGYQTPAALRRIGTARLETWLQNRHARKASSVAASAVAAAHTQYTVVPGEQLAADLVARLTQEVIDLDAALKEIDVMIEDRFRRHRYAEIIVSLPGFGPRLGAEFLAALGGDIALYDSADRLAGVAGLAPVPRDSGRVSGNLHRPRRFNRRLLRASYLAAQLSIRHDPASKHYYDRKRAEGKRHTQAVLALARRRNNVLWAMLRDRTHYQQPTGDPATAA

SEQ ID NO: 254832 - protein, 359 aa, unidentified
MRIIGCDLHARQQTVAMLDTTTGEVVEKTLLHEASNVREFYSTLPRPVRVGIEATGSMQWFVNLMEELGIECQVGHPAKIRAAEPRKQKHDRRDADLILKLLVENRFPAIWLPSQELLDLRSLLRHRHQWVRMRTRVQNALQAIALANGLRRGPSLWSHDGQSAIASLPLAPHTAHRRSELQALYGKFETEIEQLNQRVEEQAGGRPGAQLLMTHPGVGPVTALATDVFLGDPTRFADGKVLASYVGIIPREYSSGGRQRLGGLSKQGNPLLRFLWGEAGAHAVRRDPELQRFYRRKLIQKGLGKARMAVARKLGIRLWIMLRDQIDYNEFCRRGQKNGAACAGIPGTRYGATSHRPID

SEQ ID NO: 254833 - protein, 365 aa, unidentified
MFQDTTYIGLDVHKRSIAVAVRQAGVLAHEEQLPHERAAVARWARRWKRQSGGKLVCAYEAGACGYALQRQLAGLGIACQVVAPSLVPRKPGERIKTDRRDARKLAEYLQGGHLTPVQPPTPAQEAVRDLSRAREDAKQDRMRGRHRLTKFLLRHGKTYTPGRKHWTGAHRAWLAKLSFQEPAAQVVFDDYRLAVAQLDGRIEALDHQIEKASQQAPYRAAVGALRCFRGIDTLTAFGLVTELHSIEHFDRASGLMAFVGLVPSEASSGERQHRGAITKAGNGHARKLLIEAAWHARHKPAIPLALRKRREGQPPEVVAMADVAQHRLHRRYWHLVQRGKPITVAATAVARELAGFVWAALRATA

SEQ ID NO: 254834 - protein, 376 aa, unidentified
MREKLRFLGLDVHAETIAVAVAEPDGEVRNLGTIANREDSIRKFIKKLGSPEQLRACYEAGPTGFVLYWQLTQLGVDCVVVAPTLVPKKPGDRVKTDRRDALKLARSHRSGDLTAVWVPDEDSEALRDLVRQREAAKQDQLRARHRLTKFLLRTGQRPPLGLKAWTERYMRWLEQVRFTQPAQEVTLRDCLNEVEHMSARVKRLEEAILEVVKLAPQSMQEVIRGLQALRGVAHISAVTIAAELGNISSRFQSARKLMGYSGVFPSEDSSGNRIRRGGITKTGNAHLRRIVVESAWCYRHWPRVGARLRKRQQGIPAEITEIAWKAQNRLHKRYMRLSMAGKDPRKVMTAVARELLGFIWAIAIKAEQAFQQLIAA

SEQ ID NO: 254835 - protein, 568 aa, unidentified
MTPRFHPSAPAPDSDFATKPRPDPPPNPDQQAAGEYRQRKARTLAKMQDKQRVRVNAMPVLRAHAAGIDAGQSRHWVCIGFTDDPDNDHQLVREYQTHTDSLRQLVGWLKENQVTSAAVESTSFYAEVLVEMLEQAGIEVFLVDPSYTKQLQGRPKTDKRDAQWIFRLHSVGLLGSAFRPQEQTRVLRNYLRHRARVVRQAVRHIHHMQMALELMNLKLRCVLDDITGSTGLKIVKAILSGVRDPHRLAALRHTQCKHSAKEMVQALDGNYKDEHLFTLKLAYESWEFHQRQLDSIDQEIAKQLEKMKRAGALPALPRRKNNPKKANSARFDVRTALYYVVGIDLTEMEGIDELTALTIVSEIGTELSKFKTVGHFCSWLGLCPNPNESGKQKRPSRTRPGVNRTAQALRMGASSLHSSHSALGAYLRRMKSRMGAPAAVTATAHKLARLVYYALKHGMPYVRKTQEEYEAQIREQRIKSLQKKARQLGFTLIENPVRTGGDTPVPVVVTEKEEPAQEPEREKVKEPEPAQKLEKKPSKGAGTKKKAEVAGAAQAKKKTKKAAAATRP

SEQ ID NO: 254836 - protein, 349 aa, unidentified
MRFYNQQHRFYCGVDLHARTLSLCVLDAKGSIVRQQTITAGPHAFLQAVAPFRDGLAVACECMFAWYWLADLCEQEKIPFVLGHALYMKAIHGGKAKTDKIDAHKIAVLLRGGMLPQAYVYPKGMRETRDLLRRRTFLVRRRAEALVHLSNTNSQYNQPPFAKKLAYAANRAQLDIVERFSDPSVQKNVAVDLALIDAYDTQIADLELYLARTAKVDDPQAFHRLRSVPGIGKVLALVLLYEIHDIRRFPEVGQFLSYARLVRCSHESAGKKQGTGGNKIGNAHLKWAFSEAACLLLRESEQAKKWLARREKKHGKARALGALAARLGRAVYHLLRKREVFDRKRFFAS

SEQ ID NO: 254837 - protein, 374 aa, unidentified
MDDHSVAYVALDTSKLRNAVAIAEAGRDGEIRYLGEIDNAPAATAKLARRLAKKHATLTFAYEAGPTGYGLYRQIKNLGHDCIVVAPSLIPHKPGDRVKTNRRDALSLARQLRAGDLTAVWVPDPHHEAVRDLTRARGAAVRDQRAKRQQVSALLLRLGLYYPGKTTWGKAHMAWLAGQKLAHLEQRIALEEMLHAVRQAGDRIARLEQAIHAAVPDWSLAPSATALMALRGIEFIAATTLLAEIGDLTRFRTPRELMAWLGMVPSEHSTGERTRRGPITKSGNRRARSVLVECAWSYRHPPRVSRDKLARLEAAPPAVRDIAWKAQSRLTARYRALRRAGKLDVVAITAVARELAAFIWAVGLAVGSGRTPEV

SEQ ID NO: 254838 - protein, 342 aa, unidentified
MKDSIYDHYIAIDWSIKNMAIARMTKKSNKITVIDVASDIEDLQAYLKNLRGTKILTIEETTTSQWLYTELREYVDRIIICDPNRNKLLNEGAKTDKIDASKLVQLLKAGLIKEVYHSTDKFLYLRRIVSGYEDLIKAGVRLKNQRYALLRVCGKSGNEKVGSRLASQGEQFVLESLDRQIEAYEQDKQGYEMQFAKLARSNPAIKHQKSLPGIGVINAVKIVARVVTPYRFPDKGHYLSYTGLIKLAKISGGRSYGKKNSRYSRQLKSVYKSGVLAAIGGNNPINDYYNSLIQDGYAQHNARQKACRRLAILSLGVFKSGKRYQPYRSNHVKGGKEGTSSL

SEQ ID NO: 254839 - protein, 343 aa, unidentified
MSGVVTIGLDLAKSIFQIHGVDDAGRTVLRRRLSRHELVPYFAKISPCLIGMEACSAAHHWARELSRFGHSVRLIPPQYAKPYVKRNKTDAADAEAICEAVARPNMRYVPIKTLDQQSVLSLHRVRALFVRQRTAAINTVRGLLTEFGIIAGKGIGRIGELRHRANEADGEVLPDEARAAITEVFEHIDALTERIDATEAKIVAWHKSSEASQRLASAPGVGPITASAIVASVGDARQFRSSRHFAAWLGLTPRLHASGGKEHIGRISKGGDRYLRALLIHGARAIVGTSFRKGIPPRLWLKQLLARRSVNVAAVAVAHKTARALWEMITREEGYRRIAVQAA

SEQ ID NO: 254840 - protein, 376 aa, unidentified
MEHDSTVYVGLDVHKESITIAYAVGMGDVELLGRIGTTNGDIDRLCKRLRSKGRRVQVVYEAGPCGYGLHRQLVAEGFECMVCAPSLIPKKPGERVKTDRRDSIKLVRALRAGDLSAVYVPGIEDEAFRDLARAWVSAKDDLKQARQRLKSFLLSHGVRYPGKADWGPSYRRWVSQHSFSNDWQQLAFEEHRRSLGDRMAQCERLEAALRDSVVNWRFYPAVLGLQAMRGVQFTTAVGMLAEVGDLSRFEHPRQLMAWLGVTPSEHSSGDKRRQGGITKTGNGYARKLLIEAAWSYRHQARVSENIERRHAGLPKRIIDRAWDAQVRLCRRYRKLAVRWKNANVAVVAVARELAGFIWDITRLSMALATPRTGHTA

SEQ ID NO: 254841 - protein, 319 aa, unidentified
MKTINESSFSSCHFYIGVDTHLKNWRVTTRLDGIELKTVSMNPSPVELLNYLRKKYPGGIYHIVYESGFCGFWAARKFKELGVDCIIVNPADVPTSNKEKVNKNDPIDSRKLARELENKSLNGIYIPDIFHEELRSLMRLRYRIVQNQTRIKNRIKSLLYTRGIKIPDRFKGNSRWSAAFINWLEKEVKFDTTAGNYCFMDMISQLKQLREHNKSVLKQLREEAKEKEIAPIIKALQSVPGIAFIIAMSLYTEIIDMKRFSYEDQTNTFVGLVPSTRSSDENIYSNGISFRQNKYLRPLMIEAAWQAVKEDSASASSEA

SEQ ID NO: 254842 - protein, 362 aa, unidentified
MQSTPLIAFDQHAATTVAAVLLPGQRTPALHTLSSDSPTILRFVRRLARQVGAVQCCYEAGPCGFELQRALAADGMACEVIAPALIPRRPGDRIKTDRRDAGQLAVLYRAGALTAIHIPTEHEEAARDLLRCREDIRADLLRARHRLSKFLLRHGRRFTATKKAWSKRHHAWLRGQTWPLPALEQTHRAYLRTVDEAVARLHAVEEDLRALLDLAPLRPRVVRLRCFRGIDDLTALTIAAELGDARRFATAPSLMAFVGLIPSEHSSGTKQARGAITKTGNAHLRRVLVEAAWHYRHHPFVGDTLRTRQRDAPPQVIAQAWTAQQRLHRRYARLAARGKPKQHVVTAVARELTGFVWAALTQ

SEQ ID NO: 254843 - protein, 294 aa, unidentified
MELFVGLDVSIRTTSVCVMEASGKLIRESKVESEPDAIGALLHAIGGPYKRVGLEAGPLSQWLYSGLAAAGYPVICVETRHMKAALSAQINKTDRNDARGIAQMMRVGLFKPVHVKTVRSQEIRMLLTARKFVQTKILDAENNLRGLLRNFGLKVGAVTRLQFERRIIELLEQSPHLRLVIDPLLEVRRVLRKQFQHLQKAMERLAESDDTCKLLMTAPGVGPLVALSFRAGVDEPARFGRSRSVPAHFGLTPSRYQSGEIDRDRGISKCGDAGIRWALVPPGSCCESRSGARR

SEQ ID NO: 254844 - protein, 360 aa, unidentified
MDGSRQEPKMTAGLDLGDKYSYLCLIDQHSGEVVEEGRLRTTPEAFRRRFASGQPMRIAIEAGTHSPWASRVLEECDHEVLVANARKLRLIYANKQKTDEVDAENLARLARVDPKLLYPLKHRSEDSQAHLAIIRSRQALVGARTQLVNHVRGAVKSFGGRLPKCPARSFHNKASERIPEALMPALGPILEQIGSLTQRIRDYERELETISKAHYPETELLRQVEGIGGLTALTFVLTLEDPYRFERSRSVGAYLGLVPARDQSGDTDPQKHISKEGDEMLRKLLVGSAHYILGPFGSDSDLRRHGEKMTSRGGKNAKKRAVVAVARKLSVLLHRLWITGEVYDPLYNTHRRQEQEEEAA

SEQ ID NO: 254845 - protein, 344 aa, unidentified
MSEYAGQQFVGIDLHRRRSVIVRTTGSGEVLESVRILNDVESLDRVIERAGEDPEVVLEATYGWYWAVDALQEAGARVHLAHPLGVKAFEYRRVKNDFRDAADLADLLRMGRLPEAWIAPPATRELRELVRHRATLVALRSHCKAEIHAVLAKCGIQVSMSDLFGVAGTALLDRLQLAAPYAARIASLRRLMDDLDFEIEVFTNAAQGRLDADPGYLAVQQIPGIGAILAAVFVAEVGDVTRFDHAPQLACWAGLTPKHHESDTHVRRGRITKQGSRLVRWAAVESVKRVGPHTRIGALRDRVAERRGGNIGAVAAARQQIEYVFYALRDGHVRALEHPHREAA

SEQ ID NO: 254846 - protein, 424 aa, unidentified
MKVTYQTCCGVDVHKSFLVATIVKTTGGIEPSYQKKRFSTFNNSILEFKQWLLDNHCHDVCMESTGKYWVPVFNLLEDEINVVIANPKWVKAVKGNKDDTKDSKWIGDLFRLGLVKGSYIPCKIVRILREYTRYRYKLVSCRSSEKNRYQNALTVCNVALDSVVSDIFGKSSMSIIDYLLEQSGTSINHEEIASKLLRSLKSKEDAVIESVEGYQMTDAQKYRMRLVRAHMDYITAEINDVDKMIENMIFSNPDFENAVQFLCTIPSVKRDSAITIISETGTDMSQFSSSKRLCCWAGLTPGSNESAGKKKSVRITRAGVYLKPALVQCAHAAVKSDKSPYYKKKYESLVKRRGKKRAIIAIARMILTAIYQMLSTGEQWNPSDLYKIDMPVALVEKQKAKAIKQAKKLLQREGLLPPDEPLAS

SEQ ID NO: 254847 - protein, 341 aa, unidentified
MGQASTIGLDIAKWVFQAHGADATGRVVFRKRLVRAKVLEFFAGQPPCLVALEACGGAHYWARELGKLGHTVRLIPPAYVKPFVKRQKNDVADAEAICEAAQRPGMRFVPVKDEAQQANTVVFRARDLLVRQRTQCINALRGHLAEYGHVVPQGPAHVDSLVALVEDPKSSVPESARGILQVLIRTLNALEEQLKELDGEIARRAKADPVARRLMTIPGIGPIAATAITALVPAPEGFRAGRDFAAWLGLTPLQRSTGGKHKLGAISKMGERTIRRLLILGASAVVRWASRRGAAAGSWLARMLARKPRMLVTTALANKMARIVWALLVKGGTYKAPAVAA

SEQ ID NO: 254848 - protein, 322 aa, unidentified
MNKYKEIFGVDISKDVFDVHGSKSGHDQFKNDASGFKSFQKSLPKESLVIMEATGYYHYRLAQFLFKQSVLVSVVNPLSVKRFIQMKLAKVKTDKSDAKAICEYGQINEVPLYTALTDVQSECLQLFRLMDSFIKKRTATKNKLHGEEVLGIPSSWVYRSLKRDRKHLDKEILGIETKLLSLVKQDQQVQLTLLTSIPGIGLKTALFMIVITDGFEKFENSKQLCSYAGITPTIRESGSSVRGRSRISKVGNRKMRNLLFLCSFTACKHNKGCRDVYERIVNKGKSKKLALIAVSNKLIKQSFAIAKSGLPYDEKYVSVLSK

SEQ ID NO: 254849 - protein, 347 aa, unidentified
MRFYTKQHKHYCGIDLHTNKMYLCILDRQGETVYHRNLKTSPAHFLNAIKPFREDLVVSAECMFTWYWLADLCEDEGIPFILGHALYMRAIHGGKSKNDKIDSMKIAALLKGGLMPQAYTYPRKMRATRDLMRRRNHFMRKRAELFAHTQNTASQYNHQEPLGRIAKPHNREGTVERFDLPCVQKSIEANLEMITTYDRVIAGLERYIVRTAKTHDPVSYALLKTIHGVGRIIALNLLYEIEDIARFPRVQDFSSYSRLIKCAKESNGKKYGTGGKKIGNAHLRWAFSEAAQLFLKGNEAGQKYLQKIANKHGKGKALSILSHKLGRAVYYMLKNQKAFDMKMFLKA

SEQ ID NO: 254850 - protein, 400 aa, unidentified
MLSIGIDVSKGKSTVCGMKPGGEIVYAPFEVQHTREGMLELVSLLRSSGEEVRAVLESTGSYHCPVVAALLENGIFVSVVNSLRMKRFCSQSIRKVKTDRIDAMQIALYGLAYWQELQPTRLPEDTYRELQLLARQYYQMTSLLIKAKVDFNAICDQVLPGMQELMSDHAGRHKLSDFVLRYCHTTHILEMGETRFRKDYCKWAEKKGYRNCERMAALIFATAQNGIPVLPNAPSTQIVITEAIRVLHTVEASRDAILTQMQALAKTLPEYSLVREMPCIGDTLAPRLIAEIGDVRRFHSKRALIAYAGIDAPPYQSGKFCANNRHISKRGNRYLRKTGYEVMQSYVMHKPANDPIFTFIEKKRGEGKSGKLAMVAGLNKFLRAYYGKVTELYCSSSAIE

SEQ ID NO: 254851 - protein, 344 aa, unidentified
MEPMYYIGLDVHKRKISYCVKDSGGKVHAEGSLAARRLDLDRWMKTLPQPWSAAMEATMFTGWIYDHLKPHAAALKVAHPLMLRAIAAAKKKNDRIDASKICDCLRCDFLPECYMAPTAIRERRRTLRYRNLLVRQMVQMKNKIGMLLMEAGVSYNKQRLHKAGYFRELLASNPDIDAGLGSLLRLCRETVVRLQKTESALVRSLERDSSLTDRVERLMTIPAVGPITALTWALEVGDVQRFSSIKKAISYCGLCGAEKSSGNTVQRTPLSKQRNKHLQTTLIEAAKMAPRNSAELAMLYDKEKQKGNANRATLAVARKLVAYLMAVDRGHRNFHVVETSTIAA

SEQ ID NO: 254852 - protein, 478 aa, unidentified
MSELSEIFAVENGEDVRPLYSYGVGIDTHKDFIQICILLKQGDAVRQFEHQSSTAWGSMVNAAEWVRKTIAEKTIPTVYPDPLRYTIESTSTYHMPVIKAFGGKPSVVNPILASSSRRKTDVLDARLLAYQSMTGLWPESFVVPPEIQELRLLMRQRESHQRQCTAISNRINNYILRFGHTIGSTGSVRGITNRTIIEDMCEESFEYTEFPSDIQGGRFICPEGLPDEVKKLIKGMYAEFDVHQSEMKKYQKMAMEHAKRIYWETDGGKVKGAELIKNLMSVPSVGEMMALTWLSEVVTPSRFDLPQKLSAYCGCDPSLKVSAGKVTSQTRRMGNKRLHFQLTTIAGTCINRHSEPFGQWGYALYKKHAKGGYKKACGAVARRIAIALYYIHKRNEPFRYDQYNFFRMEVIDVPLEEMGFNVRINNALIANSLTSSKAIAESFITGAIHKLKGIGKKAVCEIDSWIQSNKTKVKEQKA

SEQ ID NO: 254853 - protein, 418 aa, unidentified
MKTDCETIPCERFLALDIHKHYVLVGGMNSLKEWVLRPRKVQMSRFPEWVQKNLKPTDALVLESTSNAWEIYDLVSPLVAKALVANPLKVGQIAGAKVKTDKLDVERLLILLIADIVPEVWVPPHHVRDLRALISHRWRIHKQIAMTKNRLHSFIHRFNLIPPAGPLFSEKNLSWWQEQEFSSMVRLQIEQDLLILEHLTAHKEAVHQELACLSNRKPWSKDVVFLMQLPGLGVVLSMTVLSAIGEITRFENSKNLVGYAGLGAGIHSSGLKHQGKGITKAGRKELRWAMVEAAWGAVRSDSHWKDQYEQLKKRGKHSNAAIVAIARKLLVSIWHMLAKGESHRHSTEEDLAYKMLIWSQRMDEEALRGMTRQQFAKYGLLRLGKGIHLTRIVRNSLPRRIAPADEVLALLPELNLLE

SEQ ID NO: 254854 - protein, 465 aa, unidentified
MKRPQRRPGKTLASGPSLLERLTPNAAGIDCGAAEHYVAVPADRDAAPVRSFKTFTTDLHRLADWLLACGVTTVAMESTGVYWIPLYEILEARGLDVVLVNAQHVKNVPGRKSDVVDCQWLQQLHSVGLLRGSFRPTAAIAALRAYLRHRETLVQSAATHVQRMQKALVQMNLQLAIVISDITGVTGLRIVRSIVAGQTDPRALAQHRDPRCQAAEADIIAALTGHYRPEHVFVLQQNLELFDAYQRQLAACDAAIEGHVDALAAQAPAPAGPLPGPRTRRKPRDNEPRFDIRTPLHQLTGVDLTQIDAIGPYSALRLLAEIGTDMRRWPTEKHFTSWLTLAPHNKISGGRLLSSKTPPSANRAAGILRMAAMSLGRTETALGAFYRRLAFRVGKAKAITATARKLAILVYCTLKQGLVYHDPGAATYDAQHRQRVIRRLRQRAANLGFSLIDRQTGELLEGAVS

SEQ ID NO: 254855 - protein, 463 aa, unidentified
MRRKKSKKSRKSNPQLLRTIHQHAAGIDLGAREHFVAAPPLEDGEPNVQRFGTTTPELFRLAKWLKDQNVDTVAMESTGVYWIPLFEILESQGFETLLVNARHIRNVPGRKTDMLDCQWIQMLHTCGLLKGSFRPSDEICGLRSLIRERNTMVEQRSDWIRRMQKCLDQMNICVHHAVSDITGTTGMAIIRAIVNGERDPHALARLRDRRCRKTEEQIAEQLTGNWRLEHLFNLEQALKMYDQLCGIVKDYDEKILSYTISLQPEEARDKEVPPPTSKTKAKNFAARGQEPLREALYQLSGVDLTSIDGIGVDTAAVLISELGLDYSKFPNESHFVSYLRLAPNLSISAGKKVPNKSKLTTCTRVSTALRMAALTLRNSKTALGGYYRRIARNKGASVAVFATARKLAELVYRMVCYGQVYVDTGLEAYEDRFNQRKVNYYTNYLKSQGYQVVPIETQEACTA

SEQ ID NO: 254856 - protein, 451 aa, unidentified
MFKQRNKAVSLPVIEPNAAGIDVGATEIFVAVPADRDPEPIRCFPTFTVDLERLADWLQQYHIRTVAMESTGVYWIPLFQILEKHKIDVRLVNAHHVKNVPGTKTDVSDCQWIQHLHSVGLLRGSFRPDDEICAIRSLWRHRDNLIQLATLHLQHMQKALDQMNLQIHHVISDLDGTTGLAIMDAILAGERDPHKLAQLRHPRIRASEETIMKSLVGDHREEHLFTLRQSLKAYRYYQELIQEVDAQVKQMMQRLPSKVAEGEEPPQGSKRRARKTPWRNEPPQLREDLYRAFGVDLTEVPAINSLTAQMLLTEIGPNLDRFPTAAAFCSWLRLCPDPKISGGQVLSSRTRPTKNRAALALRVATQALYHSDSFLGDYFRRMKARMGTPKAMTATAHKLARIIYHMVTTQQQYDSTIFQKQEERRRHQKSAKLHAQARELGFQLVPINCVP

SEQ ID NO: 254857 - protein, 352 aa, unidentified
MEMIALDCHKHYSVASVQSPEGRNLVECRIEHRRGSIRAFLAPYSDGCPVAVETIGNWYWIVEEIEQAGKVPRLVHARKAKLMLGSINKTDKLDVRGLNRLQQAGTLPTVWIPPALLRDQRELPRTRMVFSAMRTRLKNRLHSVLDKYGLQDQLIGISDLFAAGARERLDGCVQQLPAQAAYTSELLLKQLEAVQWVIEALEERIAELFQPTEELKLLDSLPGVGLILGVVLMLEIGDVQRFSCAERLASYAGTVPRVHASGGKTHYGRTRPDVNHYLKWAYAEAANVVAVHPDSLRHPHVGQLYSRIRGRRGHASAIGAVARHLAEATYWMLMKKESYHERGIPEVSPQGR

SEQ ID NO: 254858 - protein, 343 aa, unidentified
MDYFAGLDVSVKETSVCIVDDTGRIVREVKVASEPEALLQVLTNPAYRFKRIGLEAGPLSQWLFSVLTEASLPVTCVETRHMKAVLKAQINKTDRNDARGIAQMMRVGLYRPVHVKTLRSQKLRMLLTHRKLLQSKTIAIENDLRGTLRNFGLKVGMIGKVKFETRIKELIENVPDLAVLVEPLLIVRRVLREQIGILHRRLLAIVRDDDVCRRLMTTPGVGPVVALTYRATVDVPARFRNSKAVGAVFGLTPSQHQSGEIDRIGSISKCGDAMMRTMLFEAAQAMLMRSAKWSWLKAWAMKIARHRGMKKAIVALARRLAVIMHRIWVDGTEFRWTREVAAA

SEQ ID NO: 254859 - protein, 361 aa, unidentified
MSESMALVGLDVHKSQTVAAVLDPVSGELRVERLRGEPERVVPVFLEELERPVEAVYEAGPTGFVLARVAEQRGLDIRVVAPGSIPRAPGDRVKTDRRDAKRLVRLFAAGELRFAFVPSEVDERFRDLVRCIDDVRRDLMRARHRLSKFLLRRGVRFAGKAWTQQHERWLCTLHFEDPLSQATFVDYQCAVQGLAQRRKTLTGVLEAAVPDSSHAETVSRLRCFRSIDTLTAAGLCAEVGDFTRFPKPALLAGFLGIVPSEYTSDEKRTQGHITKAGPSNARRLLVEAAHNCRHRPAVGENLKARQSGQDPRVVRIAWRCQQRLHQRWMHLAGKRGKPAGTVAVACARELAAFCWEAATLD

SEQ ID NO: 254860 - protein, 415 aa, unidentified
MALPLLYACCAGLDVHKATVVACVLLTAANGKVSKAIRTFATTTAGLQQLADWLSSQGVTHLAMESTGIYWRPVFNLLEGRFQVILVNAQHMKAVPGHKTDIKDSEWIAELLRHGLLSASFIPPKPIRDLRDLVRARKTLVYQRTQAINRVQKVLETANIKLSSVATDVLGKSGRDMIEAMLAGISDAETLADLARGRLRKKLPALREALEGRVEPTHRVLLRQLLAQIDFLQAQIDSLSADIEPLLAPYEAQLSRLTQIIGISRLTAVAILAEIGTDMSRFPSAKHLASWAGVAPGNKQSGGKRLKAHTNKGNRHLRATLAEVVWVISHTSGNYLSAQYHRLARRIGKLKAIVAVSHSLLVIIYHLLRDNEDYHELGADFFERLDGSRQRDSAVRRLQALGYKVTLEELQEVSS

SEQ ID NO: 254861 - protein, 414 aa, unidentified
MSYKIAGIDVHKKVLMVVVMDASTPDLKPERRRFATMPSDLRQLSTWLRERGVEEAVMESTAQYWRSVWLELEPYMRLELAQAFSNRAPRGRKHDFKDAERLVRRLIANELILSFVPDGEQRTWRNLTRMKLQLTRDRVRLQSQMECLLEEMRIKLSHVVSDLLGSSGLRILRALAQGETEPKRLALLGDDRLKCSEEQLVDALTGRPQPMHRQMLGLQLERLQLLDGQIAKLNGLIAQAMKPHQDAVIRLAEVPGLGVDSAQQVIAEVGVKAGTFPSAAEFTSWVGTCPGKDESAEENHSTRSAKGNKYLRRVLNQAAHAAVKKNGSHFQAVFRRLLPRLGYQSAIWAIAHRLCRVVWKILHEGVRFIEQGTEPDPKAKKQRARMLARALRKLGYQVAITPISLATSQNETRI

SEQ ID NO: 254862 - protein, 417 aa, unidentified
MTDETNASPCRYVALDIHKHYCVIAAVNRDGQIVLDPVRIEHEDLEAQLQKKILPSDQVVIESTTNAWHYYDLLILLAAKVLVANPIRVKQIAYAKVKTDIRDTLILARLLAANLVPTVWVPPVEVRNLRYLLSQRRRLVGMHTQTVNRMGSVAHRHHLNHPKGKRFIEKNTAWQQDDELSDSEKFQLELDMATGEHLDGQAKKIAEKVASLSHQKPWAESMTYLMQLPGFGVITGMTVLSAIGDITRFESSGKLSSYSGLTAGVEQSGTKNRGKGITKEGRKDLRWAMVEVAQCAVKSDPYWKSRFQALERRVHRNQAIVAIAHQMLELVWHVLTYKQAYRHFSEERIAYKYLTWGWQLDEEARGGLTRQQFARYYLMRLGIGHDLKRIALNPKYPRKLATEAEVLALKPELNQTR

SEQ ID NO: 254863 - protein, 337 aa, unidentified
MSDIHILATDLAKRSFQVCATAPGGAVLFNRAVSRAKLETILREQAPCIVAMEACATSHFWGRFAQALGHDVRLIPPIYVKPFVKRQKNDAADAAAVAEAALRPNLHHVAVKSAEHQARAVAFRTHQSFVGQRTQLINALRGHLAEFGLVVAQGPANLKAVAGIVGDDAVDLPDAVRDIARLYLDQIELLTHKIEELHSRLVMSTKVDDAMRRLCTVPGVGPVTAGAIMAFAPDLRAFASGRNFAAWLGLVPRQRSTGGKTRLGSVSKMGQADIRKLLIVGAMSRIRWIVRRGVLPDNWLGRVLGRKPRMVAAVALANKMARMIWAMMTREENYRMA

SEQ ID NO: 254864 - protein, 425 aa, unidentified
MNYKMQDKQNQLIRRITDKHIVIGVDIAQEIHVARAVDFRGIAVGKSLSFENNERGFKELINWIEDLKIVNDLHAEIVGMEPTGHYWLNLAQWLHNQDIEIVTVNPHLVKNNKENRDNTQSKSDKKDALVIADMVKNGYYAFIHPTSETFEELRILMSNRDAIVKRNVSTVNQINRWIDIVFPEFRQVFKCIQGKGAIATLHLFPTPLELRKMKPEDVINGWKTILKRQPGMKKAQLLIELANRSIGNQRANHAYKLHLEQLLEEYELTKAQLERLDEEINKALKNVTFSDKLLDIKGISEVSLAGILGEAGDLSGFAHGNSLLRHAGLNLSEASSGKWRGQIVVSKRGRSRLRRFLYLATLSMIKNNPEFSKLHENNVNVKKMKRMKSVMKLIGKLARMLVGIARKNEVYCPEKVYPTTTQLAA

SEQ ID NO: 254865 - protein, 424 aa, unidentified
MNLTQNDRLNQVTSDTLVVGVDIGSSTHFARCFDWRGYEFSKRVFRFSNTQVGFLTFIRWVEEMMKKTEKTKVIVGCEPTGCYWLTFQKFLTDRDILLVTVNPYSVKKCKELDDNSPEKSDLKDPKTIAGLVREGRYSTSYLPEGVYAEIREAQVCRDQIMKQHVRLSNQIQGWLQKYFPEYLECYKDFDTASGMMVLEHAPLPEDIIKLGAGGINELWRNAKLRAAGIKRAKTLVEAAQGSVGLFGGEAARLEIWFLINDYQTKTKQLERLDEFLAKEIMKVPHVEKLLAIKGVGLSTVIGFVADVGDIERFTNPKQVQKLAGLEITKASSGKKKGQPCISKRGRRRLRRTMYESARSLISWNEAFSEVFMYYRYRTRNPLGGMQAKIAVACKAIRVFYTILKTGCEFDAEKLRRDIIRPEAA

SEQ ID NO: 254866 - protein, 337 aa, unidentified
MNYSGIDLHSNNSVVSVIDETDRVVAERRLPNDLARILALLAPWRPELAGVVVESTYNWYWLVDGLQAAGFVVHLANTTAIKKYDGLKHSGDETDARYLAHLLRLGILPTGTILPAEHRQVRDLARKRMQLVRSRTSHILAVENITARQSGTRITSNQVKQLDQTTVDQLHLPDDVALAVRANVAVIATLSAQIALVEKRLQEKVAPRPDYALLTTVPGIGQTLATVIVLETGTIERFASAGNFASYARCVDSQRMSNGKKKSEGNTRNGNPYLCWAFIEAANFAMHFSTEARPFYERKKARTNSVIARKALAHKLARACFHMLKERKPFDVNRCFA

SEQ ID NO: 254867 - protein, 338 aa, unidentified
MSIVAVGIDLAKNVFAVHGVGASGKPELVKPDVKRKKLLELIASLPPCLIGMEACSGAHYWAREFQKFGHTVRIMAPKFVAPYRLGGKHTKNDAADAAAICEAVTRPQMRFVLIKTLDQQSHLFIHRAHQGYVAERTALINRARGLLSELGIVLPQAYKAFKQGVHQVLEDLPGYCNQVIGDMLSEIAHLDERIEQDAKLIAKLAKEGEQSRRLMQLSGVGPTTATAIVASIGKGHDFRNGRQFSAWLGLVPRQNSSGGKTKLGSITKAGDSYLRMLLVLGARALLLSAPNKTDPVSRWALQLKERRGYGKAVVAIAAKNARMCWAVLSLGEGFRVPA

SEQ ID NO: 254868 - protein, 364 aa, unidentified
MLIIGCDYHPSGQQVFGIDTESGEVIADRWIAHTGTELEEFYGGLPAGTVVGVECSGNMLWFERRLAQYGHRLRLGDAAKIRSKETRKQKHDRRDAELIARLLREDQFPDLQWVPTLAERDQRQLLMHRHKLVRMRTQVKNQLQHIALNQGQQKKRQLWTKAGRELLESLPLEPWTARRRDDLLRWLDLLNRDCETLEREVERAAEARSEARLLMTHPGIGPVISLAFVLTIGSIERFQRSRELVSYLGLNPTEDSSGERRRLGGISKQGSSFMRLLLIQGAQTAVRGDEDLRRQYRRLASKKHRAVAKVMVARKLAVRMFWMLKTQRTHAELVRMRGSSSHPGVSKTEALSERPASPRIQPRG

SEQ ID NO: 254869 - protein, 338 aa, unidentified
MAFTSFVGIDVSKLTIDAALYVSATDPSLHQQFENRPSGFRKLLAWVHQRGGPTGLLFCLEHTGIYALPLCCFFTQHKLSYSLQSALHVKRSMGIQRAKNDKADAVMLARFAYLYRDEIKISQLPSKTLLKIQHLLAYRQRLVKNKVALEVAANELASFVDKEFSTSIIRDSQKHVVQLMASVRLVDKQLQAVIAEDPVVQKTYQLATSVTGIGLQTAAYLLVHTHCFKSFENWRQLACFAGTAPFDYTSGSSVRGRSRLSKIGDMKLKSLLSSGATSAIQSPNEFSVYYNRKLAEGKPKLVALNGVRNKLISRVFAVVQRGTPYVKIQSYTLPVAAC

SEQ ID NO: 254870 - protein, 341 aa, unidentified
MTLVMGMDQHRAQISAEWIDTITGEVSRARVAPADRDAVRKFLGRFNGSDLEVALEATTGWRFVVEELQRVGADVHLAEPAETSALKGKKKRAKTDWADARHQRELLLIGRLPESWIPPAHLLDLRARVRCRHTLSQQRTEWQQRMQAVLYHHGFPQRRDLLTLEKREWLAGLAMPAAAREQITIALQIIDMLDTLLVPFDQELRAYARKQTGCRALVDQIYGVGGLIAVTILAELGDPRRFQNSRDVVRYSGLDITVYQSDQHRAPGHLSRQGPPALRWALYEAAQRARFPDSPDRAYYVQAAERIGGNRACLALARKLLTRSYHTLRELGDHALEPIAS

SEQ ID NO: 254871 - protein, 341 aa, unidentified
MKKISFFIGLDISKADFAASIYQTPRESIVTKEAIPNDPKGFNLFLLWLKDHHIDKTNCRICMEATGVYSQAIAYYLLFQGFPVSIEPPLKVKRAFDPVGHKTDPVDSKQIAEYAYRFQDELTAWQPKAEILEKIRQLLSTREQFTKQKTALKNAMHAYSLQRVQVALINKAHRETLAQIEKQIARIDKELSKLIKQDPLISQRANHLDSIPGCGMLLAAHLLVITENFTRIQKHKRLAAFIGIVPYQYQSGTSVSKKAKIRHFGPGPSRKLLRLAAQSVATHDVTFRNYYLRKLAQGKSKALVLNNIANKLLKVACTVIRNNTRYIKEHRSIHPMYLKSA

SEQ ID NO: 254872 - protein, 261 aa, unidentified
MHVGLDIHKRFTYATILDEKGDTMFEEKFDNKPEEMESFKNKLDIGSNTVLEACGSWQHIYDYFDAQGFDTKLAHPTKTSTLVGFFCKTDKIDSKNLAELNRLNKVPMSCVPDIEVRDLRTLARNRASLVSLRTQVTNKIHAILAMKGTIFDDLSDIYGKEGMSRLRDLKFGDNNDMALQNFLNMIDTFNEQIKETEAEIDVRNGLDEDTRLLMKMNGIGPYLALLIKSEIGSIDRFSEPTKFISYCGLNPRVYQSGFKTK

SEQ ID NO: 254873 - protein, 339 aa, unidentified
MALYGGIDLHSSSSHLGIIDGQDRRVFKKKLRNDPQLILRTLERFKDELVGVVVESTFNWYWLVDLLTDAGYRVHLANPSAVKRYEGLKHSDDNHDAFWLAHLLRLGILPEGYIYPKEERPIRDLLRKRGHLVKLRTSLILSLQGIIQRNCGVAISGNNIKRVKANHVAPLLSGQEDLELSGSVSKEAIDFLTRKIRQIENVIEAKVKLKEQFIYLQTICGIGKILSLTIMLETGSIERFPTVGDYVSYCRKVPSTWTSAGKTKGKGNKKNGNKYLAWAFSEAAELARRYDSNARAYYQRKAARTNVMVAHSALAHKLARAAYYVMRDRVPFDPEKLFA

SEQ ID NO: 254874 - protein, 343 aa, unidentified
MAIVNRIALDLAKDFIQILALDENEHEVFNKKLRSNKVLAKLATLKRTDDCEVAVESCGMSHHWRRECEKLGYKTVALPPRFVKAYLQGEKNDANDARAIAEAASRPNRQTVRLKSIEQQDLALMVNQREGFVQTRTQFSNRLRGQLAEYGILLPKRVGTILQRVPEVLEDDSNALTLQSRDLINRLYQMLRAVDEEVKALDKHLATQAERNEDSQRLMTLPGIGPITATSLLALIGDVSEFKRGRNLSEYLGLVPRQNSSGGKDRLGGITKKGNTKLRTLLVHGARSALRVAQQRHDRLSLWAQDVAKRRGNNVAAVALANKHARIIWAMLKNKEDYRMTAA

SEQ ID NO: 254875 - protein, 355 aa, unidentified
MSGEKYIGLDVHQATISVAVMDSQGKLIMASILETKASTILEFLAGLRGTLFVTFEEGTWAAWLYDLLKPHVAKVLVCNPRKNALLKQGNKSDKIDARKLAERLRLNDLKPVYHGETGVRMLRELARSYLTIVKDLTRVMSRVKALYRSWAIPCAGRDVYYTRHRSQWLDKIPEAGTHRRAEQLYQQLDMLQHLRQQARRELLAESRKHTITAKLRQIPALGPIRSALAVALIQTPHRFRTKRQLWTYSGLGLETRDSGEYHYVRGQVRRRKKQVFIRGLNKDYNHDLKGLFKAAATRASVLPGPFQDFYQRSLAKGIKPTMVRLTLARKIAAITLTLWKKGENFDAEKLKSQAA

SEQ ID NO: 254876 - protein, 341 aa, unidentified
MNTTTYGLDIAKTVFQLYWVEPSGKCFNRRLNRTKLIEFLARREPGRVALEACASAHWWARQLQGLGHKPVLLHARYVRPFVQTNKTDAADAKAIWTAAQQPGMREVAPKSETQQCVLAVHAMRSLRIKMRTMLVNQLRGMLVEFGIHFRRGRRAGLDEIVQRLPDIESRVPPTLFEAVHQQLRSLESLDNEIAEYDRQITAWGRQDRACQVISAIPGIGMLTATALVATIGEARTFKSGRQLAAFLGLVPKQAGTGGKVRLGGISKRGNPYLRTLLIHGARAVLGHLRRKNQGGWSQALAQKRPTNVVAVAMANKTVRTVWALLVHERTYDRDYVSVRPA

SEQ ID NO: 254877 - protein, 309 aa, unidentified
MATSSYIGIDVSKDRLDVAVLGEERVWQVANAPEGINQLVKWMVELDPELIVVEATGGYQRAVVEALFVAGLAVAVVNPARVRQFARACGLLAKTDKLDAQVLAVFGQKVQPRHYTGKSEAEKQLSALLVRRRQLDEILKAEQNRLRTICPSLKSSVQRMIACLKEEKKILDMQIQQFVAQQDGWQEQTEILKSAPGVGQVTTATLLAELPELGKMDRKKIAALVGVAPMNYDSGKKRGYRKTKGGRGDVRSVLYMSTLVATRYNPLIRAQYQQLLKRGKLKKVALMACMRKFLTILNAMLRDQQPFRM

SEQ ID NO: 254878 - protein, 468 aa, unidentified
MTADKKLWRNRKERKEWARRLQSEDPGLEVVHPHAAGIDVGNSAHYVAVRPERDPRPVRRFECFTADLRRLADWLQSCGVKTVAMQSTGVYWIPLYEILEERGFEVYLVNARHTRNLPGRKSDVQESQWLLKLHTYGLLNNSFQPPAEIRALRTYWRQRGEHVAGAATCIQRIQKALTQMNLQLANVISDISGLTGQAIVRAIVAGERDPRKLAQFRDPRIQASEEEIAKSLEGNWRPELLFVLQQELQMYDTYQRRIAECDLQLQKHLASLANNVPPRPPEVEPDGEKRKRTKPAKNAPRFDLSCELERITGVDLTRIDGIDVMIAQTLLSEVGVDMSRWKTEAHFASWLGLCPDNRVSGDKVLRRGTRHVVNRAANALRQAANALIRSRSYLGAQYRRLRTKLGAPKAITAMAHRLARLVYRMLKYGQRYVDKGTEYYEQRYRNQQIQLLRKNATKLGFQITEARA

SEQ ID NO: 254879 - protein, 409 aa, unidentified
MMKQNIIFGIDVSSKSSTVCVVIDRIKQGETFKITNDSFGYQDLLDRLNQYLITPLVVFEATGVYSLSLQAFLEDYHIKYLKLNPLKAKKLMDNNLRHNKTDKVDAYRLALIQFNAPQKLRAPQPKEYHELQNASRYYEELTQALIINKNQLHRNLQSTFPQIESILSTSSGRVYWTIVSLLPHAQYVLNHNESQVFQSLLAISGIGRQRAHYLTTRLYALARQAYPYDNESSITIRAIQRNIANLLSLSAERDNVINYMEKLAMQANARSLTIYESIPGIAKTTAVRLVAELGDLSRFDTSAQIDAFVGIDPGRYQSGEKDSHLGITKHGNHLARKILYRTITQMETVKATQPCHITDYYDKKKRSSNSRGYKKIAIASVHKLIRTMFALIKHDQLYDYNVATHNQRL

SEQ ID NO: 254880 - protein, 427 aa, unidentified
MEVVHARCAGMDISKSDAKVCVRIARRGRTKTSATVTTWTATSSSILRLADALTAQKVTCVVMEATGAYWKPFYYLLAEAGLPVMLVNARQVRQIPGRKTDVADAVWLADLAAHGLVRGSFVPDLEIKELKDLVRTRTTLVRLRGEEVQRLEKLLESAALKLSSVINDINGLSGRRMIEALIAGERDPDVLAGLGDGRLKATKAELAEALTGRFSEHHGFLAKVHLQLIDNYTAQIAELSARIEDYFGGDDADSPQPLSLGRARHLLATIPGVSTTAAEQILAEIGIDMAVFPSPGQLASWAGVAPGANESAGKVKSATCRPGNSYLKRTLGIAAISAARTKHSFLGARYKRVMSRRGHQRAVVAIARTILETCWHLLSTGQTYHDLGGDYYTKRRPGTAIKSALQRLREAGCQIHSSSEGILIIQA

SEQ ID NO: 254881 - protein, 345 aa, unidentified
MPIVGGLDIHRKQLTFDYLDTGTGEVKRGQIAPADRAHLRSWLARFAGRDDVAFALEGCTGWRYVAEELAGAGVAAHVAEPADTAFARGRKRHAKTDRTDSRHLRELLAEGRLPECWIPPPVILECRALLETYHALRAEHTAWVQRIHAVFFHQGVPALGEAALRTDDDLEALRAAAAAHLSPAGQLQVATALDMLAALQARLDVLRHRLLAAARSLTGARVLAERLYGVGPVTGLAMTCWLGGAGRFSSSRKAVRFAGLDVTVWSSDRKGPPGRLSRQGPAVLRWAVYEAGKTHARASAPDHDYYAAVKDRKGGKRAALSEARKILRQACHILAELGDDALTAA

SEQ ID NO: 254882 - protein, 430 aa, unidentified
MGLIIPSAMHPQQDDPPMPYEWFVGIDWGSQQHQVCVLDRDRHRVGERAVDHDGASLAQLAAWLWTVSASQPQRVAVAIEVPRGAIVEGLLERGFHVFALNPKQLDRFRDRHSVAGAKDDRRDAFVLADSVRTDRPSFRRLQLDAPHLLLLRELSRAEETLLEEFRRSANRLRDQLHRFYPQMLQLCAAADEPWLWDLLHLAPTPAHAMLLSEEQGQRVLKAHRIRRLKAPEVLACLQASALPVAPGTAEAAQTHCGFLLPCLRVVAEQLQACSQQVDTLLRTLADEPGEGESPSDVAIVQSLPGVGRKITAWLFAEAAQPLTERDYQVLRTHGGVAPVTKQSGKRRQVVMRHACNPRLRHALYHMARVAMQRDAHFSSVYAALRAKGQRHGQALRNIGDRLLRILMAMLRHRTCYDANRIRCEPIGQMG

SEQ ID NO: 254883 - protein, 522 aa, unidentified
MKPFTTVVGIDLARRAAHQAVVMPAEGPGRGAPGRAWPVTHDLPGLDALCARIRQQTGRDSLEGVLVNMEPTSGAWPVVAAYLGLQGAEVCLTRTDLTSQWRKVHSRYRKTDRIDARTLANVPLSFPEHVWPVRSVSEPIRVLRELSAQRQRFVEEIIRWKNRFVALVEPVWTGLLAVLLESQRFSEVGRAFFRRFANPCEVERYGRARFAAWYAKHAHGLTDPSLLETLWKAAQSAAALWRALEEREALPWSPATLELLIEQDLRLIEVYEQELRGIEARIATARQEVPECDLLEQMPGVGKVVSVTLASLLLPADRFANTRQCGAYTGLTSRKKSSAGRETQGLRITKTGNRRLKRDLALAADTAMYQDPQLAEFAIRLRIHGKHYNEVRVAVGRKIALRARALLQRAAREPDAAFEWRDLQGNLVKPHQAKALAHELWERYRLEHDKGPSAPTSSRPSKDASQQADAQPGHQYADTPGHPATTTPTPTSATPVDNLSPVRTKPVKKPPAHHPKNKLIST

SEQ ID NO: 254884 - protein, 406 aa, unidentified
MAEGACAGIDWAKDAHEVLVEDGEGERLWGETVPHDEAGIARLCRTLATLGVIRVAVERPDGLLIERLLDTGLTVLAIHPNKVAAARDRFRAAGGKSDRFDAFVLCELARTDSHRFQALSPDSDQTKALRALTRGREVLVEQRIALCNQLRAELERFWPGAAEIFSDLDSPISLAFLERYPSPVEARRLGEKTLARFLARHHYCGRKEPSELLAKLRNAPTGRAGEAEADARRGLVLAQVAALRPIVEQIRLITSEIAHTVRTHPDGEIFLSFFKNPDSVICAATLLAEIGDDRARYPTAEHLAADAGMSPVAVESGRKKVACFRHGCDHRLRNATTTLADSTRHWHPWAQDHYLRARGRGHDHPRATRTLGRAWTRVLWRCWQDHTPYDPTRHQGLQQHLLTIKG

SEQ ID NO: 254885 - protein, 341 aa, unidentified
MKQYVGLDVSQKETAVCVVDETGRLLFEGRAKSDPGALAALLAKKAPHAERVGFETGAMSSWLWHELKRIGLPVVCIDARHAHAVLSVRMNKSDENDARGLAELVRIGWYREVAVKSEASQQVRSLLIARSRLVTMRRDLENQVRSMLKECGLIFPRAITGQFQRRVTELTGEGHVLWPVLLPLLSVHGHVCRELEGLDRQVRQMARSDETTQRLMTVPGIGVVTALTFRHTIDDPSRFRSATSVGAYLGLTPRRKQSGEMDTVGHVSRWGDRLLRTYLFEAASVLLHRTRRWCALKAWGLRLAKRNGMKKAQVAVARKLAVILHCIWIDGTSFQWGKEPT

SEQ ID NO: 254886 - protein, 419 aa, unidentified
MEKSKTRKLKTVNEKTMIVAIDIGKSIHHGYFRGSDGQDIKAFPFYNSQKSYEEFWVRALLFKQQKGLEEIVVGFESTGPYAEPLMNFLAKKPVKLVQVNPMHTKRLKELTGNSPNKTDSKDPRVIADVICLGHALTVVVPKGPAAELRRLTQARQRASKNRTAMVNQLHHLVFVVFPEFMQIIKKITSKSSLYLLKHRPFPEDIIDLGFERLQAFLKKISFGQLKQNQVKALFEAAGNTTGIREGKESLLAEIRHLVSCIERESEFMDHLEEQMSQYLKQIPYSQSILSIKGIGEVTVAGLIGEVGDFRQFTTISEIMKLAGLDLYEISSGKHRGQRHISKRGRSYLRKLLFFVAINTIRTNGIMHENYLRMLDRGMPKVKAVVAISRKLLRTIFALARNHTTYREDYGHNHHVKFAA

SEQ ID NO: 254887 - protein, 411 aa, unidentified
MERIYDICCGIDVHKKLFVACLRKDNKSTIREFGGTTRELLTLADWLCDEGCQMVAMESTGSYWKPLYNVLEYSGLSAMVVNAQHMKTVPGRKTDTKDAEWIADLLQHGLLKASYIPDKDQRELRELVRYRKSLIEDRARELNRLQKILEGANIKLSGTVSEIDGKSSRNILNVILSGEKFDRAKYDEMLSKKEIARNLKANAEQLIDDMNGVLSKMQRKVLRELLKHLDELAEHISNLNEEINNFMNPDEKKCVEDTKTIPGIGNDSAQAIISVIGTDMGRFPTDKHISKWAGLCPGNNESAKKRKSGRTAKGNAVLRTTLVLCAHSAVKVKDSYFSAQFARISAHRGKKRAYVAVAHSMLIAIYHVIKEQVPYHDLGSNYYNQFNIEKKKNALIKKLMALGFQATVVPA

SEQ ID NO: 254888 - protein, 332 aa, unidentified
MNLVSTLGIDLAKNTFSVHGVDAQGAVVVRRAVSRNKLAEQVMQLPPCLIGMEACSGAHEWARRFSAFGHSVKLMAPKFVAPYRKSGKNDGNDAEAICEAVTRPNMRFVPVKSVQQQAELGLHRVRQGFIEERTGTLNRIRGLIAEFGYVLPNGPEHIRRGVPGIIDALPARVGRCVRDLLEHAERLTAKVLEYEHEIRLGMRDNELARRAQTRQGIGPITASALVATVGNGRDFKNGRQFAAWLGLVPCQYSTGGKTRLGHITKRGDAYLRTLFVMGARSVLQRAAREADPLSRWAFAVQGRRGYHRACVAVAAKNARVAWALLTKETAAA

SEQ ID NO: 254889 - protein, 358 aa, unidentified
MKIIGCDLHARQQTIAMLDSDTGELEEKTLEHQGETVREFYSALSGPILVGIEATGSMQWFLELMEELGIECRVGHPQKIRKAETRKQKHDRRDARLLLTLLAENRFPTIWMPSSEQRDLRTLLRHRHQWVRLRSRVQHTLQSMALNHGLRRGHALWNQEGQHALRALPLAPHASERRAALLSLYPRLQESIDQLDQQVGQQVQQHPQARRLMTHPGVGPITALATEVFLGDPLRFIDGKALASYIGMIPSEHSSGRRQRLGAMSKQGNALLRYLWCEAAMHAVERDPELKRFYRRKLVQKGLGKARVAAARKLGIRLWIMMRDEIDYREFCRRGKARQENGSVCAGMPDITSGPAEA

SEQ ID NO: 254890 - protein, 410 aa, unidentified
MEIKRYANAKGGKKKGGEIKMALASQELAILSSPREKAAAGIDPARYSIQIALLSPSKEHYNTTFPVCANTVEELENILPKDIPVVAEGFGTTSRIFFLDLSQKGYTLWELNPALGKHLRILEKEAHTDSLDARSIARAGLYFPDRLSPICLKEEREALTSLLRMRREMVKELTADWNRLHALLSESYGYWYDKLKKKVHTKKGRAFFKKYPSINAFCQDKGREESFSSSLTQEEKESLLSQKPWASEIYLESLEWQIRFLLEKIELLEGKKRELGKKIEQYLKEDAEAQLLQSIPGVGPVSAATLLSEIKEIERFPNEGKLAAYCGLVPCLRKSGKMKARGAKRKYYNRKLKGTFFNIAFTAIRVNPIARSYYEKKRREGKTHRKALLCLARQYVKIVYAVLRKKQKFN

SEQ ID NO: 254891 - protein, 388 aa, unidentified
MEARTVNNLPPAAPHDDAVRCLLAIELSKKSWIVAVNTPLSDKISRYTLEACDWKGLLDLCERIRTRVAREMKKPVEIISCYEAGYDGFWLHRLLEAHGIRNYVIDPASLQVDRRARRAKTDGVDVERMLRSLLAYLRGEPKVWSVVRVPSVAEEDDRRLHRERDRLINERVQHVNRIKGLLAIHGIYDYQPLRGDRVQRLEQLHAAGGQTLPPRLKAEILRELQRLELAIRMIKAIEAERDAIASAKTGHTSAKKIQHLAKIKSIGPEFATALVGEVFYRSFDNRKQLASYVGLTPAHFQSGAMSHDQGISKAGNAKARTVMIELAWLWLRHQPDSPLSVWFRERVGKLKGRIRRITIVAVARKLLIALWRYLENGMVPEAAILKVK

SEQ ID NO: 254892 - protein, 252 aa, unidentified
MHVAQAFMVGIDVSKAHLDVAVEGKRTVVRFDNDVPGRAALATAVAGAELVVVEATGGYEMAIVRTLMAAGIAVAVVNPRQVRDFARASGRLAKSDQVDARVTLHFARAMRPAQIPHIDDGRIALAALVARRRQLIDMAVAEKNRLEHAPQAVAALIGETLAALKAQLARVDAAIALAIEAEPDMAARRDLLLTVPGIGEVSAAVLIAELPELGDIDDKKLAALVGVAPIAHDSGTWRGQRHIAGGRLLLVR

SEQ ID NO: 254893 - protein, 474 aa, unidentified
MEKTGQEPAKIGKGKRGGKRKGMCLEDRPILEPNAAGIDIGAREMFVAVHSERDEHPVRVFPTFTEDLEKLAEWLVSCGITTVAMESTGVYWIPLYDVLEKHGLKPCLVNARSMKNVPGRRTDWHECQWLQFLHSVGLLRSAFRPEGEVCSVRVLMRHRNELVLMANQHIQHMHKALTQMNLQIHHVIDDITGLTGMAIVDAILAGERNPAVLAELRDRRIKASEETIRKSLVGNWRPEHLLTLRQSRNSYQHYQAQIAVCDEEIEKLIVEFTPWVDPEERPLPPDRKKKQRRNKNKLGNPKTGFNLRTESYKLFGVDLTQVPGLAKNILTLFTEVGRDMSKWPTAAHFVSWAGLCPDNDISGGRVLWRGLRHTHHRTGELFRLAAMGLHHDQTSRGAYLRRMKSKLGPAGATTATAHKIAIIFYTMIKNHVEYDVTRWAEEDAQREKRFQEKIKRQARQLGYKLVPIEEQPAA

SEQ ID NO: 254894 - protein, 371 aa, unidentified
MKSILSVGMDVHKNSFSLCAYDGYTGEIVSESTFASDVKLVIKFIETLKSRYENDVEIKCGYEAGCLGYSLYKSLTARGVDCVILAPTTMQVSAKNKMVKNDRMDALNIAKNLASGSYKAVYVPDEEDVEIKEYIRMIHDFKKELKRVKQEICAFVLRHGYQYDGKSKWTIRYMNWIRELEMSEIQRETLNEYIAEMENLNDKINRFMNRIDEMYQSERYHEKVSKLRCFKGIETFAAMTIQVETADFERFPSAKAYASYTGLTTGEHSSGDKNNRIGITKQGNTVIRKTLVECAQSLVKGNVYAKKSQGLKSRQKGMDVNIIAYADKATERLKKKYQKLIERNVPRNKAIVAVARELACFIWGMETGNIH

SEQ ID NO: 254895 - protein, 357 aa, unidentified
MFLITPDDAAIIEVTGGVDTHLDTHTAAVIDPVGRVLGTQQFPATASGYSTLLAWMRGFGRLRRIGIEGTGAYGAGLARRLRDEHLEVIEVDRPDRKTRRFQGKSDPIDAIQAAKAALAGERTGIPKQRDGRVEALRNLRVARRSAVDQRADAQRQIKALIVTAPDDLRAQLRGLAVKQLIVICANLRPDRTDAATPGTAAKIALRSLARRHQQLATEVTDLDELLEPLVAAINPALVAVNGVGADTAGQLLVTAGENHHRLTNEAAFAMLCGAAPIPASSGKTNRHRLNRGGDRQANKALYRVVLCRLRWDLRTRAYMERRTKDGLSKKEIIRCLKRYVARELYQIITSNDLELAA

SEQ ID NO: 254896 - protein, 314 aa, unidentified
MKVYKNFIGIDIGKFNFVVSVYGEKTEKEYENTAEDIASFLKEYKAKLKAGLSILETTGGYEMRLLLNLCEEGFAVHRANARNVKHFIQSFGNAAKTDKLDARALALYGHERHERLSCFVPESKDALALYELVQRRQDLKRLLVAEKNRLQAPRANVIKKSCEVMIEVIAEQVEVVTAEINVLIEASPILTAKKAMLKTVPGIGEVTATNLLVLMPELGKLSRREIASLAGLAPRANESGKFKGYRATGAGRSTIKPILFMSAMAARNSNSTLKTFYLRLVEAGKKKMVALTALMRKILVIANARLKETNLAVA

SEQ ID NO: 254897 - protein, 322 aa, unidentified
MAMLSFGGIDVSKDRLDITVLPDEQCSSVSNDAAGWAELIEQLRGSSITAIGVEASGGYERGVVRALLAAGMSVRQINPFKLRQFAKASGILAKNDRLDARMIASFVAIMPTRPAQRQTPMIEQLAAMLTVRRQLSDHKVATENASRLLEGAMLQRLSRRRVAGLTADIDLLDQRLVEIVTADPALAHRFWLLTSMPGVGAVLACTLIALLPELGQMSRKQVAALVGLAPYDFDSGKLKGRRCIWGGRAHVRHVLYMAALSASNWNPALKAFHDRLEATGKKPKVVIVAVMRKMITTLNAMLRDGTTWVDRYSGRRSASTAR

SEQ ID NO: 254898 - protein, 415 aa, unidentified
MFIGDDWAEDHHDVEIEGEDGHRLVRARLPEGLEGVSRLHALVAQHAPAAWGELSAEQAAGRVVIGIETDRGPWVSALRAAGYQVFAINPLSAARYRDRHSTSGAKCDAGDAHVLAEIVRLDRDHHRPVAGDSDLGEAVKLLARAHQTAIWERTRQVLRLRSALLEYFPAAVAAFDDLAARDALWLLARAPDPTRAAKLTRSQLVTALRAARRHHVEAKADVLLRVLRAPGLRQSPTLEQAYASVVVAQVGVITALNEQIARLQEVVGEHFGRHPDAEIYLSQPGFGEVLAARTLGEFGDDKKRFADARARKNYSGQSPITRASGKKSVVLARYATNRRLGAALHLQAYSALSASPGARTYYDSLRGRNIGHHAALRQLANRLVGILHGCLKSGTAYNEQTAWPHQRAETERMAA

SEQ ID NO: 254899 - protein, 414 aa, unidentified
MKLFVGIDVSSQELEACFMNPDGDTIATFKVENNLHGASHLRDRIVAASDKLKSSEIHIGLEATSVYSWHPAMYMHEDPALKERRAKVFTINPKLVSKFREAYADLDKTDRLDAWIIADRLRFGRLTTTIVMQEQYVALQRLTRMRFHMVHSLTREKQYFLQNLFYKCNAFTSEVDSSVFGHAILEMLSEKYSLDDIATMDVADLADYLRDKGRNRFPDPENVARCIQKAARASYRLSKVVENSIDLVLGTSIQTIRSIQAQLKELDKAIERILEGIPGSKCLRSIPGIDKVYAAGILAEIGDIERFRDQAAVAKFAGLTWRRHQSGSFEAEDTKRIKSGNRFLRYYLVEAANSVKNRDEEFGEYYRKKYGEVPKHQHKRALVLTARKLVRLVDVLLRNDQLYTPRRKVTTAKD

SEQ ID NO: 254900 - protein, 427 aa, unidentified
MPYKMGGIDVHKKMLAVVVSDVEVDGEYPFERLLFGSNPEQLRSLAEWLLEQEVEEAVMESTAQYWKPVWGALERFWKPMRQKREGAGPMSGTLHLAQAQSNRGPQGRKKDFPDAERLVKRLVARELTLSFVPDAEQRLWRTVMRRKYQLTRNRVQLQNRLEGLLEEAHIKLSSFVSDLLGVSARRMLKALAEGETNPASLAALADRRLRATPEQLCDALGACMDLNPVYRRLLKMMLEELRLIEEQIDKLDQEMADLLHPYQDPVKRLAEVPGLGVDSAQQILAEVGALAAAFPSAKHLSSWVGACPGDNQSAGVNYSHRSPKGNRAMRRILNQSANAAVKAKGTIFELVYRRSVSRLGHKQTIGAIAHRQCRLIWKILHDGVRYEERGPAVSKGSKQRRAWRMIRELRSLGYRVELENPQQPNPA

SEQ ID NO: 254901 - protein, 342 aa, unidentified
MVPQTVVGWDLGKASSYVTATNRDTGEILREGKVPNTPGDIRAAVEGLPRPVRVVFEATGNWQATYEILEGHVDEMQMAHPLETKAIAHARIKTDKIDSATLAHLGRADLVPQSWIPPREVRDQRELLRHRAFLVSLQTQVKNRIYTYLDKAGMAYPDVADMFGKGGMAFLRSADIREPYRFLMDRDLRVYERLHGEIEEVSAKIRAMAQEDPRAKLILPMRGLGPFSVMLILSEIGDISRFPTPQHLVSYAGLCPSTYQSGRTLRHGSITKRGSKWLRWILIEATIHYVRAHGRLGHFYQRMAHRKGVKVARVALARELLHSIYWCLKKEVVFEESFARGR

SEQ ID NO: 254902 - protein, 409 aa, unidentified
MRYYVGVDWADQAHAVWIVDESGTKVAARTVPHTAEGLNEWGRELDQWRAQGIDLWAAIERPDGRVVDFLLDHDVVVYPVNPKALDRARDRFRQSGAKSDAFDARVLADFLRTDHAHLQAAQPSSDAARELKLLTEDCQRQIRQQTRLLNQLTATLKAYYPRALEVAELSTALARAFLQTYPTPAAAAALTERQWTRWARTHRLSAARTRELWDILQQPQLPVPAHVVRAKARLMLTLVAQLTPVIVAVDDYREAIEHFFASIPAAQWVRTLPIGKHGIIAPTLWARLGDAPRRWQSFRHLQAHAGAVPVTKRSGTQRIVHFRFACDKSLRYVVDHVAFLSLNSSEWARAYYDQQRTRGHSHRQALRALGAKWLKIIFVMWHRQIPYDEQHHLASMTRHQLRQRQRKVA

SEQ ID NO: 254903 - protein, 423 aa, unidentified
MDATDEPVELVERVAALDLGKVGLMACVRVPCEDRPGRRRQEIREYSTLSRSLLELADWLRCERVELVAMEATSDYWKPVFYLLEAEGFTCWLLNAKHVKNVPGRPKTDKLDAVWLAKVVERGMCAPSLVHPKPIRQLRDLTRYRRSLIRERTREKQRVEKLLEDAQIKLSSVISDIFGVSGRQMLAALIAGQRDPKVLARMARGAMRSKTPVLEEALTGHFEDHHGFLLQTMLTHVDALTTQIDDVGIRIEEAIAPFAHLVERFDEITGVGITAARELIAEIGADGTRFPSPAHLVSWAKYAPIDKNSAGRKRGGSTGKGNPWLAATLGEIVATAARTDTFLGERYRRLVRRRGKSRAIVAVGNSVLTIIWHLLADPDARYQDLGSDFYETKVNKRRRARDLIRQLEHLTGKKVTLAPTAAA

SEQ ID NO: 254904 - protein, 407 aa, unidentified
MEVVYPRCAGLDVHKDLIVACARITEAGKVTREVVEFGASTKELLRLLGWLEERGVTHVAMEATGVYWKPVWHILEGAFALRLGNARQMKNVPGRKSDRKDAAWIADLEAHGLIQSSFVPGREIQELRDLTRTRKQLMGEHGRHVQRIQKVLEDANVKLASVLSDLLGASGRRILTAMINGEQDAEKLCALADPRVKAPRATIRDSLQGRVTEHHRFMLSVHLRQLGAIEQEVTILETRIEKVLEPFRHEVELLCTVPGVKENAAAALIAEIGVDMSVFPSADHLVAWAGLAPGLNQSGGKKKPARTKRVKWAKAVMTQCAWAATHQRDCYLAARYYRIRSRRGSTKAVVAVANTMLRAIYHMLRNDTPYHDLGPEHLQRENRDRTARRLANRLQKLGYTVEVRKAA

SEQ ID NO: 254905 - protein, 351 aa, unidentified
MIIVGVDYHPSVQQVAFLDTETGETSERRLNHSDGEAERFYRDLRRRQVKVRVGIEATGHARWFERLLAELKFELWIGDPARIKAARVRKQKTDRQDAQLLLRLLVEDRFPRIWVPSPENRDLRQLIWHRHRLVQMRTRAMNQIQATAMNEGMRRKKTLWSKAGRKQLESLLLAPWATRRRQDLLDLVDRWNVTIAELSAAIEQEARKRPEVLRLMTHPGVGPITALAFVLVIGSPDRFACGKQIGSYLGLIPCEDSSADRQRLGHITKQGSSLLRYLLAEAAQAAVRWDPGWRRRFVHLAMRRDRRIAKVAMARRLAVSLYWMWRKECDYQQTLQFGPHAGEPGFVHGVK

SEQ ID NO: 254906 - protein, 341 aa, unidentified
MKNLFIGVDFSKEKVDVAIIFADGLTETAARVFNGFKTTVSGYKQLVKWVEQNSYGIDSSLWLFCGENTGDYSKGLCNFLYGKGYDMWLENAKSIKDASGLRRLKSDRADASMIAEYAMRNYDKAIMYEPLSESLAQLRELFLYRQMVVRHRCSFQVRRGEKRLTMEKSPIKTMISQSGRHIVSELNKEVEKINKRIAELIKSDEELTEVFTIVTSVPGIGTQNAVCLMVYTDNFRRFNYDSRKIACYYGLAPFGKDSGTSVHSDPHVHYMANRQIKAMLTQAALAAVNFNPIMARYYMRLVERGKKKQVALNNVKNKLVHLVTAMVRNRQTFTPEYKISA

SEQ ID NO: 254907 - protein, 347 aa, unidentified
MAIVGGLDVHRQQITFDYVDTETGQVSTGQIPGADRRQLSAWLHRRFEDGGVQGGVEFAVEGCTGWRYVAEELTSAGAVARLAEPAETAAARGRKKRAKTDRADARLMRDLLVQDRLPTCWIPPSEILEVRALLGCYHDLSRDHTAWTQRIHAVLFHQGASCCAELGTPAGRAKLARIAAEQLSPVGQTQVAAAVLMLDATEAQMGVLRRQLHAWARSMRGARVLAERLYGVGPLTALALTAWLGGADRFSSARKAVRFAGLDVTVYSSAGKRSPGRLSRQGPAVLRWCLYEAAKNHARATAPDHAYYAAVKKRIDGKRAALSEARKLVRQAVHILTELGDDAFTLE

SEQ ID NO: 254908 - protein, 466 aa, unidentified
MTKPVKKQQGRQQRGGKVNSRMPMINAQAAGIDVGASQHYVAVPPDRDEQPVRRFGAFTEDLHALAKWLRQCGVTTVAMESTGVYWIPLYQILESYGFTVKLVNARHVKHVPGRKSDVQDCQWLQQLESFGLLTASFRPEAQICVLRSYMRQRQMLINYGSRHVQQMQKALTEMNIKLQHVISDLTGVTGLAIVRAILDGERDGLKLAALKQRQIKSDVATIAKALEGDYRPEHLFVLRQALDLYDYFQQKITECDDEIMKAMQTLESDATASLPATSQPQRKARSKHHPFPVDSQQKLQRILGVDLTRIDGINETTAQLVLSELGLDICHKWPTEGQFASWLGLCPNNEISGGKVLHRGKRKVVNRLANALRMGAQSLLKSKSALGAYARRMRAKRDTPTAINATAHKLARLIYRTLKYGQEYIDIGQQQYEQKYKENVLKALQRKARQLGYQVVVAVHPSTVVP

SEQ ID NO: 254909 - protein, 388 aa, unidentified
MEEVTDEPLYRDRVCGIDIGKAQMAATIRVPSDSNPARRASETRSFGTTRREVLALADWLRCWQVPAVVMEATSDYWKGPFCRLEAEGFECVLADARQVKNLPGRPKRDPSDSRWLAACFERGAVRPCFVATPEFRIIRLHTRYRRDLTEERTREKQRTEKLLESAGIKLSSVISRLHLVTGRDIMDHLIAGERNPKVLAQLARTAARRKIAELEEALEGAEFFTAEHAALLAMMLARIDRLTADIDELTTVIERLLAPYEEQLQQAESMPGWQRRAAQDALAETGVDMTRFPTGAHLASWAGRTPVDHQSGTRKGRAKAKKGNRYLAGITGETARYQDLGPDYYERQASIRRQIAHHVGKLGALGFEVTLCRIPEPDPDPAGQTQAA

SEQ ID NO: 254910 - protein, 309 aa, unidentified
MSKLWVGIDISKKHLDVYIRPSGVFSSYDNQPPGISQLVEYLKAEQPNLIVLEATGTFHHPVMNAISQAGLAVSVINPRQARDFARACGQLAKTDAIDAKILAHFAEVMNPSVRQFPNEQTQQTKDLVARRHQLVEMMTAEKNRLQAMSQIAKEDIEETITWLQERIHKIEEQIERSIFQSIELKNTYQLLQSIPGVGPVVASNLVAGLPELGKIGNKKISALMGVAPLNHDSGQKKGKRSIWGGRGAIRSVLYMAVVVGIRHNPVIKEFYERLMKLGKPAKVALTACMHKLIVIMNAMVRHNTPWKIT

SEQ ID NO: 254911 - protein, 402 aa, unidentified
MNCVGIDISKGKSMIAVMRPFGEVVVSPFEVLHTDSELSKLARLLKSLDGETRVVMESTGNYHAPVAWLLHDAGLYVSVVNAMLVHDYGNNSLRRAKTDKKDAVKLANYGLDHWLTLPRYVPEEDTRLMLKSCYRQYQQYSKVRTMLKNNLISLLDTAFPDANRLFTSPPRADGSEKWVDFVAAFWHCECVCGLSEKAFTAKYQKWCKKHGYNFSEDKALDIYASACGHFGVMPKTDTAKLLVEQAISQLRATSAALAALKQEMQSLAASLPEYPVVMEMFGVGPALGPQLMAEIGDVRRFHSKKSLVAFAGIDAPPYQSGQMDIRSRSISKRGSASLRRTLFLVMGVLLQCAPMDEPVYQFMNKKRSEGKPYRVYMMASANKFLRIYYASVKAYLDSLEHN

SEQ ID NO: 254912 - protein, 346 aa, unidentified
MYYCGIDYHKKYSVVSVQNADGEIILERRVEHNNPLVFDEILGGLSEPAAVVYESGLNWTWLYEVLERIENVKSITLANAYKVRLIAEAQIKTDKIDARKLAMLLRLGMVPSCHIPDRATRDRKEVLRQRAYWVRQRTGLRNRIHKLIGKQHSLQMPQVSDLFGKKGKDALHKAVLPEPDAMLLRQDLAMLDQLDAVIKADEEKIKTGSKPDRAVEVVSSIPGVGLIVGSIIATETDGIARFTHPERYTCYAGLAPTTHSSGDKTYNGRMIWQCNKWLKWAYIEAAWISIGCSAYFGGLYRQCRARGKKANTAITIVARRMARIVYQLLQEDRLYEERSFAPAALV

SEQ ID NO: 254913 - protein, 358 aa, unidentified
MEVLHARCAGLDVHKDMIVACVRHMADGKVEREVRSFKTTTKELLALSEWLSAEGCMHVVMEATGVYWKPVWHILSDGDFELVLANAAHVKNVPGRKTDVNDATWLADLMAHGLVRGSFVPDEQTQEMRNILRTRKQFVRERSSHVLRIQKTLEDANVKLDSVITDIVGLSGRRMIEALIAGETDPGTLAALAHRRIKASPAELEAALRGRVTDHHRFLLRLLLQHIDAIDAAIAQIDQEVDANVEPFRTAIKILSTIPGISQLSAEVIVAEIGLDMSRFPSEGHLISWAGLCPRNDESAGKHRSNRMRKGAPWLKTALIQCAWAAVRTKGSYLQAQFQRLRSRRGPRRRSALSLPQS

SEQ ID NO: 254914 - protein, 412 aa, unidentified
MEVIHRCCAGLDVHKETVVACLRRTCPDGAVAEQVRTFATTTAGLLELGDWLVAGEATIAAMESTGVYWKPVWNLLEGRLTLMLVNARDVKQVPGRKTDVKDSQWIAQLLACGLLRASFVPPAPQRELRDLTRTRTSLLQDKSRIANRLQKILEDANIKLGSVASDVLGVSGREMIRALIDGKLSAAEMAELARKRLRLKIPQLTAALNGRVSEHHRFMLRLLLEQIEHSEQQIARLDQRIEEVMSPLEKTGLTLLDEIPGIDQRAAQNILAEIGSDMSRFPTADHLAAWAGLSPGNDKSAGKRRSGRMSDGNRWLKGTLNQCAWAASRKKDSYFAAQHRRIASRRGVKRATMAVAHSQLCICFQLLKNGECYRDLGRDYFERTDEDRTKRQLVRRLEKLGYRVTLDKKEAA

SEQ ID NO: 254915 - protein, 393 aa, unidentified
MVCVGIDVAKDKHDCFIISSEGEILADVFTIRNNAEGFDTLLQAIRRSTRPEDKIKVGLEATGHYSYNILGFLLDKGLPTYVINPLHTNLYRKSLSLRKTKTDRVDARTIAAMLMSDVDLKSYTDTAYHNEELKSLTRYRFDKVRERAKLKQSVSRLVTILFPELEKLVPSLHMASVYALLSEFPGAKQVAGAHLTHLKAVLYDASKGRYGRDMATTLREAARCSVGSVMPTKSLELQHTIRLIRELDAEIEDIEAAIQSMMDEMQSPIMTIPGIGVRMGAMILAEIGDFSRFDSPDKILAYAGMSPSTYQSGQLSLSGAYSHMEKRGSRYLRYALYNATKYVCLWDPVFAAYLAKKRTEGKHYNVALSHAAKKLVRLIYAMEKSRQSYRNAA

SEQ ID NO: 254916 - protein, 420 aa, unidentified
MKSFVPVAGVDVSKRFSDLCVLSPDNNVLLRQKIYHDMVSMKLAEKKLHEIELECGARPVVVMESTSHYHLILFQFFTDAGFEVVVVNPIQSGALKNINVRKVKNDRVDAYRIAMLYRLKVLRPSQIPTSSLRGLRLLTRQRSELKGDVARFKNRMTAYLDQIFPGYGEVFSDVGGSASRAVLHMCPTPEELLNADGSLLAKVICEAGNKGPKFGAEKAAKLREAAGSAQVIGVRSASNASLIKNVLDIIEGLLAAIQRIEGEIKELVTQDTRLDEDVKLLCSIPGIGFSSAVVIVAEMGNISLFRKPKQLAAYFGLDPGERQSGTFKGRKNKLSKRGSPQVRAALHMAAVSSVSRNRDGTCRNPVLAEYYERKCAEKPCKVARVAVMRKLSNIIYAVLRDRRPFELRTPQEHMALLAAA

SEQ ID NO: 254917 - protein, 362 aa, unidentified
MCQIEVVQISSEGGPSVEKIIRIGLDTSKHVYQLHGVDSEEEPVLRKKLRRKEMVAFFQKLAPTVIAIEACGGSHHLARSLATFGHEVKLIPPHYVKPYVKRGKNDAADAEALCEAMSRPSMRFVPVKTAEQQAALMLVGLRERLIRNRTQLANSIRGYAAEFGVIAARGLCRIGPLLERIAADVSLPALARELFAIQGKEYALIEAELKVIDAKLMAWHRDNACSRRLSQIPGVGLIGASMLVMKTPDPRLFRSGRQFAAWLGLTPKDHSTAGKVRLGVITRAGDEALRSTLIVGATALLRRVREGSNRKSSAWLLDLLRRKPPKLVAVAMANKIARIAWKLMVSGETYRANAASFVAAAA

SEQ ID NO: 254918 - protein, 407 aa, unidentified
MQVIYPRCAGLDVHKQTVVACVRIAGDGPPLQEVRTFATTTSGLLSLADWLDSFGVEHVGMEATGVYWKPVWHVLEGHFELVLANAAHVKNVPGRKTDVNDAMWLADLLAHGLIRASFVPPVAVQELRTLTRTRKQFVRERSAHAQRIDKVLEDANLKLSVVLSDILGKSGRAVLQAIVDGHTDPERLASHVTTRVKASRAELLEALRGRVSTHHRFMLKLHLGHIDALDRAIADIEKEVGLGLEPFRQAAKLLSTMPGLSEVSAHVIVAEIGIDMSRFATAGHLLSWACLCPRNDESAGKHRSTRLRRGGKWLKTTLVQAAWSAVRVKGGYLQAQFHRLRARRGAKKAIIAVAASMLTAAWNMLRDGTEWHDLGATHFDRADAHKTANRLIRRLQQIGFAVQITPA

SEQ ID NO: 254919 - protein, 342 aa, unidentified
MKDTMIGVDLAKNVFVLHAATMAGEVRYRKKLSRGQFLRFLSEQPPAIVIMEACGSAHYWARELVKVGHEVRLIAPQYIRPFVKRQKNDAADAEAIVIAARQPEMRFVPPKTADQQARAVLFRARERIVRQRTELVNALRAVLYEYGQAIPQGIAHIQRIEAIVERAEIDLPELVREECRDLLAQIDEKTARIKEKAKKLVDLSWQSGIAHRLQTMPGVGPLVALAVEAFAPAMENFRCGRDFAAWLGLVPRQFSSGGKERLGRVSKAGQADIRRLLIIGAMTCVSWAGRKPPVHGSWLSRMLAKKPKMLVAIALANKMARNIWAMLTKQEDYRDPALAIMA

SEQ ID NO: 254920 - protein, 369 aa, unidentified
MTSVNHPDARGAIHLGLDVHKNTISVAVLEPQDEVPVTDKISSDEASVRQLIARFEDLGRLRVCYEAGPTGYELARLLASLGVRCEVIAPSLIPVAPGDRVKTDKRDCRRLARLHRAGALTAIRIPSVAEEAVRDLCRARADMVIDQSRARNRLNKFLLRHGRIWRDGSNWTQAHRDWILAQRFDEAALAATFAHYRASVTVGEAALTSIEADLAAWFTRQPFADPVARLSAYRGISYLGALTLASEVCDWRRFPTAGSFMAFCGLVPSEYSSGERICRGHITHAGNVHLRTQLVESAWSYKCRPAVGVTIARRQQGLPPEVTARAWKAQLRLTRRFRRLEERKNSRQVVVTAIARELASWCWSLAVMD

SEQ ID NO: 254921 - protein, 448 aa, unidentified
MSNGSGISRGDRNRNARLSGLRSAVPLSHAIVGIDLADRKQMVVVTDHDSKVLARRTFRVKAWNLGAALEWAAEQAARARFAGVTVACEPTGHRWRVLGQLAEARGMSFVCVQPAISAWVRKTEDLTPDKTDDKDAVLIARLVAQLRCYLPEPVDETWGRLRHLGTRREQLLEQHVACVQQIRDLLECVWPAALEAANWPFRSATWVAAMTVVMDRDGGDLERTRRLGAARFERAVRKEVIRRGGQRPCLRIVRALFTALTDKAGVLAHRPAAFERIAWVIADWDHANTALVDTEARMVTLLDELELTELATSIEGLSPVGAAAILAETGDLTRFTSARAVVKHAGLAPRERKSGTFAGRARVTGAGRPLLRAAAWRAVWGCLQTNRVYAARYRHLTTRETNKLKPTQAQTAVAAAILRQLHYVITHQQAWDPVVAAHGLRAVEGAAA

SEQ ID NO: 254922 - protein, 318 aa, unidentified
MAEQFRFVGIDVGKRQVDVSFGTNGKVEQFPNDDEGIAKILKRLEGQPVEKIVLEASGGYQRQLLASLLGAKYPAVAVNPRQVRDFAKALGWLEKTDQVDARVLALFAERVRPDVRAATDPALEVLQEWVVRRAQLVGMLAAEKNRAQQAKVGGVRRDINDHIDWLKKRLRDMEKELAALMKTCDAWDAQVQLLDAEPGLGRISSVLLVAQLPELGKLSRRKIAKLVGLAPLSHDSGAHRGARVTWGGRSAVRTCLYMATLTAIRCHPSIKTFYKRLVARGKQKKVAMVAAMRKLLTILNAIVRDGRNTSSEASEATS

SEQ ID NO: 254923 - protein, 418 aa, unidentified
MIKTKKQRIVNGKTLIVTVDMGKDKHFGYWRCQDGTDVKPFAFSNNGTGFSQFWERITKAKEIHHLDEIVFGYESTGSYAEALVHFMRARSVRLVQVNPMHTRRIKDLQGNSPNKTDAKDPKVIADIIALGHALTVVIPEGPAAELRRLTQARERSNQRHTALVNQLQGLVAIIFPEFMQVMPDVKILTARYLLRECPAPQDIVAYGLDNLTRTISKVSRGKLKEGRAKALYDAAKASVGVTEGQASIIREIHEILVLMEAAERFTEGLEKEMIHYLNQIPYSHSILSLKGIKEVTAAGLIGEVGDFRRFKTLSEVMKLAGLDLFEISSGKHQGRRHISKKGRPLLRKLLYFAALNTVRRGGMMHQRYQQYLDRGMPKIKALIAVARKVLGIIFAMVRDQSIYEEDFSRTSMQLEEAA

SEQ ID NO: 254924 - protein, 460 aa, unidentified
MNDYFLGVDASKGYSDFVMLDGKKQIVIENFQLDDTFEGHSQLYELLRRFNQDYPQATIYAAVESTGGYENNWFQSLLNFQGSLPIKTAHLNPLGVSHNSKADLKRNVTDKISAQNVAEYMIAHPEKVSYQHQDSLASLRKQWGFITMLTKQCTQLLNQLESLVYNANPEILAYCKDRTPQWVLKLLTRYPTARRLSRAKVNSLARIPYVSTERAKELIATAKKSVGSANDKVTEQLIVSTVKQILHLKKLIDTQTEILANQCQIPEVELLKTFTGIGDYSAIGLMLQIQTVERFLTSKKLSSFFGIHPEYKKSGDGTYKYRMSKKGRKEGRRILFTVAMTAIQSNPLIREIYQQAVDRGMEKMAAMGLCMHKILRIIYGMLKHNQPFDPQIDLKNRQKKPPRQKKGGPDQNRRYQDFDSKAPVSRRQKMKRKERKQSQNAVDVKHGISEAPVPTDQLAN

SEQ ID NO: 254925 - protein, 353 aa, unidentified
MFKVTSDGGSREPARVYGTIKNDFDALSKFCRKMVSTSSELHFVYEAGPCGYGIQRYLSDNGFECIVAAPSMIPKKSGDRIKNDRRDAKSLAQNHRSGELTAVYVPDREDEAMRDLTRAREDAVASARKAKQRLCAFLLRNGLIYNGKTKWSKAYFNWLSDIAMPHPAQQVALQEYIDAVHENIKRVERLTDQIRHMAANWRLEPVMKALQAARGVSLIVAATMLSEIGDLSRFDNPKQLMAYLGLVPSEYSSGNTIKRGGITKTGNGHARKSLVVGSWAYRLPPRVSRTLLKRHEGLPDAVLKIAWKAQLRLCARFRRLMAKGKSKQVLVTAIARELCAFLWAINKQVKMPA

SEQ ID NO: 254926 - protein, 348 aa, unidentified
MSQNLDRAIAVIGIDIGKNSFHIVGLDGRGAIVLRQKWSRGQVEARLVNMPPCLIGMEACVGAHHLSRKLKAFGHDARLMPAKYVRPYSMGQKNDFRDAEAIAEAVQRPTMKFVATKTADQLDLQALHRVRERLVSQRTGIINQIRAFLLERGVAVRQGLRFLRAELPRILAAPPDVLSPRMVRVIEGLAEDWRRLDERVDHLSGEITALARQDVGCERLMSVPGIGPIISSAMVAAIGTGDAFSKGRDFAAWLGLVPKQISTGDRTILGKISKRGNRYLRVLFVQAAWVVLIKPKSWERHGLKHWIEAAKKRLHRNVLAIALANKLARIAWSVLANGRIFEARLQAA

SEQ ID NO: 254927 - protein, 410 aa, unidentified
MKLCVGIDVSSKDLVTSMISEETCEVVFQGNFVNDLKGATELKTIIINTANSNHLDQVVIGMEATSIYSFHPAMFFQEDQDLKKFDTQSVVIDPKKTKRYHDVFAEDKNDQIDAFYIADFLRVGRYSTGIVLQENYIALQRLTRSRYELVQSLVRAKQHFIENLYYKLNKLVISDELNTSVFGSTMMSLLTEDMTTDDLLNTSINDLADYLNEHGRGRFANPEALAKTIQKAVRASYRLDKVIANSVDTVLSVYAEEIKAFQKIIKGLDKAIEEVMKVIGKEEEVLRSIPGIGPVYAAGILAEIGQIDRFDNEAKLAKYAGLSWKEKQSGNYASDNTPLKRTGNAYLRYYFVEAANRVRIQDPVFGKYYQRKYKEVKRTPSKRALVLTARKLIRVIFFLLKNHQIYQEKR

SEQ ID NO: 254928 - protein, 387 aa, unidentified
MPKPNDLSRSLTALDQDSTLIAVIEMSQLSWLVGALVPGLEREPVKKQVPDAEALLRLLQRWRDEAVKAGRVIKRICVAFEAGRDGFWLARWLRGRGMEAYVIHASSIPVQREHRRAKTDRLDVGLLKRAFLGWLRGEAKHCSMVAIPTLAQEDAKRPSRERENLVGECSRIVNRMKATLIRLGIRGFNVKLRQAAERLGGLRTPEGEGLPPNTLVELEREMARLDFLKAQIKAIELARLERLERAPAEGAHAMVLLLAKVRGIGIETADMLVHEVLGRNLRDRRAVARYGGITGSPDESGTKRREKGLARAGNARVRRAMIQLAWRWLMFQKDSALAQWYGERTADARGATRKTMIVALARKLLIALWRLVTAGQLPVGVVLQPAP

SEQ ID NO: 254929 - protein, 344 aa, unidentified
MEITTIGLDLAKSVFQVHGVDATGQVVVRKSLRRAQMLPFFTRLPSCLVGIEACGTSHYWARELIKLGHQVRLMPPAYVKPYVKRGKTDAADAEAVCEAVARPTMRFVPVKSPEQQAALSMHRTRDLLVKQRTQLINMIRGLHAEFGIDIPKGIERALLMARRIVDGEAPDVPMEAAKIVSTLSQQALDIHVRLREIDRDLAVCLRGNDVARRLMTIPGIGPVGATALAASVTDPHQFRSGRQFAAWLGLTPLQKSSGGKERLGRISKMGDKYLRKLLIVGMTSLVRRAKYNPKTVDPRLADLLARKPVRVATVAMANKTARVIWSIMARGETYHADHRPALAA

SEQ ID NO: 254930 - protein, 365 aa, unidentified
MQKVSTMRTSGKRIFKGQLTIGLDLGDRSSSYCILDEAGKILLEQKLPTTPEAMKQTFAKMPRSRIAMETGTHSPWISRLLKALGHEVIVAHAQNVRLIVKSRRKDDRIDARTLARLARIDPQLLSPVQHRSAQAQLHLTEIRARAGLVSARTALVNAARGLVKSHGERLRKCGTFQVSREITSDLSTELREALQPLLREVESLNERIQEYDRRIEKMAKEKYPETALLKQVKGVGDLIATTYVLTLEDAKRFRKSRDAGCFVGLQPGRRNSGESEPQMHISKEGDEYLRTLLVQGAHYILGPFGEDSDLRRWGQRLAARGGKNAKKRAVVAVARKLAVLLHRLWVSGEPYEPLRNSQKAISAAA

SEQ ID NO: 254931 - protein, 359 aa, unidentified
MQGQNYELDFSGKEIYAGIDVHLKTWKVSIMTNGVMCKTFSQSANAADLKKFLERNYPNANYHSAYEAGFSGFSAHRELEKLGVSNIVVNPADVPTTDKERRQKEDSRDSRKIVRSLYNNELEAIHVPNIDIEGLRALVRYRKTVVKEISRHKSRTKSFLYYHGIEIPEELKKGSGHWSKPYSQWLQVLEFESEYSKQVLLQIIDTVEHLRKKLLEVNRKLRQLEKESQYSEQIKLLRTVPGVALVTTMTILTELNDMKRFKNIDRLCSYVGLVPRTDSSGEKDRTGGITPRCNQQLRGMLIESAWIAIRHDPALMMKYGELIKRMDPNKAIVNIAKRLLSRIRYVLLNKKAYVKGVVK

SEQ ID NO: 254932 - protein, 388 aa, unidentified
MNLGADKSGPLTAIHTDLGAIFVSLELSRSSWLITSLSPGGGEKMSKHSVRGGDFTGLMERFAQLQEKARRRTGQSFRIIVVQEAGLDGFWIHRALQNEGIESHVVDAASIATSRRRRRAKTDKIDGETLVRVLLAYKRGEPRVCAMVKVPTPGEEDRRHLCRERKALTAERVRHVNRIKGFLYSQGISGYQPLRRDRRQRLEELQTGDGRAFPQHLKALVNRELDRLELLLRQIKTVEAARDALLAVGQTAKPAPAAMLLDIRGIGPEFAAVLWSEGLFRHFENRRQIAAYAGLAPTPWQSGAVDREQGVSKAGNPRLRTTLIQLAWLWLRNQPRSALSVWFHERVSRNGGRLRKTTIVALARKLLIALWKYVTAGVVIEGVTMKVA

SEQ ID NO: 254933 - protein, 346 aa, unidentified
MNATTYGMDIAKNVFQVHWVDGNTGEICRKKLPRGKVTEFFAVRPAGRIAMEACGGAHHWGRTLGPLGHQIELLPTHQVRPFISGNKDDAADARGIWLAAQHGDIRRVAVKSSEQQAMLSLHRMRTHWVSVRTATVNALRGLLYEFGVTLPRGRHSGLRQLAQQRAEINDAVPAVMVRLVDDQLLALADIEGHVQAMEGGISLMLKSQESARRLRDTPGIGVLGATALAATLGDGTSWRNGREFACCLGLAPGHRGTGGKVRIGSISKRGNAYLRTLLINGARALASREHPAPWIVALLGRRPFNVVVVAIAHKLARIAWALVAHGRAYEASWKASAPPAASAGAV

SEQ ID NO: 254934 - protein, 358 aa, unidentified
MRRQNTKRRFEPQHIYVGIDVHKRNWTVTVRTELGEFKTFSQDPDPDALFHYLRRNFPTGRYHVVYEAGFSGFWAYDRFVKLGMDAAVVHPPDIPTTDKERRTKADRVDSRKLCRDFQAGLLNPIYVPDLRQREDRELVACRFATVKKQARVKNQIRSLLDRHGVVLPKRFRAPNHWSRNFMDWLRKHAFSPSRAQQALFEYLDEIEFLRSRVLDLTQQVRKLGQEEPYAEAFRHVVTLPGVGSFSAATWVVLLWPIERFRSPDHLCSYVGLVPSLHQSGEKERRGQLTRRKHKILFRLALENAWCAVRTDAFFNDLFWQRARRMPKNEAIIGVAKRLVSRLRHVWMAGEPYVSGVVS

SEQ ID NO: 254935 - protein, 391 aa, unidentified
MVCVGIDVAKDKHDCCILDSDGMVRADCFTIPNNMDGFKQLLQTIRNCTKKSDKIKVGLEATGHYSYNILGFLLDNDLAVYVMNPLHTNLYRKSLSLRKTKTDRVDARTIATMLLSDVDLKSYTDTAYHNEELKSLTRYRFDKVRERAKLKQSVSRLVTILFPELEKLVPSLHGVSVYALLSEYPGAKQISEAHLTKLTNLLSIASKGHYGKEKAIQIREAAKSSIGSVMPAKSLELKHTIKLIKELTSEIDEIEDSIQQIMDELHPPILSIPGVGIQSAAMILAEIGDFSNFESPDKILAYAGCSPSTYQSGKLTNCYAHMEKRGSRYLRYALYNATKYVCHWNPVFAKYLAKKRAEGKHYNVALSHATKKLVRLIYALQKSGKAYLTAA

SEQ ID NO: 254936 - protein, 350 aa, unidentified
MIIIGCDYHPGFQQIAFVDTETGDYGEPRLEHSEGAEKFYRDLAAQGKKVRVGMEASGHARWFERLLAELNFELWIGDASEIARKRERKQKTDLEDARHILQLLMENRFPKIWVPSGENRDLRQLLWHRHRMVQARTRIMNQLQAVALNEGLRCKKKLWREKGRQQLEAFRLAPWASRRREDLLQLLDRLNPTIAELTQAIEQEVEKCPEARRLRTHPGVGALTALAFVLIIGRAERFQCGKQIAAYLGLVPLEDSSGNRRRLGHITKQGSSIVRFLLVEAAQVTARSIPEWRNKYVHLTMRRGRKIAKVAMARRLAIALYWMWRKGWDYEQLRKFGSHAGQPGNRDGVK

SEQ ID NO: 254937 - protein, 411 aa, unidentified
MDKVYDICCGIDVHKKLIVACLRNGNKNVVREFGATTRELLSLADWLKESDCKMIAMESTASYWKPLYNILESSGLNAMVVNAHHMKAVPGRKTDVKDAEWIADLLQHGLLQASYIPDKDQRELRELVRYRKSLTGERSRELNRLQKMLEGANIKLSGTVRDINGKSARNLLEYLITGERFDEAKFDEMYSKKVIAHNLKASKEQIIDDLNGVMSPLQRRMMKELLVHLDELNAHIKNLDDEIDNFMKPEEKKASEAIQSIPGIGNTSAQAVISVIRTNMNRFPTDSHIASWAGLCPGDHESAKKRKSGKTRKGNALLRSTLVTCAHSAVRNKQSYFYAQFMRISAHRGKKRAYVAVAHSMLIAIYHILKDGMVFKDLGADYYNQFNKERKINAYLKKLKALGWEAPVVAA

SEQ ID NO: 254938 - protein, 367 aa, unidentified
MEKSSTAVIGMDVHKESIEVAIAAENEARHYGRIGGDAHSVDRLIKKLRSVHRAPLFVYEAGPCGFWLYRKLAAQGLRCMVVSPSMTPRNAADRVKTDRRDAMKLARLARAGELEPIYIPDEKDEAMRDLVRTREDAVCMQRQARQRLQALLLRNEIRYVGRSSWTVAHRRWIAKLKLPNAAQQIAFEEYVQAVEEAEQRLSRLAVAIGAQLEHWRWRPLVEALQALRGVSAIHAVRIVAELGDFRRFESPRKLMGYLGLIPSEDSSGPRRRQGSITKAGNSSARRAMIEAAHAYAHPARVSWVIARRQTGLAKNVCDIAWKAQLRLCGRFRRLAARRVPRNKVVVAVARELSGFVWAIARQVKPAL

SEQ ID NO: 254939 - protein, 269 aa, unidentified
MIIVGLDLHVRNSFVSAMDLETGELFDQRRIPNTREAIRGYFGQFAGQEVKVTLEATTNTYPMVSLLRQMPKVQVVVVHPRKMRIIAESLCKTDKVDSEVLVELGRGPYRLPTSYIPEAAVHELRCELRTRARLVAMRTELKNRVHGLLSGEGFFEHPPELFGKRGRSWLAEVELGELARGRLERFLRLLDQFEAELLEITQVLRERYAKAPLWAEDVKLLTSMPGIGLLTALTILGELGDWRRFGRPEAVVNYAGLVPSLDESNQKSH

SEQ ID NO: 254940 - protein, 354 aa, unidentified
MSQKLNAAIAVIGIDIGKNSFHIVGHDHRGAIVLRQKWSRGQVETRLANLPPCLIGMEACVGAHHLSRKLQMLGHDARLMPAKYVRPYSKGQKNDFRDAEAIAEAVQRPTMKFVATKTADQLDLQALHRVRDRLVGQRTGVINQIRAFLLERGIAVRQGLRSLRSELPGILATRTDVLLPRMLRIIEDLAGDWRRLDERIEGLSSEIETLARQDKACERLMTVPGIGPIISSAMVAAIGTGDVFSKGRDFGAWLGLVPKQISTGDRTILGKISRRGNRYLRALFVQAAWVVLVRVKCWERYGLKSWIEAAKKRLHHNVLAIALANKLARIAWAVLNKGRAFECVKTNEMASRPA

SEQ ID NO: 254941 - protein, 337 aa, unidentified
MTHITRMGIDLAKHVFQLHGVDERGHTVLRRRISRAQLRPFLAQLRPCLIGMEACGSAHYWARELAMLGHDVRLIAPQFVAPYRKNDKNDGNDAEAICEAVGRPHMRFVPVKEIEQQAVLTVHRARQLLVAERTALVNQTRGLLAEYGLIVSTGVGVLRRALPDLLETPTLPGLAREVFADLADRLRALDERIATYDRRVAALARQTEPAQRLMQAPGVGPVTATALVATVGNARAFKNGRQFAAWLGLVPRQHSSGGTRRLGRITKRGDVYLRTLLIHGARAVMRQLTRRTDATSRWVLALKARRGFNKAVVALAAKQARVLWALLATGRPYVACS

SEQ ID NO: 254942 - protein, 400 aa, unidentified
MDDIDDVGVFLGLDVGKSAHHGHGLTPAGKKVFDKQLPNSEPKLRAVFDKLAAKFGTVLVIVDQPASIGALPLTVARAAGCKVAYLPGLSMRRIADLYPGEAKTDAKDAAVIADAARTMPHTLRSLELTDEITAELTVLVGFDQDLAAEATRTSNRIRGLLTQFHPSLERVLGPRLDHPAVTWLLERYGSPAALRKAGRRKLVEVIRPKAPRMAQRLIDEVFDALDEQTVVVPGTGTLDLVIPSLARSLAAVHEQRRALEAQIGQLLEAHPLSAVLTSIPGVAVRTAATLLVTVGDGTSFPTAAHLASYAGLAPTTKSSGTSIHGEHAPRGGNRQLKRAMFLSAFAALHDPASRTYYDRCRARGKTHTQALLRLARQRINVLFAMLRDGTFYEPRTPRLA

SEQ ID NO: 254943 - protein, 371 aa, unidentified
MKSILSVGMDVHKNSFSLCAYDGYTGEIVSESTFASDVKLVIKFIETLKSQHENDVEIKCGYEAGCLGYSLYKSLTARGVDCVILAPTTMQVSAKNKMVKNDRMDALNIAKNLASGSYKAVYVPDEEAVEIKEYIRMIHDFKKELKRVKQEICAFVLRHGYQYDGKSKWTIRYMNWIRELEMSEIQRETLNEYIAEMENLNDKIDRFMNRIDEMYQSDRYNEKVSKLRCFKGIDTFAAMTIQVETADFERFPSAKAYASYTGLTTGEHSSGDKNNRIGITKQGNTVIRKTLVECAQSLVKGNVYAKKSQGLKSRQKGMDVNIIEYADKATERLKKKYQKLIERNVPRNKAIVAVARELACFIWGMETGNIH

SEQ ID NO: 254944 - protein, 459 aa, unidentified
MSQLPTLSYKGFAGSKAGLVRLRFQEEVSKSTMSEVESIQSEPEFAAFIGIDWADQKHIWCLQTAGSKQRESGELEHTPEAVECWVANLYQRFAPRPIAVAVEQSRGALVFMLSKYELFHLFPVPAQMAASMRQALYPSGAKDDPRDADLLLDLLLQHRNKLRRLSPDSEATRRVQNLVEERRKLVDEKTAQINRLTDHLKVYFPQMLEWFGRLDSELVCALLERWPALEELQKASPASLRTFFRKHRCRDRERIECRIEAIRRALPAIQDRAVIDAKSAVVKVIVQLIRILIGGIEDLDGQIEEAAAAHPDFFIFNSLPGAGPVMAPRLLAAFGSQRDRYRSAHEIQSFSGIAPVTESSGKRKWVHFRWACPKFLRQSFHEWAGHSIVQSEWARVYYQQQRSKGNTHHAAVRALAFKWIRIVFRCWQDGVAYDENTYRAALAKHGSPLSGLVAIGKTL

SEQ ID NO: 254945 - protein, 431 aa, unidentified
MPESTVSRQPQEPQFAAFVGIDWADQKHVWCLQAAGSTQRESGELEHKVETVEAWVAQLCQRFGERPIAIAVEQLKGALVYMLAKYECLHLFPVPSTMAASMRKALYASGAKDDPREADLLLDFLLQHRDRLHRLAPDNEATRRVQNLVEERRKLVDEKTAQLNRLTSNLKIYFPQILDWFKDLDTELVCALLEHWPTLEELQQPSPVELRKFFHQHHCRNGELIEHRIQEIGHARPAIHDRAVIEAKRVVVKVTVQLIRSLREAIAELDGKIAEAAAAHPDFFIFDSLPGAGAVMAPRLLAVFGSQRDRYGSAEEVQIYSGIAPVLERSGKMKWVHFRWACPKFVRQSFHEWAGHSMVKSAWARAYYQQRRNQGQDHHAAVRALAFKWIRILFRCWKDRVAYDEEKYLAALAKRGSPLSALLVVPTRATM

SEQ ID NO: 254946 - protein, 392 aa, unidentified
MEEKAWAGVDVGKGFYWTHVVDARGTELLSRRVENDEADLLALIDEALSLAGEVTWALDQPGGGAALLLALLWERGQGVCYVPGLSVDRARDGYRGESKTDRKDARVIADQARMRGDLGQLRPGDDALAGLQLLLARRRDLVGDRTRAVTRLRETLLALFPALERALNFNTRGPLELVVRYQSSGAIRRAGRKRVAAYLKKRGVTKADVLARRALEASEEQSIKLPAEDVASEIVAELAGSILALKERVEALDEDLARRFFSRPEARVLSSSPGIGPILGAEFLVAVGDVSAFGSADRLAAYAGLVPAAHDSGKRVGNHRKGRGGNKVLKRVIYQSAFSSMRAVPESRAFYDRKRAEGKRHTQAVIALARRRVNVLWAMLRDGTTFESRSAA

SEQ ID NO: 254947 - protein, 411 aa, unidentified
MNNTLFVGIDISKRSNVATFMNCEGKVVGRLTFSNSGSGADRLVAKILSYYEKEDFEAIRIGMENTSVYSKNLVWFLYEHEALNEHKLSIIPLNALMVANYKKSFLDMDKDDITDSFAIADFIRIRPGLLPFKLDDRQEALKIMTRSRYNYVQALSRMKSQFLTRLFLSFSEMEAEKPFYSIFSKTSLSLLEEAFTLDELAEKPIPELVEFLQEKGGGKFQNPEEIAKVLKKAASSSYRVPAMVRESLNRTMASDMEIMRILENEIHNCDKNIEKLMKSVPAILVSIPGIGPVLAAGIMSEIGDISRFQKQESLGKMAGFKWKRNQSGKKESEDKAAVLSGNKKLRYYLVEAANRVRIHDPVFEAYYRKKYAESKTHAHKRALILTARKLVRVIFYLLKENKLYKPDVGIS

SEQ ID NO: 254948 - protein, 362 aa, unidentified
MTINAGVDLHKTQFTVFVKQSGNQFEQYSTEEDGYKKFLTRIQRWKKNGMTVRIGVESTGNTRYFKNRMEQAGAEVVVINTLKFKVVNESVKKTDRHDAATIAEFLEKDMLPESRLCSEESEQLRRLLKVRTTLVRTMVTVKNQIHALLTGLGMKDSRATLQSKRGRQKILDALRKADSELVVQPLFETIEQLEKSVKSIERELEKLTEGDRTVELLMTIPGCGKIGAWTIRAFTDDINRFASAKKYSAYAGLVPWVQNSNETVHHGKITKRGPEELRTALVQLVMGMRRCRSTVSWRLMERYTEMKRNKGSGKSIIATARKLSTIIWCMLSTGQEFDPSLMIDRQLIRKADSMRTTASQSA

SEQ ID NO: 254949 - protein, 359 aa, unidentified
MKLVPPNTDPTPSSPNPRRRYKLGVGIDIAARTFTAATCELDETPSKAHNFTQTPEDFIRLEKHLLAAGLLPTDMLVVMEATGTYWIELAIFLDSRGFPLSVINPATARDFAKSLLIKLKNDRIDAQMLARLAITHKPALWTPPPLIYRELTQRLAQRNDLVAMRTSLTNQLHALSVCPSVPSVVSRFDLLVHTIDLQLKELEVEIKTALNLAEEWAASVARLQTIPGVGPLTALWLVVLTLNFTLCTKAESLVQFAGLAPIERRSGTSVRGRPMIGHGPLRSLVYMAAGSAIRFNPLIKAYYEELRLTKGKPYKVARCAAARKLLHIAFAVATHSEPFEAAYALRNRAARLEPKAQAS

SEQ ID NO: 254950 - protein, 346 aa, unidentified
MGKHSTDFSTVTTVGLDLAKHVFQVHGVDAAGKVIFNRAIRRDKLLAFFAALPQCLVGLEACGSAHHWTRELIKLGHDARMMAPIYVKPYVRRQKNDAADAAAICEAVARPSMRFVRPRTVENQAELMRHKAREMLVAQRTQLLNGVRGHLGEIGVIAPQGPRSARELAGMIEACDGSLPLDVCAALAELVVQLRRLDEAIDRLDKTIAQTAQADATARRLMTIPGVGPITASAIAASAPDVSGFEGPREFAAFLGLTPRQHSSGGKERLGRVSKMGNRYLRKLLVVGAHAVLFHRRRHADALRMWAKKLIDKKPFKLVAVALANKLARIVFAILKAETSYRAIPA

SEQ ID NO: 254951 - protein, 343 aa, unidentified
MNPTTIGLDIAKNVFQAHGVDQNGKVVVRKRFSRAKVLEFFANLPPCLIGMEACPGAHYWARELMKLGHAVKLMAAQYVKAYVKGNKNDGNDAAAICEAVSRPGMRFVAINTEAQQDTQMLHRIRSRLVAERTALINQVRGLLGEYGIVFAQGPSQVRRGLAVLLAEEDPRLSGMARELLADLNGQLLALDERIANYDARVKAACATDERSAKLAELPGIGPLTATALAAAVNDGKQFDNGRQMAASLGLTPREHSSGGKQRLMGITKRGDTYLRTLLIHGARTVLRHAEGKTDRLSRWALAVQARSGANVAAVALANKLARIAWAVLARDRIYRADWAEQSV

SEQ ID NO: 254952 - protein, 386 aa, unidentified
MKDETFVPREYDVFAGLDVDKKSIAATFSSQQGFIRSLHMPYSVDYLLNHVRKHFGDQKVAFVYEAGPTGYGLYDGLVAQGYRCLVAAPSMIPRAPGQRVKTNRLDSRGLSESLRGGQLKSIHVPSPIYRELRHLTQLRDTVVREAAAHKQRIKALLLLEGIGFPSATAGRQWTLRVKAQLRKLRCSRIVRFKLDQLLDSLEFCEKQVVSSTKEIRRFCKEDVELFQSIEYLMSIPGIGWIVASQLLARMGDWREIDNVRQLGSFLGLVPTENSTGDSVDRGSITRAGDGRLRSKMIQAAWSAIRQDGELREFYRSVCQRNPRGKGARIAIVAVARKLSTRIYAVLKKQRPYIVRKQVHSAPLTQEETSPQGTTRRCAEPGETDNS

SEQ ID NO: 254953 - protein, 448 aa, unidentified
MKILALDLGKFNTMCCFFDTKTRKHSFLNAATDRDYLTTVFKKHKIDLVVMEACGPSGWITDLAKGLELETVVCSTNEDAWKWANVKRKTDKDDALKLARMASMDELKAVHMPTEAHREFRSLVKYRKTLDCRICKMKCTIRAWFVNHGISIDTGEKAWHTGRERINSFRKPLAECEPNELWKGELDLELTQLDALTIQLQCVVKKLEELGKNDPRIVRLRTIPGIGPRTAEILVACIDNPHRFENGRQVAAYFGLVPRQFQSGETDRNGRITKRGNPLARTILVECAWASLKYNPWAKGIYDRICGKQKTRKKKAAVALARKIAVLAWAMLRDEKDWDPKTMIDNTEAYGRMNPSLKESLLTMKPKENSDQRKSRLRREAKKAKEAAASTIAKPTTKAKVSRKVKKTVRSPQAKAKRSSSKPKPTPEKTITKTTTKPRRARKPVSAV

SEQ ID NO: 254954 - protein, 315 aa, unidentified
MTKHLPPVNVGVDVGKNQLDLYLLERDRALTVPNEEQAILVLVRSLSRYRVERIVVEATGRLEQPFVRAALAAGLPVIVVSPLKIRRFADVIGQLAKTDQIDTRLIAQFAATVKPLPRPASDANAQAIKDLVVRRRQLTSLRTMEKNRRQVMPNDLKPSFDRILKALDRELKSLEQLINHAIDQHASSRHKRELLTSTPGIGNCVAATLIGDLPELGSLDRRQIASLTGVAPFNRDSGTLRGKRRIRGGRAHSRTALFLSAMVATRFNPDIKRFYQRLLTAGKHKKVALTACIRKIVTALNAMLRDNLPWRSAIA

SEQ ID NO: 254955 - protein, 327 aa, unidentified
MCHVNETGQVTVEGKAKSNPGALTDLLSKHAPHAERIGFETGAMASWLWHELRRVELPVVCIDARHAHAALSVRMNKSDQNDARGLAELVRVGWYREVKVKSEQSQKIRAILVARSRLVSMRRDIENQVRSLIKECGLLFPRAIGQQFRSQVSELLGVDHLLLSVISPLLSIHENVCQQQGKFDNEVRRLAKLDETTRRLMTVPGVGVVTALTFRHTIDDPSRFRSASTVGAYLGRTPRRSQSGETDTNGKISRGGDRLLRTYLFEAATVLLYRTKKWSSLKAWGMKLAKRIGMKKAKVAIARKIAVILHCIWVDGTSFDWGQPKPI

SEQ ID NO: 254956 - protein, 318 aa, unidentified
MNTNTKQSINVGVDTGKTQLDIYIRPIDHFFTVENNEKGIEKAIKVIQQYHPERVVIEATGRLEMPFVLACSEHSLPIVRANPIHVKRFAGAIGRRAKNDRLDAQLIAHYAEAIKPTILKIKPKNIRLMSDLVIRRNQLMGIQTMEKNRLQILPKSLHSTIKPLLTALKTQITKIEQKLEKLIEENPEYQSKSIILQSVPGVGPNSGTSLISNVPELGYITNKQAASLVGVAPITKESGRYKGKRAIQGGRAQVRTVLYMAMMSAMQCNPVFKTTYERLLAAGKPKKVAIIACVRKMVVILNSMLRDGVMWDKNLVKN

SEQ ID NO: 254957 - protein, 324 aa, unidentified
MLNVGIDWASDHHDVCLTNDSAQTLAAFRIAHGSQGFERLHCVISEHQPEPQEVLVALETTRGLLVHDLLRSGYRVYAINPKAVSRYKDRYVVSKAKTDSLDASCLAHLLRTDRHRFKPLVLLPEDYRLLDRFCLDLRKLVDDRTQIVNQINDCLKEFYPQALGLFYKPACAISIAFLQTFSDPNTLLATTKCRFRAFLKEQNYPYLEKAEELFGKIHAPAPQADPVIVQTGKIRLMALLDQFLAVRQHQKSYEQRIRAVLRKVPESKLIRTLPGLGGRLVPELVAVLGPRQSHRRFDSARALSNLAGCSPITQASGKWRTVRM

SEQ ID NO: 254958 - protein, 369 aa, unidentified
MTIHPTAIPKLYIGMDIQKKSWSVHLRTDISDHKTLTIPSSCDVLFEYVQTHFKGHEVSLTYEAGCCGFSASRYFLNLGWNVLVVNPADVPRKDKQTYQKTDKIDCKNLAKQLHSGQLKGIFIPDEAQDLLKSLLRQRAETAKQLRAIKSNIKALLLYHGMEVPKEFDSPNWSKAFIQWLMNIKWTHQTGKICLDSKLRMFNLIHEEYLQLANELRAYCRKHHKNDYYLLKSIPGIGGYLASAIIAEIGDLRRFSSEAQFASYVGIVPTIRNSGGAEKIQGVTPRCKGLLRSYIIESAWVAFRLDPEMQTYYRKHIGRNPKSIIVKIARKLLNRMLAVIKSGVPYQCSYSLNNGKETKKVLRQKPHKTI

SEQ ID NO: 254959 - protein, 339 aa, unidentified
MKLYAAIDLHSNNSVLVILDERDRVVYERRLPNELPAILNELKPHRKKVQGIAVESTYNWYWLVDGLMDAGYSVKLVNTAAVKIYDGMKYSGDEHDARHLAHLLRLGILPTGYIYPKKERAVRDLLRKRAQQVRYRTAQILGIQNLVSRNSGHGISTNDIRKLDEGTIGELCDGDQIRALAVQSNLTVLRCLDDEIHKLEFVVLKQAKLKPQFEKLLSVDGIGNILGMTIMYEAGDMKRFAKVGQFASYARCVSSSRWSNGKKKGEGNRKNGNKYLSWAFMEAANFSIRFNERIRAFYQRKQAKTNRVVALKTVAHKLARACYHVLTDQVEFDLARAFA

SEQ ID NO: 254960 - protein, 370 aa, unidentified
MRDGITHVALDAHMRMLQVAMLLPGSDVPIEWQVANEGGAIRRMVKKIQREAKGEVRMCYEAGPCGYALQRTLKDLGVDCMVIAPSLIPMKPGDRIKTDKRDARKLAGLFRAELLTEVHPPTPGEESVRDLSRCREDAKADLMRARHRLSKMLLRRGIVWEGGKKNWSQAYMKWLRTLSFDHPADKLVFGDYLLAIEHLEERLQGLDSALESASQKDPYRGPVAALRCFQGIDTVTAITVVAELHDFRRFQSARELMAFLGLVPSEHSSSDSRKLGSITKTGNGHARRVLIESAWHYRHPPRLGPALRKRREGQAAAVIAVADKAAQRLHRKFGKLQARGKPMPKVVVAVARELVGFLWAVLYPASAQAS

SEQ ID NO: 254961 - protein, 358 aa, unidentified
MTKVRKKVDFKGEKIYVGIDVHKKSWTVAVCTEHTNYRPFNMEPKPESLVNYLRTNYPGAEFICAYEVGFSGYSLYEYLTEEGICCLVVNPADIPTTSWESEFKNDQRDARKIAQCLRSGQLRPIHIPSKQLQGDRSLVRFRRQIRKDLVRQKSRIRSLLMFYGIQVPDEVDSKGRWSERFRHWLWNLELPKPSASKALHLQMGMLEYIRGMRNNTNSHLQQLSNEQRYIDLADLLQTVPGVGRHTAVKILVELGDIKRFPTLDQLCSHVGLVPASHNSGENVRQGRLTYRGHRELRTMLVEAAWTAIGVDPALERTYQELKKRMIPPKAIIRIARKLLARIRHVLLTGEPYEKGIIA

SEQ ID NO: 254962 - protein, 389 aa, unidentified
MFSGKQNQIRATLRKELVIMKDTIKYVGLDVSKEKIAVAIADEGRDEPRYWGMILNTPEAVKKLMDKLGNSENLRVCYEAGPTGYALYRLLLTLNIHCTVIAPSLIPQKPGERIKTDRRDAVRLAQLYRAGELTSVYVPTPEDEALRDLVRCREDAVEDELRAKHRLSKFLLRYDIHQPKGKKWTVRYYRWLDTLKFENSKLKVVFQEYYHQIKEIQQRILRLEEEIRIQATDSIHAPIIQALQALRGVALITATSLAAEIGSFKRFSTPRQFMAYVGLVPSEYSSGESRRQGKITKTGNRHVRRLLVESAWSYRFTPSVKGELKKRQIGQSPTVLAISWKAQNRLHKKYFRLLSRGKESGKTITAVARELAGFIWAITQELDEVVPKA

SEQ ID NO: 254963 - protein, 420 aa, unidentified
MDEITQEPGALVERVAALDIGKAALTACVRVPHEDKPGVRRQEVRSYATVTPALLDLRDWLTCQGVTLVVMEATSAYWKPPFYLLEDGVACQVVNARDVKNVPGRPKTDKLDAVWLCKLAERGMLRPSFIPPRPQRQLRDLTRYRRTLTHERTREKQRAEKLLEDAQIKLSSVISDIFGASGRAMLAALITGQRNPHDLARLARGSMRAKTSALQEALTGHFTEHHAFMLGMMLDRIDALTAQIHTLTTRIEQAIAPLAAQVAQLDEIPGIGVTAAQDILAEIGTDMTRFPTPGHLVSWAKFAPRARQSAGRSKAATTGQGNPWLGGTLGEAAAGAARTKTFLASRYRRIARRRGNKRALVAVGNSLLTVIWHLLSDPGAHFTDLGPDWHDRLAPLRRKRQLIAELERLSGKKVTLHDTA

SEQ ID NO: 254964 - protein, 357 aa, unidentified
MVDILTEAKSSEVGVTNPYRRTEHCGKIHACRCDKEVGVIGIDVSKDHLITSRGRMRKYENNKRGYEEILKMKPCAIVLEPTGVYAIRPCQYFKEKGIKVLQVSPNVLSREKEFRGKKTDFYDAEKLDNMVDKAKEYEYNSLRELVTLYLFLKDIEVKYKNRLKRALFLVSDNDKLNKDRLERLAKGDFTQEELYQLEYTPIVLEEIKVLAKTLLEMQEKLKEVRRMIEGQVPQDHVLLTIPGVGRLAAGVIIGIVGDIRRFPKPESFVAYCGLDPLVERSGKAVISKGISKRGNKYLHSLFYFLAGRNYSRNPTLLKFYEAHKDRLQGKKLYTALARKLARIVWSVWYNNRPYEPK

SEQ ID NO: 254965 - protein, 364 aa, unidentified
MENVRFVGLDVHADSIAIAVAEPGRGEPSGLATIPNDTVMLLKRLRKLGRLKCCYEAGPTGFGLHRDLTAAGIECIVVAPSLVPTKPGDRVKTDHRDAVKLARFLRSGDLTEVHVPEQATEAMRDLERARDAAKRAERAARHQLGKFLLRNGRRWPGKTAWTSKHLEWVRAQHFEHEAQERVLDDYLKTVQDCSARVERLTKSIVELVESWSLRPLVKALQALRGVNVVAAVVLAAELGDLARFESAPKLMGYLGLVPSEHSSGETRQQGRITRAGNAYARRILVEAAWAYRFRARKSAAIAARSQGVSDEVQRIAWKAQERLCARYARLTARGKNKNRTVVAIARELSGFIWAIGRQPKLLEA

SEQ ID NO: 254966 - protein, 430 aa, unidentified
MKSNTQNAKIEAITEKTLVLGIDVGSETHYARAFDYRGIEYSKKPFKFSNTEAGFATFKEWILDLKERHEKDKVVPGMEPTGHYWFNLGKFLQDNEMKPVLVNPHHVKKSKELDDNNPTKNDRKDPKVIAGLVREGRYMIPYLPDGVYADLRTASNIRFQLQAELTRIQNRISRWFNIYFPEYKTVYGKPDAKSGMLILKAAPLPEDILTLGIDGVNQIWRDAKLRAVGKARAKTLIKAAEHSIGSKEGTMSARMEIRMLLEDYESQNMRLQEVMVLIEELVKEIPMAEKLLEIKGVGIRTVSGFLAEVGDISRFNNPKELQKLAGLALVENSSGKHKGETTISRRGRKRLRYLLFEVAMSLVAKNPEFRELHNYYTTRRLNPLKKMQSLMAIAAKLIRVFYAMLTKGVDYDPKKMVSDIKRPAVYLQAA

SEQ ID NO: 254967 - protein, 385 aa, unidentified
MTHAPGTGTVIDYERTLILAIELSNTSWVLAAQIPGLPGVKAKRSIDPTPEALMAAIENYRGRAEKAGRNVDRVIAVYEAGWSGFWLVRWLAKHGVEEAHVIQPSSVPVDRRARRAKSDGIDAELLLRTLLAWLRGEPRVCSMVPIPAEADEDARRRVRERAELVSERVGLVNRIGAVLATLGAGEYNPLRRDRRQRLDELQTALGDSLPTNAHAKIARMLDRLELLLIQITELEQSRDAVLEDESPDRASSMIQQLAKLRGIGVQSATVLVREGFVREFANGKALGSYAGLTATPYSSGGIEREQGIGKAGNARLRTVMVELAWLWQRYQPGSAQVRWFRERGGTGRRVRKVMVVALARKLLIALWRFATQGVVPEGAVMKPAS

SEQ ID NO: 254968 - protein, 396 aa, unidentified
MVTVGIDIGGRTHVVARCRDGQARADRETVRVSQDRAGFAALDAWLERQLEPVTLMAMESSGHYWMPLASHLRRREIPVAVVNPLAAKYFAKSRLARTKSDPADARSLAEMAMRDTPPARDPLAGAELRQAARFAMTLVTEQAKVCQRLIRLVELGFPELGELFDDPTCRTAREVLRIAPTARVATRRRTSTLANANAGPGRRRLGQAKAERLQAAAAESIAVPELDAEVTFEVGLLLDQYDLLERQITAADGRVAGLLDGETARRIQTIPGVGPSIAATLLAEIGDIERFTDFDQLLAYAGVHPAERSSGRKGSNPETSWHMSKAGNSHLRAAAYRMAVVGVQHNPVIRAHYARKRAAGKSKMNALGHCMRKALSIVWGVWGNGADFDSDWGVEA

SEQ ID NO: 254969 - protein, 371 aa, unidentified
MSSIIYVGMDVHTTNYTLCCYSIATDKIFATATMDPDHMNIVKYLDRVNRELGGGCQFKCGYEAGSLGYSLYHQLTGQRLDCVILAPTTMATTRKKKGIKNDKRDAGNIAKCLAYNTYSAVYVPTGEDNAVKEYIRMRNDAKDTLKRYKQQLLAFCTRNGKRFTEGRNNWTQKHLAWLAKLDFGDAILNETLREYMTLYHQAVDKIELFDKRIAEMARMERYDEKVKKLTCFIGIKEHSALATIVETGDFIRFPTAQQYASYLGLVPGEDSSGDSVQRTGITKAGNTHVRKLLVEAAQSYSRGVIGKKSKALKDRQAGNDTKVIAYADRANDRLKRKCYRIMFKSKRNIAVTAVARELACFVWGMMTDNIA

SEQ ID NO: 254970 - protein, 342 aa, unidentified
MERELYIGVDVSKNWLDLAYYDGVVVDWKQGHIRVDNKESGYIQIDRWLKKLGVNRDCVLFCMEHTGLYCQDFRLWLERKGYVYGMVQPRKMHRFEPDLGENERALDRIKTDEMDSFRIAIYCEKHCRKIKASPSRLPGEAYFRLKRLMAERKQYTRQSVLYKQHLHDISVYDTEGSRERKKAGLGLLTEQIRQTDAEIRRIIESDPALSRNYELLCSIKGVGLVVAVETIVLTENFTSITNPRKYACYIGIAPAKKESGISVRGGEHVSRKGFTQAKADLSLICLVAIRHDPGIRAYWQRKKAEGKHSGIVLNAVKFKLVLRMFAVIKRQKPYVEIDAYKR

SEQ ID NO: 254971 - protein, 383 aa, unidentified
MKYVGVDLHKHLIVLCVVVLVAGRPKVVKRAQFGCHESEAIRAFFQKLGPFQVVVEATAAYEWFFLLIENLADRLVLAHPKKLRVIAESTRKSDKIDAQVLAVFLALDMIPQAYRPTPRIRQHRVLVRHRCWLQRRITSLKCKLRNILGHYNADIAGLFTRQGEQYLATVPLSPADRFAVQALQEQLGLFQRQLQDTDRQLQQFAETASLAEQEARTLLDTIPQVGPVTIDVVLSELGDWRRFRSQKAVTAFAGLDPGFRKSAEKCLELHISKEGSRLLRWAMIQAAWRLVVRSPRWRQMLVRLQINTGSKKKAIVGVARHLLCMMFAMLQAGRPYELLGVPNGNQQSSPPRETAETSTRARQKGAAPSRLRPRLGRSRCARG

SEQ ID NO: 254972 - protein, 409 aa, unidentified
MRGRRCIGLDVHRDFCEVAIWEDGKVRSAGRVAARPEALAEYAAALRPTDWVALEATSGARQVAEILGPHVARVVIANTHRLAAISESKKKTDRNDARTLAQLLAAGVLEGSWLPDEPTRALRRRVSRRHNVVVARTRAKNETMAVLHRNLSERPPMSDPFGVAGRRWLGSLELPDDEVETLSAALRQIDFLNQEIATLERELARFVSASVEARRLMTVPGVAMITAATFLAQIGEVGRFSSPKQLVGYLGLDPRVRQSGNGTAFTGRISKEGSVLVRHVMVESAHSATRTPGPLRAFYERVRSRRGHAIAIVATARKMVTLFWHLLTRSEDYRHSIELPTSKKLRKVELLAGAPRRRGGGPSNGPNREQRLATDRAKAQHAEDQYRRLVANRTPPGRDQPQNQDQLRT

SEQ ID NO: 254973 - protein, 378 aa, unidentified
MIDQMTLEANYVGIDTHASTHVAAVIDQRQRVLSTIEVTADPAGMDQLRQWISRIGPVARAGIEGTSSYGAWVTVIVLDAGIEVVEVTRPNRQRRRSTGKNDTLDAVAAAVAALTRIGTAPVKYRSSHLDQLRACQIARESLVSTRTKIMNQIRALTRTIPGLAALDINDLSGPHLIDALLHHKQPIPGLDPVQLLCDYWRRLGTDTEHLEHQMSLICRRYAPELLTHTGLATICCTILLLTAAGNPDRVRGEASFARLCGTAPLEASSGHTIRHRLSRAGDRQANHALWVIAAYRITHPDPTTTAFIDRLTGRHKTRRDILRILKRALVRELLPDLRLATSRLCRPHPGADPITSHPGAPEPMSRVAKPSRSDAKRP

SEQ ID NO: 254974 - protein, 337 aa, unidentified
MIVVGVDVHKHSLTAVAVDELGRLLAECSGPVDGRVVEWTRSLDEERLWAIEDCRHVTRNLEQTLLDAGERLVRVPPRLTAPQRRRGRSRGKSDSIDALAAARAALQEPLLDGPRAGEETLRELKLLVDHRDDLVAERRRCQQRLRWHLHELDPGLRVPLGALDRALWIERLARQLAHRGQTTQVRIARDLLTRCRTLTRSVNELDRELRARTETLAPRLLELAGCGHLSAAKLLCEIGPIERFPSDAQLARHAGVAPLDASSGKHQRHRLDRGGNRQLNCALHRIAVTQGRTYAPARAYLERKQNEGKSRREALRCLKRQLARTVYTTLKTDSALT

SEQ ID NO: 254975 - protein, 404 aa, unidentified
MDVVNDRCAGLDVHKKTVVACVITPEIKQTRTFGTMTSDLLVMCDWLTDQKVTHVAMESTGVYWKPVYNLLEVLGREILLVNAQHVKAVPGRKTDVKDSEWIADLLRHGLLRASYVPDRDQRELRELVRYRRSLTREKAQVVNRIQKVLEGANIKLSSVATDVVGVTGRAMLKAISEGANDPEELVQLIKGRLHSKKAALKEATKGLIGPHQRMMLRSQLRHLSFLEQEIEGINQEIATRMASVEDVIVRFDAIPGVGRRVAEDVLAEMGSDMSRFPTSGHLASWAKVCPGNNESAGKRTSGATGKGNPWLRSALVEAAWMASRSKDTYLAAQFKRISVRRGAKRAALAVAHTILVTMYQMLSRRVGYHDLGGAYFDRANVQRVVRRSVTRLENLGFRVSLAPA

SEQ ID NO: 254976 - protein, 350 aa, unidentified
MLIIGCDYHPGFPQIASVDRESGELREGRLGHREEAERFYHQLKERNLQVRVGMEASGHSRWFERLLGELQFELWIGDVVQIRSKRVRKQKTDRQDAQLLLRLLMEDRFPRIWVPDAENRDLRQRLWHRHRLVQMRTRVVNQLQVVALNEGLRRKKGLWRAAGRQELESFALAPWASRRRQDLLDLLDQLTPKIQELTRALEPEAEKRPVARRLKTHPGVGPLTALAYELVIGTPERFHCGKQIASYVGLVPREESSGDGRRLGHISKQGSALLRFLLVEAAQVTVRSQPQWRSRFFHLAMRRGRKIAKVAMARKLAVHLYWMWRQGWDYGPMQKLGSHAGEPGNRDGEQ

SEQ ID NO: 254977 - protein, 418 aa, unidentified
MTEDVQWLVGIDWATEKHRVCLLDMSGRVRGERDVNHEGAGLSEVCSWLLERTRALSGQIAVAIETPHGPIVEIFLERGFQVYAINPKQLDRFRDRFTVAGAKDDSRDAHVLGDALRTDRHAFRRLAAEDPVVIELREWSRMTDDLRQERNRLANRVRQQLRRYYPQAMQVTDDVAADWFLDLWQEAPTPAKAARIKHTTIDRILKANRIRRIEAIEVLRILRQKPLWVAPGTTEAACAHIRTVAARIRLINQQIKEANHKLNELCAKLEAPAEGPPGQKCEQRDIAILRSSPGIGRIVLATLLAEAAEPLRQRDYHVLRALSGIAPVTRRSGKQHFVVRRYACNRRLQNAVYHWARVATQHDLISRRRYAELRSRGHTHSRALRGVGDRLLYVACTLLERQTPFDPNYKGSQAIGAP

SEQ ID NO: 254978 - protein, 313 aa, unidentified
MEEFPATAAGYARLPGWLGGFGTVCLAGIEGTGSYGAGLARHITAAGVRVVEVDRSDRQDRRRQGKSDPLDAVSAARAAQSGRARGAPKGRDGAVEAIRTLMVARRSAAGERTRTINQARALVLTGPDDLRTRFARHTPAALITGLASLRPRTGDVAGHATRIALRELGRRAQFPAGQLTRLDELIVPLVTARAPGLLALYGVGPRTAALLLIAAGDHPGRLRSEAAWAHLCGAAPIPASSGKVTRHRLNPGGDRQANHALWRIVFTRLGSHPATRAYAERRTAEGKSKAEIIRCLKRYVAREVYPHLRPAGG

SEQ ID NO: 254979 - protein, 394 aa, unidentified
MKLVGIDVGKNSHHFCVMDKETGEFNVTPSSFSNNKEGFDFLINSLKPYSKKSILLGMEDTGHYHVALLKFLLSNGYTVALINPKTTDLTRKMEGGITKNDKLDTITICDVLDTPERKKQYRITKVDRFDLYEQRQLTRHHHNLKEELNVYCNRLQKSIDLVFPEFNTLFSSKYGIVYMNLLKTFGSAEAIASTDIRTIRKFFEIKGKGNRISLTPEKLKECAKNSIGISSGVETIQIKHLVSQITLIKEQIAEIDKKIEEFSITNNSPILSIPGISHFSGTSILAELGDIGNYSKPSQIIKFAGVAPYHYESSQYNAQHTAITKKGSKYLRKTLYQVILPVINNNPVFKKYYLLKISQGKGHRCAQGHCIRKLLRIIYHLLETGQSFDPALLR

SEQ ID NO: 254980 - protein, 368 aa, unidentified
MENEPKRFIGIDLSKRTYEAAAIHAENSTITRWNGKLDPHGREALVRRLASGDIVALEAGTASFKIAKELQEKEGVTVVVLNAANLAIIHASLKKTDKEDALKLARLVQKFSLEELPVVPLPTDEEMEHRALVAHETRFRQDRVRLINRLHAVFLRSGFPDHTKRQLGIRSTRETLILEELDGFNLVEAMNLHKMINEYEAILEDLDRQINDTVVACGEDAEILLSIPGFGVKTTMAVLAYAGDMRRFENPSQLVNYIGFSPRLYASGDLERTGSITKRGNPQVRWLLIQSAWCMVQSKAANPLKAHFEAMLKRGKAKSVAIVALARKLLEMVYILLTRRERYRYIDPCLYTTKLRRIGFNLVGAGVC

SEQ ID NO: 254981 - protein, 339 aa, unidentified
MKEVTTIGLDLAKNVFQVHGVDRAGTVVVRRALRRSQVLAWFAKLPPCLVGMEACATAHYWGRELRRLGHEVRLIPPAYAKAYVRRNKNDAADAAAICEAVGRPAMRFVTIKTEQQQAAAAIHRVRDLLIKQRTMLRNQLRGLLAEFGVVAAQGRRGLNELLAVLSDPEDRRIPSPLREGLMMIMETWRGIERKLEEIDRQMVAAGRADATYRHLVTAPLWADPVECDMAALVIDPGAFKRGCDFAASLGLVPRQDGTGGKVRLGPISKRGNGYLRRLLVNGATSLIKCQHARQDPWVAKLLASKPRKVVAVALANKLARIGWALMTRQEDFRSQPAAA

SEQ ID NO: 254982 - protein, 416 aa, unidentified
MKLTYPICCGVDVHKTFLVATIITSEYVMPHYRQKRFSTFYSGLVAFKKWLLENNCKDVCMESTGKYWVPVWNVLEDSVHVVIANPKWVSAVKGNKDDKKDSKWIGDLFRMGLVPSSYIPSKDIRILREFTRYRSKLVSMRSSEKNRFQNAFTVCNLTLDAVVSDMFGKSATDIENYLLDTDIVDPAQCVSLLRGSLKKNSSDVVEAVSGFNMTPEQKERVRIVQGHFADIDRRIAQLDGVIGNLVAVYEGQISLLCTIPGVDRRIAITILSEIGTDMTKFGSSKRLCNWAGLTPASNQSAGKKKSVRISRAGVYLKPALVEAAHAAVKATEKHPYYRIKFERLMKRRGKKRAIIAIARMILTAVYVMLSNLEEWNPVDLYKVDMPEHLKEKQLAKAVKQAVRFLEAQGLTVLDSA

SEQ ID NO: 254983 - protein, 321 aa, unidentified
MQFIGIDAAKATFDIALPLSHGKYRTKAKLPNTPKGFDELLAWRAKHAPNAAVGMEATGIYHEALAQALVEAGVVVHVANPARVKAFGQAEGMRTKTDRSDAKLIARFFEAQRSEKLHPYVPPTPSEVKLRALVRRRDDLQEMLQMEHNRLDVADISVQQGIKDVIRTLEEQIKQVQKAIEDHIDNDPDLRRRHQLLTSIPGVGNTSSAQLLAILGDLSKYSDVRQVVAHAGLNPAQRQSGNYEGKCRISRVGDANFRKKLYMPALTGKTHNPTLKSFADRLSAKGKPFKVVMCAVMRKLIHLIWGVLRSDRPFEPDVALA

SEQ ID NO: 254984 - protein, 342 aa, unidentified
MRSGTATSLGHPYRKGNVMAAASGRFVGIDGAKASLDVWMLLANTHFTVPTTEAGWRWLMTRIGPGPGSPIVLEATEVDHLGLTDALAAAGMPPVIVNPSWTYHFARSQGKRAKTDRCDARLLAEYARRALTTVRPLPSATARTLTALIARRSELTKMLTMEQHRRHTADACLHPDLDGHIADLRTCRRAIDRELTVVVAGDPFWHRRVAMLRSIPGIGPTRSVPLAVRLQELGDLTRQAIAALAGVAPHARDSERYRGRRTIGGGRRDVCKALYQGSVVMRTHHPPMRAHGEHLVARGKEPNVALVAVARRSLGIMAAMVRDDLLWQDTKVGQGHFLPIPG

SEQ ID NO: 254985 - protein, 340 aa, unidentified
MKEVSIVGLDLAKNMFQAHGAASDGSVVFRRKLSRAQLVKFFAAQPPCLVAMEACASAHHWARTLGALGHTVKLIPPAYVKPFVKRQKNDAADAEAIAEAAARPTMRFVEPKSEAQQAAAMAYRTRDLLVRQRTQTINALRAHLAEYGVVAPTGVAHVGRLAAVVEGEDSGLPEAVTVLGRMLVAQIATLSRQIETLDKELRQRAGGDDTARRLMTIPGVGAITASAITTFAPPCETFAKGRDFAAWVGLTPRQHSSGGKERLGKTSKMGQRDIRRLLIIGAVAVVKWAARNGAPEGSWLARMMARKPRMLVAVALANRMARIAWALMRNEEVYRDPAAA

SEQ ID NO: 254986 - protein, 325 aa, unidentified
MDVLGIDVAKASLVVVLLVGERQQRAEFANTPAGHAKLLSWLAKRCPAPVHACLEATGTYGDDLAQVLFDAGHTVSVVNPARIAAYATVQAARHKTDQADAALIARYCQREQPAAWQPPAPELRELRALVRHLDTLQQQRQAEHNRLEAGGHPATVTQAIQAHLTFLSAQIDTVEQQIEAHFDQHPDLKRQRELLDSIKGIAARTATRLLAELGDWQRFANARAVVAYVGLNPREYRSGSSVQRRTRLSKAGNAAVRAALYFPAIVAKQHNPLVQALCARLTARGLCPKAVIGAAMRKLVTIAYGVLKSGQPFDPKYAQVASGQA

SEQ ID NO: 254987 - protein, 347 aa, unidentified
MEYFAGLDVSLETVNVCIVNPAGDILLEKKIAAQPAAIIHLLKSFGSPFKRIGLEVGPTSSWLYGELRAAGYGAVCLECRHVKAGLSAMRNKTDRNDARGIAQLVRLGWFRQVHVKSEEAQRTRMLLVNRQQLLTKALDIENSVRGSLKVFGLRIGVVARRGFEARVLELVADDPIVLAVTKPMLRVRRALLEEFERLDRLCQQLARRDPVCRRLMTVPGVGVVVALTYRTGVDAPERFSKSRDVGAHFGLTPKRYSSGQTDYDGRISRCGDEMVRTALYQAANVLLHHGRWSSLRSWAMRIAKRGSVKGAKVALARRLAVVMHRMWTDGTDFRWSDTSRMTAPTAA

SEQ ID NO: 254988 - protein, 366 aa, unidentified
MKKGSTMAIRRKQIVSERKLTIGMDLGDRFSCYCVLDEAGEVVVEQKLATTKPAMKQVFSRMPRSRVALETGAHSPWVSRLLATLGHEVIVAHARNVRLIGESSRKDDRLDARMLARLARLDPRLLSPVRHRSANAQIDLTVIRARAALVGARTALVNAARGLAKSYGERLRKCGTQQVNPDLAAGLSVELRTALEPLLAEVASLNQRLAEYDRRIEQIATKEHPEVALLKQVKGVGTLIALTFVLTVDDPHRFRRSRDVGCYLGLRPGRRNSGRSEPQLHISKEGDRYLRTLLVQGAQYILGPFGQDSDLRRWGLKLAERGGKNAKKRAVVAVARKLAVLLHKLWMSGEVYEPLRNNRPVISAVA

SEQ ID NO: 254989 - protein, 319 aa, unidentified
MGAVLGIDVGKADFHCALLIDGHSRSNSFSNSQAGFQKLLGWLRNRDVARVHACLESTGGWSEELAGFLHKHGHAVSVVNPSAVKAFGQSELSRTKTDKADAALIARYCHAMAPRLWTPPSLSQQRLQRLSRRRVALDDMRVQENNRLKGPGVDDIRSSIEATIAFLTRQIAEIDADIASLIDNDPSLRGKRELLESIPGIGERVATTILGELPQITEFRNGKALAAFVGLCPREYRSGTSVAASWLSKVGNRHVRRVLYMPAMTAMRFNPVLRAFAARLRSYGKRPKQIIAAVMRRLIVIAYGVLKSAQPFSAQGGRC

SEQ ID NO: 254990 - protein, 434 aa, unidentified
MHNKNYISVGIDVGSAFSFMTILAPDETVILKPFKITHNNKDSLERAVSEIKKAEELYSLESRIFLESTGIYHFPLFCYLVDCGFNASIINPIITHSTKNGNIRKVKNDKIDSKGIAKLGLSKDIPVSQFPAKLVLELRSLTRKYYDLTDERSAHINKLKGDLHTVFPQYLDVFCDVTGKTSTMILRQYGTPDKILRGHKKTMIEKISKASRKGLAKASERYEKLCAAANAAKTFGCQIDSIYFNIFLTLDLVEKLDSALDSILNRIRQLITFNKNEKFIQQIKLLNTIPGVGFLTAVTIMCEIGDFSAFRNPKQLFAYFGLDPEVNESGKFVGTQLHMSKRGSRIARRAIFAVARSEELASIRTKRNGEGINPYLRKYYELKSGQKPKMVAIGAVMHKVCNIVFAVLRDEKAFELRSPEEHCKQYQRPALAAA

SEQ ID NO: 254991 - protein, 406 aa, unidentified
MEIEAINRRVIGLDIHQAQITACALVEDERGGLRKEHRQFGAFKRDRRALADWCAAIDPAEIVMESTGIYWKSPYAALEKVGIRAKVVNARHVKNVPGRKTDIGDAEWLAMLSRAGLLRGSFVPEADHRELRLVSRQRQKLVGILASEKNRLHKVLTDSGIRLGVVVSDLHGQSARAMVKAFIEGKPPEEVIQLASRRLKASRDEMMDALHGELSPPHRFVLDELMQHIEDIEERIRRFDQKLLEGLSGAGDALMVLQTIPGVDLIGAAMLLVEIGTDMSVWENEERLSSWVGICPGNNESAGKRKSGRMRKGNPYVRRLLCEFAHAASRTESTFKAKFQGLLVRRGRKRAIVAIAHKLLRTIFFMLKRGQHYRDTTVNYEEMSVKRNAARWIKKLTEFGFLPKPA

SEQ ID NO: 254992 - protein, 342 aa, unidentified
MQVTTIGLDIAKNVFQVHGIDASEKVVVRKQLRRSQVLAFFKALPPCLIGMEACATAHYWARELTKLGHKVRLMLAKDVKAYVKRNKNDAADAEAICEAVRRPTMRFVQVKSAEQQGGLMLHRTRDLLMRQRTQVINALRAHLAELGITAAQGREGLKELLKIIASDADERLPADAHASLVVLAAELQAMQTLIGSIEKRITAQHRGNEASKRLESIPGIGVIGATAIAATVTDPTVFRSGRDFAAWIGLVPRQDSTGGKQKLGPISKQGDRYLRRILVVGAVAVLRYAKQNPEKYPWLTQLLARRPFKVVAVALANKMARMAWALLAKGGTYRAPALAAAA

SEQ ID NO: 254993 - protein, 323 aa, unidentified
MDNHTQYLGFAGVDLAKKVMQIHFVTEDGEITDKSAKRAEFLDFFRNRGKCLIGMEACGSSQDWARKLEAMGHEVHLMSPKAVKPFVSGQKNDHNDAIGIYKAMFNGVRRVPVKSTEIRDLQTLRRIRSQVTKDKVKEINHVRGLLAEYGIVMGKSLNAFNKGISSALESLKERGDVSPLVAEELRTTVEAIKAKIERQKKLDQEIEQLARGCKNYENFLKTPGVGPFTAAMLCVLLCDPSIFANGRQFAAYIGLAPRSRGSGGKNYVTGIPSKFNCDSESRAVLVECAQAIARCKNKSLWVEEILRRKPKEPLHKRWVICYN

SEQ ID NO: 254994 - protein, 331 aa, unidentified
MINKTAQFAGIDVGAEELVLVVRKNATSMKAQKFANTPADRARLVAKLAKLPGLRVCLEATGAYHLELAVALHDGGVELNVVNPKAAHNFAKALMKHSKTDAIDADTLAQYAERMPFTAWVRPTPQAFTVRSFARRINALTRQKAMTKNQLHALAFGPDLPKAVLDDAKLAIAQLEKRLARLSREAQAFIGEHEDLKRVFTLLLGIKGVAETSAIALMGELLLLPKGLTHKQWVRYAGLDPRVFDSGKSVHKAPRLSKAGNRHIRQALYMPALSAKQHDPYVKAFFQHLIEKGKKPLQALCAVMRKLLHAIHGMLRDNQPFDNTRFYATAA

SEQ ID NO: 254995 - protein, 362 aa, unidentified
MSKFIICGMDVHEKSIKMMWAVDNGAPELKDLPNTPGGRLCLISHLKGAARAVGCTEIVVAYEACMLGFGLHDQLMAAGITCHVLAPSKIRKSRHDVKRKTDEADARLILETLRACLLAGNTLPAVWVPSPEQRADRELVRARLEIGNKTTELKTQISMLLKTHSITRPPKVGKPWTLGYRAWLAGLTRDQATLPLQTRLVLGSMLRQLKNLETEARLLNNAVATLADTPRYKATVEKLTESLMGVGVLTAMVFLTELGDLTRFKNRRQLGSYLGLAPTSNESGQITDRKGHISRTGPSRVRWALCQATWCHIRLTPEAKAAYERIRKGKDKLKRVAQTACCRQLAIRMWHMAVDVLKTKAA

SEQ ID NO: 254996 - protein, 347 aa, unidentified
MGRFCVGVDVSSKTMDIAYRGPKGRTVGQVFENTRGGQRALIKHLKKQSRSIRVVMESTGIYGLDLAMALDKAGMEVMVANPRAAAHFAKATLQRSKTDPLDAEMLLLFAERMPFTRWHAPTATELELRGISRRVQSLLETVRAEKNRMHAAKHVEGTIIVRRSIEATIKALDKQIAGLRGEARKLIKSEALLERRWHLLLTVKGIGVISAISILAELSVLPADMTDRQWVAHAGLDPRLFESGTSVQAPPRISKRGNSHLRAVLYIPAQSASRFDAGASNFAARLRSGGKKPLQVHVAVMRKLLHGIHAMFASDQAYDGKRLFPAAGAVGTSEIAPSAISEVSIAL

SEQ ID NO: 254997 - protein, 344 aa, unidentified
MSQIIRIGMDTSKHIFQLHGVDASERVVLRKRLGRQAMLAFFANLSPTVVGIEACGASHYWARELGKLGHEVRLIAPQLVKPYVARNKNDGRDAEALCEAMSRPRTRFVAAKSVEQQAALMLLGIRDQLVARRTQLSNAIRGHAAEFGLIAAKGMDKIVPLLTTIARDESVPALARELFAMLARQHGRVEVELKAIEAKLRAWHRANAMSRRLAEIPGVGPVIAAALVMKVSDPGVFRSGRLFAAWLGLTPKDHSTAGKTRLGKITRAGDEMLRSLLIVGATSVVKQAKRGRGSRWLIALLKRKSAKLAAVALANKIARIAWKLMTTGQSYDSARIDAAMASAA

SEQ ID NO: 254998 - protein, 348 aa, unidentified
MAMSILEAGRTVIGGVDTHLDVHVAAALDPIGGVLGVESFVASPQGYKALFEWMGAFGTVSKVGVEGTGAYGAGLGRFLAKAGVQVVEVDRPNRQARRKKGKSDPADAVEAARAVLSGRATGTPKSRDGNVEAIRALLVAKRSARDARGRAIHQMRQLSYTGPDQLRSRLKGLSITELVTETAAMRPRSSGDPVVYATKVSLAALGRRVLSLEDELVGIDELLTTLVTTCAPKMLELFGVGIDTTATLLVTAGDNPERLRSEATWAHLCGVAPIEASSGKVTRHRLDRGGDRNANQALWRIVMTRLACDPRTREYMERRTKEGRSKREVIRILKRYVAREVFKYLPRA

SEQ ID NO: 254999 - protein, 415 aa, unidentified
MALKIVYKICCGIDVHKNFVVACIAKTDKQGVTTYERHHFSTYTKGLKQLLKWLLDRNCKDVCMESTGKYWIPVYNVLEHDCSIVLAHPKYVKAIRGKKTDKKDAKWIADLFKHDLVAGSFMPPADIRQLRDLMRYRFKLTCFKSSEKNRYQNCLTVSNIQLGNVVSDTFGKSSQKIIAKILENPDDTSFDIGSLIHGSMKDKLPELELAIDGYITPEQAGKLKVIKSHYENLEARKAELEELILALATPYQQELAILQTAPGISSDFTAIGIISEIGTNMEAFPSAKHLCSWAGLTPTNNESAGKKKSVRVSKAGCYIKPLLVQCANAAIKSKKHPEIRDRYLRIKKRRGHKKAIIAIARMLLTALYHMLKNGENYNSDLYQKSDILPTTREITVEQAILMAQFQGFRIKSATE

SEQ ID NO: 255000 - protein, 341 aa, unidentified
MTPKLSVVGIELAKSIFHLVGLDERGKIIVRKRLARGEVMPFMAQLPRVLVGMEACGGAHYWARPLREQGHEVKLMAPQYVKPSVKTNKNALRDAEAIAEAVTRPSLRFVPIKNVAQQDLQALHRVRERLMGARPALVNEIRGLLAEYGIVLPTGINAFRNALAEKLEAEQGKLTPLSQELCGKLCAEFKKVEAEVAYYDEKLQALATTHPESQRLWTIPGIGPLTATALSAAVGDVGGFTNGRQCAAWLGLVPKHYSTGGQTRLLGISNRGDRYLRKLLIHGARATLRWARPKTDSRSQWIRGLLERRGWNRTAVAVAHKNARIVWAVLSRGGVYGESTH

SEQ ID NO: 255001 - protein, 343 aa, unidentified
MEYYVGLDVSLKQTSICVVNQTGSIVQEGVVDSDPEAIASFVRSKAPGSVRIGIETGPTTTWLWTELNRLGLPVICIDARHAKAVLKMQINKSDRNDAAGIARIMQTGWFKEVRVKDLDSHAVKALLASRALLVKIKRDLENQVRGLLKNLGLVIGRAKFNVFAVRAEGLIENRPELVAAVRPLLEARKAIEQQVDDLDRKVHKLARHDVQVRRFMTVPGVGPITALCFKATIDDPTRFKRSRSVGAYIGLTTRRHASGEMDWSGRISKCGDAMLRMYLFEAAGVLLTRVPKWSGLKAWGAKLTKRNGLRKAKVAVARKLAVILHRMWIDGTEFNWSTKKAAA

SEQ ID NO: 255002 - protein, 349 aa, unidentified
MEGVFLGVDFHARTQTVSWCGTANGVVERRTLDHRTDDVRAFYQQFHVPAVVGLEATGYARWFHRLVEETGHRLVIGDALRIRQFAARRQKNDRRDSELLLDLLLRGDFPAIHIPSIASQEVLRLLRYRHRLVGMRTMLKNGLQAVMLSNRVLRTSRMRTLLWRHQLEHLPLTGADAIRREHSLPLMDELSARIEALGNELHRRSQDDQAVGLLQTHPGVGLLTALAVAHTLQPLSRFRRARCVAAYCGLDPVERSSGDTVRFGHISKQGNRLLRFLLIEAGRSAVRPEGDPDLRRFYYQLALKRNGSIAAVAVARKLLLRMFCMLRDQIDYEEFRRRGRDARRARGES

SEQ ID NO: 255003 - protein, 353 aa, unidentified
MSTIVAHHYPYVIGVDTHAATHTFAVLTSGGEHLDTQTFPTTPAGISRALAWAGRRTDGDVDILWVIEGIGSYGAELTKAAQDTGYPVVEAANMSHKSRRGIGKADPIDAQRIAEAVLPLSVERLRKPRDNQGIQAALKTLLAARDHISRERTKITNALTSLLRSIDLGVDARRAPGKRIIQQIGSWRTRNEAVEHATARTEAIRLAKRFQAVEADLKANDAHIAELVAHSPAAGLTQETGIGPFTAATALVAWGYPGRLRNEAAFAALAGTSPLQASSGKTIRHRLNRGGDRKLNRALSMATMHRMRFDPETRNYAEKRRAEGRTDREIRRSLKRYLARRIYRHLNHVTSLD

SEQ ID NO: 255004 - protein, 468 aa, unidentified
MKKQKIPMTIVNPHAAGIDVGSRSHFVAIGQEQKDVKSFGVYAEDLRAITKWLLENKITTVAMESTGAYWQNLFIELINSDIEVVLTNGKFTKNINRKKTDVLDCQWIQKLHSLGLLPSSFLPDYTTERLRTYCRHRTNMIQQRADSIHKMAKFLKYLNFRLDVVVRDIAGQTGMKIISDICNGNLDPKSLAAHRHHNCRKSEEEIAKALVSNKREDYLFGLKQEFDRHQFYTSKIDECDKGIAQFLEQSILQKEDVVDDIPDGKYFKRQNKNAIKGIDLNIASYQYFDGVDLLAIPGVSHSTVLTLMSEIGPEGFSKFPTAQHFASWLKLAPNNKISGGRVLSNRIPQGSNRLKIALRNAANAVGNLKDSDLAKFFKKIAFKKGRQTAINAVARKIAVILWNMITKKQPYKPKNNYLFLDQKRRIVSRMRKQIADLGLNPDELGFSRANRDKIASQMTSDNQSLSLR

SEQ ID NO: 255005 - protein, 458 aa, unidentified
MWALQCGFEHVGQIPLVPCGPRGSPPVGVLESEGVIVLEEDHHSEEIIARVAALDIGKAELMCCIRIPGETGSGRRLQEVRPYSTMTRSLVVMADRLAELGVTRVVMEATSEYWKPVFYLLEAHGFETWLVNARDVKHLPGRPKTDKLDAIWLCKIAERQMLRPSFVPPPQIRRLRDVTRYRTDLVEARTAEKQRVEKLLEDAQIKLSVVASDIFGVSGREMMKALIGGQRDPKVLAAMARGRMRAKKAQLEEAFTGYFTDHHRLLLTKMLARIDALSADIAELETVIEEMIAPFADAVARLDEIPGIGPTAAAVVLAEIGVDMSRFPTPGHLGSWAKFTPTTKQSAGKRKGNGTTGHGNRYLAKVLGEAAVIAGRTDTFLGERYRRIARRRGKNTAIVAVGRSMLVIIWHLLSEPDAHFIDLGPDFYDKRIDPERKKRAHIRQLEALGYHVTLEPAA

SEQ ID NO: 255006 - protein, 351 aa, unidentified
MREYISFDSHKRYTLMEREDMQGEFARQQRIEHEPGAICRALEGCEKDTPVAVEATGNWYWIVSEIEQAGLRPLLVHPRKAKLMMGMINKTDKLDVHGFNRLQRNGTLPTVWIPPADLRDLRELTRVRMVLSRQRTRLKNRISSTLAKYALVAGEYSDPYGKRARQALEVVIGKLPPQAQWVTTELLSQLDFIEAQITRQEKRLEQLLDITPQIRWLMSLPGIGLILGATVALEIGDNTRFAYAERLASYAGTTPRVISSGDKTRYGRLRPDVNRYLKWAFAEAANSVAVNHTRCPQRHVSQLYKRLRARKGHAKAIGAIARHLAEAAYHVLNRKETYRDPLLNKGQSREV

SEQ ID NO: 255007 - protein, 421 aa, unidentified
MSSRTLSKKLSSVKPGTLFVGVDLALDRNVAVVLTERAEQLARFGFPNDRDGYDYFYRRLETLQECRQAPGVLVGMEPTNYFWKLLAADMEQQRPDYGYRLVNPYTVRKNREGNQLDRSKDDNRDAFTIGDLLRTGKYTETRLLHGTYAELRQYVTLYSRLQRDIRRQKTLIHNIAGQLFPELPRVFKDLTGETALAMLHNHAAAAVVRKMSQETFIAGVRADFQGRRLQVAKLRRAHVLAKRSVGLQDGVEALQLALRTHIETLKTLQQQLEEVCTVLVDVFLSLPESEYLLSVHGLGVITAAIILAEIGDPSHYTSGYQLIKLAGTQPVLDTSGRKTRSKTPMSHKGRPRLRTALFFAVMRLVQVDEAFAREYLHLQTREKNPLTKMQALGVLMNKLLRVLWALMRNRTFYNPDFQHAA

SEQ ID NO: 255008 - protein, 445 aa, unidentified
MAVSPQSVEPGEPFVRCFSAFTEGLDASVEWLKACGVTTVAIESTGVYWIALCQKLEAAGIEVFLVNARHVRHVPGRKTDVKDCQWLQRLHSFGLLSASFRPEDGICRLRSLQRHRLNLIWTAGAEIQHMQKALQQMNLHLHHVVSDITGLSGLRIIDAILAGQRDAVQLAKLRDYRVCKSTIAQMEAALVGDYRPEHLFVLGQSLQAYRFYQARIQECDVQIESHLQQLAQRFESSSALPAKLPEPEVHNDAQAQNPQPAKRKVKRKPQANEPKIDLADYLRRICGVDLTQVIGLNVLSVLLIVSEIGVDMSKWRSAKAFSAWLGLCPRNKISGRKVLDTRTCKVISRVATTLRLAAQSLGRTNTALGLFYRRKRAHLGPAKATTATARKLACLVYHLLKYKEQYREPDPTTYQLKVEKAILARIQKQAAVLGYKLLPTALVPA

SEQ ID NO: 255009 - protein, 309 aa, unidentified
MDAVFVGIDVSKDRLDVHVLPSGEAFAVARNGEGLAGLNARLGSYGAAVIAVEATGGFETVVAASLAGAGLPVVVVNPAQVRAFAQALGKRAKTDPVDALVIARFAEATRPQIRSLPDEATQLLADLVTRRRQIVQMIGAERQRERRAPPKLKRSIARLVEVLEQELSTLDRDLDDAIRGSPAWREKENLLKSVPGVGPIVARTLLSQLPELGSLDRRQIAALAGLAPWTRQSGQWRGKSFIGGGRASVRAVLFVASMVAARHNPQMKAFHQRLIAAGKAKKAAFIAVARKLLTILNAMLRDNTPWRHT

SEQ ID NO: 255010 - protein, 364 aa, unidentified
MKRKIYVGMDVHKETIRIASLTNNTKEIVKEQQIKHNEVQIKKFVNKLKSEWNEIHSCYEAGVTGYPLYRNLKSLGVNCILVAPGKIPRQSSDKIKTDKRDAIKLAKLLRSGELESIHVPSEEDEAVRDYLRSRDSLRLDLGRNRQRLMKFLLRKGITYSATKYWTVSHNKWLNNLQFNNEILQETFNDYYSRVRVQEENLKAMDKRIQEIAKSEPYREKVGILRCFRGVDYLTAMFLLCEVCDFKRFKTAGSFMSFLGLVPGEYSSGSKRKQTGITKTGSPRLRRILTEAAWQHRFPGTGSKIVTARRSGQPALVVALAEKASLRLHKKFRNLQQRGKTPQVMITAVSRELSGFLWAAMNLVA

SEQ ID NO: 255011 - protein, 474 aa, unidentified
MRVRLGIDVACRADHQASLAGVDGELIWSGWRFRTIPTDLTALWEKIPPGAEVQVILEPTRNAWVPLAAWLSAQGAEVVLVAPEQSADLRDYYNKHTKTDRLDSRVLARLPLLHPEGLAAYDGPTPADPLRRVMRRRAKLVKARVATFQRIDALVELLGPAWAEVLGAGDYTKTALVVLERYGDPRALRRLGLRRLSELMIRTSKGAWREDKAAALLAAADDAMALWAGGGLDFAELAADIAAEVRVARSLNDEIAVLEQRAAPMFAAQDRRPAVDDGDERGIIASVPGLGGVLGAGILARFGDLDRFANLAGVRSFTGLVPKIDQSGLTHGHNGITKAGDPGLREVLYLAADYLRRIDPQLAARYYRLIVETGKHHDSALCHLATTLATRLAACWRRRERYVLRDVDGTPITEIEGRAIVAERYKIPDNVRQARRRASRAKQLKQRTTRREKESTKAAPAPGRTTDDSNQKVA

SEQ ID NO: 255012 - protein, 384 aa, unidentified
MSFAQTWHPDHLHGGDRIYIGLDVHKNLCYATFVDERGEVVDRRKFPNTREGVSRFVSELSSADAVVMEATSHWQYIYDALEEAGVEVCLSHPLKTRAIAEARIKTDKVDSEILAQLLRTNFLPRAYVPSREIRDFRAIVRYRAAVNRARVEVKNRIHALLAKHGVRHEFSDLFGKRGIEFLKELELSGVDKVILISELKHLEFLNRELENLSRYIADLSVEMKEVRLLMTIPGVDFYSALVILSEIGSVERFSSAKKLCSYAGLVPGVHSSGGRVYHGRITKQGSRYLRWILVQVAHVAVRREGRLRDFYLRLARRKGKKVAIVACARKLLVWIYHMLIRAEPYCEERKELTEYKLRRMRRVARPYPFSEEVVERLISANVDT

SEQ ID NO: 255013 - protein, 355 aa, unidentified
MDSTKYIGMDVHKESISIAVMNGAGKIVMECVVETKASMILQFINGLRGDLQVTFEEGTSAAWLYDLLKPYVTKLVVCDPRKNASMREGNQSDKIDARRLAELLRLNHLNPVYHGEHGLRSLKELVRSYLTVTKDLARVMSRVKAIYRSWAIPCTGKQVYAPRHRAEWLGKIGEPGVRRRAEFYYQQLDALRTVRQEVRRELLAEGKKHKAWKRLCQIPSIGPIRSAVLLGILQTPHRFRAKRQLWTYSGLGIETQSSADHRSVNGQLERAKKQISIRGLNRNCNHDLKNLFKGAAIVASSKPGPFQEFYTALLAKGIRPDMARLTLARKIATIVLIVWKRGACFDAQHLKPQTA

SEQ ID NO: 255014 - protein, 364 aa, unidentified
MLIIGCDYHPSFQQIAFVDTDTGEVSERRLGQREQAEQFYRDLKQRNQAVRVGIESSGHSRWFERLLHELGFELWIGDPAEIRSKRVRKQKTDRQDAQLLLQLLLEDRFPRIWVPDAENRDLRQLLWHRHRLVQMRTRVMNQLQVVPLNEGLRRKKALWRPAGRQELESIVLAPWASRRRQDLLDLLDQLTPKIQELTHALEAEVEKRPVTRRLMTHPGVGPLTALAYELVIGIPERFHCGKQIASYLGLVPEEKSSGDRRRLGHISKQGNVLLRFLLVEAAQVTVRSHQEWRNKFFHLAMRRGRKIAKVAMARKLAVHLYWMWRQGCDYGPWQKLGSHAGKPGHPDGVQSITDVMIGHPAPSK

SEQ ID NO: 255015 - protein, 354 aa, unidentified
MRFYDQQHEFYCGVDLHTRRMYLRILDREGNKRLHRNMRAKPLDFLNAIKGFRDDLVVGAECMFTWYCLADLCLDENIKFVLGHALYMKAIHGGKKKDDKIDSEKIARLMRGGTFPLSYVYPREMRATRDLLRRRTFLMRRRSELLAHVQMVNHQYNLDPFEKQLQYACNRDVLERFEQDSIRQNVEADLQLIGHYDQLLKQLESNLLRQAKLQDPQARFLLQTIPGVGNLLSLVLLYEIHTIDRFANVGNFLSYARLVTPKHTSDGKVTGHSGAKIGNPHLKWAFSEAVLMMMRHCEDAQHFLARKEKKHGKARGALGVRLRMHLANSRFLPRSRAPPCVVRCSRKGRDHVGD

SEQ ID NO: 255016 - protein, 422 aa, unidentified
MSCLPALAGVCPHPMPVRRDIIILTESTLIVAGADTHADTLHVAAISMTGAALGDREFPTTRTGYATAIRFLTSWGQIERIGVEGTASYGAGFTRALSTAGIEVVEVTRAVKSTRRLKGKSDPLDAYSAARTALAGDGLATPKDDATSGLRALHIARRSAIKHRTAVINQIKARLISAPDMVREKYRASTTLKMIEALARCRPDAQAEPWAQSVLVAAKMLAQRVQFLETQVESLQAQIDAIVTEANPGLRAAYGVGSDTAAQLLITAGANPHRLHSEAAFAALCGAAPVPASSGKTNRHRLSRGGDRAANNALHRIALVRMSHHQPTKDYVQRQLALGHNRMEILRKLKRAIAREIFKLLTRQIAVPEYADLRPARQAKNITVTAAANHFGIWPTVIFRIERGLQRDDTFADTYRNWLRAA

SEQ ID NO: 255017 - protein, 472 aa, unidentified
MGKKNVKKNVKQDTSKTFLEMPVVNPKAAGVDVGSRSFFVCVGQGPEDVREFGVFTCDLHDIAKYLKDLGYITVAMESTGFYWKQLFVLLQDYGFEVILVNARHIKNVKGRKTDVVDSRWLQLLHSLGLLSASFQPDTMTQELRTYTRQRQYLLRQSAQQVLRINKNLTLMNLQLKPVLRDLMGLTGKKIIEAILDGIRDPFELAELIHPNCQHTKNDFIKALEGSYRDEYIFELQQCFDSFLHLQKQINQCDSKIATLLEHFVFLKESDKANQNIIINPTQTKYKAPKRIKYKNCPPVNIAADVFKLANGIELLNIPGVNTGTILTLISEIGLDLYKFKTAKHFCSWLGLAPNNKITGGKVISSHTEKKKNRVALAFRDAANAVERIDGNNPLKLFLKRIAAKKSRSVAITATARKIATIIWTMLTEKVQYNYKATADDQTIIRNKKIKTLQRIIQEFNIQSNEIAFNVSA

SEQ ID NO: 255018 - protein, 348 aa, unidentified
MDTIGLDLHKRESQLCIIGEDGTVTERRIVTSRERLTAVLGARAGARALVEASTESEWVARHLESLGLTVIVADPNYAPMYATRRRRVKTDKRDARTLAEALRLGAYRVAHRVSAERRHVRAELAVREALVRTRTRYVSLAKALVRRDGLRVASSESEHVPARIAALPLGDTLTAELAPLFTVLGPITDQIAAADRRITALMHADPAAALLATAPSIGALTASAMVATIDDVTRFASAHQFAAFLGLVPSERSSGEQRRVGRITKTGNARARYLLVEAAWRILRSKSADTAALRAWALTIAARRGKRIAVVALARRLAGILYAMWRDGHAYDATKLRMPRAPREAPSA

SEQ ID NO: 255019 - protein, 345 aa, unidentified
MTNDIQFSSVCGIDIAKSVMQVYKVSSDGVVSNKAVKRADFLNEFRNIPPALIGMEACGGSQHWARELQSLGHTVRLMPPKLVKPYVTGLKNDKNDARGIYTALEMSVREVPVKSAAIRDLALLQTMRAKRQREKVAKINHIRGILTEYGLVMGKSLNAFLAKAGSLIIELKDRADVSPYVVSELIALFREVKEAMEKIKELETNIDSIAKTLKQYDLFRSAPGVGPITAATMLVLLCNPAVFKNGREFAAYIGLAPKSSGSGGKNFVTHIPKKCECNNEVRALLVQCAHSICRCRHKSDWVSSILARKPKKVAIIAIANKLARQLWIMAKKGEKFEKRFILAAV

SEQ ID NO: 255020 - protein, 323 aa, unidentified
MNKDIKYFGIDISHLVFDVTDSEGNYYQFKNSISGFKKFVKLLDFNSHCVMEATGYYHYQLAYYLQEEGIKVSVENPLSVKRFIQMKLSKIKTDKSDSKLICEYAKDVKLKLWKGNSKHQLECLQMTRLLGVYTKQSTMLKNKLHGEAVLGNPSKVVVSSLKRSLKQVEKELKMIEDKLLVLVKEVHQDVLTRLKSIPGIGPKTSLMLVVLTDGFDRFTSGSELCSYAGLTPVIRQSGSSVKGRPRISKIGNQKLRNLLFMCSFNACKYNYACKAIYDRLVAKGKSKKLALIAVCNKLLKQAFAIAKSGLTYDNNYRSVLLKN

SEQ ID NO: 255021 - protein, 358 aa, unidentified
MDTVKRNKVDFTGQPIYVGLDVHKKSWSVSISTQYGQYKSFSQPPEVDKLVHYLQHHFPGAQYLSAYEAGYCGFWIHDRLREKGIGCLVVNPADVPTKNKERKTKRDRIDCRKLSRSLRNGDLEGIYVPPRGKLEDRSLIRTRLSMGRKQTRCKNQIKSMLFFYGVVIPEEKEMGHWSRRFIRWIEGIRMERASGDMALQIHLEELSHLRQIIAKLDRAILALARTEEYRPWVLLLRTVPGISTLTAMILLTEIGEITRFPSIDELTSYVGLIPDTKASGEKEHIGGITQRSHSQLRWMLIEASWKAVQKDPALMMAFDQYCKRMRKTKAIVKIARKLLNRIRYVLKNRSEYVPAVLE

SEQ ID NO: 255022 - protein, 395 aa, unidentified
MFIVGIDVAKRSHEVCMITSDGQTVQRPFSIRNNCTGYNLMLEKIIKHTNIKSQIVFAMESTAHYWLALFTRLRKDGYHVILLNPIQTSAMRDMFIRKIKTDAKDSFIIAELIRFGRYAESNVAQDRLLALKELCRNRFYLVDMAGDLKRKLIALIDRVFPEYEAQFDTIFCKSSVALLKKYPTPQRLSNAHLDKLTELLWNSSNGHFGEWKARELKDLARNSFGVEDCDGAYSTLILLMLDQIQSLSGKADALEKEISRLFQSFDTTVTTIPGVGPIIGAVILSEVGDISRFSSADKLAAYIGVDPSVNQSGEFQAAHAHMSKRGSPYLRRCIWMASQVAVQRDPMFRAYYEKKAAEGLKYMTIIGHVTRKMTAVIFAILRDHKVYEPVLPTAA

SEQ ID NO: 255023 - protein, 319 aa, unidentified
MDKTSVGIDVAKLKFDVAVWVERKKYKTKAFPNTPSGFSQLLKWLIPYGDCHICLEATGSYSVPLAMFLVDNGIDVSLENPSRIHAFGESELSRNKTDQGDAKMIVRYCALHTPVLWTPPPLSERQLTALVRHLKSLEEMRQMQENRQSVADDVVQSSLLEIISALKQQIQATKEKIKNHIDNDPDLKKNKALLESIPGIGEILSASLLAYVGNVSKFTNSKAVVAYAGLNPKLCESGLFKGRSCLSKRGHTELRKALYMPALAALSCNPIVKAQWQRLVSRHKGGKMGVCAAMRKLLQLAYGVLKSGIPFDTKIALAS

SEQ ID NO: 255024 - protein, 362 aa, unidentified
MDKVIKDGTDMTIGVDLGDKWSRLCVLDEHGEVCEEGRIATTADAMRKRFSTEAPCRIVIEVGTHSPWVQRLLQELGHEVITAHAQSVRLIYGGTNKDDRLDAERLARLGRLDPKLLHPIRHREGSTQADRAVIRSRYVLVGCRTKLINHARGIVKSMGGRLPTCSADAFPKRVREALPKELKPALRPVLETISALTTRIRRFDRLIEDLASKRYPETDVMRQVSGVGPITSLSFVLTIEDPARFRRSRALGAYLGLSPRRSQSGDEDPELRITKAGDDDLRRLLVGSAQYILGPFGPDTDLRRWGLALAARGRKNAKKRAVVAVARKLAVLLHRLWVTAEVYEPLRHPADKPDSIAQAVPA

SEQ ID NO: 255025 - protein, 370 aa, unidentified
MKQYSEAFIGFDTAKKKHAVAIAGVGRESEIRYLGEIDSSPAAVERMIRKLAGRYEKLHFCYEAGPTGYGLYRQVRALGHHCTVVAPSLIPKKPGERVKTNRRDAVTLARLLRAGELTSVWVPDTVHEAVRDLVRAREAASQDLRRKRQQLLSFLLRHGRIFGGRQHWSRAHLHWLAQQKFDHPAQQIVFQDGVDAIDEAATRLRRLDEQVAAIVPSWSMAPVVEAYQAMRGVSFVVAVTFVAEIGDLRRFDNPRQLMAFLGLVPSERSTGDRVRRAGLTLTGNKRARRVLIEGAWSYRYPARVSQTLQARLEGLPKAVRAIAWKAQIRLCARYRRLNAAGKKLPVVIAAIAREMAAFLWAIARQVAPAV

SEQ ID NO: 255026 - protein, 313 aa, unidentified
MTVPQITLGIDISSTRLDAYAYPAGRAHGVANTAAGIARLVGWARELGAFVVLEATAPFDQGLIRALERAGLAFHRANPKRARDFARSAGFLAKTDAVDARMLALYGTTPALRPTAPVAPERLELQALSTRRDQLVEMRKSERIRLKGVSGPISIQSLQTVIALLDAQIAALDTHIATALARAPDLARDAAILRSGAGVGPVCASVLLAFMPELGTLNRRAVALLAGLAPIARDSGAMRGKRYVGGGRKRVRDALYMASLAAIRIGRWKQAYDHLRALGKAPKQAIIAIARKLLVALNAAIRDQNPLNNAPQA

SEQ ID NO: 255027 - protein, 367 aa, unidentified
MQEGIKFFVGLDVHMESIAVGAAEVGRAPGRLIGSVPPDVPKVVKLLSRYGEPAQVHVVYEAGPTGYGLQRALSERGYVCQVIAPALIPKRAGDRVKTDHRDCVRLAELSRAGELRAVWIPDPADEAIRDVARAREDAVNACTRAKRQLRGFLLRHEVRFPKRHSWRKTLYHWLAGLNFGAAQTAYMEYVQAVATCEERVERLTEALVQSVEGWRFEPVVKALQALRGFDRVNAIGLVAEIGDIGRFSHPRQLMGYLGLVPSERSSGERVARGSITKTGNAHARRLLTEAAWNYRFSPRVGQQAQQRARKLPQAIRDMGWKAQVRLTGRFRRLQARGIHRNKVCIAIARELAGFVWAIAVRTTPQPA

SEQ ID NO: 255028 - protein, 376 aa, unidentified
MMDESGKVVFKAFSFPNTSDGGHALFSKLTSYSSSTDDFEIGMEATGHYWLSVYSFLFEKKFLLHVINPIQTDGWRRGTEIRKRKNDIIDSVLIADLIRYGQFVETRLADEDLFSLRSLTRFRTYLVESISDLKRKVVCVLDQVFPEYQSIFSDIFGKTSKEILLQFSSPIDFESVSSQTLAELLAKLSRKQVGSAKAAQLKAAASCSFGVTFAKSSFTFQLKALIEQIAFIEKQVKETETEIAGIMEKLESPITTITGIGNVTGAAIISEIGDISKFDSPRKLVAFAGLDATVTQSGEFEAAHNVMSKRGSPYLRKAIFQAALVAAFKDPVLSAYYQKKRAEGKHHLTCIGAVARKMCNIIYAVVKNNQPYVPKA

SEQ ID NO: 255029 - protein, 411 aa, unidentified
MEVIHARCAGLDISKKDAKVCVRVAGAGRRKTVETVTTWGSMTSQILALREHLIAERITCAVMEATGDYWKPFYYLLEGAGFEVLLVNARHVKNLPGRKTDVADATWLAQLGAHGLVRGSLVPPEPIRQLRDLTRARTAITRERSREVQRLEKLLEDAGIKLSAVASDILGVSGRAMLESLIAGNRDPAALADLAKRRLRSKIPALTEALTGRFTDHHAFLARVHLDLIDQHTAAVADITARIEATIKPFHWFRDLICTIPGISTLTADVIIAETGADMTRFPTAGHLASWAGTTPGNNESAGKVKSSRTRPGNPYLQGALGAAAMACAQNPVTYLGARYRRIAARRGPQKANVAIQHSMLIATWHMATNGCLYHDPGADYFNQLHPERAEKRAISQLEAMGYHVTLTRAS

SEQ ID NO: 255030 - protein, 395 aa, unidentified
MQNSSPPPGAVVIGMDPHKRSVTIEVMNAGEQVLDGGRFDTDSDGFTRMLTHVASYPDRVWAIEGCAGIGRHVAARLVAAGETVVDVPAKLSYRVRLLTAGNGRKTDDTDAHSIALIGVRVTGLRPVVSNEQIELLRVLVDRRRMLGEEHTRKISQVHRLLLELIPGGAKIYLSARQARTLLSPVRPKDPAGKARKQLAMELITDLEKVYTRTKQADKDLLAALAETGTHLTELHGIGPTGAAMLLVEVEDITRFPDHNHFASWTGTAPIDASSGDTVRHRLSRGGNRQINRVLHTMATVQLRNPTQGRAYYDRKKADGKSSMEAMRCLKRRLSDIVYRTMLTDLTQPATTGPGGQPGDDSDSSATGSQPTTGSSDKPLPGPATTHPTRPLPAAS

SEQ ID NO: 255031 - protein, 304 aa, unidentified
MFGIGIDVSKATLDVAVHGEQFRQFSNDKRGFVRLIRWLKTWPIKQVVLEASGGYERAALDVLHAAGLPMVRINPARARRFAQGTGRSAKTDRLDATVLAQMAHLLPLTRYVPPAPWQQRLAEFAQCRRQLVQMRVSEMQRLRRLVDPDLIAMKQRHIAQLSDDLKQLDKAIAEQLEGQPGWKNIGALKGVGPILISTLACELPELGSLGSKAIASLVGLAPMNRESGTWQGQRRISGGRAVVREALYMAALTAIRYEPRLRAFYAGLKAKGKASKVALVAVMRKMLVILNARKRDAEVALGCP

SEQ ID NO: 255032 - protein, 371 aa, unidentified
MNTIVYVGMDVHKESYTLCCYSYDRDKVEFKQTIPSDYRLVLKYMERVREQYEGEVKFVCGYEAGCLGYSLYHQLTDHAVDCKILAPTTMAITNTNRVKTDRRDAGNIARCLAFHTYSEVYVPDDEDNAVKEYIRMRDDQKLMLKKIKQQILAFVLRKGKRFEGDTTYWTITHLKWLKNLELEGLDKETLSEYMITYEYLTDKIQRMDERIQSLAEGERYCEQVQNMSCLLGIKTHTALSLLVEIGDFDRFEKASRFSAFLGLVPGEDTTSDNVKRLNITKAGNSHLRRLLVEAAQSYTRGAIGHKSQDLKKRQSKCSPEVIAYADKANERLRRKFYRMTLQKNINRNVAATAVARELACFIWGMNTGNIA

SEQ ID NO: 255033 - protein, 462 aa, unidentified
MRKTKTKRPATLDNLAIVHPNAAGLDIGSREIWACVPAGRDEETVKWFNTFTPDWQALADWLVACGVDTVAMESTGVYWIPVFELLEARGLKVYLVNAWHLKHVPGRKSDYLDCQWIQKLPALGLLNGSFRPDAEMVALRGYLRHRAQLLEHRAPHILHMQKALQQMNLQLHHVLRDVTGTTGLAILRAIVAGERDPVRLAQLRNPACKSSEETIAQALTGSWKAEHLFVLQQSLELYDFYSQQVAACDAAIEKQYSARKPRWAGPDEAPDVPRVKPDSHSKNQPQLNVRAEIIRLTGVDLVAVEGISASLAQIILSETGADMSPWENDKHFGSWLGLAPHSDISGGKVLRSRTLKTSNRAGQAFRQAAASVTRSQSAFGARFAYRRKRAQLGPMQALVATAYKIARTVYYMLKHRVQYQDIGAVAYEKKQQERELAQLKKKAAKLGFTLIPHEPAPAVAAV

SEQ ID NO: 255034 - protein, 411 aa, unidentified
MELLVTRCAGLDVAKDEVVACVRVPDGQGGRGQEVRTFPTFTSGLEALAGWLAAEGVTQVVMEATGQYWKPVWQVLEERGFQLLLVNARQVKILPGRKTDVADAAWLAELLEHGLLRGSFVPPAAIRELRDLTRYRKRLIQAHSAEVQRIQKTLEDAGIKLDSVAADVVGVSGRAMLAALVAGERDPQVLAELAKGRLRNKLPQLRQALRGRFGDHHALLVRLALGHLEHLEGTIAALDRRVDEVMAPFARARDRLDTITGVGKRAAETIIAEIGTDMTVFPTAGHLASWAGRCPGNNLTGGKRRSGKSTKGNRWLGEVLTECAWAAARSRDSYLSAQFWRLARRIGKKKAAMAVGHSILVIAWHLLTDDCDYADLGGDYFVRRDADRARQRAVAQLQALGYQVTLQPLAA

SEQ ID NO: 255035 - protein, 449 aa, unidentified
MKILALDLGKFNTMCCFFDTKTRKHSFLNAPTERNYLNTLFKKHKIDLVVMEACGPSGWINDLAISHGLKTLVCSTNEDAWKWSNVKRKTDKDDALKLARMAAMNELKAVHMPSETHREFRSLVKYRKTLDHRINKMKCTIRAWFVNHGIEIDTGEKAWHSGRERINSFRKPLIECQPDELWKGELDLELTQFDALTLQLESVVKKLEALGKTDPRIQRIRTIPGVGPRTAEILVACIDDPHRFTTGRQVSAYFGLVPRRYQSGETDRNGRITKRGNPLARTILVECAWASLRYNEWAKGVYDRICGKQKTRKKKAAVALARKIAVLAWAMLRDEKDWEPKHMIQVTESFGKMKRELKQSLQSMKPKENSDQRKSRLRREAREAKAVAERPKRSVRTATARRSRSKTTVVPTATPPTNTSKRATPKPTTRTNLKPKPKPRRAGKLVSAV

SEQ ID NO: 255036 - protein, 346 aa, unidentified
MAHYAAFDVSDKETAIHGLDEHGKLVWKGKRPSEPEALAAALRQHAPELVRVGLETGRLTPWLFHALKGLGVPVVCLDARHARAATALQRNKTDARDAETLAQLVRTGWFREARVKSWAAHAVRHLVGARAQLVGMATDLSNQIRSLLRTFGLRITGRAGGTFERKVREQITGSPEVAAVAEPLLAAWRAMRDQIAALDRKLIEAARSNATCRLLMTCPGVGVVVATSFAAAVAAPDHFRCSRAVGAYLGLTPRRHQSGESDHSAGVSKRGDKLLRSYLFEAAACLLIRVQRPSALKAWGVGLVQRLGFKRAAVAVARKLSVVLHAMWRENRPFQAWPTPAVAAAA

SEQ ID NO: 255037 - protein, 399 aa, unidentified
MSKNDCKYFIGIDISKESFDASCIDGDGEKIFHISTSMNRAGFQELSRKLTSLFCPRESILVGMESTACYHINLYSFLIASGYAVMVINPVLIANFVKLQLRKTKTDKKDAFVIAQFLLMNKASLCQNDVSAEITDLKDLVRQRESIVDQITALKAEIKRVLTITFPELEHTACIFSKSMLRLLQEYPSAYAIRNTKRSKIEKILIPGSMGKQTTKSVERIKKAAETSIGTSSPARELILKQKASLLVHMEENLQELTDILVEICQSKMQEDMNILTSLPGIGNKTAMNFLIEMGGGIAPYQSHKKLIAMAGIDPAIYQSGKVDRSGRISKRGNRHLRRVIWLMTVKVIQFTERFKQYHEKRRQDGLPYKKAVLATAHKLIRVLFTMLKNRTLFNASMS

SEQ ID NO: 255038 - protein, 371 aa, unidentified
MGESSKTLFVGLDVHKDTIAVAYAPNDRGADVVSLGTIGTRQCDIDKLTRRLESKGATLVFVYEAGPCGYWLYRYLARRGFSCSVVAPSLIPRKPGDRVKTDRRDAVTLARLLRSGDLTSIYVPSVADEAIRDLSRGREDAVGDLKRSKVRLKAFLLRQDIRYEGRANWNAAHLRWLARVVCPTPAQQIVFQEYVHTVTEQSERLRRLESELHTAVKTWRLYPVVEAVQALRGLDLTGAGTLIAEVGDLTRFDTPRKLMSYLGLTPSEYSSGAHRRQGGITKAGNGHARRALVEGAWAYRYPAKVSRHLQLRLEHVPPEARAIAWKAQVRLCKRYRLLSARGKHVNQVVVAIAREMAAFAWAIARTVPVAS

SEQ ID NO: 255039 - protein, 412 aa, unidentified
MSLALPEALFFTGIDWAAATHAVCVMDAAGKIAAEFTIAHSADGITQLIRRLARYGDPAAIPVAIERPNGRLVDLLLEAGHPVVPVSPNAIKTWREGEVLSGAKSDAGDAAVIAEYLRLRRHRLQVAVPYSGQTQALRTVVRTRSDLVDMRVAATNQLSALLEASWPGAQAIFADVESPISLAFLTRYPTPASAAHLGEKRIAAFCAGQGYSGKRPAAELLARLRAAPAGTADPALTTALGTAVLALVAVLRTLNTAIKDLDRSAAARLGEHPDGEIFTSLPRSGQINAAQMLAEWGDCRQAYGGPDAVAALAGCTPVTKESGKHRAVHFRWACNKRFRKAMTTFADNSRHASLWAAKIYNDARAAGKAHPYAVRILARAWIRVIWPCWLNHTPYDPARHGAAAALTEPIAA

SEQ ID NO: 255040 - protein, 313 aa, unidentified
MSKSTFVGIDVSKRSLEVHVLPSGEHFSVNYDEAGLSALIQKLKTLQQLQVILMEATGGYEKLLAAELCAAGLNKVCISNPRFIRDFARSTGQLAKTDTIDAAMIALFAQMFNLEPKTIPSQAEEQLKALVSRRQQLIKIRTAENNRLEKATTPRIIASLRKSLKFLNGEIQELDNEIQLTIKQNPVWCAKEKILRKVKGVGPATACQLLATLPELGQLNRRKIASLAGLAPINRDSGQFRGKRMICGGRSAVRKALYMATLVATIHNPTIRNFYNRLLATGKPKKLALTACMRKLLIILNSILKNDPITICI

SEQ ID NO: 255041 - protein, 338 aa, unidentified
MKITTIGLDIAKSVFHAVGVDKAGKLIKKKMLRRKDLLPFLAQIEPCLIVMEACGGANYWAREFELLGHNVKLIAPQFVVPFRQGNKNDYNDALAIAEAAQRPNMRFVKPKGVAQQDVQLLHRMRERLNKQSTALINQVRGMLAEYGIVITKSKSAFKVQFPDILADETNALTTKGRAIFYQLYEEFSDIEKWLKGCDVQVLTETKNNVICQRLETIPGIGPVTATAIYAAVGDGKDFSNGRHFSAWCGLVPKQHSSGGKDNLLGISKRGNAYLRTLFIHGARTVLQHSCHKQDKFSCWAIQLAERRGFNRACVAVANKLARMAWVIAAHDEEYRLPV

SEQ ID NO: 255042 - protein, 340 aa, unidentified
MSTQFFCGVDLAKHHFSLHALDDHGKVILHKSVSRAKLLATLANMPTMCIGIEACSGAHYWAREFNKLGHDTRIMAAKYVGPYRTKGKNDLNDAVAICDAVQRPNSRFIPVKSPERQAILATHRVREHWVNERTALINRIRALLAEFGIIIPTGRAAIHREVPLILEAVENGLPDIARAVVADCFDHLQTLNQRIADTEQCFDMVTKASPNAQRILNVRGIGPQTATAIIATIGKGEQFDSGRDFAAWLGLVPKQYSTGGKPRLGRISKRGDKYLRTLLVHGARAVITNLGDKQDRLSVWGRNVLERRGMNRAIVALAAKNARIVWALLHHQTDYQDYAA

SEQ ID NO: 255043 - protein, 393 aa, unidentified
MICVGIDVAKDKYDCFILSSEGEVLADVFTIPNNAEGFDTLLQTIRRCARPEDKIKVGLEATGHYSYNILGFLLNEGLDTYVINPLHTNLYRKSLSLRKTKTDRVDARTIAAMLMSDVDLKSYTDTAYHNEELKSLTRYRFDKVRERAKLKQSVSRLVTILFPELEKLVSTLHMASVYALLSEFPGAKQVSEAHLTHLKAVLYDASKGRYGSDMATTLRDAARCSVGSVMSAKSLELRHTIRLIHELDAEIEDIEAAIQSMMGEIQSPITTIPGMGVRMGAMILAEIGDFSRFDSPDKILAYAGMSPSTYQSGQLSLSGAYSHMEKRGSRYLRYALYNATKYVCLWNPTFAAYLAKKRAEDKHYNVALSHTAKKLVRLIYALEKSKRPYSTAA

SEQ ID NO: 255044 - protein, 343 aa, unidentified
MDHYAGIDVSLEYSSICVVDANGKIVREDKVASEPEVLIVWFRSAGLSLARIGLEAGPLSQWLYAAMREAGLAVELLETRHVRDAFKAMPVKSDRNDARGIAQLMRLGWFRPVHCKSRTAQETRALLTARKLVQSKLRDIEASLRGTLRGFGLKVGATTSRRFAARIKELVAGHPILEVVAEALLAAHAVLLREFNGFERRVRTMARHDVKARLLMSAPGVGTIVSLTFASAIDDPGRFKSSKQVGAHFGMTPKKYQSGETDYTGRISKIGDQGVRTALFEAAHIILTKPVKGSALKSWAMRLAKRAGMKKAKVALARKLAVIMHRMLVDGTPFNFAAAAAAA

SEQ ID NO: 255045 - protein, 334 aa, unidentified
MSNVTTVGIDLAKNVFSLHAVDGRGVVVLRKTVPRARLAAVVAQLPACLIGLEACSGAHEWARRFAQHGHSVKLMAPKFVAPYRKSGKNDGNDAEAICEAVSRPSMRFVPVKSVEQQAVLTLHRVRLGFVEERTATINRIRGLLAEFGVVLPQRVVEVRRGAAATLDQLPTLAQRALTDLLAHVRVLDERIGEYERELEQHARRDERAKRIQKLSGVGPISASAIVASVAEGHEFKNGRQFAAWLGLTPKQYSTGGKTRLGRITAHGDAYLRTLLIMGARSMLQTALRRTDRLARWALGVRARRGYHRACVAIAAKHARIIWAMLAKNQPLQLA

SEQ ID NO: 255046 - protein, 413 aa, unidentified
MDLLVERCAGLDVAKQEVVACVRTPASGAGGRRRQEIRTFPTFSADLEALADWLAAEGVTQVVMEATGQYWKPIWYVLEGRGFALLLVNARHVKIVPGRKTDVADAAWLAELLEHGLLRGSFVPPPQIRELRDLTRYRKKLTQAHTAECQRVQKTLEDAGIKLDSVASDVLGVSGRAMLKALVDGERDPEALAALARGVLRKKLPELRRALRGHFGDHHGLLVGLSLAHLEHLEGAIAQLDARVDQVIAPFAVARDRLDTITGVGKRAAEAIIAEIGVDMGVFPTAAHLASWAGRCPGNNVTGGKRRSGKPTKGNRWLADVLTECAWAAARSRDTYLAAQFWRLARRIGKKKAAVAVGHSILVIAWHLLEGDCDYHDLGGDWFTRRNDTDRHKTHLIKQLQALGYSVTLQPAA

SEQ ID NO: 255047 - protein, 339 aa, unidentified
MWYSGIDHHKRDSVITTYGPDGPRVKQVRVANTPLALAQYFADFPSPHKAVVESTGGWYWLADVLAPLGVELVLAHATRLKAISAAKVKTDQVDSDVLALLLRADLIPEAHMIRPGQRGPRDLMRARLRLVEKCVSAQNSIDRLLEKFNVDTVAELEALYQLQAGCHQAQIHLLEEQITTLERALHPHLIPNPDVQRLLWIPGVGKVNAFTLYTEIDGITRFPSVRQFFSYSRLVPGADNSGGRTRHRSGSKAGNRYLKLAFSHAGIRAVQYYPEIRAFFKAKARRKPIRIARTLVALELARIVYQVLVKQEAFNGQFKSRPLSRGKHAQWPRRASPPA

SEQ ID NO: 255048 - protein, 374 aa, unidentified
MKNVSIFVGLDVHKESIDIALVEDDRHSAVRYYGTIGGDLADLEKAIKKIKKAHPEASFHFVYEAGPCGYGIYRYLTKAGYECMVVAPSMIPKRSGNRIKTDRRDAIMLASLHRAGELSPVYVPREEDEAMRDLVRARQDAVKAGRVAKQQLKSFLLRHGIKFSGKGDWKQSHMTWLAGLAMPIPAQQIVLQEYINTVKDCTERIARLTFQIQEVLPSWELAPVVKALQAMRGVSLQVSVTTVAELGDLKRFDNPRKLMSYLGLVPSEHSSGGSRRTGSITKAGNGHVRKALVEAAQTYRLKARIGKELLARQAGLPKQICDIAWKAQIRLCSRFRKMEARGKKYQTIICAIARELCAFMWAIAKEVKPITTCN

SEQ ID NO: 255049 - protein, 393 aa, unidentified
MTVQSQVSGQTRVSVFIPRDYDVFAGLDVDHHSIAATFTDHDRLMQSLRLPYSAEQLLNYVRKHFSGQRLAFAYEAGPTGFGLYDELVAEQHTCLVVAPPMVPTAPGNRVKTNRLDSRKLSTSLRGGELRSIHVPSPKYRELRHLVQLRDTQVQQLTATKCRIKALLLYEGIEFPSDDGKEKQWSARVLDELLALPCSESVRFKLDQLIGALHFHFNGAAAAQKQIRHFCKNDAELRQSIAWLKSLPGIGEIVATHLVARLGDPSLITNVRQIAGFLGLVSSEHSTGDQQNRGEITRAGDSRLRNKLIQSAWVTIRKDPELREFYQRVYQRHPRKVAARKAIVAVARKLTTRIHAVLKEQRPFVLREVSQAPLTTEETAGLRERLDGQQNEQR

SEQ ID NO: 255050 - protein, 391 aa, unidentified
MTKPKTKMVNDLSRCLDPLDMDATLIAVIEMSQSSWLVGGIVPGVERQPLKKLEVDERALLSLLNRWRAEAEKNGHRITRMAVAFEAGYDGFWLARWLAAQGIETHVIHASSVAVTREHRRAKTDRLDTELLKRGFLGWLRGERGHCKMVAVPTLAEEDTKRPSRERETLVGEATRIIARVKAAFVRLGIRGFKPKLKAAAARLKTLRTPEGEPIPPNTLAALRRDLERHQIVKKQIRELEQTRLDVLKQAPEKGPHAMVLLLARVIGIGVETADMLVQEVLSRNMRDRRAVGRYAGLTGAPDESGSKRREKGLARSGNARVRRGMVQLAWRFLRFQEDSVLARWYRQRTADAPSMRKTLIVALARKLLIALWQLVRDGVVPEGVRLRPAA

SEQ ID NO: 255051 - protein, 339 aa, unidentified
MIADSPPRSIRGSTAPRSGKPAPGERLIGEPLFIGVDVSKSWIDIADTQGRALRVANEETAIAAAFKGRWSTCANMVCEATGGYERALMRVAKQRGLPLRRVHPNRARAFGQMTARLAKTDALDARVLARLAAFTADEPRAALPDVRTQELADMVSRLTQLTDLHQAESCRVQQAATAKSKASIKTVLKVLDAQIDAMQEAIDAFIAKDATLSQNARIMRSCKGVGPKSVQAILAMLPEIGVLNRRKIAALVGVAPITRASGSSVNHASITGGRKALRDILFMAALTASKHNPVFKTFYERLRANGKPHKLALVAVLRKLITTLNAMINSRQMFKIALT

SEQ ID NO: 255052 - protein, 347 aa, unidentified
MQIKTIGIDLGKTACDVVAMDGRGEVVSGRRLSRPKLIAWLAKVPPCVIGMEASCGAHHLARRLLALGHEVRLMPAQYVRPFVKTNQHDQADAEAIAEAVQRPEMRFVPVKSAAQLDLQALHRARDRLVTQRTGLINRIRAFLLEPGIAVRSGRAALVKALPEVLEATAELSPTICALLSRLRTHWQALDDESAALDQHILLSARAHPCARLLMTIPGIGALIGTALVAAIDTGQAFGRGRDLACWLGLVPRQHSTGGKSRSLGISKPGNGYLRRLSGARRPRAAAPRQDPRGPPRCLAAPPGGQGAPQRRHGSARRQARPLGLGGAGQASGVSRGRRLSRSGVPQG

SEQ ID NO: 255053 - protein, 348 aa, unidentified
MVIGIDPHKQTHTAVAIFKATGEVIGELTVRARTPGFERLLEWARDLDEQRLFAVEDGRHVSGALERLLIDRGEQGVRVPPRLMGESRRADRVRGKSDPIDAEAVARAALARPDLPRMTLEGPERDIGLLVAHRESLVRERTDRICKLRWLLHDIDPDLAPPLRTLDRFTTLDRLASVLEAMASSVAVRLCSELVARCREITVRANELEREISSLVEAVAPALLEIPGCGSLTAAKIVAEAAQVSRFPTEGHFARYAGTAPVPASSGARHRHRFNRRGNRQLNAAVHRIAITQIRIHEPAKDYMAKKRAEGKSKTEAMRALKRHITRVVLKTLTSMDRPTDRLTAVAA

SEQ ID NO: 255054 - protein, 426 aa, unidentified
MDITCGIDWAENHHDVALVDAAGTRVAKLRISDDAAGFTALLTLLAQHGDTPDDPIPVAIETSRGLLVACLRATGRPVYAINPLAVARYRERYSMARKKSDAGDAMLLANILRTDAAAHRQLPDDSEQLQAIRVLARAQQDAVWDRTQLLLRLRSLLREYFPAFLQAFGKTDEGLAGAVPRTLLEAAPDPATAAALTPEQIADLLIKAGRQRYITRTAQRLHELFQAPQMRQPPAVERAFGQQALALLHQFNATITSCDELTAATVEAFEQHPDAPIIASFPGLGTMLGARLLGELGDDRSRFPDARALKCYAGSAPVTRASGKSHAVFNRRAKNQRLASLGYQWAFCLLTTSPGALAHYRRRREYGDRHAAAQRNLFNRMLGIVHHCLTTGQTYDEATAFPSGHNHRHEQVSPRTRRHPSLTVTS

SEQ ID NO: 255055 - protein, 399 aa, unidentified
MLYAGWDWASESHAVTVLDQDGKVVQRFSLRHDEAGLTDAMERLSSIAPPAELPVAIETTSGLVVDRLVRAGHPVVPIHPNAFHATRPRWGASRAKSDPGDSFKLADYLRTDGHRLRRLKPIDTSTEELQALVRMREDHLAARVAATNQLRALLQRHWPGAAEVFARVDSEIALAFLEDYPTPQAAAHLGEARVRMFCRRHSYCGRRSAAELLKRLTAAPTAASALGPHVVAEAVRAQVRVLRTLLGTIADLDRAIGAALLVHPKAGLLEPLPRIGELNLAQIVAEVGPILDRAVDVEHACAEVGAGPVTRESGKGRSVHFRWAVNIRARQALGIFADNSRHSSPWAANLYAAARARGKRHPHAIRILMRAWVRVMWACWHSETPYNPALHGGESRIAA

SEQ ID NO: 255056 - protein, 342 aa, unidentified
MYYIGLDVHKKTISYCVKDASGRICQEGKVGATRWELDIWIKTLPQPWTVAMEATIFTGWIYDHLKPHAADVKVAHPLMLRAIATAKKKNDSIDAGKIADCLRCDFLPECYMAATEIRERRRTMRYRHLLVRQMVQMKNRVSGLLMETGVSHNKQRLHKVGYFPELLANADAVSASIRPLLQLSRESITRLQRTEGAIIRSLQRDPLLAERVRRLQTIPAVGKVTALSWALEMGDISRFRSIRQAISYCGLCGDEKRSADKIARTPLSKQRNKHIQRVLVEAAKLAPRRNPDLALVYENARQKGNANCATLAVARKLVAYLMAVDREQRDFEPVRGLAGIAA

SEQ ID NO: 255057 - protein, 368 aa, unidentified
MKQQTSATTETNIKGRNIIDFTGKTIHVGIDVHEKDFQVAKVLGDICLGNHRMAANGQGLIDHLRTHYPGAGFKCVYESCAWGFTLQRQLQQAGIDCIVVHAADVSSSDKEKKRKTDKVDALKLARNHAAHQLTGIHVPNEEIQKQRNLIRFRKKIVGDLNRSKNRLKSLLKYQGINIPEQLGKKNNWSYNFMNWIEEVAKKDVLLQDTLLLMLEEVKLLRQLLLKTERALRKLMQTSYNDKAKLLMTTPGVGRTTAMLFLLEIGDIQRFGPFDRLNDFVGFCPDTDSSGETDRDTGITSRRHKQLRSALIEAAWEAIRIDPALLDMYQKLTKRMKGNHAIIRIARKLLRRMRAVLVSGIPYQKGVVV

SEQ ID NO: 255058 - protein, 425 aa, unidentified
MNYKQNEKINQVKESTLVVGIDIGSTTQYARAFDWRGIELGKVFTFSNSREGFESFKSWMQHLQDKYRKSDVIVGIEPTGHYWFDLGAYLEDEGILLVMVNPYAVKQTKELDDNSQSKNDRKDPKVIAKLVTEGRYSAPYTPDGVYADLRIMVANRKRLIREMTQIKNRFARWFAIYFPEYTDVFGDYEAQSSMLLLKKTCTPEAIVELGAEKINQIWRDAKLRAVGMKRATTLCETAKRSIGLKKGSSAAQYEMKLLLEDYEYKKAQLDAVMEEIEKLCRKIPESEQMLAIKGIGVITVAGFLAEVGDVRRFESPRQIQKLAGLSLRENSSGKHKGQTTISKRGRSKLRAVLFNAAIPLIAKNPEFKSLHEYYTTRANNPLKKKQSVIAISCKLIRVFYAILAKGVTYDAQKLISDIHRQPQAA

SEQ ID NO: 255059 - protein, 350 aa, unidentified
MKKNIRKPTRRVADETIGIDPGDKMSHYAILSAEGTLIEEGTFRNQPESIRLHFSGRPARIALEAGSQSAWISRELKQLGHEVIVADPRQLKWITAGDNKHDRVDAQKLARLARADRDLLSPVEHRSADQQADLSVIRSRDALVRARTLLVNAARGIAKGIGHRLPKTITLTFGRRASAALPERLLAVLAPLLSQIDKPSEGIAEYEARIDAIAARRPEVKTLTSVPGVGTLTALTFLLTLGRASRFEHSRDVGSYLGLRPKRQQSGQRDPELGISRAGDTYLRKLLVQCAHRTLGRFDADTALRQWGLAKAGGSGATRRAIVAVARKLAVLLHSLWVSGENFKPFPVKG

SEQ ID NO: 255060 - protein, 327 aa, unidentified
MFDKEGYMSDSTERFVGIDVSKDSLDLFADPPAPQLSTHCGYDDATVHKLANALADLAPTLVVMEASGGLEQRLAAELAACGVQLAVVNPRQVRQFARALGELAKTDALDARILCAFARAIRPQARAPHDADTRDLADLLSRRRQLVDMRVQELQRQHTASSRTMQKSLTEHIAWLDKRIAQLDEDMGQRLRASDIWRAKDDLLRSIPGVGPVLSLTMLGLCPELGQLNRREIAKLVGLAPLANDSGKYRGPRRIWGGRADIRRVLYMGTQSAIRHNPVIAAFAARLHLTGKKPKVVIVACVHKLLTIMNTMLKTGQSWQPPEQRTQ

SEQ ID NO: 255061 - protein, 333 aa, unidentified
MGQQYVGIDLHKRRSVIVQVGEAGERGFTKRVDNSPTALVDAIAGTELHEVVLEATCGWYWAYDSLVEAGAKVHLANPSGLNWGQRRVKNDERDAQDLADMLRLGRLPEAWPAPQKARELRELVRYRAKLVSVRSGMRSQVQGVLTKCGIVVSRSKLWGAKSDATVEALALSGPYKLRVTSLRALITAIGVEISALDDEIATWMSGDVGYRAILAIKGIGPVLGAVFVAEIGDVNRFAGADRLCSWAGLTPKHRESDLSVHRGRITKQGSRLVRWAAVEAISRARDTSVAGLYARVAARRGANVARVAAARKILSLVYYGLRDGEVSCLAKAS

SEQ ID NO: 255062 - protein, 344 aa, unidentified
MDYHTALDVSLRSVSICIVDDEGAIQFEGKTSSDVEEIVTCLKRFNPELRSVGFEAGALTQYLTYGLQASGYEVICLEARQVSAALSAMRNKTDKNDARGIAQILRTGWYSRVHVKSMESHLIRVLLSSRKAVLKKCVDLENEIRGLVRLLGIRLPGPLKHGTFDTHVREAIETHTTISQSLIPLLDARLVLYKTYLNLDSQARALAREDDVCQRLMTVPGVGPVTALTFKAGVDDPTRFRRSRTVAAHFGLTPRRFQSGEIDNPGRISKAGDPDVRSALYVAAHSLVVRSAEWSSLKVWGLRLAKTKGHRRAVIAVARKLAVILHKMWLDGSDFRYGSTEATP

SEQ ID NO: 255063 - protein, 351 aa, unidentified
MDIMGCDLHTRYQVVAWMEEETGEIRTRRLEHESEEVRTFYGGWPRGAVVGVEATFPALWFERLLAECGHELWVGDAARIRASVVRQQKTDTRDAEHLLDLLRTNRFPRIWVPSLEERDLRQLLVHRMKLVRTRTMVKNQLHALAISQGVCRKRKLWSARGRAELESLALLPWAARRRKELLEWLEQLDRSVAELDQAVEEAAAGRAEVERLRTHPGVGPVVALAMVLTLGPVERFANSRKVVSYLGLNPREHSSGGRQRLGAISKQGNTMMRWLLVEAAQTAARLDPDLRRTYQRLKFRRVSGVAKVAVARRLAVRLYWMLRARMNYAPLVRMSGSPSSAVAPTASGSKV

SEQ ID NO: 255064 - protein, 410 aa, unidentified
MNLVYTCCAGMDVHKASVYVCLMKVRGTEVVPEVRTFGTTTRALLELLDWLMSEGCVRAAMESTGVYWKPVFNILEGALNVVLINAQHCRGLPGRKTDVKDCEWIAELHLHGLLRASFVPAPEIRELRDLVRARTTLIADRSRQVNRVQKVLEGANIKLGNVAADVLGVSGRAMIERLIAGETDAKALAELARGRMRSKRAQLREALEGKVKPHHRLLLQTHLSVLDGVNAALETLTTEIEERMRPFAAIRDRLDAVTGVGLEAATVLISEMGVHLSAFPTPGHAASWAGLCPGHHESAGKRQSGRTRHGNRWLKTVFTQVGWAASRANGTYLQAHFRRICRRRGVKKAALAAGHSAFVRCVAMIQEGSDYRELGAAYFDERAKTRVTQKLVDRLTQMGYTVTLQPLAAA

SEQ ID NO: 255065 - protein, 316 aa, unidentified
MSKTQDLEFIGIDVSKNRLDIAVGENEGLWSVTNDSEGIEKLIEQLVQFKPQLIVLESTGGLERPVLFALDQADLPVALINPRRAREFAKAIGLLAKTDKLDARLLARFARDVKPARTILPSADEQKLSALMARRKQLLDMLTAENNRSRTASPAIQQRIATHVSWLEKELHDLDQEIDDFNNSDLDRQAKQNLLKSVKGVGPVTASILTSDLPELGHLDKKKIAALVGVAPFNHDSGRFRGKRRVKGGRPAVRQVLYMAAVSASRSNPYIRAFYLSLIQRGKLKKVALIACMRKLLVILNAMVRDNTPWHETVVS

SEQ ID NO: 255066 - protein, 427 aa, unidentified
MPYRIAGIDVHKRVLTVVVSDVEVRGEYEFERRQYGSTPSQLRALAAWLVERQVEEVVMESTAQYWKPVWATLERYWKPLQQGREGARPMSGMLHLAQAQSNRGPRGRKNDFADPERLVKRLVAGELILSFVPSAEQRLWRTVMRTQHQLRCNQVQLQNRLEALLEEAHLKLSSLVSDLLGLSGRRMLTAIAEGETNPAVVAAQADYRLRATPEQLCDALGACGELHPVYRRLLKTALEDWQRTEAQITQLGQQMAALLAAHQEQVQRLAEVPGLGMDSGQQIIAEVGASAATFPSDKALSSWMGACPGEEESAGVNHNRRSPKGNRHLRRILNQAANAAVKVKGSIFALLYHRYVVRFGHNKTIAVIAHRLCRLIWKILHQGVRYEERGPAVHQKSIQRRTARMIRQLRDLGYRIELAKPSAPVPA

SEQ ID NO: 255067 - protein, 350 aa, unidentified
MVVVGADVHKRTHTFVAVDEVGKKLGEKVVVATSSGHHQVLVWARERFGAQVVWAIEDCRHLSARLERDLLTAGQKVVRVPSKLMAQTRASARTRGKSDPIDALAVARAFLREPDLPLASHDDISRELKLLIDRREDLVGQRTSTINRLLWRVHELDPGRAPKPHSLDRAKHRRLLGQWLATQPGLVAELARDELTDITRLTEAIDTLAKRIGDRIHQVAPALLALPGCGELTAAKLVGEAAGVTRFKSEAAFARHAGVAPIPVWSGNTAGRVRMTRSGNRQLNAALHRIAITQIRLDGLGQAYYRKRLDAGDSNTEALRCLKRRLARIVFHHLHTDHQSRIQPCQPAAA

SEQ ID NO: 255068 - protein, 332 aa, unidentified
MNMHPQGGVARPDQRLNAGIDVSKQHLDACWGTEDQRLDNDEPGWDVLIANFRATHVDLVVIEATGGYERGLVCALQGAGITVARVNPRQARDFAKSMGVLAKTDRVDARTLRDFADVLARHKDRHKYITPFIEAQREQLAALMARRRQLVDMRVAEGNRLEQAGTRAARSIRSVLKTLDKQIADIDRDADDHLDRHFKEQRMLLDSVKGVGPVTILTLTSALPELGHLGRRQIAKLVGVAPLADDSGSRKGPRRVWGGRGEVRSVVYMATTSAIRFNPAIKAFHSRLIAAGKPKKVAIVACMRKLLTILNAMLRDHALWDATKHLQTSKTA

SEQ ID NO: 255069 - protein, 355 aa, unidentified
MNSEKYIGLDVHQATISVAVMDSKGKLIMESILETKAATILEFVAGLRGTLSVTFEEGTWATWLYDLLKPHVDELVVCNPRKNALLKDGNKSDRIDARKLADRLRLNDLKPVYHGETGVRMLRELARSYLNLVKDQTRVMNRLKAMYRSWAIPCAGRDVYYARHRAEWLGKIREAGVRRRAEHLYQQLDMLQHLRQQARRELLAESRQHPITAKLRQIPSLGPIRSALAVALIRTPHRFRSRRQLWAYSGLAWETRSSGEYRCVEGQIRRSKKQISIRGLNKDHNHDLKGLFKGAATRASIQPGPFQDFYQRSLAKGIKPTMVRLTLARKIAAITLTLWKKGENFDAEKLKSQAA

SEQ ID NO: 255070 - protein, 325 aa, unidentified
MFVGLDLHKRYSEFATMDIFGNVLRQGRIENTLEEMKTFSESIPAQSSIAIESSSTWYWAHRLLSERHRVVLSNPIKNKAIASAKVKTDKIDSVMLATLLRGGFMAECYVPSRETMEFRELVRYRANLVRQRTRMKNQVHAYLLMNNISIDAGPFTKGFVEEVRKIGDARVQGYLRLIDGLNREIREASATIRQKAGSNEDANLLMTIPGVSFYSALLIVSEIGEISRFGDSSSLVAYAGLAPSTHSSGGKTYHGPIMKSGSRYLRWIVGQCTRVHMRAEPGGTVASFYARLARKKGDQKAIVAASAKLLKIVYWVLRERRSYHS

SEQ ID NO: 255071 - protein, 454 aa, unidentified
MSTRVLSFEDWSISTTPCLRRVRTVTSRGERVQVLGVGIDWAEEFHLVALGRPAEGVFEVARVEHTPTAVAALITRVLGLEPDPAEVRVVIETRHGLLVEALVDAGVTVLPVNPDLVARRRGPARKKDDAKDARIACLLALDRFTDLRALVPHGELAGELRAIARDDVRAARDERRLLNRLRADLIATFPAALVIAGDDLGAPVMLKLLERWPTAAELAAADRDQVEAFARAARHGWPDRFAGRVADALAAEHFQARDYLVRAKAATIRLAATQLLLIRDQRRAWQHRMGELLLGAPRYGRNKQPGDDRGPAVPGGEVYLSFPGLGDRLAARIAGEIGDAIGQFTTPNALQCYAGKAPVTRRSGKSELVVATRLACNRFLADAVQHWAFTSLKNSGWAREFYDTQRHRGKTHNAALRALGNRWLEVLWHCLTRGVPYDENVHVANRDRAPSKTA

SEQ ID NO: 255072 - protein, 343 aa, unidentified
MSEVTTIGLDLAKNVFQVHGIDALGQVVVRRQLRRSQLLPFFEKQAACVVGIEACATSHHWAREIAMLGHEVRLMPARYVKPYVKRNKNDAADAEAICEAVTRPTMRFVAVKTEEQQSVLMLHRTRQLFVRQRTTLINAIRAHMAEFGIVAGVGRNGVERLLRLIDEGSDERVPPVARECLQALRAQLMLVKRQILEADRRILAWHRSNELSRRLETIPGVGPLIATALVASIPDPHAFGSARDVPAWIGLVPKQNSTGGKERLGSISKAGNRYLRSLLVVGALSVIRRAKQVGYTRRAWLAELMARRPVKVAAIALANKIARVAWALMVSGTRYREPVPQAV

SEQ ID NO: 255073 - protein, 456 aa, unidentified
MVTAVAPPRFAGLDVHKREITYCIIDAGGSVVERGKFALNRQNLQNFIGQHLLRHDRVALESTTNCWAVADVLRPCVARVLVSNPMATKAIAQSKIKTDKVDALVLAQLLRCDFLPEVWQPDAATRQRRQLSGRRASLVGQRTRMRNRIHSVLAMRLIEPPAKTSLFGKAGRAWLDALTEDEIDADGHDMIDADLRLLDALQLEIDRFDSRLAQLGYEDRRVKLLMTMPGVSVVVAQALTAAFGDIDRFATADKAAAYLGLVPSTKQSAKTCHHGPITKRGNSTARWMLVQAAQHMFRQSGPLGHFFRRLKSRKNHNIAVVATARKMAMIAWTMLRRNEPYRYSPPKSTATKLAGLRIAATGQKRTGGTAKGQKATAKLPGGSRTIKSLDTVYAEESLPPRHPLSAGESKHLEQSDTTAFVRSLHQDRVIPRRKTPNPETQKPNENKQIKPPNKNP

SEQ ID NO: 255074 - protein, 359 aa, unidentified
MSTMPDAEVFVTLGIDTHKYTHLAVALDQLGRRLDELEIPTTTAGYGELHAWASELGTIDTVGIEGTGAYGAGLTRWLRDRGVVVVEVERPDRKLRRNAGKSDPIDAEAAARKVISGEATVTPKLGTGNVEMIRVLRIARRSAVISRKQVTNQLHALTVTAPDVLREQLEGRTSRARVAIAAKFRPGDEPDTVLAATRYAMKKLALRFRTLDAEIKDLDRQLTRLVTATAPKIVALRGVGIHTTATLLVTAGDNPDRLRSEGAFARLTGTAPIPASSGKTNRFRLSRSGDRQANAALHLIAVNRLLCDPRSKAYVIKRTGGTKANLDILRRLKRYTAREIYPLLLEALTEAEPDLARAA

SEQ ID NO: 255075 - protein, 429 aa, unidentified
MQESASTAPVEGVAAYVGIDWADQKHDVALRSASEPGKVEHRLIAHEPEALMDWLGELQQRFGEKGKILVCLEQSRGALIYHLMGYEFLELYPVNPSQLASFRETFSPGGAKDDQPDAALLCELLYCHRDRLKAWKPDDELTRKLAFLNEGRRKAVDQRTQLANEIKSQLKVYFPLALQVLDNDTSTALAADLLLQWPTLDSLQKQSAHKLRKFFYAHNCRNEQKLLERLELIKVAKPLTRDPAVIEPAALRVQLLAQQLKSLLPYIARYEKWIAELFDAHPDSFLFRDLPGAGPALGPRLLTAFGTDRGRFEHSINFSSLSGIGPIRRASGKKTGKNASVHFRHACPKFLRQSLHEFGLHSIRSCPWAKALYQSLRARGKGHHAAVRAVTFKWIRILFCCWKNRVPYNPERYLQALQTRGSVYAEAAG

SEQ ID NO: 255076 - protein, 338 aa, unidentified
MEREYVGIDLHRRRSVIVRMGEDGQELSTVRIENDPIALSLAVAEAGPNPEVVLEACYGWYWAADVLQADGAVVHLVHPGGLNWDNRRVKNDKRDAMELANRLRRNDLPEAWIAPPKVRQLRELVRYRAKLVALRTGLKAQVHSVLAKQGLFPPVTYLWGPEGKKFLNDAPLDPGFLHRLESLRDLVAVYDKEVDLLEREIYRWLRDDTGYWAVQQLHGVGHTLAAIFVAEIGDVSRFPGPQQLCSWAGMTPKHRESDVKVRRGRITKQGSVLVRWAAIEAISRVRGTEKIKQDYHRIAERRGKNIARVAAARRLLTLVYYGLRDGEIRCLASHSEAG

SEQ ID NO: 255077 - protein, 365 aa, unidentified
MTTYYIGADVHNNSTELAVEKNKRIIERYNVPTDMVSISRILDSLDGKKHLAIEEGPMAGWLYRNLRKKVDSLTVCDPRRNKLIDSDGDKDDKIDASKLAALLRGDYLRPIYHSNDDLRIKLKNWVCLYYDRVRDAVRNINKIRARCRMNGISIPRRIIRNPAVRENWLCQINNRNLAEQLNLLWIGYDATSKQVRIAKRQLAVQAKRYDIISFWGHRPGIGLIRAVTLFAYLDTPWRFKKKNKLWKYCGVGLQRTASGTDKKGKPKPAKLQLPWAVNRTLKNVILGAAASAINQKGNLFRDYYERMLKDGKMPSNARHTVARKLLTVMWAMWKTNSRFDENLCSKLVRHSCGGAGAVKEKILSR

SEQ ID NO: 255078 - protein, 404 aa, unidentified
MKRTKARGPVQRDAKEVLAEVLGKLTGKLDAPAVSTSAKENRRGNTVGPNRDRLTVGVDLGDRWSQYCILGLEGETLAEGQLRTTQEDVREFFQALTVARVVIEVGTHSAWVQDVITEWGHEVLVANPRLMEGSKRRKRKSDRIDANKLARLGRVDPQSLYPIRHRSREVRQDLVVLRARDALVSVRTELINTTRGLVKSMGTRLPRCSSPSFAEKVKDAIPVEVGEALLPLVQLVETVNDCIARYDQKIEELGREKYGHTTLLRQVKGVGPITSLAYVLTLEDPQRFSSSREVGPYLGLVPKQEDSGDSQPQLGISKTGDRMLRRLLVGSSQYMLGAFGPDTDLRRYGLRLCERGGKNAKKRAVVAVARKLAVLLHHLWVTGDVYEPLHHSGAETRTAQATAA

SEQ ID NO: 255079 - protein, 343 aa, unidentified
MEYYVGLDVSLKHTSICVVNPTGLIVQEGVVDSDPEAIALFVRSRAPGTVRIGIETGPTTTWLWTELNRLGLPVICIDARHAKAVLKMQINKSDRNDAAGIARIMQTGWFKEVRVKDLDSHAVKALLASRALLVKIKRDLENQIRGLLKNFGLVIGRGKFNVFAVRAAELIENRPELIAAVRPLLEARKAIEQQVDDLDRKVHKLARHDVQVRRFMTVPGVGPITALCFKATIDDPTRFKRSRSVGAYIGLTTRRHASGEIDWSGRISKCGDAMLRMYLFEAAGVLLTRVPKWSGLKAWGAKLTKRNGLRKAKVAVARKLAVILHRMWIDGTEFNWSTKKAAA

SEQ ID NO: 255080 - protein, 370 aa, unidentified
MAQSTSLFVGLDVHKDSIAVAHAVGGSAEPPVFVGAIGPRQADLDQLLRRLQGRTRALTFAYEAGPSGYGLYRYLTAKGLPCQVVAPSLIPKKPGDRVKTDRRDAVELARLLRSGDLTAVYVPSVEDEALRDLCRARDAARVTGKDAKLRLKAFLLRLGRHYVGRANWTDAHRRYLAKVVCPTPAQQIVFQESVRAVDEQVDRIQRLDAELVERAPAWRLYPVVQALQALRGVQFLVAITVVAELGDLTRFDNPRQLAAFVGLIPSEYSSGGSRRQGGITKAGNGRARRALIEAAWAYRHPAKVSAHIQSRIDHLPKPIQDLGWKAQVRLCKRFRRLVARGKHSNVAVTAVARELIAFMWAIAKEVPVPA

SEQ ID NO: 255081 - protein, 319 aa, unidentified
MAQNQSVVVGIDVAKDKVDACIRSLRLRQTFPNTAQGHRKLVTWLRKYAVGKAVMEASGGYEREWRDVLHKEGIEVWIVDPKRVRSFALSAGRLAKNDPIDAEMIAWFAETFRQAPGQVPDAAREELAALTKARKALVDLKTRLQAQDEHAAPKPARKAYARVLKRIGAEIGELETIISAKVKATPAFAARAEIIESVPGLARTTSAALIAGMSELGQVSDAVAAALIGAAPYDDDSGKRRGERHIKGGRRWVRNAIYTPCVGAATQHNPVLKAYYQRLIARGKPPRLAFIACMRKLIVILNTMLARREKWDHSRYAPQ

SEQ ID NO: 255082 - protein, 355 aa, unidentified
MTSTKYIGMDVHKESISIAVMNSAGKVVMECVIETKANMILQFFDGLRGDLQVTFEEGTSAAWLYDLLKPHVTKLLVCDPRKNASMKEGNKSDKIDARRLAELLRLNHLNPVYHGEHGLRSLKELVRSYLTITKDLGRVMSRVKAIYRSWAIPCTGRQVYAPRHRAEWLEKIGEPGVRRRAEFYYQQLDALRTVRQEVRRELLAEGQKQQAWKRLCQIPSIGPIRSAVLLGILQTPHRFRTKRQLWSYSGFGIETHSSADHRSVNGQLQRTKKQNCIRGLNRNCNHDLKNLFKGAAIVASSKPGPLQEFYTALLTKGIRPEMARLTLARKIATIVLIVWKRGACFDAQHLKPQTA

SEQ ID NO: 255083 - protein, 372 aa, unidentified
MENIIYIGMDVHKESFSLCALHGTTGEIVGEARCASNVSLVKKFVEKLKIKYGEDIKIKAGYEAGCLGYSLHNLLEQNGIDCDILAPTTMYSSSKNKMVKNDRFDAKMIALNLANGTYKEVYVPEEEDVAVKEYIRMLGDFKTALKKMKQQIKAFLLRHGYVYEGKSSWTIAYMKWLKNLDLQGLFKETLDEYLLQYDVLVDKIERFSLRLEELSHSERYEEPVGKLRCLKGIDTTSAMTVHVEIADFTRFRTAKAFMAYVGLTPSESSSGERINRSSITKQGNSTVRSTLVECANALVKGTIGLKSKRVKARQKGQRSEVIAYADQAVERLQRKYHRMIYQGKPRNVAVTAIARELGCFIWGLETGKIHRK

SEQ ID NO: 255084 - protein, 272 aa, unidentified
MGLFAGIDVAKDTLAVAVSSGPEWNCANDPRGITLLVERLEAANPALVVLEATGGYEEELLAALIAAGIETRRVNPREVHHFARAAGQLAKTDRIDARMLALFAERIRPPARALSDPEREQLKALVGRRSQLLQMITAERNRRAHAQRWLARSLQRTIRALERELKLIDREIAERLGRSTTLKPLHDLITSLPGAGPVLGATLIARVPELGRLSRRQIAALIGVAPFTRQSGQWRGRDMIFGGRAPVRATLYMAAVSAVRHNPLLFRRKWRP

SEQ ID NO: 255085 - protein, 400 aa, unidentified
MDHQLYLGIDVGKTEHHATAITAVGTVVHDKTLPQSEPKIRALLQTLRAEHGAVLVVVDQPKTIGALVIAVAQDLGIDVAYLPGLTMRRVADLHEGQAKTDARDAFIIADTARTLPRTLRGITVAEENIAEPAMLCGFDDDLAAQLTQVRNRLRGFLTQIHPALERILGPRLGHTAVVTLLTRYPSPTRLRSAGRGHVRALLKKHAPRLAERLTEEIFTALAEQTVTVSGTTAAEKIIGRLAQQLAQLCSQRVEIEAEILAVVDAHPLTQVLTSMPGVVVRTAARILTEVVGKNFKDAAHLASYAGIAPVTRRSGSSIRGESPSRRGNKTLKRALFLSAFASINASPASRAYYDRKRAQGKRHNQAIIALARRRTDVLYAMLRDGTFYTEPTPPAVALAA

SEQ ID NO: 255086 - protein, 494 aa, unidentified
MHVNRLTPITMLCRRGARAGRPILTSILPAGWMSRPHSTPVTHRIEGVPTIFANAAGIDSGADQLVVAVPPDRDAAPVRVFRTFPPDREALVAWLLACHIATLAMESTGVYGVPIYAVLEQQGIVPYLVNGRHVKTVPGRKRAWNDAQWLHRLHALGLLAAAFRPDAEIAALRTLVRYRAELIQHRAPHIVHLQKALQQLNVQRERVRSDIMGSTGQVIIRAIVAGERDPIVLAQHRNPACKSSTDTIATALTGTWKDELIFVLIQALVIYAVYTAQIAVCDGELEQSLQRMEARSGEPAAPLPDLRPAKPDSHSKTAPRFNARAHYARLLGVDLVAVMGLSSSSVPTIISAIGTDRSRFPTVKHFGAWLGLAPRNDISGGKVLRSRTRKVANRASQAFRQAAQAVARSDSAIGAYYRSMRARKGPEPAPVATAHKIARIVYHLLKYGEAYEAESAAAYEQQREERELRVLARRAAKLGYTRTAVQEPSPDPIP

SEQ ID NO: 255087 - protein, 314 aa, unidentified
MAQLRFVGIDVSKDTLDVFLRPSGDHQVFDNDDQGCAKLARFLHRRNRRPELVVLEPTSRYHLPIAKALAAKSIPVAVVNPRHVHAFGQATGELARTDKIAAELLAQYAEVLRPEPRPLPDDDAQAYRDLVARRRQVVASITAERNRRRVAGVAAPYVQASIDSLVAQRKALDAELARRTRDCPARKETDRILQSTKGVGPVTSHTFIGDLPELGQLSRGRIAALVGVAPLNHDSGTLRGTRHIWGGRAHVRAALYMAATVAVRHNPVIKAFFDRLIAAGKPFKVALTAAMRKLLVILNAMLRDGRPWQAMGTN

SEQ ID NO: 255088 - protein, 353 aa, unidentified
MLIIGCDFHPSFQQVAIFDNRTGEIEEKRLPHREEAEQFYRSLAGQQVRVGMEACGHYPWFERLLAELGFELWLGDAAAIRATVVRKQKTDRRDAEHLLTLMRENRFPRIWVPSLEERDVRQLLVHRHKQVQARTRVKNQLQAMALSQGVQKKRKLWTEAGRQELEKLELLPYAAERRKQLLQALDGLEAEIEQLNRRVEEEVQKRPAAVKLQTHPGVGPVTALAMVLTLGPAERFPSGKQVGSYFGLIPSEYSSGGQQKLGHISKQGSSFLRFLLVEAGQTAARYDAELGRFYRRLAVRKHRALAKVAVARKLAVRLYLMLREDWTYAQLCRAVVQASPSHPVVGRQSRTLE

SEQ ID NO: 255089 - protein, 485 aa, unidentified
MKRKSIFRNESQKLDAAFIEAGLPERVLLVPLDFAKVTHYACFCDGRGTYIRKAFTVKNNQEGIDYLVDQIERTRVARSIKSKRHVIIGGEDSASYTRNFMDRLFELGYLTVRLDSKEVHRQAESVDSSTDKTAVRAIAKTMLNRDARQVGGSDPYAQLRGLTRQRRRIVHLSTAVKNRIHTHADCLFPGFLSKDSAVAAFSMASLELMANKFSAATLARKSEKTLTRTLSRQGVRSAPEVAAKLKEQARNAICADDASVQLSSQLIESELRLFQTLQSSLSQLDRESARILLQLPEAFAVSIKGIGITLASSIFAETGSLSQIQRCDQINAYAGIAPRVKQTGGPESPARIGGKRRNFNRILKDYTLQAGNHLYLHGPEELLHDAARRKLAGKAVDTAMARRFLRIARALAKSHSIYLPSHLRTAQAGTDVEAQTRAQYIVKTWSDFLLKWKRLGLHEEAFAPETPLGDWRIIVQEIYEIDLPI

SEQ ID NO: 255090 - protein, 388 aa, unidentified
MFFLGIDIGKNTHVASLLDEKAKIIFKAYSFANTLDAAEALLVKLEPYKDSLEIGMEATGHYWLSLYSFLAEHKFIVHVLNPIQTDGWRKGIEIRKRKTDVIDSVLIADLIRYGNFLETSLADEDILSLRNLSRFRVYLVNSVSDLKRKAIAILDQIFPEYASVFSNVFGQTSKELLKSLSLPSDYENLSATKIEEVLSNITQKKKASKTISTLSDKASRSFGISFCKDSFAFQLKLIIEQICFIEEQIASVELEIDQLMSKLGTNIKTIPGVGSVIGAVILGEIGDIERFDNPSKLVAYAGLDASVSQSGEYEASSGKLSKRGSPYLRKALYMAAQRAEFCDPVFHAYYEKKRNEGKHHLVATNAVARKLCHTIYAILKKDVPYEVQ

SEQ ID NO: 255091 - protein, 369 aa, unidentified
MTSIIYVGMDVHTTNYTLCCYSIEENQIFAQVQVNPDYREILRYLNQVQSQRGGNCKFICGYEAGGLGYSLYHELTYHGIECIILAPSTMAVIPGKRIKTDARDAEHISKCLAYHTYSAVHIPSQEDDAVKEYIRMRDDAITTLKRIKQQTIAFCVRHGKQYDGRSYWTKRHLDWLESLKFDHPILQETFQEYLIQYYQASEKVDIYNIRIEELAQRETYREHVQKLVCFRGIAVHTALSLLVEVGDFHRFKTAQHFASYLGLVPGEHSSGGKQIHTGITKAGNTHLRRLLVESSQVFSRGVIGKKSVKLKAKQEGKPAEIIAYADKANERLRRKYTKIASHSKYNIAKTAVARELACFIWGMMTDNIA

SEQ ID NO: 255092 - protein, 361 aa, unidentified
MVFHNVRKHLKEEAMQFYTRQHKYYCGIDLHASSMYLCIIDSEGNVLLHKKIKTDPKAFLRAIAPYRDDLVVGVECVFMWYWVSDVCSDNDISFVLGHDLYMKAISGGKAKNDRIDSKKLAAMLRGGMFPLAYTYPRDMRSTRDLLRRRNYFMRHRAELLAHIQNTNTQYNLTPMLKKVAYKANRPGVAEKFSVPSVRKSIEADLLMTDHYDALLTDLELYITRNAKIHDAQAFHLLRSVPGIGKILALVILYEVHDITRFDRVQEFASYSRLVKCQHSSAGKIHGSGGRKIGNAHLKWAFSEAAVLFLRRNEKAQKYKARLEKKHGKGKALSIIAHRLGRAVYFILKRRRPFQMDKFFNN

SEQ ID NO: 255093 - protein, 423 aa, unidentified
MGKTIPICCGVDVHKKFLVATILTGDYLIPQCKQKHFGTSFRNLLTFKQWLLDNNCKDVCMESTGKYWVPVWNVLEEIGNVVIANPKWVSAVKGNKDDKKDSKWIGNLFRMGLVPSSYIPGKDIRILREFTRYRSKLVSMRSSEKNRYQNAFTVCNLTLDAVVSDMFGKSAMAIENYLLDTDVVDPEICVSFLQRSLKKKSAEIIEAVEGFNMTQEQKERVRIIQGHFADIDKRISQIDEIIGRLTAEHEGTISLLCTIPGIDRRLAITIISEIGTDMSEFGSSRRLCSWAGLVPGNNQSAGKKKSVKITRAGVYLKPALVEAAHAAVKATEKSPYFRIKYEKIMRRRGKKRAIIAIARMILTSIYAMVSTGEVFTPSDLLKYDMPEDLQKKRTLAEAKDAVKLLVSLGLVAEGSISLEALAS

SEQ ID NO: 255094 - protein, 355 aa, unidentified
MNHNTTYAVDLAKSVFEIAVSNHPGHVCERHRLSRERFLTFFAQQKPGTVLLEACGSAHHWARSLSSIGHDVVLLPPHRVRPYVTGNKTDSADAKALLEAARNQDIRPVPVKSIDQQSLTALHRLRSAWISVRTARINTVRGLLRELGVFIPLGAKRVRPTLAELLEDPDSAIPHAIRPALADAADEIGDLERRLANLETQLNALGKAIPDVQLLQTIPGIGLITATALVAFVGNVQRFPSGRHFASYLGLTPREHSSGLTRRLGAISKRGDTYIRMLLVHGARSVLWSAKGKTNPHPIQLWALEVERARGHNKAAVALANKLARIIWAVWKNQRPYERRSTSPVPPDTTPTTDC

SEQ ID NO: 255095 - protein, 416 aa, unidentified
MNAVGIDVSSRKSTVAVLRPLGEVVCLPFDVTHDIVGLASLAEKLKALDGETRVVMEHTGRYYEAVEKALHEAGLFVCAVNPLLIKEYGANSLRRVKTDKADAVKIARYALDNWADLRDFTPMDAIRYDLKTLNRQFQLASKQRTASANNLIALLEQSFPGIRKCFDSPVRSDGTQKWVDFAHSFWHVDCVRKQPFAAFCERYRKWCKRHAYLFKLSNAEEVYALAKRAVVLTPKSKVVKVLVQEAANQLISISRSVEVYRAEMDRLAAMLPEYPVVMAMYGVGKSYGPQLMAEIGDVRRFERKQALVAFAGIDPMPNQSGDKNVRSNKSSKRGSPYLRKTLFNVIRTYLQCAPQDEPVFQFLNRKRAEGKPFYVYMLAAANKFLRRYYAKLRDYFASLDTLQPVAPIPTILKATL

SEQ ID NO: 255096 - protein, 346 aa, unidentified
MTDFSADTKKIYRIGIDIAKNVFQIHGVDKNDKCILRKKISRRSMIEFFSNLPPCIIGMEACGGSHFWARKLTSMGHTVRLIAAKFVKPYVKNNKNDARDAEAICEAISRPGMNFVPVKNVEQHDLQSLHRIRELTKKNRTALVNQIRGLLMEYGIVINRGVSHARKNIPVILEDADNELTATARDMIGELHRDLLSLDLKLNTYDQRISAIAKSSETCKRLMAIDGVGELTATALLAAVGNAHQFKNGRALAAWIGLVPRQHSSGGKTRLSGISKHGNSYLRTLLVHGGRAVIQNCDKKDDSTSKWLSSIKKRTGTNCACVARANKVARVAWVILAKGETYRKAA

SEQ ID NO: 255097 - protein, 332 aa, unidentified
MLAIDLAKGSFQVCAVAADGAVLYNRVMSRTRLAALLAEQPACVVAMEACATSHHWGRMAQSHGHEVRLVPAVYVKPFVKRQKNDRADAEAIAEAALRPTMRFVAVKSADTQGRAVAFRTHQCLVRQRTQLINALRGHLAEFGLVAPKGPASLKVLENALADPASDVPGPVREMGAIYVEQIARLTEVIGRLAEELEAASRTDTQLRRLCTIPRIGPVTAGAVAAFAPDLDTFDSGRNFAAWLGLVPRQRSTGGKTRLGSVSKMGQTDIRRLLIVGAMSVIRWVVRKGGSANRWLAALVMRKPKMVAAVALANKMARMIWALTTKEQDYRMA

SEQ ID NO: 255098 - protein, 316 aa, unidentified
MKEMAEKGLVVGIDVAKGWLDVAVLETGESFRVDNDSAGWALLLQRLRGRRVRAVGLEPSGGYERGAKQALRKAGLPVRNVNPHKLRHFARALGRLAKNDRLDAVVIARYTADMPTREMRVDPLREQLAELVSARRQLTEDKVSLSNQLDQLRDAMVRRLFARRLRSIEANILLIDKRLAELVASDVQLAEKDRLIQSFKGAGPVLSHTLLALAPELGQASRREIAALAGLAPYDHDTGVFRGRRSIWGGRSEVRGMLYMVALTACRCNPVLKAFHQRLCDAGKKPKVALIAVARKILTILSAMLRSNQPWNPAHS

SEQ ID NO: 255099 - protein, 346 aa, unidentified
MEQYVGLDVSLKMTAICIVDRTGKIEREGMVASNPEAIAAFIRLHAPHVARIGLETGATSTWLWTELNKMGLPVICIDARHAKAALKMQINKSDRNDAVGIARIMQCGWYKEVRVKGLDSHAIKAVLVSRALLVKIKRDLENQIRGLLKNLGLVIGRAKMNVFVVRAAELTEARPELAAAVEPLLKAREAVEQQIADLDRKVMRLARNDAQVRRFMTAPGIGPITGLCYLATIDDPTRFKRSRSVGAYVGLTSRRYASGEVDWTGRISKCGDAMLRSYLYEAAGVLLTRVEKWSVLKAWGMRVAKRSGLRKAKVAVARKLAVILHRMWVEGTEFKWSSKEDVTQPA

SEQ ID NO: 255100 - protein, 420 aa, unidentified
MRNAGIHANSLLEVRRMYNAVGIDVSKGKSTVAVLQPGGTVIRKPFDVSHTSQNLNELADYLSSLDGTTKIVMECTGRYHEPMIKALSEAGLFISIVNPHLIKNFGNNSLRKVKSDPADARKIARYTLDNWTELRQYSGMDNTRTQLKTLNSQFSFFMKQKVAAKANLIALLDNTYPDVNKLFDSPTREDGSEKWVDYAYSFWHADCVRKIGLKAFTERYMSFCKKHHYIFQQDKPEKLFNASKELVAVFPKEKTYKLLIQQSIQQLNLASEHVERLRREMNELASTLPEYSTVMGIYGVGKTYGPQLIAEIGDVSRFTHREALTAFAGVDPGVDESGQHKSKSNRASKVGSARLRKTLFQIMTTLLQNAPEADPVYRFLDKKRSQGKPYYVYMTAGANKFLRIYYGKVKECLRNLEQTE

SEQ ID NO: 255101 - protein, 406 aa, unidentified
MKDRDRKAPVAGIDWASKTHAVCVLDAAGGIRARFEVPNTGKSFSGLVRRLTKLQVAGVAIERCDGPLVEALLDAGLRVVVITPRQVKGLRSRYSASGAKSDTSDAYLLADVLRTDGHRLRALTQDSDATRVLRALSRSRKQLVEARVGLVNQLRAELERVFPGAIGLFARLDSDVAIAFLRRYPTQQAATRLTEARFAAFLRRISYCGRKPVAELYTRIREAPAAGLSPEEADGRAACVLALLRAVDAVRSEERELEAEIIERLDAHADAAIFTSLPRAGHGVRAAALLAEIGDDRARFPDEEALAALAGVAPVTKASGKLHHVGFRWAADKKLRDALINFADDSRHASPWAAKIYADAIARGKRHPHAVRILARAWIRVIWRCWQDRAPYTPQLHGGAMKLAAA

SEQ ID NO: 255102 - protein, 342 aa, unidentified
MQIATIGLDIAKNVFQVHGIDAAEKVVVRKQLRRRQVLEFFKGLAPCLVGMEACATAHYWARELMKLGHLVRLMPAKDVKAYVKRNKNDAADAEAICEAVRRPTVRFVQIKSAEQQGRLMLHRARDLLMRQRTQVINALRAHLAEFGIVAPQGRQGVKELLLIIANGEDERLPVDAHASLVVLAAEFTAMQTMIGSIEKRIMAQHRSNEASKRLETIPGIGVAGATAIVATVPDPTVFRSGRDFAAWIGIVPREDSTGGKRRLGPISKRGDRYLRRILVVGAVAVLRYARQNPEKYPWLTRLLARKPFKVVAVALANKMARTAWALLAKGGTYRTPALVAAA

SEQ ID NO: 255103 - protein, 422 aa, unidentified
MEEITEEAAELVARVAALDIGKASLVACVRVPHETSAGRRRQEVRTFATTTRSLLELQDWLVCQGVSLCVMEATSTYWKPPFYLLEDVTQCWVVNARDVKNVPGRPKTDRLDAVWLAKLAERGMLRASFVPPPWQRQLRDLCRYRRTLIQERTREKQRVEKLLEDTQIKLSVVISDIFGKSGRDMLEALIAGQRDPHVLARMARGTMRKKISVLQEALTGHFRDHHGYLLRMMLDRVDGLTAQIEALTGRIEEVIAPFARQVAQLDEITGVGPTGAQELIAEIGLDMTRFPTAGHLVSWAKYAPKARQSAGRSKPGTTGKGNPWLGATLGEAAISAARTKTFLGSRYHRLARRRGKQRALVAVGNSILTIAWHLLSNPDAHFTDLGPDWHDRLAPQRRKRQLIAELERLSGKKVLLQQETAA

SEQ ID NO: 255104 - protein, 425 aa, unidentified
MPFAALDLHKKIVEAVVLDDTGRVLHRDHFSTTREALTDFARNLPSNTHIAIEATTNTWAVVRLLQPFVAEVVVSNPLRTRAIAEAKIKTDKVDALVLANLLRADFLPRVWIPDQATIALRHQSTERANLVADRTRIKNRIHSVLHQRLIPAPHDDLFSPRSLAWLSQLDIDPLGRQALDRQLRQLGHIEEEIFDLSGTLAQQAHDDPRVKLLMTLPGVDFPVAQTLLAVLGDISRFPSADKAAAYLGLVPSTRQSAAHCYHGPITKQGSGHARWMLVQGAQALAFHPGPLGVFFRKLAKKKNRNVAVVATARKLVTIAWHMLKNNEPYRYAQPATLKAKFDRLRIRATGKRKPSGNPKGAPRPAGYGSGVRTRAVPSVDEVMQEAGLPPLPPLSAGEQKMIGERGAAAFASSLHQAKRVPRRSK

SEQ ID NO: 255105 - protein, 454 aa, unidentified
MGKLKQSSSMPIIHRNAAGIDIGSKFHVVAVSPEITDEPVKTFKSFTGELHAMAKWLKECHIETIAMESTGVYWIPAFEILESYGFEVYLVNAREVKTVPGRKTDVNDSQWVQQLHQFGLLHASFQPSKENAELRAYLRQREKLLDYKAAHIQHMQKALMQMNIQLHHVVADVNGKTGMEIIRAIVQGQHAPDELVKLRDNRCKNSVEVMKAALTGNYKAEHLFSLTQALELIDIYMEKIEACDRVIESTLERLHQLADSMHTTPPKPKGRDKSKNAPSFDVRQSLFNMIGTDLTQIDGIGSSIALKLVAECGTDMTKWPTSKHFTSWLCLAPCNKISGGKVLSSKTRRSSSRAATYLRLAAVVVGKTNTALGAFYRRLAWRTGKAKAVTATARKLATLFYNALRYGMEYVDKGANYYKEQYRKKIIGGLRRQAESLGYTLQEKVPALAETEVS
